(19) United States
(12) Patent Application Publication
(10) Pub. No.: US 2013/0034624 A1
(43) Pub. Date: Feb. 7, 2013

(54) ANIMAL MANAGEMENT

(71) Applicants: Milton Alejandro Gorocica Buenfil, Queretaro (MX); Duane Theuninck, Canyon, TX (US); Todd Raymond Allen, Newton, KS (US); Larry Langford, Wichita, KS (US); Sue K. Denise, Davis, CA (US); David Rosenfeld, San Jose, CA (US); Tom Holm, Salt Lake City, UT (US); Dennis Fantin, Danville, CA (US)

(72) Inventors: Milton Alejandro Gorocica Buenfil, Queretaro (MX); Duane Theuninck, Canyon, TX (US); Todd Raymond Allen, Newton, KS (US); Larry Langford, Wichita, KS (US); Sue K. Denise, Davis, CA (US); David Rosenfeld, San Jose, CA (US); Tom Holm, Salt Lake City, UT (US); Dennis Fantin, Danville, CA (US)

(73) Assignees: CARGILL, INCORPORATED, Wayzata, MN (US); METAMORPHIX, INC., Calverton, MD (US)

(21) Appl. No.: 12/812,491

(22) PCT Filed: Jan. 7, 2009
(86) PCT No.: PCT/US09/30353

§ 371 Date: Mar. 3, 2011

Related U.S. Application Data
(60) Provisional application No. 61/020,249, filed on Jan. 10, 2008.

(51) Int. Cl. C12Q 1/68; A23K 1/18; C40B 30/04

(52) U.S. Cl. 426/2; 435/6.11; 506/9

(57) ABSTRACT

Methods for managing animals can involve identifying a trait by analyzing a biological sample and determining a physical characteristic of a bovine subject using imaging. A method can include obtaining a targeted trait genetic value and determining a targeted trait value for a bovine subject using imaging. A method can include obtaining genetic information determined by identifying, in a biological sample from the first bovine subject, at least one single nucleotide polymorphism (SNP). An animal can be managed based on information that has been identified and/or obtained.

### CLAIM OF PRIORITY AND CROSS-REFERENCE TO RELATED APPLICATIONS

[0001] This application claims priority to U.S. provisional patent application 61/020,249 which was filed on Jan. 10, 2008 and is incorporated by reference in its entirety.

### FIELD OF THE INVENTION

[0002] The present invention relates to methods and systems for managing animals. More specifically the present invention relates to methods and systems for managing animals by evaluating genetic information and physical characteristic information of the animals.

### REFERENCE TO ELECTRONIC DOCUMENTS CO-FILED WITH APPLICATION

[0003] The following electronic files are being filed concurrently herewith:

mmi0201_Table1A.txt: size 9 Mb, created Sep. 10, 2004
mmi0201_Table1B.txt; size 12 Mb, created Sep. 10, 2004
mmi0201_SequenceListing.txt; size 94 Mb, created Jan. 7, 2009

[0004] Pursuant to Section 801 of the PCT Instructions Relating to International Applications Containing Large Nucleotide and/or Amino Acid Sequence Listings and/or Tables Relating Thereto, the sequence listing is being filed solely on electronic medium in computer readable form referred to in Section 802. The electronic files in computer readable form are herein incorporated by reference in their entirety.

### BACKGROUND OF THE INVENTION

[0005] Under the current standards established by the United States Department of Agriculture (USDA), beef from bulls, steers, and heifers is classified into eight different quality grades. Beginning with the highest and continuing to the lowest, the eight quality grades are prime, choice, select, standard, commercial, utility, cutter and canner. The characteristics which are used to classify beef include age, color, texture, firmness, and marbling, a term which is used to describe the relative amount of intramuscular fat of the beef. Well-marbled beef from bulls, steers, and heifers, i.e., beef that contains substantial amounts of intramuscular fat relative to muscle, tends to be classified as prime or choice; whereas, beef that is not marbled tends to be classified as select. Beef of a higher quality grade is typically sold at higher prices than a lower grade beef. For example, beef that is classified as “prime” or “choice,” typically, is sold at higher prices than beef that is classified into the lower quality grades.

[0006] It is known for a cattle processor to pay cattle producers more money for cattle that are expected to provide desirable carcasses. One criterion of a desirable carcass is carcass weight. Another criterion for desirable carcasses is “red meat yield,” or the proportion of saleable beef resulting from a carcass. Red meat yield is negatively correlated to carcass fatness and highly related to a USDA measure known as “yield grade.” Yield grade is measured on a scale from 1 to 5, with 5 being most fat. As cattle get fatter, yield grade value goes up and red meat yield goes down. In most market conditions, yield grade 4 and 5 carcasses are subjected to substantial discounts. Another criterion for desirable carcasses is degree of intramuscular fat, commonly referred to as “marbling.” Marbling is highly related to USDA quality grade. The typical target for marbling is a level associated with USDA Choice. Higher levels of marbling can bring price premiums while lower levels often cause significant price discounts. In general, marbling increases with overall carcass fatness.

[0007] Cattle typically arrive at feedlots in heterogeneous groups. It is common for weight of cattle within a pen to vary by 200 lbs or more. During the course of the feeding period, this weight spread tends to increase due to variation in growth rate of individual animals within the pen. There is similar variation in fatness of cattle and carcasses derived from those cattle. It is known and most common within the cattle feeding industry to harvest an entire pen of cattle at the same time. However, this known method of harvesting results in wide variation in resulting carcass weights (and red meat yield, yield grade and marbling) of cattle from the pen.

[0008] It is also known to provide a system to calculate an optimum or target condition for an individual cattle and select the individual cattle for shipment based on such calculation. Such known systems typically include the use of ultrasound to determine a characteristic of the cattle (or carcass).

[0009] Existing systems typically use the “Cornell Method” for allocating feed to individual animals. The Cornell Method is shown by Fox et al., 1992 Journal of Animal Science 70:3578 and “Application of Ultrasound for Feeding and Finishing Animals: A Review” by P. L. Houghton and L. M. Turlington (Kansas State University, Manhattan 66506). However, this system has several disadvantages including that an optimum or target condition is calculated for an individual cattle and a sorting decision is made for an individual animal based on the calculation.

[0010] What is therefore needed are methods and systems to manage animals that integrate more information about each animal to contribute to the categorization and decision making process for populations of animals.

### SUMMARY OF THE INVENTION

[0011] The invention relates to methods and systems for managing animals.

[0012] In a first aspect, a method for managing animals includes obtaining information that predicts a trait for a first bovine subject of the bovine subjects, at a facility configured for managing bovine subjects. The trait is inferred by analyzing a biological sample of the first bovine subject. The method includes measuring a physiological condition or age of the first bovine subject using internal imaging. The method includes calculating a quantitative score based on at least the genetic information and the determined physical characteristic to predict the trait, and managing the first bovine subject at the facility based on the quantitative score. The method includes managing the first bovine subject at the facility based on at least the predicted trait based on the quantitative score.

[0013] Implementations can optionally include the following features. The method can further include obtaining, at the facility, the biological sample from the first bovine subject; and forwarding the biological sample to a laboratory to perform the analysis of the biological sample, wherein the information is obtained at the facility from the laboratory. The information can be received electronically at the facility from the laboratory. Managing the first bovine subject can include performing an operation selected from the group consisting of: selecting the first bovine subject for harvest, selecting the first bovine subject for being relocated, selecting the first bovine subject for receiving treatment, selecting the first bovine subject for being measured, grouping the first bovine subject with at least another of the bovine subjects, and combinations thereof. The identified trait can be at least one characteristic selected from the group consisting of: an average daily weight gain for the first bovine subject, a red meat yield of the first bovine subject, a tenderness of the first bovine subject, an endpoint characteristic of the first bovine subject, a ribeye area of the first bovine subject, and a marbling of the first bovine subject. The identified trait that is taken into account in managing the first bovine subject can include at least the marbling of the first bovine subject, and the method can further include making an implant decision regarding the first bovine subject based on at least the average daily weight gain for the first bovine subject and the marbling of the first bovine subject. The analysis of the biological sample can include identifying a nucleotide occurrence of at least one single nucleotide polymorphism (SNP) corresponding to a position that is about 500,000 or less nucleotides from position 300 of at least one of SEQ ID NOS:19473 to 21982, wherein the SNP is associated with the trait. The analysis of the biological sample can include identifying a nucleotide occurrence of a panel of SNPs. The analysis of the biological sample can further include contacting a bovine polynucleotide in the biological sample with an oligonucleotide that binds to a target region of any one of SEQ ID NOS:24493 to 64886, wherein the target region comprises a position corresponding to position 300 of any one of SEQ ID NOS:19473 to 21982 or wherein the target region is within 3000 nucleotides of a nucleotide corresponding to position 300 of any one of SEQ ID NOS:19473 to 21982. The determined physical characteristic can be at least one characteristic selected from the group consisting of: a marbling of the first bovine subject, a backfat measurement of the first bovine subject, a muscle depth measurement of the first bovine subject, and combinations thereof. The facility can include an animal management location at which the bovine subjects are to be kept for a yet undetermined time period before being removed therefrom at a shipping date, and the method can further include receiving the bovine subjects including the first bovine subject at the animal management location, the bovine subjects being organized in several arrival groups; and generating a future backfat estimate for the first bovine subject; wherein managing the first bovine subject comprises sorting, based on at least the future backfat estimate and the identified trait, the first bovine subject into one of several predetermined sort groups for separate management at the animal management location, the predetermined sort groups being different from the arrival groups and associated with different predefined shipping dates. The facility can be a feedlot where the bovine subjects including the first bovine subject are managed.

[0014] In a second aspect, a method for managing animals includes obtaining a targeted trait genetic value for a first bovine subject based on analysis of a biological sample of the first bovine subject. The method further includes determining a targeted trait value for the first bovine subject using imaging. The method further includes sorting the first bovine subject into one of multiple predefined groups based on at least the obtained targeted trait genetic value and the determined targeted trait value.

[0015] Embodiments can optionally include the following features. The targeted trait genetic value can include a marbling genetic value, and the method can further include determining a marbling score using the obtained targeted trait genetic value, the determined targeted trait value, an implant dose value for the first bovine subject and a target backfat value for the first bovine subject, wherein the sorting is done based on the marbling score. The method can further include selecting one of multiple time categories for the first bovine subject, the categories including at least an early time category, a normal time category, and an extended time category; and determining the marbling score more than once for the first bovine subject while varying at least one of the implant dose value and the target backfat value, the variation being defined in a schedule associated with the selected time category. The method can further include selecting an actual implant dose for the first bovine subject based at least on: (i) the targeted trait genetic value; and (ii) a genetic value relating to an average daily weight gain for the first bovine subject, the genetic value based on analysis of a biological sample of the first bovine subject. The analysis of the biological sample can include identifying a nucleotide occurrence of at least one single nucleotide polymorphism (SNP) corresponding to position 300 of at least one of SEQ ID NOS:19473 to 21982, wherein the SNP is associated with a marbling trait of the first bovine subject.

[0016] In a third aspect, a method for managing animals includes obtaining genetic information regarding a first bovine subject, the genetic information determined by identifying, in a biological sample from the first bovine subject, at least one single nucleotide polymorphism (SNP). The method includes generating a physical attribute estimate for the first bovine subject using at least one physical measurement of the first bovine subject and an equation configured to make estimations for a single animal. The method includes managing the first bovine subject based on the genetic information and the physical attribute estimate.

[0017] Embodiments can include any, all or none of the following features. Managing can include sorting the first bovine subject into one of several predetermined sort groups for separate management at an animal management location, wherein the predetermined sort groups are different from arrival groups and are associated with different predefined shipping dates. The at least one SNP can correspond to a position that is about 500,000 or less nucleotides from position 300 of at least one of SEQ ID NOS:19473 to 21982. The genetic information can further be determined by contacting a bovine polynucleotide in the biological sample with an oligonucleotide that binds to a target region of any one of SEQ ID NOS:24493 to 64886, wherein the target region comprises a position corresponding to position 300 of any one of SEQ ID NOS:19473 to 21982 or wherein the target region is within 3000 nucleotides of a nucleotide corresponding to position 300 of any one of SEQ ID NOS:19473 to 21982. The physical measurement can be an imaging measurement of the first bovine subject. The method can further include estimating an empty body fat measure for the first bovine subject using the imaging measurement; determining a feed allocation using a predefined algorithm taking into account the estimated empty body fat measure; and administering feed according to the determined feed allocation. The physical attribute estimate can include a future weight estimate based at least in part on an estimated daily-gain-to-finish measure for the first bovine subject, the estimated daily-gain-to-finish measure also being directly used in managing the first bovine subject; and wherein the managing is also based on an estimated days-to-critical-weight measure for the first bovine subject, the days-to-critical-weight measure being estimated using at least an estimated daily-gain-to-finish measure for the first bovine subject and a predefined critical weight for animals.

[0018] Embodiments can provide any, all, or none of the following advantages. Improved animal management can be provided. A genetic trait and a body characteristic of a bovine subject can be taken into account to provide more efficient animal management. More cost-efficient sorting procedures, for example at animal feedlots, can be provided. The economic process of deriving profit from a bovine subject can be streamlined and made more effective. Measures taken in animal management can be better adapted to individual bovine subjects by taking into account one or more genetic factors.

[0019] In a fourth aspect, a method for predicting a trait in an animal subject includes analyzing genetic information in a biological sample of the animal subject; and determining a physical characteristic of the animal subject using imaging; and calculating a quantitative score based on at least the genetic information and the determined physical characteristic to predict the trait.

[0020] In a fifth aspect, a system for use in managing animals includes a management component, a measurement component and a genetic component.

[0021] The details of one or more embodiments are set forth in the accompanying drawings and the description below. Other features and advantages will be apparent from the description and drawings, and from the claims.

### DESCRIPTION OF DRAWINGS

[0022] FIG. 1 schematically shows an example of an animal management system.

[0023] FIG. 2 schematically shows exemplary measurement components of an animal management system.

[0024] FIG. 3 shows an exemplary top-view of making an ultrasound measurement using the animal management system of FIG. 1.

[0025] FIG. 4 schematically shows exemplary management components of an animal management system.

[0026] FIG. 5 schematically shows an exemplary genetics component of an animal management system.

[0027] Like reference symbols in the various drawings indicate like elements.

### DETAILED DESCRIPTION

[0028] This application relates to the following applications:

[0029] Ser. No. 10/750,185, filed Dec. 31, 2003 and entitled “Compositions for inferring bovine traits”;

[0030] Ser. No. 10/750,622, filed Dec. 31, 2003 and entitled “Compositions, methods and systems for inferring bovine breed”;

[0031] Ser. No. 10/750,623, filed Dec. 31, 2003 and entitled “Methods and systems for inferring bovine traits”;

[0032] Ser. No. 60/437,482, filed Dec. 31, 2002 and entitled “Methods and systems for inferring genetic traits to manage bovine livestock”, to which each of the previously mentioned applications claims priority;

[0033] Ser. No. 60/631,469, filed Nov. 29, 2004 and entitled “Animal Management System”; and

[0034] International Application Number PCT/US2005/043069, filed Nov. 29, 2005 and entitled “Animal management system”.

[0035] The entire contents of each of the above applications is hereby incorporated by reference.

[0036] The specification hereby incorporates by reference in their entirety, the electronic documents filed herewith. The electronic files are titled “MMI0201WP Table 1A.doc” which is 11 Mb in size, and a file called “MMI0201WP Table 1B.doc” which is 11 Mb in size, both created Jan. 6, 2009 and a file called “14972-105021 MMI-0201lfr_ST25.txt” which is 94 Mb in size created on Jan. 7, 2009.

[0037] Systems and methods are described for use in managing animals using genetic information, and information about the physical characteristics of animals. These systems and methods are used to obtain information regarding a trait of an animal and then used to sort and manage animals effectively. “Animal,” “animals” or “livestock” generally refer to any number of domesticated and/or wild animals such as swine, cattle, horses, bison, goats, sheep, deer, elk, alpaca, llama, poultry animals, fish, etc. As used herein, the term “trait” refers to a measured or observed characteristic of an animal at a particular age or condition in an animal's life cycle. The trait may also be predicted for a particular timepoint or outcome such as time of harvest.

[0038] In one embodiment, animals at a feedlot are sorted based on genetic information or physical characteristics that are imaged using imaging methods. In one embodiment, management decisions are made to keep, breed, cultivate or cull an animal. Animals that are cultivated are optionally provided additional factors to optimize growth and development of the animal. Such factors may be, but are not limited to, alternate feed, presence of feed additives, presence of implants, variations in dose of implanted molecule or compound, or combinations thereof. Information provided to feedlot operators can be used to change the subsequent treatment of individual animals at the feedlot, such as to increase or decrease feed, or to administer certain materials, such as growth factors.

[0039] FIG. 1 shows a high-level representation of an exemplary system 10 for managing animals at a facility, for example at a feedlot. The system 10 includes a measurement component 100 and a management component 200 that can be in communication with each other and/or in communication with a genetics component 300. In one embodiment, the genetics component 300 and the measurement component 100 provide information to the management component 200 for use in decision making for animal management.

[0040] The measurement component 100 includes, for example, measurement equipment for performing physical characteristic measurements on a given animal. Measurements may include external physical characteristics such as length, weight and the like. As used herein, the term physical characteristic means an objective measurement of a physiological condition at the time of measurement. Measurement may also include internal physical characteristics such as, but not limited to, backfat thickness, muscle tissue depth, amount of marbling, ribeye area, follicular development, bone development, and tenderness that may be imaged using conventional internal imaging methods. Conventional imaging techniques include, but are not limited to two dimensional (2D) imaging, three dimensional (3D) imaging, computed tomography (CT), magnetic resonance imaging (MRI), x-ray or radiation, positron emission tomography (PET), single photon emission computerized tomography (SPECT), computerized tomosynthesis (CT), ultrasound (US), angiographic, fluoroscopic, visual light photography, infrared photography, and the like or combination thereof. Of these techniques, ultrasonography is the least expensive and is particularly well suited to use on large animals raised for commercial food production. In one embodiment, the values from imaging are used in combination with the genetics component to manage animals.

[0041] Ultrasound imaging involves the direct introduction of high frequency sound waves from a transducer into the tissue to be evaluated. The echo resulting from these sound waves can be recorded as an image that provides valuable information about the internal characteristics of the tissue. The time delay between transmitting the sound waves and recording the echo can be used to indicate the depth of the tissue being imaged. The intensity of the echo can be used to distinguish between different types of tissue, because different materials have different levels of acoustical impedance. In this way, internal structures can be visualized, including overall organs and structures on or within organs, such as lesions.

[0042] In specific embodiments, one or more characteristics such as backfat thickness, muscle tissue depth, follicular development or an amount of marbling can be determined using a handheld ultrasound probe. In another embodiment, near infrared reflectance may be used to measure tenderness of a bovine subject. In still another embodiment, x-ray may be used to measure bone development of a bovine subject.

[0043] The data obtained by ultrasound tissue imaging and analysis at a packing plant is itself indicative of meat quality and/or yield, such as the backfat measurements, or can be used to make other calculations, such as yield grade. Yield grade is a scale from 1 to 5, with 1 being the most lean and 5 the least lean.

[0044] Typically, cattle backfat thickness varies from about 0.1 inch to about 1.0 inch thick. Rib eye area typically varies from about 9 square inches to about 15 square inches. Yield grade is determined by considering at least rib eye area and backfat. First though, solely with respect to backfat, backfat measuring greater than about 0.7 inch thick generally results in a yield grade of 4 or better. Average cattle have a backfat thickness ranging from about 0.4 inch to about 0.7 inch, and such backfat generally results in a yield grade of 3. Less backfat results in a yield grade of 1-2.

[0045] Yield grade also considers rib eye area. The USDA yield grade is determined by considering backfat thickness, rib eye area, hot carcass weight (which is determined by weighing both halves of a carcass about 15 minutes after initial processing) and pelvic, kidney and heart fat (PKH) values. Thus, for example, if a particular animal has a relatively small rib eye area and relatively thick backfat, then the animal likely will receive a yield grade of 4 or 5. And, if the animal has relatively large rib-eye area and relatively little backfat, then the animal likely would receive a yield grade of 1-2.

[0046] Marbling also can be determined using ultrasound tissue imaging and analysis of ruminants at packing plants. Marbling is determined by computer analysis of contrast differences in the ultrasound image. A quality grade is then assigned to the animal to reflect the marbling content. Marbling is specified as standard (which correlates with the least amount of marbling), select, choice and prime (prime correlates with the most amount of marbling).

[0047] The measurement component can also store such information measured from one or more live animals.

[0048] The genetics component 300 includes equipment for obtaining genetic information about a given animal, such as by taking a biological sample, causing it to be analyzed, and providing a result of the analysis. Thereafter, the genetics component can also store such information (e.g., information about a live animal's genome that can relate to physical traits, or phenotypes such as marbling, average daily weight gain, red meat yield, tenderness, fat thickness, and the like) determined from one or more live animals.

[0049] One or ordinary skill in the art will appreciate that in some embodiments the physical characteristic measured in the measurement component 100 may be the same as the trait that information is determined for by the genetics component 300. In other embodiments, the physical characteristic measured by the measurement component 100 is different than the trait information determined by the genetics component 300.

[0050] Biological samples can be harvested from a live animal or an animal carcass. Suitable biological samples include tissue or fluid suspected of containing a polynucleotide from an individual. Such biological samples include, but are not limited to whole blood, plasma, serum, spinal fluid, lymph fluid, the external sections of the skin, respiratory, intestinal, and genitourinary tracts, tears, saliva, blood cells, tumors, organs, milk, semen, tissue and samples of in vitro cell culture constituents. In some embodiments, a biological sample useful for inferring traits about an individual animal, such as a bovine subject, can come from a biological sample of that animal (e.g., that contains nucleic acid molecules, including portions of the gene sequences to be examined, or corresponding encoded polypeptides, depending on the particular method used to analyze the biological sample). A biological sample useful for practicing a method of the invention can be one containing deoxyribonucleic (DNA) acid or ribonucleic acids (RNA). The biological sample generally can contain a deoxyribonucleic acid sample, particularly genomic DNA or an amplification product thereof. However, where heteronuclear ribonucleic acid which includes unspliced mRNA precursor RNA molecules and non-coding regulatory molecules such as RNA is available, a cDNA or amplification product thereof can be used. In some embodiments, the biological sample 124 can be obtained from a live animal at, or near, the time of arrival through the use of a tool that substantially simultaneously collects a tissue sample from the animal while placing an identifying ear tag. In other embodiments, the biological sample can be obtained by, for example, collecting a whole blood sample.

[0051] In some embodiments, the biological sample can then be analyzed on the premises, or be sent out to a laboratory where a genotyping system can be used to analyze the sample. Exemplary genotype systems typically includes a hybridization medium and/or substrate that includes at least two oligonucleotides of the present invention, or oligonucleotides used in the methods of the present invention. For example, a solid support can be provided, to which a series of oligonucleotides can be directly or indirectly attached. In another aspect, a homogeneous assay is included in the system. In another aspect, a microfluidic device is included in the system. The hybridization medium or substrates are used to determine the nucleotide occurrence of single nucleotide polymorphism (SNP) markers that are associated with a trait.

[0052] Accordingly, the oligonucleotides are used to determine the nucleotide occurrence of bovine SNPs that are associated with a trait. The determination can be made by selecting oligonucleotides that bind at or near a genomic location of each SNP of the series of bovine SNPs. The system of the present invention typically includes a reagent handling mechanism that can be used to apply a reagent, typically a liquid, to the solid support. The binding of an oligonucleotide of the series of oligonucleotides to a polynucleotide isolated from a genome can be affected by the nucleotide occurrence of the SNP. The system can include a mechanism effective for moving a solid support and a detection mechanism. The detection method detects binding or tagging of the oligonucleotides.

[0053] Medium to high-throughput systems for analyzing SNPs, known in the art such as the SNPStream® UHT Genotyping System (Beckman/Coulter, Fullerton, Calif.) (Boyce-Jacino and Goelet Patents), the Mass Array™ system (Sequenom, San Diego, Calif.) (Storm, N. et al. (2002) Methods in Molecular Biology. 212: 241-262.), the BeadArray™ SNP genotyping system available from Illumina (San Diego, Calif.)(Oliphant, A., et al. (June 2002) (supplement to Biotechniques), and TaqMan™ (Applied Biosystems, Foster City, Calif.) can be used with the present invention. However, the present invention provides a medium to high-throughput system that is designed to detect nucleotide occurrences of bovine SNPs, or a series of bovine SNPs. Therefore, as indicated above the system includes a solid support or other method to which a series of oligonucleotides can be associated that are used to determine a nucleotide occurrence of a SNP for a series of bovine SNPs that are associated with a trait. The system can further include a detection mechanism for detecting binding of the series of oligonucleotides to the series of SNPs. Such detection mechanisms are known in the art.

[0054] These systems can be used, for example, to identify a nucleotide occurrence of a panel of SNPs corresponding to positions that are about 500,000 or less nucleotides from position 300 of at least one of SEQ ID NOS:19473 to 21982, where the SNP is associated with a trait such as marbling or average daily gain.

[0055] In one embodiment, the present invention provides an isolated polynucleotide that includes a fragment of at least 20 contiguous nucleotides of the bovine genome, or a complement thereof, where the isolated polynucleotide includes a nucleotide occurrence of a SNP associated with a trait, where the SNP is in disequilibrium with a SNP corresponding to position 300 of any one of SEQ ID NOS:19473 to 21982. In certain aspects, the polynucleotide is located about 500,000 or less nucleotides from position 300 of SEQ ID NOS:19473 to 21982 on the bovine genome. The linkage disequilibrium for cattle is about 500,000 nucleotides. Therefore, it is expected that other SNPs can be identified that are associated with the same traits based on the fact that these other SNPs are located less than or equal to about 500,000 nucleotides of the identified associated SNP on the bovine genome. In certain aspects, the polynucleotide is from an Angus, Charolais, Limousin, Hereford, Brahman, Simmental or Gelbvieh bovine subject.

[0056] In certain aspects, the isolated polynucleotide includes a fragment of at least 5, 10, 15, 20, 25, 30, 35, 40, 45, 50, 100, 200, 250, 500, 1000, 5000, 10,000, 25,000, 50,000, 100,000, 125,000, 250,000 or 500,000 nucleotides in length. Furthermore, in certain examples, the isolated polynucleotide includes a fragment of at least 5, 10, 15, 20, 25, 30, 35, 40, 45, 50, 100, 200, 250, 500, 1000, 5000, or 9549 contiguous nucleotides of any one of SEQ ID NOS:24493 to 64886. In another aspect, the isolated polynucleotide is at least 65, 70, 75, 80, 85, 90, 95, 96, 97, 98, 99, or 99.5% identical to the recited sequences, for example. In another aspect, the isolated nucleotide includes region that is contiguous with a region of any one of SEQ ID NOS:19473 to 21982 that includes position 300. In certain aspects, the isolated polynucleotide consists of any one of SEQ ID NOS:19473 to 21982. In other aspects, the isolated polynucleotide consists of any one of SEQ ID NOS:21983 to 24492. In certain aspects, isolated polynucleotides include an associated SNP or are complementary to a region of at least 20 contiguous nucleotides that includes an associated SNP. Accordingly, in these aspects the isolated polynucleotide includes a nucleotide at position 300 of any one of SEQ ID NOS:19473 to 21982.

[0057] The analysis of the biological sample can also include contacting a bovine polynucleotide in the biological sample with an oligonucleotide that binds to a target region of any one of SEQ ID NOS:24493 to 64886, wherein the target region comprises a position at position 300 of any one of SEQ ID NOS:19473 to 21982 or wherein the target region is within 3000 nucleotides of a nucleotide at position 300 of any one of SEQ ID NOS:19473 to 21982. The attached sequence listing provides sequences of contigs (SEQ ID NOS:24493 to 64886) generated from the bovine genome. It will be understood that contigs can be aligned such that SNPs that are on separate contigs, but are located within 500,000 nucleotides on the bovine genome, can be identified. For example, alignment of contigs and determination of distance between contigs provided herein, can be accomplished by using the sequence information of the human genome as a scaffold. Tables 1A and 1B (filed herewith on the compact disc), lists contigs that are “nearby” (i.e. within 500,000 nucleotides on the bovine genome) an associated SNP. While two methods have been described here for using biological samples to infer traits, other methods can be used to identify certain genetic information that has been previously determined to correlate to traits.

[0058] Tables 1A and 1B, both of which are filed herewith on a compact disc, disclose the SNPs identified by the analysis, and provide the SNP names for the SNPs corresponding to position 300 of SEQ ID NOS:19473 to 21982. The sequences disclosed in SEQ ID NOS:SNP1 to SNP4000 are regions from which amplicons were generated. Table 1B also indicates the location of the amplicon-generating regions within a larger bovine genomic sequence contig (SEQ ID NOS:24493 to 64886) (See column 2 of Table 1B, labeled “In Sequence,” which lists a contig name (e.g., “19866880525139”) and positions (e.g. “923-1522”) within the contig of an amplicon which includes the SNP at position 300. A sequence identifier for the amplicon (SEQ ID NOS:19473-21982) is listed in Table 1A. Furthermore, Tables 1A and 1B identify the nucleotide occurrences that have been detected for each of these SNPs, and identifies traits that have been identified to be associated with these SNPs using methods disclosed herein. All of the SNPs listed in Tables 1A and 1B were associated with the respective trait(s) with a confidence level of 0.01, or higher confidence. Finally, Table 1A provides the sequence of an extension primer that was used to determine the nucleotide occurrence of the SNPs (SEQ ID NOS:21983 to 24492).

[0059] Each SNP in Tables 1A and 1B is characterized by the trait(s) found to be in association: marbling, tenderness, fat thickness, daily gain and retail yield. For each of the five traits, “High” refers to the direction of the specific allele contributing to the largest value of the trait. “Low” refers to the direction of the specific allele contributing to the smallest value of the trait. Because each SNP marker is represented by two copies of nucleotides, each animal can have two copies, one copy or no copies of the specified allele. For example, a SNP with two alleles: guanine (G) and cytosine (C) can produce three possible genotypes: GG, GC and CC. If animals with the GG genotype have significantly higher means than animals with the CC genotype, then the G SNP contributes “high” and the C SNP contributes “low”.

[0060] In certain aspects of the invention directed at methods for inferring traits such as the traits listed in Tables 1A and 1B, nucleotide occurrences are determined for one or more associated SNPs. Therefore, in one aspect, for example, the method is used to infer fat thickness, by determining a nucleotide occurrence of at least one SNP corresponding to the SNPs indicated in Tables 1A and 1B as associated with fat thickness. For this aspect, as a non-limiting example, a nucleotide occurrence of the SNP at position 300 of SEQ ID NO:19473 can be identified and compared to the nucleotide occurrences listed in Tables 1A and 1B 1 for SEQ ID NO:19473. A thymidine residue at position 300 of SEQ ID NO:19473 infers a higher likelihood that the bovine subject will produce meat that has high tenderness. In addition, as a non-limiting example, a nucleotide occurrence at position 300 of SEQ ID NO:19474 can be determined and used alone or in combination with the nucleotide occurrence at position 300 of SEQ ID NO:19473, to infer tenderness. For example, if position 300 of both SEQ ID NO:19473 and SEQ ID NO:19474 are thymidine residues, there is an even greater likelihood that the bovine subject will produce meat that has high tenderness, than for either nucleotide occurrence alone.

[0061] In some embodiments, the system 10 can perform a method for managing animals in which the genetics component 300 obtains a targeted trait genetic value (e.g., a marbling genetic value, a red meat yield genetic value, a tenderness genetic value, or an average daily gain, etc) for a first bovine subject based on analysis of a biological sample of the first bovine subject. Generally a panel of single nucleotide polymorphism (SNP) markers is used to calculate a targeted trait genetic value. In some embodiments, the panel of markers may include at least 2, 3, 4, 5, 7, 15, 20, 25, 50, 75, or 100 SNP markers.

[0062] Genetic information from genes, genotypes, alleles or DNA markers can be used independently or combined from a number of genes, genotypes, alleles or DNA markers into a single composite genetic value or score. In some embodiments, individual genotypic information from individual genes, alleles, genotypes or markers can be used in a regression analysis within or across breeds. Animals can then be ranked according to their regression scores or actual values assigned to animals based on their individual scores. In some embodiments, genes, alleles, genotypes or markers can be combined as in a molecular breeding value or molecular genetic value. The composite value is a prediction of the genetic potential based on their genetic data individual contribution to the physical characteristic of the animal. In other embodiments, genetic information from genes, genotypes, alleles or DNA markers can be combined with an animal's correlated physical characteristics and physical characteristics from related animals to predict total genetic merit. An example of this strategy would incorporate genes, genotypes, alleles or DNA markers into genetic prediction models that rely on phenotypes of related individuals, such as those that estimate expected progeny differences or predicted differences or estimated breeding values.

[0063] In one embodiment, a composite genetic information score from multiple genes, genotypes, alleles or DNA markers is a Molecular Genetic Value. A Molecular Genetic Value, or MGV, is a mathematical expression developed to help explain and use the genetic results from quantitative trait analysis. Examples of commercial products include Tru-Marbling™ and Tru-Tenderness™ tests (MMI Genomics, Davis, Calif.). Traits such as marbling, tenderness, growth and many others are classified as “quantitative” traits because their expression is controlled by a large number of genes rather than single genes. DNA-based diagnostic tests containing many genes and DNA markers have been developed and validated for certain traits. The MGV is a method for reporting the combined effects from a large set of DNA markers into a single expression that is easy to interpret and utilize for enhancing breeding and selection decisions.

[0064] In order to combine information from a number of DNA markers, the genetic effect of each genotype included in the MGV diagnostic test must be partitioned into additive and non-additive components. A research population of animals from which genotypes have been determined and individual trait phenotypes recorded is used to estimate these effects using mathematical models. In one embodiment, a Bayesian strategy can be employed using a Markov Chain Monte Carlo approach. This statistical algorithm partitions a phenotype into components described by Falconer (and universally accepted by quantitative geneticists) due to genetic (as defined by molecular markers), known environmental effects (like sex, feedlot, etc) and residual variation. This algorithm uses an iterative strategy to find the best fit of the genotypic data to the phenotypic data. The same hierarchy of models that were tested in the classical setting can be used, except that all SNPs can be now included in the one analysis. A suitable variable selection procedure can be included in the Bayesian regression set up in order to identify models with the highest posterior probability. This strategy is unique because it analyzes all markers in a single analysis.

[0065] Upon completion of the statistical analysis, estimates of the magnitude of the effect of all SNP markers in the diagnostic for all possible genotypes of a SNP in the research population are available. These data are used to create a table of values in the database that has marker genotype and contribution to the phenotype. For example, GG may have a value of 0.05, GC may have a value of 0.01 and CC may have a value of −0.05 at a specific SNP. Epistasis is the interaction among different loci, so if two markers interact, this analysis provides a table of values for all 9 combinations of the genotypes of the two markers.

[0066] Results are stored in a database and used to predict trait values of animals with unknown phenotypes using the Molecular Genetic Value (MGV). Animals for which prediction of trait values are desired are genotyped utilizing previously described platforms, then the genotypes are compared to the database of individual marker values. These marker values for each SNP genotype in the diagnostic test are summed across all diagnostic markers creating the MGV for an individual animal. Animals with MGVs greater than 0 are predicted to have trait values greater than the mean and the relative deviation from the mean is proportional to the degree by which the MGV is different from 0. Likewise, animals with MGV less than 0 are predicted to have MGVs less than the mean and the relative deviation from the mean is proportional to the degree by which the MGV is less than 0. Animals with an MGV near 0 are predicted to perform near the mean value of the trait.

[0067] Molecular Genetic Values can be used to enhance animal breeding and selection decisions in a number of important ways. MGVs can be used to rank animals based on their genetic potential to express a trait. These ranking can then be utilized in comparing one animal against any other animal so that decisions can be made on whether to keep, breed, flush, cull or sell specific animals. MGVs can be used to enhance mating decisions. Software tools can provide probability outcomes for MGVs of progeny produced from specific matings to previously tested sires and dams. These breeding tools can be used to optimize the MGVs from progeny produced in defined matings. Since the MGV for an animal will not change over time and since it is based on the animal's actual DNA genotype, the MGV can be used to make early and accurate breeding decisions. The ability to rank and breed animals at an early age results in both increasing the accuracy of selection and decreasing the age at which animals can be selected.

[0068] In this animal management system 10, the measurement component 100 and the genetic component 300 can be in communication with the management component 200 such that the management component 200 can use information from the measurement component 100 and/or the genetics component 300 to provide animal management, such as sorting decisions, time of harvest decisions, implant decisions (e.g., decisions regarding administration of medicaments and/or compositions which can be intended, for example, to cause the individual animals to grow faster, grow more efficiently, and/or produce leaner carcasses), commingling of cattle at the time of sorting, and allocating feed provided to a pen to individual animals within the pen. In some embodiments, a quantitative score can be calculated for a trait using an equation that includes information from the genetics component and measurement component. The score outputted from this equation is used to manage a group of animals.

[0069] Equations for obtaining such quantitative scores are developed using multiple regression tools. Predictive variables that are evaluated include items such as weight, ultrasound measurements of backfat, marbling and muscle depth, live animal estimates of empty body fat, MGV value, implant dose, expected values for backfat and empty body fat at slaughter. The general approach is to use stepwise regression on these predictive variables and their interactions in order to screen for variables with greatest predictive value. After the initial screening, standard methods for multiple regression and residual analysis were used to derive working equations. In one embodiment, the equation that is used for this method can be generally presented as:

Trait Score=constant+(X*MGV for the trait)+(Y*imaged characteristic)+(Z*additional factors)

[0070] In general, the system 10 can use a combination of one or more physical measurements, imaging results, and/or one or more portions of genetic information of a specific live animal to predict future characteristics such as weight, body composition, and marbling. These factors can then be taken into account for management decisions such as in sorting and harvest date decisions.

[0071] Traits that can be assigned a score using this method generally include those traits that have a genetic component, and are associated with a physical characteristic that can be measured externally or using imaging techniques. Examples of such traits include, but are not limited to marbling, tenderness, quality grade, quality yield, muscle content, fat thickness, feed efficiency, red meat yield, average daily weight gain, feed intake, protein content, bone content, maintenance energy requirement, mature size, hide quality, pattern of fat deposition, ribeye area, and ovulation rate.

[0072] In some embodiments, the system 10 can perform a method for managing animals at a facility configured for managing bovine subjects. The management component 200 can obtain information from the genetics component 300 that identifies a trait for a first bovine subject of the bovine subjects. The information obtained by the management component 200 can be inferred by analyzing a biological sample of the first bovine subject. The measurement component 100 can determine a physical characteristic of the first bovine subject using imaging and communicate this information to the management component 200, which can manage the first bovine subject at the facility based on at least the identified trait and the determined physical characteristic.

[0073] In one embodiment, the system 10 can determine a marbling value for the first bovine subject using imaging (e.g., by an ultrasound measurement taken by the measurement component 100) and a marbling genetic value based on analysis of a sample from the first bovine subject. The management component 200 of the system 10 can sort the first bovine subject into one of multiple predefined groups based on at least the obtained marbling genetic value and the determined marbling value from imaging.

[0074] This method also includes managing animals with a measurement component of an internal characteristic of the animal that is determined using imaging. The imaging may be carried out using an imaging measurement component 126 that is controlled by the physical measurement control 120. Imaging can include any or all techniques for obtaining an image of an animal or a part of it. Accordingly, the imaging measurement component 126 can be configured for performing any or all of the measurement techniques mentioned above.

[0075] In some embodiments, the system 10 can perform a method for managing animals in which the genetics component 300 obtains genetic information regarding a first bovine subject determined by identifying, in a biological sample from the first bovine subject, at a panel of SNPs. For example, the panel of SNPs can be directed to positions that are about 500,000 or less nucleotides from position 300 of at least one of SEQ ID NOS:19473 to 21982. The management component 200 of the system 10 can generate a future weight estimate and a future backfat estimate for the first bovine subject using at least one physical measurement of the first bovine subject, taken by the measurement component 100, and an equation configured to make estimations for a single animal to provide a score for the animal. The management component 200 can use the outputted score to manage the first bovine subject based on the genetic information, the future weight estimate, and the future backfat estimate.

[0076] In particular implementations, animals are brought to a feedlot with the expectation that they will later be shipped from the feedlot to a beef packing plant for slaughter. The exact length of time that each animal will spend at the feedlot has typically not been determined when the animal arrives. Rather, the specific shipping date can be determined while they are at the feedlot.

[0077] Referring to FIG. 2, groups 102 of animals at the feedlot may be subjected to external physical measurements (e.g., weighing), internal imaging (e.g., ultrasound), and biological sampling (e.g., taking a sample, such as blood, that contains nucleic acid for genetic characterization). These tests can be performed immediately upon arrival of one or more individual animals to the feedlot, or at any other time. A physical measurement control 120 may communicate with and/or control a weight measurement component 122, including a scale that can weigh animals (e.g., those belonging to the groups 102). In addition to the identification and weighing, upon arrival, the physical measurement component 120 can cause a biological sample 124 to be taken from each of the individual animals (e.g., a blood sample, a tissue sample, or the like) to be processed by the genetics component 300. This sample can be processed on location, or sent out to a laboratory elsewhere, for the purpose of identifying certain genomic information (e.g., nucleotide sequences) that correspond to traits such as marbling, average daily weight gain, fat thickness, tenderness, and the like. Based on the results obtained by testing the biological sample, an individual animal can be given a score indicating its predicted ability to efficiently gain weight, and/or produce meat with favorable qualities such as marbling, tenderness, and the like. The identification of genomic information and/or scoring may be carried out using the genetic component 300.

[0078] Identification, weighing, imaging, and biological sampling may be carried out while the animals are processed through a chute or other device that temporarily restricts the animal's movement. An individual animal record that can include data such as arrival weight is established in the system at this time. Also, at the time of arrival or later, the individual animals can be grouped and/or categorized. This grouping can be based on the external physical measurements of the animal (e.g., weight) taken at the time of arrival and/or the internal characteristics of the animal (e.g., results of the imaging measurement 126). The group that an animal is assigned to can indicate management choices such as an expected amount of time that the animal is going to be fed before going to harvest, the type of food and/or additives to feed to the animal, and/or the type of initial implant that the animal is to receive. In some implementations, each animal is classified into one of Early, Normal and Extended categories, for example by registering the categorization in a computer. Such assigned categories can be taken into account in sorting, or other management decisions regarding an animal.

[0079] In some embodiments, an optional implant of medicaments and/or compositions can be performed. This can, for example, cause the individual animals to grow faster and/or more efficiently. In other embodiments, the same type of implant is given at arrival to all animals, or all animals in the same category, and is not determined using information from the biological sample. In some instances, genetic or physical characteristic measuring may identify a group of animals that will receive an implant.

[0080] FIG. 3 shows an exemplary top view of an operator 20 making an ultrasound measurement using the imaging measurement component 126. The operator 20 is measuring an animal 104 that is located in a processing chute 106. The imaging technique used in this example is ultrasound, and the operator therefore applies a handheld ultrasound transducer 127 to a particular location on the animal 104 to make one or more measurements. The transducer 127 is connected to the imaging measurement component 126, which registers the measurement(s) for use in the system 10.

[0081] In implementations where one or more other imaging techniques are used, the operator 20 could use multiple imaging techniques, to capture one or more images of the animal. The image information can then be processed in a suitable way to obtain the desired measurement. In one embodiment, an MRI image, an x-ray image or a photograph can be automatically processed to obtain one or more numerical values. It is possible for several different characteristics to be measured using imaging. Using the individual animal identification, this information is stored in the system 10 in association with, for example, the original weight of the individual animal and/or any obtained genetic information.

[0082] A method of sorting animals into groups at the feedlot will be described with reference also to FIG. 4. An estimation component 210 can make calculations based on data obtained about individual animals. The estimation component 210 can be included in the management component 200. The calculations may involve using equations configured to make estimations or predictions. For example, the estimation component 210 may generate predictions such as a marbling score, a future weight estimate, and/or a future backfat estimate for each of the animals using at least one of the physical measurements, results of the imaging, and/or genetic information from the animal. The estimation component 210 may do so by inserting the physical measurement(s), imaging results, and/or genetic values, into an equation that is configured to make estimations for a single animal. That is, the estimations and predictions can be made on an individual animal basis while management of animals in the system 10 can be done on a group basis. The animal can be sorted into one of several groups based on the scores using these equations, as will be described. The estimation component 210 may perform the calculations while the animal is captured in the processing chute 106, or as an alternative, the calculations can be performed at a later time (e.g., after additional processing, after obtaining results of genetic sampling, and the like).

[0083] Data that the estimation component 210 may use in the calculations includes, but is not limited to: initial weight, date of initial weight, current weight, date of current weight, expected average days to market for the group, imaging backfat, imaging muscle tissue depth (e.g., ribeye depth), imaging marbling, marbling genetic value, average daily gain genetic value, past and future implant strategy, and breed code. Data that the estimation component 210 may generate based on the calculations includes, but is not limited to: days fed, average daily gain to date, days to feed, estimated future feed intake, estimated future average daily gain, estimated weight at future dates, estimated backfat at future dates, estimated marbling at future dates, food additive regimen, and implant strategy.

[0084] In some embodiments, some or all of the estimations and predictions generated by the estimation component 210 may be used by a sorting control component 212 in the system 10 to categorize individual animals. The operations performed by the sorting control component 212 include passing the estimations and predictions through a series of logical tests to make categorization decisions. The sorting control component 212 provides a signal representative of the categorization decision. This signal can then be used to assign individual animals to sort groups.

[0085] For example, the categorization decision may include assigning each animal to one of several predetermined groups. In some embodiments, categorization can occur substantially immediately after testing is performed on an individual animal. In other embodiments, the sorting control component 212 can perform the categorization whenever prompted by the system 10 or by the operators of the system 10. An individual animal can be grouped based on, for example, the current and past physical measurements (e.g., weight measurements 122) of the animal, the internal characteristics of the animal (e.g., results of the imaging measurements 126), and the results of the genetic testing (e.g., as performed by the genetics component 300). In some embodiments, the group that an animal is placed in can indicate an expected amount of time that the animal is going to be fed before going to harvest, can indicate the type of food and/or additives to feed to the animal, and can indicate the type of implant that the animal is to receive. This information can be added to the individual record of the animal that was established upon arrival.

[0086] In one embodiment, for time spent in a feedlot, three categories are used to sort incoming animals: early, normal and extended. In one embodiment, the early category generally refers to 20-80 days feeding period prior to harvest, although in another embodiment, this time period is between 35-75 days feeding prior to harvest. The normal category generally refers to 70-130 days feeding prior to harvest, although in another embodiment, this time period is between 80-105 days feeding prior to harvest. The extended category generally refers to 90-160 days feeding prior to harvest, although in another embodiment, this time period is between 110-150 days feeding prior to harvest. One of ordinary skill in the art will recognize that these times are relative and may be adjusted as animal management capabilities improve. As time ranges are adjusted, the early period will precede the normal time period which will in turn precede the extended period.

[0087] In some embodiments, one or more lots of animals 400 can be subjected to processing by the system 10 in FIG. 4. At this time, the animals 400 can be in a common group that has been kept together at the feedlot for some time (optionally the animals in such a common group can earlier have been categorized into the Early, Normal and Extended categories). As another example, the animals 400 that are brought in for processing can come from separate groups in the feedlot. The processing can include physical measurements, imaging, and the like, for example as described earlier. The animal is identified so that the previous history of the animal is available and so that the results of the current processing can be added to the animal's record.

[0088] The genetic information obtained from the biological sample (taken at an earlier processing stage) may have been obtained before the processing described above. For example, a certain time may be necessary to forward the sample to a lab, perform the analysis there, and return the results. The genetic information can therefore become available sometime in between the biological sampling and the current processing. On the other hand, in an implementation where genetic information is obtained more rapidly (such as by performing the nucleotide analysis at the animal management facility), the time of taking the biological sample or performing the sorting based on genetics, or both these measures, can be adjusted differently.

[0089] The estimation component 210 may generate predictions such as a marbling score, average daily gain, a tenderness score, a future weight estimate, and/or a future backfat estimate, for each of the animals using at least one of the physical measurements, the results of imaging, and/or genetic information from the animal. The estimation component 210 may do so by inserting the physical measurement(s), imaging result(s), and/or genetic values into an equation that is configured to make estimations for a single animal. That is, the estimations and predictions can be made on an individual animal basis while management of animals in the system 10 can be done on a group basis. The estimation component 210 may generate estimates of the average daily weight gain and/or the quality of meat at harvest (e.g., marbling, tenderness, and the like) of an individual animal based on factors such as traits (i.e., phenotypes) of the animal and additional factors, for example, but not limited to, past and future implant strategy, marbling determined by imaging, and estimated backfat at harvest. To facilitate the calculations performed by the estimation component 210, the results of the analysis of the genetic material obtained upon arrival may be reduced to numerical values (e.g., molecular genetic values or MGVs), that represent certain traits, such as marbling and/or average daily weight gain, of the animal. The estimation component 210 may generate more than one estimate based on varying certain independent variables such as future implant strategy and number of days until harvest, thus creating a family of estimates based on variations in the independent variables. The estimation component 210 may perform the calculations while the animal is captured in the processing chute 106.

[0090] The animal can be sorted based on the results of the calculations. For example, the animals can be sorted into sort groups 216 that are distributed among pens 214. Such sorting can be effectuated by the sorting control 212. Additional animal management can be provided by a management control 218, and the shipment of the animals can be controlled by a shipment control 220. These components will be described further below.

[0091] The following examples will serve to further illustrate the present invention without, at the same time, constituting any limitation thereof. It is to be clearly understood that resort may be had to various embodiments, modifications, and equivalents thereof which, after reading the description herein, may suggest themselves to those skilled in the art without departing from the spirit of the invention.

### EXAMPLES

### Example 1

### Estimating Empty Body Fat of a Live Animal

[0092] Empty Body Fat (EBF) of the live animal is estimated using the current weight and imaging measures. The estimate of EBF is employed in calculation of future gain, future weight, and future backfat. Another aspect of the calculations is to estimate the future weight of an individual animal. The future weight of an animal is determined from, for example, an estimated daily-gain-to-finish measure and/or information related to the animals ability to gain weight, such as, an average daily gain (ADG) prediction, an ADG molecular genetic value (ADG MGV), and the like. Because it is typically desirable to harvest individual animals at a particular weight, the estimation component 210 can estimate a days-to-critical-weight measure for an individual animal based in part on data such as a predefined critical weight for the animal and/or an ADG prediction. The days-to-critical-weight measure is a numerical value indicating the number of days that an individual animal must remain in a feedlot to attain a predetermined weight and can be used in the sorting of animals into predefined groups.

### Example 2

### Estimating Marbling of an Animal

[0093] Marbling of the animal at the time of harvest, which is important in determining an animal's ability to produce meat that will receive a high grade at harvest (i.e., USDA Choice or Prime) is estimated. Data used to estimate marbling includes data derived from the results of testing genetic material (e.g., the marbling molecular genetic value, MMGV), the chosen implant strategy (e.g., type and amount of medicaments and/or compounds provided), the marbling determined by imaging, and the estimated backfat at harvest. For example, animals with a high MMGV can have a tendency to produce meat that will grade higher than meat from animals with a low MMGV. However, the administration (e.g., implanting) of, for example, estrogenic and androgenic compounds that are intended to encourage efficient weight gain and/or addition of lean muscle mass can have a negative impact on animals ability to produce meat that will receive a high grade. Thus, equations can be used to predict the effect of implant strategies (i.e., types and amounts of implanted compounds) on an individual animal's ability to produce meat that will grade.

[0094] The marbling molecular genetic value (MMGV) is used in the calculations that are performed by the estimation component 210. The MMGV is determined by the genetics component 300 from information received from a testing facility, such as a laboratory capable of performing identification of SNPs (single nucleotide polymorphisms) from blood or tissue samples. Referring to FIG. 5, a biological sample 124 that was taken from each individual animal under the guidance of the physical measurement control 120 is sent off to a laboratory 310 for genetic testing. The laboratory can be in the same location as the feedlot, or can otherwise be situated at a remote facility specializing in genetic testing. Upon completion of the genetic testing, the results 320 are returned to the genetics component 300 in the form of an electronic copy (e.g., a CD-ROM, floppy disk, USB drive, or the like) and/or can be transmitted electronically to the genetics component 300 via a suitable communications protocol, for example over the internet. Once the results of the genetic testing have been obtained in the genetics component 300, a scoring module 330 of the genetics component 300 analyzes the results and designate a numerical score for certain traits, such as marbling, tenderness, and the like. The scoring module 330 is optionally in the control of the laboratory and can be located on those premises; or can be located elsewhere and receive the results of the analysis.

[0095] The MMGV is a numerical score that represents the predicted ability of the animal to produce meat with a high degree of marbling, and thus to receive a high grade at harvest (i.e., USDA Choice or Prime). The larger the numerical value of the MMGV, the better the chance the animal has to produce high quality meat. These values can be passed to the management component 200 for use by the estimation component 210.

[0096] Some or all of the estimations and predictions generated by the estimation component 210 may be used by the sorting control component 212 in the system 10. The operations performed by the sorting control component 212 include passing the estimations and predictions through a series of logical tests to make sorting decisions. The sorting control component 212 provides a signal representative of the sorting decision.

### Example 3

### Assigning Animals to Predetermined Sort Groups

[0097] Sorting decisions may include assigning each animal to one of the several predetermined sort groups 214. Some sort groups 214 may receive, in addition to their regular feed, a growth promoting beta-adrenergic agonist such as: zilpaterol hydrochloride, which is commercially available as Zilmax® from Intervet, Inc. of Millsboro, Del.; or ractopamine, which is commercially available as Optaflexx™ from Elanco, Inc. of Greenfield, Ind. Other implants include TE-S® or TE-IS®, (VetLife, West Des Moines, Iowa).

[0098] In this example, with reference again also to FIG. 4, the system 10 includes five sort groups 214A-E. Each of the sort groups 214 are associated with at least one of the pens 216 in which animals belonging to the sort group are to be kept. The sort groups 214 are associated with a corresponding length of time that the animals are to be kept and fed before harvesting, the type of feed to be given, and/or the type of implant that the animals are to receive. As discussed previously, the feed allocation module 218B of the management control component 218 can manage the feed allocation for each of the sort groups 214 and/or pens 216. The system 10 sorts the animals into five different sort groups to facilitate the group-based management of animals.

[0099] Each of the sort groups 214 is associated with a different predefined shipping date and feed additive combination as follows:
[0100] The sort group 214A is named “Group 1” for animals that are to be given a standard feed and a shipping date that is early relative to a standard shipping date based on average values, for example about 75 days on feed. Moreover, the animal receives no growth promotant.
[0101] The sort group 214B is named “Group 2” for animals that are to be given a standard feed and a shipping date that is early relative to the standard shipping date, but not as early as group 1, for example about 90 days on feed, and the animal receives no growth promotant.
[0102] The sort group 214C is named “Group 3” for animals that are to be given a standard feed and a shipping date that is normal relative to the standard shipping date, for example about 105 days on feed, and the animal receives no growth promotant.
[0103] The sort group 214D is named “Group 4” for animals that are to be given a standard feed and a shipping date that is extended relative to the standard shipping date, for example about 135 days on feed, and the animal receives no growth promotant.
[0104] The sort group 214E is named “Group 5” for animals that are to be given a standard feed supplemented with additional growth promoting compound(s) (e.g., zilpaterol hydrochloride) and a shipping date that is normal relative to the standard shipping date, for example about 105 days on feed.

[0105] The predefined shipping dates may be precise, such as 105 days, or may be flexible, such as a 20-40 day interval. Nevertheless, each of the sorting groups are associated with a different combination of shipping dates and feed additives.

[0106] The different shipping dates for the respective sort groups are managed by the shipment control component 220 in the system 10. The shipment control component 220 initiates the processing that causes the animals in the pen 216A to be shipped after 75 days on feed. Similarly, it initiates the process of shipping the animals in the pen 216D after 135 days on feed. At or after the time that the animals are sorted into the five sort groups 214, the animals receives an implant of medicament and/or compound that is determined by the system 10, but is not related to the sort groups 214. Exemplary implants include any of TE-S®, TE-IS® (VetLife, West Des Moines, Iowa) and/or Synovex-Plus® (Wyeth, Madison, N.J.). As an additional option, the system 10 may determine that certain animals are not to receive an implant. As discussed previously, the implants are administered by the implants module 218A included in the management control component 218. In some embodiments, the implant strategy is independent of the sort group. Because of this, the implants module 218A are located at the processing chute 106 so that the implants can be made shortly after the sorting decision has been made, but prior to performing the sorting.

[0107] The estimation component 210 makes predictions of the likelihood that an animal will produce meat that will obtain grade USDA Choice or Prime. One factor in obtaining these top grades is the amount of marbling present at harvest. To make predictions of the marbling score of an animal at harvest, the estimation component 210 uses information relating to the marbling molecular genetic value (MMGV), the past and future implant dosages, the estimated backfat at harvest, and the marbling and muscle depth at the time of imaging. The genetics component 300 generates an MMGV, a score relating to an animal's ability to produce meat with the correct amount of marbling, from the biological sample 124 of an individual animal. The biological sample 124 is sent to a testing facility substantially immediately after being drawn from an animal and identified in such a way as to be able to trace it back to the individual animal it was drawn from. The testing facility then attempts to identify one or more nucleotide occurrences, which have previously been shown to be associated with a “high” trait characteristic (e.g., correct amount of marbling, a high level of tenderness, ability to efficiently gain weight, and the like). The results of the testing, such as the presence of specific SNP markers, are returned to the genetics module 300. The genetics module 300 reduces the results of the genetic testing to numerical values (e.g., MGVs) that can be used by the estimation component 210 to predict future characteristics of the specific live animal from which the biological sample was obtained.

### Example 4

### Assessing Marbling at Harvest Using Combination MGV and Imaging Information

[0108] In some embodiments, a marbling MGV (MMGV) can be used, along with additional data, to quantitatively predict the amount of marbling at harvest of an individual animal. Marbling at harvest (MAH) can be determined according to the following equation:

### Steers

[0109] Equation to estimate MAH:

Marbling=128+(0.2877*MGV)−(0.1977*DOSE)+(16.7854*MBLu)+(7.3265*EBFc)

### Heifers

[0110] Equation to estimate MAH:

Marbling=63+(0.39*MGV)−(0.10*DOSE)+(12.03*MBLu)+(10.14*EBFc)

### Where

[0111] MGV=Molecular Genetic Value for Marbling from BeefGen testing
DOSE=Total hormone dose from all implants
MBLu=Marbling measurement taken with ultrasound
EBFc=Expected Empty Body Fat percentage based on carcass measurements

[0112] The marbling molecular genetic value (MMGV) indicates the genetic propensity of an animal to produce meat with a high marbling score. An MMGV of greater than twelve indicates that the animal falls within the top thirty percentile with regards to marbling and has between a 90% and 98% chance to grade (i.e., USDA Choice or Prime) based on a backfat endpoint of 0.5 to 0.6. An MMGV of between −9.5 and 12 indicates an animal that is in the mid thirty percentile (i.e., 30%-60%) with regards to marbling and has between a 45% and 80% chance to grade based on a backfat endpoint of 0.5 to 0.6 and an implant dosage of 14 mg to 158 mg. This indicates that time at the feedlot and implant strategy play a large part in these animals' ability to grade. Finally, an MMGV below −9.5 indicates an animal that is in the bottom 40 percentile with regards to marbling and has only a 10% chance to grade when fed to a backfat endpoint of 0.5 and implanted with a dosage of 158 mg. This category of animal has the least chance to grade and would typically be put on a feeding and implant regimen that would produce the greatest amount of meat with the greatest efficiency without consideration of grade.

[0113] By varying the values of BFH (e.g., 0.5 and 0.6) and dose (e.g., 158, 110, and 14), a range of MAHs can be determined for an individual animal. The MAH value which is largest (max MAH) is used in the decision making process of the management control to determine which group the animal should be placed in, what type of feed/additives the animal should receive, and what implants the animal should receive.

[0114] The following is an exemplary set of logical tests that can be used to sort individual animals into groups. First, an animal is added to the Group 1 sort group 214A if it was categorized as Early. Animals that are determined to go to Group 1 can be given one of three implants. The animal is given TES® if its MAH is less than 2.45, no implant if its MAH is between 2.45 and 2.52, and in the case where the animal's MAH is greater than 2.52, the animal is given the highest implant dose that results in an MAH that is greater than 2.52 (where TES®>TEIS®>None). The animals in Group 1 sort group 214A will spend a total of 75 days on feed.

[0115] An animal is added to the Group 2 sort group 214B if it was categorized as Normal and the animal's MAH is between 1.50 and 2.52. All animals in the Group 2 sort group 214B will spend a total of 90 days on feed and will all receive a TES® implant.

[0116] An animal is added to the Group 3 sort group 214C if it was categorized as Normal and has an MAH that is greater than 2.52. The Group 3 sort group 214C will spend a total of 105 days on feed and receive the highest implant dose that results in an MAH that is greater than 2.52 (where TES®>TEIS®>None).

[0117] An animal is added to the Group 4 sort group 214D if it was categorized as Extended and has an MAH that is greater than 1.50. Animals that are determined to go to Group 4 will spend a total of 135 days on feed and can be given one of three implants. The animal is given TES® if its MAH is less than 2.45, no implant if its MAH is between 2.45 and 2.52, and in the case where the animal's MAH is greater than 2.52, the animal is given the highest implant dose that results in an MAH that is greater than 2.52 (where TES®>TEIS®>None).

[0118] An animal is added to the Group 5 sort group 214E if it passes one of two logical tests. First, the animal is added to the Group 5 sort group 214E if it was categorized as Extended and has an MAH that is less than 1.50. Second, the animal is added to the Group 5 sort group 214E if it was originally as Normal and has an MAH that is less than 1.50. Animals that are determined to go to Group 5 will spend a total of 105 days on feed that is supplemented with a feed additive such as zilpaterol hydrochloride (e.g., based on manufacturer recommendations) and will receive a very high dose implant (e.g., as shown in Table 2).

### Example 5

### Assessing Average Daily Gain Using Combination MGV and Imaging Information

[0119] In some implementations, information obtained from a biological sample can be used to infer an individual animals potential for growth. The average daily gain molecular genetic value (ADG MGV), which can be derived from the results of an analysis of a biological sample, can be used by the system 10 to make decisions about the type and amount of implant that an individual animal receives. The presence or lack thereof, of particular SNPs in the biological sample, that can be used to infer an animal's potential for gaining weight, can be used to derive a numerical value (e.g., the ADG MGV). The ADG MGV can be used in a decision making process that determines the amount and type of implant to administer.

### Example 6

### Determining Implant Dose

[0120] Table 3 illustrates a decision making process that uses marbling MGV (MMGV) and ADG MGV to determine the implant dose, which is indicated by the terms “High”, “None”, and “Low”. Table 4 lists some exemplary implants and their potencies, while Table 3 lists some exemplary implants and their doses. Animals with marbling MGV greater than 10 can receive a high implant and still be expected to grade Choice. Cattle with marbling MGV lower than −10 also receive a High implant because they would not be expected to grade even if they received no implant. Cattle in the middle column are borderline. Those with reasonably good genetic potential for gain receive no implant in order to give them maximum opportunity to grade. Cattle with low potential for growth get the implant because they are in most need of a growth boost. Table 5 lists examples of total active doses for some implant types.

TABLE 3

| | Marbling MGV (MMGV) | | |
|---|---|---|---|
| ADG MGV | Less than −10 | −10 to +10 | Greater than 10 |
| Greater than 0.625 | High | None | High |
| Between 0.625 and 0.299 | High | None | High |
| Less than 0.299 | High | High | High |

TABLE 4

| Dose | Implant |
|---|---|
| None | No implant given |
| Low | Ralgro ®; Synovex C ®; Component EC ®; Ralgro |
| | Magnum |
| Medium | Synovex ® S, H; Component ® ES, EH |
| Medium High | Finaplix S, H ®; Revalor IS, IH; Synovex ® Choice |
| High | Revalor S, H; Component ® TES |
| Very High | Synovex ® Plus; Revalor ® 200 |

TABLE 5

| | | | Total active |
|---|---|---|---|
| Trade Names | | | dose, mg |
| Ralgro ® | | | 14 |
| Magnum ™ | | | 28 |
| Compudose ® | | | 25.7 |
| Encore ® | | | |
| Synovex-C ®; Implus-C ®; Component | | | 7.2 |
| E-C ® | | | |
| Synovex-S ®; Implus-S ®; Component ® E-S | | | 14.4 |
| Finaplix-S; Component ® T-S | | | 140 |
| Finaplix ®-H; Component ® T-H | | | 200 |
| Synovex ®-H; Implus-H ®; Component ® | | | 14.4 |
| E-H | | | |
| Revalor-G ® | A/E | M | 48 |
| Revalor-S ®; Component TE-S ®; | A/E | H | 144 |
| Revalor ®-H; | | | 158 |
| Synovex ® Plus ™; Revalor ® 200 | | | 220 |

### Example 7

### SNP Marker Panel for Determining Tenderness

[0121] A DNA-based genetic test contains a panel of 11 unique DNA markers each on highly associated with expression for tender meat. By measuring the cumulative effects for each of these 11 markers, this test accounts for a substantial proportion of the total genetic variation for this complex metabolic trait.

[0122] Since tenderness can only be measured in harvested cattle it is difficult, time consuming and expensive to make genetic progress for this trait using traditional genetic improvement tools. This test allows producers to accurately assess the genetic potential of their breeding stock to produce tender meat. This test also shortens the interval for making genetic progress because it can be used to test animals of any age. Results will allow cattle producers to make early breeding decisions that increase the accuracy of selection and decrease the age at which animals can be selected.

[0123] To determine an MGV for the trait of tenderness, a panel of SNP markers is studied where the presence or absence of a SNP at position 300 of 11 sequences allows the operator to infer the trait of tenderness. For this application, the 11 SNP markers used in this tenderness panel is provided in Table 6.

TABLE 6

| Marker | SEQ ID NO: |
|---|---|
| CAPN1x9 | 64924 |
| MMBT07944 | 20614 |
| MMBT25471 | 64923 |
| MMBT05224 | 21645 |
| MMBT11557 | 20221 |
| MMBT07678 | 19885 |
| MMBT09366 | 20559 |
| MMBT19805 | 20427 |
| MMBT21150 | 21108 |
| MMBT07919 | 21499 |
| MMBT07176 | 19861 |

[0124] This test has been validated in Angus using samples from the National Carcass Merit Project, representing Angus sires bred to Angus-based commercial cows. While this is a small population of animals, the data indicate that this test accounts for 100% of the genetic variation observed in this population as measured by Warner-Bratzler shear force. Results of this validation are presented in Table 7.

TABLE 7

| | |
|---|---|
| No. of samples | 407 |
| Heritability* | 0.35 |
| No. of Markers | 11 |
| Phenotypic variation explained (R²)** | 0.38 |
| As a percent of Heritability | 100% |

*as estimated in Minick et al, 2005, Cam. J. Anim. Sci. 84: 599
**estimated from a model that included contemporary group and MGV

[0125] A number of embodiments have been described. Nevertheless, it will be understood that various modifications may be made without departing from the spirit and scope of this disclosure. Accordingly, other embodiments are within the scope of the following claims.

The application's sequence listing, which the Patent Office published only in electronic form, follows.

SEQUENCE LISTING (64925 sequences)

SEQ ID NO: 1 - DNA, 600 bp, Bovine  MMBT02545
tatggggaaaattgttggtaatttactaaaagcattttaatataacaaaaagatagagcaaataattatttatcatttagtgtaggaggatagggcctggcaaacaaataaggcagatgtcggattaaagaaacaatccaatggtgacaaagaaatatttataacataaatcataattaaatattagataaataaacataaaaataatgtcccaaaaggattcccaagaaagacaatttaatggacaaaggcagggatatatatgaatgcttaaatggtttcatgaatattgattagctrgattttttttagtgtgtgagtgaaggagtagtatgctgagggacaaaagtgatggacccaaatctgagttttatggtttttcagataaatacgcatttttgtttatttacacagagagatattgtcctactaatatgatatctccaccaggcccattaaaacttatgtgctaacctctgtttcacacattaacgacaaacaggacataacgcttctgcacgaaaggaaacacatactgagagttgtttgaaacaaaaaaaaaaaaggaagaaggaggaaaaacctgatcttttgtaaata

SEQ ID NO: 2 - DNA, 600 bp, Bovine  MMBT05243
aagcaggaagcatcattcatctgccacatgtttccaactatggaaaattaattccaaaggacagactcatgaatctacttataaaggtgtgacactgacacatttcttcactgtaggaacgcccatgactgtgtgccagctacctcgaacatggggaaatcgtttctcatcaattgtaccttttagcgcaaaagtttcttaagctgtaggtgcagaagagattgtcccagtctgacagatggagaaactgaggcagagaggacgaagggcttgtttcctcatcagagctagagagcagaygtgtttcatattttttttcctcagactacgtttttccacctgctactgtaaggaccctcaccaagtttatgacccttaaaatgtcttttatttcttaaaatccaaaagtaataattaatagccccaagaacttagtgccactgcagctgctgaggccaggaacggttactcggtaggagcctaatgctggagcagtgctgccccctggtgcctactgggagtattcccagatttccctaggtggggatcctggcgcgtacttggtccccacttaatcttctccagagaagtgggcagggc

SEQ ID NO: 3 - DNA, 600 bp, Bovine  MMBT09018
ggcagcctttttatcaactatagtaactaacctaaaagacagcaaacggtcaaaataaatgccaagaagaaagataaaggtatgtgaagtaacagactgaaatttttatgtttaaaggaagcttccatttttaatcctctttgtgttcactactttatattgaaagtattcttcaggctgattttttttttcccccctccaacccttcagtcatacgcagtgaaaaaagtcatatgaattaaatataaataggctttctaggctttaaaaattattaaatattcacagttcctaagtctygactctttctgtggcagccaggcactactcaggggaagagatataaaagtagctttaaaacagaaggacaagatgctactttctttagtaaaaaggtgaaagaaattttaagatgagattcagaaaaggggcaggttaggttctaaactaagattctcaagttctaaacagaatttcgcttaaggacacttatttattaaaactccttttcctttttcccaatgaagcctaataccctgagttgtaaaccaactgttttcaaaagcacaagctctcaatgttgagtcaggtcaggtgttc

SEQ ID NO: 4 - DNA, 600 bp, Bovine  MMBT06945
ttttccagacaactgaaggattaaaatgttgctgtgcaaacttcaacacttggctatttttgtagcaatgcctttaaagtaatttttgagaaagataacacacaattaggaaggtgcagacaacacaaacatggatctagatggattatcataaagcaaacatctctggacccaccacaggagtcaataaatacaacacaggagacatcacagaagactgctgttagcctcccaatcccgaggcctcttctctcccagaaaaggcagtctctaacaaagttgtcttagtttctcttcccrtttctccaaagttttaaaatcttagcagacccttcacatttaaagttgtggacctctttctatgctaattaattcatcactccttttaatgactctattttaaaaagagaggtacctgcktacattttttaactgctcagattttaaatgtctacttgtcatattaacgtgaattgttttactgtgcagtatgcrgatgcttccaggtgccagtcatttggataagcattgccatttgcccccagttaaatggccttagacctctgaaatacttctaattcattcctttgtgccctttca

SEQ ID NO: 5 - DNA, 372 bp, Bovine  MMBT17660
ttttaatgttatgaaagtatttaatattttaaaatcagagtccacatcaaataatttttctttattcaactcttatctgagtttccaattctgaaaaatcaagaaattcattcaaaaattatagatagctgtagatataagtatcagtctcagtactcacatggcattttttttcctgcttgcttttgaataaaaacctacataatgaacacgataatatggtaggatttgggccatgtaattttcccatttagacttttttcattcattttctgtaatctgatctcatggtcttcttgmttttctccctcttgaagtttaacgtcattttcattttttcacaacgttggctgtaagttttctttctttttt

SEQ ID NO: 6 - DNA, 600 bp, Bovine  MMBT17471
cctagtctacactgaatctggcaatcaggaaatctgctaggcccctgtgaacacaggtgacaatttctcttagtgccatcggtgtatgttacaagggcggggattgggctgatccgactcatgcagttattcaagaaaagaggtggctcagactcgctctgcttcaccaaggatagaaggggagcggcttaggaaggttttaatttagctgaaaatacaaatggcaaaatcaaaggtaattttttccctcctgctgtaagaaacccagtgacatctgtgaggtggtttgattcacatcargggaagcttttgaaaaatggagatggcaattaattggacttcagaggatggtgacagttttttctaatgtcttgatttcctatcaagacattggccacttttctgcagggcctcaagacagtaattagatgtcatgtcggaatgtgactccaaggtctcaggcgacaccagttctaactagagcgcccccaaacacaggatgagacaatcagcttggccggcggcgtcacctgagagtcaacgcagccttccctcttcaacaacatgggaaaacccgagtcaatggagcagtttcacttt

SEQ ID NO: 7 - DNA, 600 bp, Bovine  MMBT14829
ggtcagagtggttaagcatcttgctggaggtcacacagctggtaaagatttgagttgcgaatttgagacatttattctctatctcaaacatgtacccttctggtcttctaggataataagaaacactactgtgaattactgttggattgtggtggtggtggtggtgcaggaggaggagaggagaggagacccctttaggggaatgtgttggggttgagcattgagaactaggatgtttctgtgtggatcaggtttgtgcagagatggatcaatgactcaggagtgtacacagatcctatkctttgtaccctttagaaattaggctgatcatcagcctcaccttgaaatatctcttattcctttgtaatcaacatgtggaactgttgaaagaatgtctgctgatggatatctttcaactaatcttaaaatggtggatgtctgtttaattttaaactgggtaccatgacatcccctgtgctgaacattcacaaacagctggacttagaaggaaatgtacaaatgtagtgttcacagattactaatataatgagggctgacagaattattataggtcaccgagcctttaaataacatttattt

SEQ ID NO: 8 - DNA, 598 bp, Bovine  MMBT00031
  misc_feature (1)..(90): n is a, c, g, or t
nnnnnnnnnnnnnnnnnnnnnnnnnnnnnnnnnnnnnnnnnnnnnnnnnnnnnnnnnnnnnnnnnnnnnnnnnnnnnnnnnnnnnnnnnnaatgtccagccttgtttagatccaccagaagtgttgaatatatggactttcatgacgttacctaaacacttggccttcctctcaacatcctaaacatttgcttgtgaattttcttgatttgggatttatatttctgaagcatacacccaagggaagggattcaggactgtcctcacccacctctgtccatggctcttttccacaaaaacrcctattccttctaggtcatccttttgttcactgccttccctgctggtctacccagctcctatggcaaggcctccttcacgccagacttcctccragaaatcactmtggacccctcagcccatcttctcctgcccatctctgaatacatctgggacctgatttcatctggactgctgctctggttgtgtcattgataagttagctgacaaagacaaaatgaagtctaatacaaaatgaaccatccgttgattcataaccatacagcaarggagtctctctggtcactttcctggacagg

SEQ ID NO: 9 - DNA, 600 bp, Bovine  MMBT00078
gctttatggggctggtttgggcaaagcctgtgctattttttttaaatgttgcctggggatccaggtttctatatggacctgcacagatgggggtttaagctatggatttggaaggcaaagccacacgtctcctctggttttgagaagagatctaatccaggatctgactgctcatgctccatcctcattgggacattttctgagctgaggtgtgagcaaagcatcagctaaaacatgcaccctgaggagcaaatagaaacctaggtggggccccatcctccttgcatggctgcaggggtrgtgtttgaatgggtggtccttcctgactgatggccaccgtcagagggaaatctctgaaagcagataccagtttgagccatggctctgcccgctctgggctgtgtgacctcagataagtcactgcgtgtctctgagaccatttctctttttcgtgaggaggtgagggtcagggctatggtgaggtgttccagagaaggtgggtttgcacacacctggcacttgtgctgggcagcagaggatgcatgggaacccgaacctgggttggggtcagggggctgggggaaaggaggagagtgggga

SEQ ID NO: 10 - DNA, 598 bp, Bovine  MMBT00032
  misc_feature (1)..(31): n is a, c, g, or t
nnnnnnnnnnnnnnnnnnnnnnnnnnnnnnntcttctgactccccccaccccccgcattccttttctctttttcccccccttttagtagtcaagggaaaaaaaaaaagagcaagcagagctgacaggtatcattcagccgccctggcttgtgaggggtggtataaatgaatctcagggctcctggcttcacatgattcaaacatgcgttattgaagatggatgttccttaaaaaaagattgatggtggatgccgggcttagggtgccatttatcattttgaatattatttagacttgccrtgtaaacctgtaacttgagagttggacgagccgrggctgggtaggggcctgtgtgtgtgtgtgtttccatcgattggccttgggttatcattgctgctgaccagatgcagtccctcccatttacagtatagaagacacccccctcccgtaaaggagggacggtttaattttgaataatttccaaggacactggggaaaatgaagtatctgtgatttacactaacaggcaacttctttctctctccttctctccctctctcttccccgacagaggcagtcatgtacgaaacattaaaat

SEQ ID NO: 11 - DNA, 598 bp, Bovine  MMBT00008
  misc_feature (1)..(129): n is a, c, g, or t
nnnnnnnnnnnnnnnnnnnnnnnnnnnnnnnnnnnnnnnnnnnnnnnnnnnnnnnnnnnnnnnnnnnnnnnnnnnnnnnnnnnnnnnnnnnnnnnnnnnnnnnnnnnnnnnnnnnnnnnnnnnnnnnnnctcaacccagcacagaggggctggatcagaactcacttctcatcgggttttccaccatggggttcccctcgcccggacgctcgatcttgaaaacttcatccacgaagacaatccgacagtcattgagagaatcacccctacaagagaacaggcctgttaggatgaccagcrggccagtctcaccgatgaccccaaaagacccggccacttggacatgttctcagagcccatgaacagctctgattctaattataysgtagaagaggttttcgyggggccctatgaactcgcctagctactaccctcgmaaattcaagtcctaccacatcaggaacgaggtgaaaacaaataagccagagtttcagtatgtgatgcattttcgagaataatttttaacctttggcaggtgaggcccactaagaggcaaggcccactaaacaaggctcaataggcaaaaactatgaagaag

SEQ ID NO: 12 - DNA, 600 bp, Bovine  MMBT00087
ccctcaaggggtctctstgtttcgaaagtcatttctaaactttgattatatttttttctacgtcagagatgataatctccaaagaactgattcaaggtaacccacttkgtgggaggctgaagcttaaatcagaaaacccsttctttaatacagagtgagaagtggaatctctgcttagtgtgacatgaaaaatccagtctctgtgagtttgctattagagtaagagggattcgttaggtgagactaatgggtagttgctccatggcatacgggatcttcctggaccaggaattgaacccrtgtcycctgcatttcaggcagattctttaccactgagccaccgaggaagccctgtgcttgctcttytgtttgtttttcttggtgctgagagtcacagggatagatctgcctggttgaatctgttgtgaaagctttagcctcaagatattcatgctcagcacagattcagaaaatgttctgaatcatctgctggctgaaacatccraggactcagtacatcgtctgacagatatgtggacaggagacatccagtaaggatgcacagtggccggtgatcactcgaggtgtgtgacactcttg

SEQ ID NO: 13 - DNA, 600 bp, Bovine  MMBT00070
caacttccagttgagaaagctgaggctcagagaagggcaggaggggttggccagagccaagccttgtcctcccatccccactggagatctttgctgggtgccctgccctgggaggggtggacacagagggtgagagaccctctctgcgcatgcggtctgatgggcagaggccagtgacccgctgggcagctcaggccagccctgggcctcactgaaacctgtccctggcccagcaggcccctgcttccagggaggttctggggtgtgatgtgggaagcggccttggtctgtaaatgcacrgtgcggaggatgcgtgccgtcccctgtggagtgcggtctcagggcctgggcctaggtgcatctgcacccagacagccttgtttcattatcttatgtatttgtctgtggctgtgtcaggcctcagctgcggcacgcagagtccaggcgtgcgggcttctcccttgtcgaggtgtgcaggatcagtagctgcgacccacaggctgagctgctccgcggcaggtgggactcagctccccaagcaggcatccaacctgcatcggatgggcaggcggatcctcagccactggaccccccagcagc

SEQ ID NO: 14 - DNA, 598 bp, Bovine  MMBT00430
  misc_feature (1)..(163): n is a, c, g, or t
nnnnnnnnnnnnnnnnnnnnnnnnnnnnnnnnnnnnnnnnnnnnnnnnnnnnnnnnnnnnnnnnnnnnnnnnnnnnnnnnnnnnnnnnnnnnnnnnnnnnnnnnnnnnnnnnnnnnnnnnnnnnnnnnnnnnnnnnnnnnnnnnnnnnnnnnnnnnnnnnnnntctgctaggttacattcactataggcctaggagggctaccagctggggagagcggatggcccactgaaaagagcatcctaacagggccacctagtgaatgctcagcttcttagggaaacttcttttcagtattggtrtctgaagtattgatctgatggaggaagagccatgctcttcatggagaccattatcagggattttatggactattgcttcaggtggagtgtggagtaattatttccttaagactctttgtatgtataattgtattcctgctactcaggatatgttcagaaaataattactattgaattaactgcattgacagtctttcarttctactaccaagactgtttgcatttaagctaagtttcctccttgccaatatgtgtctgttacaataagcatttcaactaaattagcatctcagtaaca

SEQ ID NO: 15 - DNA, 600 bp, Bovine  MMBT00039
aacacattaatcttaaaggagaaaaaaaattacctcattggtgaagcctgaaaaattgttctgccttgtaatacactgtaacatacttctgttgtagtacccttaccaccagtcttgtagatttgcgttgacacatactttcttaaaagtatgtgtttaaaaaaaaaaaaagtatgtgttgcatgctttgcagctgtaacttcttgtgagcagagactgtgttttgtatatcttggcaccccagtaaactaacgcaatttgggattacaaagtgacttcacaatacatttttagaatgcrttattaagtaaatttggtggcaagtatctcccctttgattttttgttgttgttgcttcccttacaatctaaatcacaaaacaagaaaaatggtaggctttctttacaagtttcatatgaatgccagaaaggagcagratcaaaactagtccccaaggacttccctggcagtccagtggttaagactctgtgctttcactgcagggagcaccagttcagtccctgggtggggacctgagatcccacatgctatataggacagccaaaagataaaataagttataaaataaaaatctagtcc

SEQ ID NO: 16 - DNA, 600 bp, Bovine  MMBT00130
tagcacacagcacacacacatgggctctaaggtgggcttcctggtggctcagatagtaaagaatctgcctgcactgcaagagacctgggttcaatcccatggtcaggaagatcctctggagaaggggatggcaatccactccagtattcctgcctggagactgagtgactaacacacatggggtctaaggcagttgaatgtgtctcagaagcacaaagatcccagaccatgaagacctgagttcagatcctggctcctccagtttctagctatgtgaccttggcaagtgattcaactacyctgtgccaccgtttctgcatctgccaaatgggtgtgatggcagtgccttcctctaggaccatgggagaatgaggtgagctattcagaactgcttctgggctgtctctcttcctcacagctcccttctggaatgtctaggcaagtctgggaagcggagggctgagcctccggcagttaatgaatccagaaaggatctcagctgtgtcaggggagccccagtgccaagttggcctgatttttatcccaagagagctgagaacgggttctggtgtcagacatctgcggtgtgattggcataaa

SEQ ID NO: 17 - DNA, 600 bp, Bovine  MMBT00171
atctctatctcttcaagactatttgcacattttttttcaactagaaaacacttatctcctaccttctccactcttaagcttttctagtgtactcacatttaattgcataggattaaaacattatgttaaactaaatcagtaagcctcaaaatttattgtcatgagatgcaagccaagggctattaaattttcccaggacataaggctctttcagacagacacaaatatataaggaccccaagcaagtctcatcagtcataagggctttaggagagtagtggactgtgttcctaggcaagytttctgaaggattagcacaaactccaaagccctgaataattctcctaaaaggaaaactaagatgcttaaaccttaaagcattaagcaagactacataataaagagcctttaggattttcgttttatactcccaacttttgagatcaggtcaagagggtcagtgtaactgtccttggttctgaaacggtgttgacttggaggtaattcatttattttaaaatgtctactaatgtctactggattcccaatatccacttgtgtaacttgaatcagtgatggcccacagctctttggtttatg

SEQ ID NO: 18 - DNA, 600 bp, Bovine  MMBT01317
tcctgtcgaagtcrgcagatgaactaaataacttcttgctcagtgaggtggttgaaatctagggttctagagggacacctgttggaggrtgaatcctgaatttccacctattagctgtgtgatgctgggtaaggcacttaacctctctaagcctcagttttcccatttatgaaatgagaataatacgagggcctgcagcgcagggcttggggtggattcagtgaggtgctgggtgcgcctagcacagagrcagtgcccagtgccagcccacagctgtcattgtcgttaaagagactgttsctgtcattattaatcatcacacccattctagttcttgggtggaggcttctgtcacatgcatcctggggccctagtccccacactcctagcagtgtagacaccctttactcagaagctcatatatgagtttgtaataagctgcctctaatcttttgtgctctccttatggacaagtatcaaatccaggcaagatctgctaccaagctagcttttaatgagggacttagcctgaaccactggaaccacgggaagccactatctcagccagccatgcattcattcaagagtcagggtgttcaa

SEQ ID NO: 19 - DNA, 598 bp, Bovine  MMBT01326
  misc_feature (1)..(87): n is a, c, g, or t
nnnnnnnnnnnnnnnnnnnnnnnnnnnnnnnnnnnnnnnnnnnnnnnnnnnnnnnnnnnnnnnnnnnnnnnnnnnnnnnnnnnnnnncttgacttggcaggcaagataactgaggcgtagagaggttaaatgagttgtccaaagccatataacaggatgggaggctgacctggggaatgcggtcctagatgcatgggaggagatggttggctcaatgcctataactttgagggtgagtcatccatccccttgaattacagaatcctcgggctgtagggatcctcaggaagtcagctgtcstcctggccttcaagagaagtccacttattgtccaccagagggataaggacctttcatatctttagaagacaggcttctctccagccctcaggccacatagccttcaaggccaggccatcttccttggcctcattcacacattcacaggcctgaaagctgttgagggtgctctgtgttgagtggccctctgtgttgagagtcaggctcatagaaagtggtgatgggttcagttcccctctgcccccgcagtcaatggtgctcatctcctgtggaaagtttcaaagcagggatgcttttg

SEQ ID NO: 20 - DNA, 598 bp, Bovine  MMBT02162
  misc_feature (1)..(1): n is a, c, g, or t
ntcttagaatgattgttaggttcacaggtgtttgttgtattatgacccactggtgactgactgccccccacaggccactgacagtcctgtatcgtacaggaatattattaaatcctgtgcgcctgaaagtagacagaggaaaaggagaaagaaaggaaccctttagtccttatgaagatttaaaggcctctttattgcctatgcttgacttgactgcattgcttttcagatgctcaaagactgttggagagaaggactaaagatgacagactgaatgaagcagattttcaggaaggaggsaagatgagtatcttaggctccaggaggctggaaggagcttgtccaaaggagcaatgggatcccaaacagcaggccattaaggatagtctcaatccagtttttcacttcattcccaagggtcctcttccctcggtaccaccagagtggcatgaggggccaggcctccgggacttttgtcaggacccgcctcctgcctcctgagtcaagggcgagttgaatgctagcagcatagaaaccttggaaagcactcttgggtaattgtgaccgtttattaaggtacaatattaatgcattgttt

SEQ ID NO: 21 - DNA, 600 bp, Bovine  MMBT01006
ttctcgctttcatacacttcacaaatcggagtggacacactcaccatgctatgtccattcactaacaggaagaaggcttgatyagcattgagctgtaagcgccttcttattatcttgatgagctcactcatgttgacatgatcaggcaccagaaactttgttttatccaggacaggaagctgtttctcacctttgtatckttctattattaccgggattttggtaggatgctgctctcggataagtcggacatcttctactctttgttygaaggttcggcgctgtttgaaggttttctcsgacggcatggcgctgcaggctgggtgggggcggcgagttggaggctgcaggcggcggcagaggcggcgacagctccgacagaaaaacattttttaaagtgttttctctattcaaaatctgtgacagtgttattattattctaagactgttgtacagttgtcatagcttagagcaaatgatgggatattctgattctgtcagctttgcggtccttgagaactaggattgttggttcggaataaagggtgcaatcccctagtrgctctagtcctgatacactgtgttcccttaaaagaaact

SEQ ID NO: 22 - DNA, 600 bp, Bovine  MMBT01705
ggagtgggttgccatgcccgcctccagggcatcttcccttaccaccgtgagcactaaatgaattagaaagctgagaccatgaggcaaggatacaaaaagcaacctgggaagctctaaaacaccaaggatttcataaactttgattatttacaacgccaccccaggaaatgaatagaacacatcaggttttaggaaatcagagaagaatcttcagtactttctaaggcaccgacaccggtctcccattgagaaacggcctggcctgccccgtctttggttctccccacttccgctggtgcsgtggccctgttctcctctccctgaagtaacttctccgtgggcacttacatcgcttagttgtttcccgcttttgacagcctgaacgtagacaggagtgtcagtaaccagcttgtaattgttccttgttttcagcacgtgagctttgtacttgatctgtcaaaaggaagaaggaaaataagcctgtgttagaccattcattatatttgaaattgttggttttcacatagagcctggttgcttttagctcatggcatgcacatacattggccctgaatttcataacaatcagcataatcaatg

SEQ ID NO: 23 - DNA, 600 bp, Bovine  MMBT00564
gaggaaaccacttgctcaaggcccttacagccaggctccagaaccaggtatgttttccgagcccagcatggagttgtaaagagcatggactccagagccaggctgccttgggagaacctggccgatcaccagctgtgtggcctgcagcaagctgcacgacctctctgtgcctcagttttcacatgggaaaaagggagataataattgtacggctcctaggattgcggtgaggatgggatgtcctggagcacgggaagccttttagccccgcctggagcgtggtaaagtcagggccagccsttctgcttgtgctgctcccgctggtctcykgtctgccaccaagtcctacagaccccaggtccttaacagggccagtgttgtttctctccacttgtccctggtctaggacatcattatttgtcctggttctctgtcgcagcaccccactgccttcccccgcccacccctctctgcccatgcagcagagccatcttcctgtttcactcttccctgcccagaaccaccacctcagtggtcacccctgcccccagcccaccccgagcgccagcctctcctggccctggcccaccctggtttcag

SEQ ID NO: 24 - DNA, 600 bp, Bovine  MMBT01385
cacgttttttaatgagcttgagttactctctatgattttggggaaagtttgtaaatgtactctacattgttaatgaactatcttctaatcatctgtgccagtagcctatgtagcagtttatccactccccaagatggccactccccaatagggcactcaggctacccaagtgcttatgggatccttgaaagttaaatgaacagaataacatttgggggactggtaattgcaattacacatgtaagaaaagtattttctctttacatttcacaaattgctgtggttctttaaaatatactstgtgtttcaatatgcggtatgtacaaaaaacaagttctactccagaaagaatgttggttcttgtcaaagcagtaatatgatccagagacccatctatatgaaaaacaaacaaaaacaacaacaagagagatggggagggaacagagggaaataggcagatcagatcagtcgctcagtcgtgtccaactctttgccaccccatgaatcgcagcacgccaggcctccctgtccatcaccaactcccagagttcactgagactcacgtccatcgagtcaatgaggccatccagccatctcatc

SEQ ID NO: 25 - DNA, 600 bp, Bovine  MMBT01416
atttttgagcttctacactgtctagaattaattagctcccccatagtaatttctggaaatttataatgctgtttatcaagtttatgagcaaattaattgctttaaatctattttgaaattcatgtaattacatcagttgtattgaagttttctgaattgaggactttatcagcttttaggctatcttaaaatttgttcattatctcaagtgagaaatttccacattattttatattactttttgcataaaactgaaaaattgagaagtccaatttgataaattaaagttgcatgctgatscccacaacacatcttgtggttggatgacagtcttccattaaggcaagtgwcctgtataaaattagcattgtaactaatatataggacctttgtggggaagaaaaaaattattactcattaaacagctttgaatgaatggaaatatatatgatgctttggatggaaagtactaatattaaaaaacatagtcactttaggatggataaataattgttataagcctttaaaattaagtgtaacttacaatacatatatgctaaaatatgcatatatgctaaaatacacaaatcttaaagtaya

SEQ ID NO: 26 - DNA, 600 bp, Bovine  MMBT01195
aactttctgttaattcttcttaacatttacactactaagttattttatgacttcagaatttgaattaagcttagatttttacatattttcttcatttaaatctgttaagacatttatattccgcactttgaggcattgccaaatcttacctctccagtgtttttcctctcctttctccctttattttgttttaaaaatagatttttttcccccaaaagcatgctgtaagtgattccccctttacctaattcctgtaaatacttttgacaaaaattgccttttaacctcttctccaagttsagctaacatctgttctgctgtggrtaggctagatgaccaagggttggaattgctccttggcacttccttctatacactgaccttttccattttgtctcattttaatgacattaaamtgtctcattttaattcatattgctamggcattgggaaagatggaatccttaaccatatttatcttcaaagaagcatgaaaactgctatcagattttattctataagcaagcaaggattccttggccagatgtttttataggtgtgtcccttacaaagatcagttttacctcaaccagagaacta

SEQ ID NO: 27 - DNA, 598 bp, Bovine  MMBT01719
  misc_feature (1)..(70): n is a, c, g, or t
nnnnnnnnnnnnnnnnnnnnnnnnnnnnnnnnnnnnnnnnnnnnnnnnnnnnnnnnnnnnnnnnnnnnnngagtatgagaaaggacttgaaaagccactaattccaggagttctagtcaatacctttaaccctcaccttccccttttgagaatagagtctctagttcctataatttccacccagcactaaaagttcttttaagggccctggatgcctttggatcctgagaccctggcctcaccgctccttatttcttccctctggggtatgtttaatgtagtgtttactgggttaaaagsctgaggtggttcaagaatctaccagcatatatgcatttatgtgctcgtgccagccacatgcttacccagcctttcctcttggacaacactgggcagatctggtgagactattgtccactgcgtttgcccccgctacctgtggctgaatgttcccagagactcctaacctcccaaatgctaagaagctgaagtattttaatattcaggattatttcaggatatttttctaagtgcctgagtatatgccctgtgtggtgcttaatgaggctgcagtgtgatacacacacacacacacata

SEQ ID NO: 28 - DNA, 600 bp, Bovine  MMBT00562
agcaaacctcattttttctccagggaacagcccgttgcccattgcatggggtggtcaagatgcctcgccttccccttggctaggggcacgtgacccaggtcaggctgtttggargctcgcgtccttgaagggagacacagtagaatctggagctaacatttggaytyacccgtactggcggtggtgcctggggaggctgccccctgattcttgcaacctggacccctggcaacatcttctttcctgtccttcttgaggtctggctgttctctcctgagccactccgaggcattctaatastgtattgttattattaatttttcttgcttaagttagaaagtgttggtttctattatttgtagctaaagaatcggaactgacacaaacccaaatgcccagcaatcggggcttaaaagcatgatacagcycacgatggagtactatacaccaggtacagcaacgagacacaggcacagaaaagatgcttacaacatatagtttagtgcagagcagattctaataaaacaggatgccatggtatgatacaatgcttgcaaaatacactctgtaccatcatagaaaaaggtctggaaaaaaata

SEQ ID NO: 29 - DNA, 600 bp, Bovine  MMBT02802
tattttcatggtagacttttatgttagtttcagagtatcttctaattatcaaatgtatttaaaattatgtatactttaatttcctatccagaatataaataaaccttttcaattaatgaattaatgcacaattattgtaggcagttcagaaagttaaattctattacactccctaagtgttaatcaattagccattttcattagctataagtcagaatactggagtgcccccaaagaatgaattctttttaaaaattaaaatatttttataattcaatttaatgaaatatgtcatatctstggctaattttaccttttccttttcattctcactcaaatcctctacscttgccctttgggcatgcacagaagcccagctctgtacatccacacatgacattcgattacacatattcctaactgctggcatgagctgtatactaaatattgtacctatcaagctttacatgttttcattttaaaattcccatttaaatgcaaattctgccatttaaatagagtcytcgtgtgctttattacactataattactatttcccatcttcctggaaccaactgcaagaaaggccataggtcactt

SEQ ID NO: 30 - DNA, 600 bp, Bovine  MMBT02056
ttaaacaaaatttaaacagcacaatgaaactttttactaaaaaaccttttcaatgaaatggctctaattaaaacttttaaagaaagacattggtttaaaaaaaaaatgaataaagtaacaatttaacttaaaaaggcctgtgttaagagacgatttaataaaattgagattagaaagtattcacagatacaatctcatttaagaagtaatcaccaacaaaaagcaaggtaacttcaatttttccttttttgcctcttaaactgaactatagttgatctacaaattttgtgttaatctccscttttcagcaaagtgactcaattatacatacatacacacagacacataaaaacagtcttttttttaaaaaatattcttttctattatggtttacccctggaggctggatatagttccctgtatgtttcttgaattcatcttcagcagttttaatgtacatattttcctaacgttttagagtttgaatagctagtcgtttgctgacctcttgtgttagctggtagaactacatggcctcaaagcaaacttcagcaccttattcaaacaccgtagtgggaacatgaagacaaacagcttagc

SEQ ID NO: 31 - DNA, 600 bp, Bovine  MMBT02065
taaagtgagtacttgggattccaagccatgaatatgtgtccaccaattgttaatctgtaaactaacctgccaaccagcttcagagcagaactggtactctggccagcggaactgttgttccctttgtttttgaaaatacaaagggaaggaagtgatgagacagtcatcgatgattaaaagaggtcatttactttccatgccttgtggctttggtccaaaggcagaaagtgaaaaggaatgggatctgcccttgcaagggatgaaatctactaatgatctcccatgtttcccagtctcatscagcatttttcagctaatcctttgaaaatattttctgaagccagtctgagtttttacctgtgggagagaaatatcctgtcggtaaataccaacattatggccactgcatgtatttaaagacagagtgcagggtgcctcatggagttccgtcaattgcgtgtaacggttttcagaagtcctcattcttctggaagctaccaacagacatgcacattcaggccttcagtggaactaaaggggaattcatagaaaccagaactgcacgaaggcaactgaaaaattgagcttcccaggtagctc

SEQ ID NO: 32 - DNA, 600 bp, Bovine  MMBT02111
gcctgctggcttgcatctctcacaatcatcctatattaataaatctgcatcttgcctatcaaagaaaaaactaacctaaaatcagacttatcatacaacccagtaccttcaccttgggcatttatcctaaagaagtgaaaacttatattcacacagaagtttacacaaaccaagtcacacaggaccagccctcaacagccccaccctgagatatcaagagtggagagtaccatgacacatatctagtttgtttgttgaatgagggaacaagatggacctgactgggctaaggatacactsamatcttttgacaactcaaggcaggtgaaaaacttcaaactggaaatattgaattttctgctcttcagtgatgaattagaaaaataaaaaccatatgaccaaatgtatatcttgagttatgaaacagctccatactggactaaayagaaatagaaatgcagagaaaagaatttgtttctagtacagtatttttctttttttagaactatttccatttttttagaacagttaatgttttattatacagctatttgtttgctactaaataacagcttttaaaaggctttgctgctttctgta

SEQ ID NO: 33 - DNA, 590 bp, Bovine  MMBT02189
  misc_feature (1)..(3): n is a, c, g, or t
nnngagcatctgacacaaatttagtcaagccattaatgactaatgaccggtgacatggtaggattttaaaaaaaagagagagagagagagaaaatgagccaatgtaattttctcttgggagtttaaactgggagacagagaaggtaggagtaattagtaggagttaaggctgtaggttaagcagggctagaytggagtgagctgcagctaaatctaaaaccagaacaaactattagctagaagatgaggataatagcaacagagcagacagccaggaagtcacagttgagcaaggcctatagstcagtcatgagtatcttacataatcctctccttttcccctttcttttcttccttccatttttactttcttgctcatctcttcttttcacaaggaacacttgctgctgaacactgactatatcccaggaggcagatatgatgataaacaagacagacacagttgctgccatcattatggaggtttaagtcaaatgaaggtgatggaaaagtcccagggccgtgctctaaccttggtctccggagcgcttgggtaatacaaattaaggcgttgcttcaatgtcaggatc

SEQ ID NO: 34 - DNA, 600 bp, Bovine  MMBT02132
ttaagctgactaccttaccgacttttaaaaataaattcctttaggactactaggtccataatcaaattatttgtgaagcactgacagaattatatcctcctttctggtatttctcatttgtttctctcaccttattgctttggtgggaacttccacagtgatgttaaataatagtggtgtttctggttcctgattgtagttagacatccaccctccaacctttcaaagtccccaaaggacaaaaaagatattattaatttgaaatctgttttattctaaaactttactaaagtggaaaastgcyatgcctgtgatgaagagtgctgatccttgacagtagtgggagtttggttgaactcagtcatgtctgaaaaagggccacgtgctgaatgatatcccagtttagtaacatcagtaatctggtgtgtgtgtgtgtgtgtgtgtgtgtgtgtgtgtgtatttaagtgttgagtctttctgaggaggatcagcctctcaggtgaacttgatgaatcttctraagtatatataacagcaggggaaggagagggtgggacgatttgagagagtagcactgagatatgtacactagggtgagtg

SEQ ID NO: 35 - DNA, 598 bp, Bovine  MMBT00996
  misc_feature (1)..(75): n is a, c, g, or t
nnnnnnnnnnnnnnnnnnnnnnnnnnnnnnnnnnnnnnnnnnnnnnnnnnnnnnnnnnnnnnnnnnnnnnnnnnncaggtgacattctggaccggtaagtcgccttgcaagtgtaaggtattccgtccttacacttgcacttaaacttgtgatccttcaaatgatgacgaaaggctgggcttcaggtcaggcaatgtaggttcaaatctgggcttgacttctgaagcctcagtttccttgcctacaaattaggcataacagctaccttgtatattgtaaggattaattgtgatggcacasacagcaatgctagaaagcaataattttaattattgtaggccaagataatctgaagggattcaattatttctttccctgcygtaacccatgaagtacaaccttctaactctgattaatgcgccaccatcagttttatgagagtgggtttagatctgataacaaagtgggctgtcttcattccatttatttctgtgaagtcttgagtttaaatggttgaggagggggtgttgggaggggaaaggccatgttcttgttttaaaaaacgttaattttcagttgccaggctgccagaagtgag

SEQ ID NO: 36 - DNA, 600 bp, Bovine  MMBT00542
aaaaaaagagaatcacaaagactcattgtaatggaaaactcaaaggacagagtgttggagctgcatgcaggggccgcccgagccagacccacgctatgtccccgtgcttagcacatttctgggtgctcgagamacaaaggcgtgagtgaaaccggagactgatgaaccctgcgacacaatctgagggccagtgttagaatcctgggcgaacagtattcacatatcagaagaggggactgagatcccaggggacgggttgtggaatcttccgggtgtttcaggagccccctgcccccggtstggctctttttgagggcgctgtggccagggaggccagggacggtccagggctgagtctggggcctctcagggaaggatgggcttacgggaaaggagttttctggcgggagagcctttggtgctaaccctcccgaggcctggggccccggcagctggaggcctcagcgggaggcagagcgcacccttagcagggcggggtgggcccagtgcacagcttgttggggtaatgggcgtatttgcggttgtaggtgcccaggttgcggcgaaagcagagcgcggccttcttgtcacactcgcagg

SEQ ID NO: 37 - DNA, 602 bp, Bovine  MMBT02679
  misc_feature (1)..(2): n is a, c, g, or t
nntctagctatgtcgcagatgttcttccaaggagcaagctgcagtctatgatgggaaagagtaatttgttacggatctgaatcgtcaggtccagtcatttggcttgaaggattcagttgactccactgaaagcacatggcaagtatagctcctaaatgacagtaagaastccctcatttatattctctcatgtctctatctcatctaaccctgtcgggtgaacccctgctgccctttaaatgcaaattccatccattcccccatctgcatggagctgacaacccatcttccatgatgcttcrgcaytctgtatgtacttctgttagggcccctgcatgcatatcagagatttgtgtttccattcttgtgtccctcactggagaattacgtccttgaaaggagaacctcatttcactgtcgtttgattccccaaagtgaactgtgttcctacctgtggagtaatgtgttttgcacatttgctgaattgaatcagaatttcaggtttggaaggaaactttcccatcattctaggaagcctagaacagtagaaccaataacatctgtggcccgtccacccctcatttagtcgatggggttacagg

SEQ ID NO: 38 - DNA, 598 bp, Bovine  MMBT02149
  misc_feature (1)..(64): n is a, c, g, or t
nnnnnnnnnnnnnnnnnnnnnnnnnnnnnnnnnnnnnnnnnnnnnnnnnnnnnnnnnnnnnnnntgcacacctgtgggacggaaccctggcttcttcctatgggacggctcccagctgtgctggaggtgtgcccccacccccccactgatgtcaggtaagtactgaatctgagatgacacttccttgatcaaatgacaatgctctagttacagactctgctgaagtggtttctacttctcccttctcgcctcactctcctttgccatttctcatcaacctccagaacccacagtcagacrgctgagatgctgaccaaycccaccagactgcagaccccctcacagcttgaggacagaggagcctgcttcccagagacacagctgcccatgcccctctggctctccaggtgtaatggagcctcagaatcggccagaccactccactatctccacagtgtctcttcccacccaagcacagggtttacggcgggtggagggattcttgagttcaggagctgggaaaacaactgcagcaattgactgtttggaaaacaatttatagtttacaaaacactcttttcctttatctcatgggaat

SEQ ID NO: 39 - DNA, 600 bp, Bovine  MMBT01938
taagcacacctctcttccagagctagtccctctcccagatcataactaccattgtttttttttcaaaaagaccagtgtgtatagagatgcttagagaccttgaaacacccttaaaaacaagcactgggcagcggctagagacataaagatgaacagatgctgtccttagcccgagggaactcatagtttcagagaaggagacagggaagcgaatggaaaatgtgaaaacgtgaaagcaatgtgaaaacatgatccagacaggtgttgggtgtaaataagatgctctgggagccctaagcrggagggcaggaggggctggccaaggcaagcttctctgcagcaggatttggagtttcagttttcagctgcctgaaaacttaagacaggtctataggggtggacggagaaggcaatggcaacctactccagtactcatgcctggaaaatcccatggacggatgagcctggtaggctgcaatccatggagtcgctaggagtcggacatgactgagcgacttcactttcacttttcaccttcatgcactggagaaggaaatggcaacccactccagtgttcttgcctggagaatcccagggatg

SEQ ID NO: 40 - DNA, 600 bp, Bovine  MMBT02005
cctctgaaatcctcaactggaaaattcctctttctagctgcaactcattcattatttctgctactacctgactcccaacaacccctgttctcagcctcctagagacctccagtcctgggttctcctyttgtgaaccatagccttgagagagacattgcactctcactaccaatggaagctcactgacagcagtgattcccacaggcagaaagaagggggccattggtcctcaaggggctgggtgtgctcctccgtgggctctttccagcatccatctgcctgccctctctgtggcccctrctaggccaccattttctcctaccactcaaaccataagaggccactgctcatcttgctggctttctgtctactccctctccactctccccstcattctctacagctmgttcccttctgaacttgacacttggttccctggcatcatttctcttgctcttctctactcacatctcatgttctccttaagcaaccttgccccatgcctgtgccccagcttcacatacttgctggtaacacccacatctgtgccccatcctctgaccttgcacctgagttccaggagctgaattctccgcctcc

SEQ ID NO: 41 - DNA, 600 bp, Bovine  MMBT02644
ttaaaaaaagtgataaatatctgtgaaattataatttgacaaaagaaggaatgaatagatcacaaaattgacctgaactttctaaatgaacatatcaaagacattttataatgaccaatggtcacttttttctatccctacctgcaggaggtttactgtgaagttgagagtgttcggtacaatggggaacctctggctttgggccttttctcacactgaaactctgaaaaccaattcgccccagcaccctggcgggaggagttttcacatagaggagtcacctgtctcttcctggacctrtggcccctttggaatttctccgttacgaggcagtaggggtggagcagagaaagcattaggagccagagcactggtgcaggctgtgtgacctcagggaacttgcttcacctctctgggctttggtttccttctgggaagtctggatgatcttcatggacccctttaggacccctaaagggtcaggggagacggtgtaattggctgccatgaagcaccatacccatcatggatgcagttgtggcaactttcactgattttggtactggggagaatgtagctcatcatggaaaaggacataga

SEQ ID NO: 42 - DNA, 600 bp, Bovine  MMBT02066
ttctgggttacattggagcagcatctaattcccttcagcgtgtgcagggggacaacaggagcaaagaggagcctggggagatgtgtgccatgtggagtcctaaatgctctttgttgtgagcctgggatttaaagagaaagtggggagccctcctcactccccgggagagcctgcctccttgcaggatcagtatgaagrctcttttgtgtcctgcagaggcaggaagggcagtctgatcccagaccactgctcacagcagcgacttccccataacaaccgaaatactggctacaatgcatrcccccttgagggttcagtgyctcctgacagtaaaaccgaaaagggtccccttcctgtttcctgacctttatttccaaacagaggtatataagaatcttgtgttgcctctcatggtgcctgctgtataattaatgtcccaataatggatgtatggatgtccagatgtattcatgaataaatggaaatatgaataaatgaatgaaaaactaagctctcttcatcaagtcatacataaggcacagtcagatacctgggcctagagtctagcctctgagcagctcggaaaggcttctggaatat

SEQ ID NO: 43 - DNA, 536 bp, Bovine  MMBT02323
ttcatatgtggtttgaatagttaagtcagaaacagaaaatattgggatattttcatgtctctgtaaatttgttctcatacttaatggccttcatatgcttttcaaagctctttttcaaaatctgagccacataatagtctactaaataaacacctaaggagatatttagagcactatttgtttcttattttggcagattaggaaaatacaatataaaaatatcatctcaagaaaagattaaatttttacaaaagtgtcaattactcaccactggtctttggtttccccatttgtcatcartgctaaccctattctaccctttctgctgcttctaccgctctccagatatgcatggtctaacctgaccagatttcttctatcacaaagagaaattatctatttcataaattgatatctttccctacataaaagtatttttaaagatgagtctgtggcatgattgcaaaactaaaacaaggcagtggtttactacatgaagaattccaaacacaaatacttagaaagaggaaaagttt

SEQ ID NO: 44 - DNA, 598 bp, Bovine  MMBT02184
  misc_feature (1)..(64): n is a, c, g, or t
nnnnnnnnnnnnnnnnnnnnnnnnnnnnnnnnnnnnnnnnnnnnnnnnnnnnnnnnnnnnnnnnatttttttaaaagtttttcccaaattcatggatgaatcataaattatgccaggtatgatataaagaatattgaccttttttttttggtcacaacacacagcttgctaaatcttagttccctgatcagaaattgaacttggaccatggcagtgaaaacaccaattcctaaccactgaaccatcagaaaattccctaaaactgactttaaaaataaaatatgttgtgaatgccctaarcaagttgattagttgggtttttaaaaatttaatgtatatgtaaatctgcatrtataaatatacattcaatgtgtatgtttgtatgttctttattcaactgctccagatgatatgatatgggtccctctaagatttttttctgtgatgatcaaattgagccaataaatgtttgattaattcctatggtgagccccataaaggccagtcacagatagaaaggatagttaaggagggaactgctagttaaggagattttttaaggcttagagtagagcctgaartcaaatagaacagaaaa

SEQ ID NO: 45 - DNA, 600 bp, Bovine  MMBT02122
gttacttcatcactagacctcttcttggtggaatgtctattgccattctctggcactttaggttgtgctacacataaaatgccttgatgcgtctttttttcctttatcttactgaattttttcaatgtttttgttatacaagcagtacatgttcattgtaaaaaaaaaaaatcaaacttgaaatatgcaaatgagcaaaaaggagaggggaggcactgaggcataatcactgtggacttcagggttctcctccggtggtgttcctttgtggaaaaggggttttgttgtagcaagagtcartctgcatttcctggactacattcagttccatgactcctgattctaagtagcaggtttcattaaaaaaaaaaaaaaggcacatatttcagccaaaacaacggccacagaatcattctgaacgagttccaaaacctccggtggaggaaaattcctttaccatatgttgcacctttcatagggaatggcaggctaagaaaatcaacaaattgggaggaaaaaggaaaaaatgctatacagtgatttctcagctatgtaaaaatatttatgataataaagaccttcataaaatacaccccagaa

SEQ ID NO: 46 - DNA, 598 bp, Bovine  MMBT02016
  misc_feature (1)..(50): n is a, c, g, or t
nnnnnnnnnnnnnnnnnnnnnnnnnnnnnnnnnnnnnnnnnnnnnnnnnnagcagatgcaacagcaacactgtgaaagccccttttttccctaccgctctccgtgagtcactcatgctaacctcatttggcttgttcagatcatataagtattcgttagatgaaacaaaggtactgtccccgccaccagaatcctcaaaaagaaagctacacgctccttaaaattattccagcctaactgaggaagtcaacagataaaagaactcataatcaagacacataaaaacaaaattaccaaaargaaaacattctgtacacatcatggtgaagtgccctgtcccggtacagacacacccaggtgctgttactaacatcggtgcctatgcgtcctgtcctcaaattctctcctcaaagtttgactcctaaaaaayaggcttggtaaaaggttgaggtcccaggtggtgctaccggtaaagaaccctcctgccaatgcaggaggcgcaagagatgcgagtttgatgcctgcatcaagaagatcctctggaggaggaaatggcaacccactccagtcttcttgcctcggaaaactgcagtccatg

SEQ ID NO: 47 - DNA, 600 bp, Bovine  MMBT01988
gtcaaggccaattttctgaaaatatagttgaggaagctatatccttgagtgattatgcgactagcccaggatcacgatgttgttgctgaccttatcaccctgtgggtctggagtctggtccagggttttccatctcataaagtaagttcgagttaacttatttcctatttgcttccaacaattgattacccaatgtaagctggagactgggcttggcactaagatactttaactcatgccctcaataacccttcattttaccaagaggaaacagaagttcatggagttttggcagttcarccatgttcatgcagttattaaatggtagagccaaaattgacaatcaagtgtgtctgacaccaaactgtgaaattttcctggcaccacaaattggagattttactgaatggaagggtacagtgtagactcagcaggcttctcagtccagctagaatgctctacctagaagttactttgcccaaacatcctcctgtagaagtatagaaatcccctcctgcagatatctctaccttaaacctctagtgagagaggagccctttctttcttttggcctgccatttggccttgagtttcccacag

SEQ ID NO: 48 - DNA, 600 bp, Bovine  MMBT01980
gctgtaatttttacaaggaattagaaacatgacttaagtaaatattctctctttaagaatgtcattcacctaattaaatatagtaaaagtactgtctacactcccaattaatttgctaatctacaagaaatctagaatcaatagctagctaatagctactcaaatgagtcactaaagacaaaaatattcatatttgtatttggtagttgaagagcaatcataatacagatgacaatatacatttgtgcaactcaaaatgatggcaatgtgtctagaatcaagccctataaaacttactcrgggatttgaatcatgccatttgtttttttattgtttgactttcttctccttcaaattggacccatgtcagcataagcacactggctgacaccggtcctcactggacatttccatgacaaacctaaaagtcacaggcaacataaattgtcaaggttttatgartacagctctgctaagtgcaaagtattttctagacaaaagttwagcgcaaaggtagaagggtcattttagtgtagtaaaaacagaggagtcctggatgcatttttttagaacctcaaattaattatgraatcaggagtg

SEQ ID NO: 49 - DNA, 600 bp, Bovine  MMBT02487
aatagcaatatgctatgaaattcataacagtctctaaagagcctttgaaaatattataatacctatttagttcttgaacaatttattaataaaacktaaaacttaataaaacctttatctgagttaagttkctcttttaggcttacaaaaataaaacaaaacagaaccactaactctgaagcatgtagataagaatgagtcaaaattctatgacttttatgtttcaatacaagttgtgtgtaacatacctcaggatttgtgtcaaactccaggcttaaacagtggaaaccgttttatctrtttacttggttcagaaaggctcagtgcctctaggcaatcaatctaactctttgcagcaagacataagttatttgagatttctacctcaaaacctattatgcccccaaagtgctatctctgattattgttaaacgaagtctcagttggcagaagagttcaccatactagaactcttgatagcttcagagaaatactttattaaattctaaagcactcaagccatacctccaaaatacaggcaaacctccagagtctccttgaaaaattactcatggcccaagcactattggagccataaaa

SEQ ID NO: 50 - DNA, 601 bp, Bovine  MMBT01955
  misc_feature (1)..(1): n is a, c, g, or t
ncaacagaattcatttgtctgctgctgttctctcaaatatgaaaaagtcagaattggctgcctgagacccttgggttggatggggtgttatgcagctttgtgccatagattctatgtcctaaaggcaatagatccaatcataggacttcattcaattttctctttctattgagcattagtaagtcttttttttttttttaactggtctcattctacaaagaatttgagatgcctttttccttttcatagctgtccacttgaaacttataaagacacctctcattatgaagattaccctccrtggcccttcaactcaaaattgcattcagagtccaatgacattcccaagctrttttgcaatttcatgaaattaattttcattaagtctactcaaaagctttttcattttccatgtctggaaatcttttttaagaaagagacacacacatgcacacaaggaaatcattttccaacaaagacttaaatgtatccagagctcccaatttgaagtcatttatttagtcttctccaagcactgctttttaaaaccaggctgggcctcctatcaagttctagcactctgttaactcctgactgtccc

SEQ ID NO: 51 - DNA, 559 bp, Bovine  MMBT01808
agaagaaatctagtagggattcataattaggcccttggggtaaacataagaaagaaatataaagttgagacaatgtaaaggaaagtcagttttcagaaactatatttagtcagaaataagcaagtactagtttggttttaaaatatgaactctccaggagtcaaccttgatgctatatctttgaacatccaaatacagcagaccttgaaaaaaaaaacaaaaacctctcatcacttcaaaaactaggaccaacaatccatttacagcagtaatctaaaaacaatcgacaccaagacatartaaaactggaccaggaggctatcattatatttgccagaagctgagcaaagttgctagccagaatcratgttagaagtaaattttctttgagtacttcaatttttcctgggcagataaatgcaaaatctgtaagcaataaaactggtcacctctttcatttctttcaagcaactggagaactggtcacccgctctctctataattattcttgtcttacatttctacatccattctgagatggattctcctggaaagagtg

SEQ ID NO: 52 - DNA, 600 bp, Bovine  MMBT02614
ttttttttaattatttggaggcttttcttgattggtgctatacttttaagtatttgcatcgaatagaaacaatttaaaattaaacttcaaagatgacaacagagccataaatatattgatactctggttagtagcattatgttctctaccttgtttcctgcttaaaaaattatagttcaagtattaatttatagtgtgtttgtcatcttagtatggtagctgatgatgaagatgcattgagtgattcagaaaccactgaagccctgaccccagatatcttagctcggaagtaagtattgrtaactataaagcatattccacaactgtaaagctgtgtttaattttgcagagtyaaagacattttactttacttgtacaagtgtaaataaaaagcatgtgctaaatgaattaagtttcatctagatttttcatagcaacctgtatagtcttatttctaggttaaaatcaaagtatgtagatgagtaccagaagctggtatacagattccctatgttgattgcctgcatagagatttttttttttttttttaatatcctgctacctgggtattaaagatacaagtgagataggtaaaaataa

SEQ ID NO: 53 - DNA, 600 bp, Bovine  MMBT02689
gagtctggaactaatgttacataagtagcaagcacactagagttagcatgtccaattaatgtctggctattggggcaaaatgacattctgaggcatgaagaacaaaagggtaattggatataaaagggatctcattttaacaaacatgaatctacatggccattcctatgagcatgattcactgcaacactgcaaaataagagacattctaatattgaaactttcttaagattataacaaagatacatccaaaacaggcaatattctaaattataaaagtgtactgttaatcattattcrtaagttcttcataaaatatttataatttttgaagttcttctatatctcagctgactctctcaacaaccttgtgaacaaactgggcagtgagcatgtagttttatatatgagaaaagcagatatatatactcttcaaggtcatatagccagtaagaattcacccttcattcattcattcacttacccacatttttacaaagtatctactatgtggcaaacactgtactgctatatgttgagggaatacaaaaattaatgagattaatcttttaattagaaaatcatatagcagatcaaatt

SEQ ID NO: 54 - DNA, 600 bp, Bovine  MMBT02932
actaaaaaataaaaatccatagtaaaagcaaatttgccgttaatcaaggatcattcttcttaaaagtaagaatttattagatatctagcaaattttaagtccaacaagtaagttttagtggatttttatcttgatgatttttaaaactatgcgttgtttttaaaatattttggcccgttgacgtttatattttcattttatcaccctttacacactttcctcttatgcaaatatatctactcttatcacctctttatgtatttcttttcatattacatgtttcgttatcacatttattcrttttcatagtgataaggtttcaaaacattccccttcctttcataggcacagttctttctcctagaaatatctgaggagttgatttcttacattttaaaatactccagtttacacttaaaattgacattatgcatatgtctataaaatagtaaagtaaaaagaaaaatacaaaaatttgacttagattttttaacaagttgtttttcaagtagccatatcctttctaactaaagaaataaaggctgaactagaaaaagaagcccccttaaaaaaagatatatacatatatatgtatgtaca

SEQ ID NO: 55 - DNA, 598 bp, Bovine  MMBT02014
  misc_feature (1)..(72): n is a, c, g, or t
nnnnnnnnnnnnnnnnnnnnnnnnnnnnnnnnnnnnnnnnnnnnnnnnnnnnnnnnnnnnnnnnnnnnnnnnctagaaattttatgaaaaatgttatttttctacacacacacaacatctctgaaggccaaacaaaatatatctgtggaaggaattcattccataggccactagtttgaaagtactggtctaccacctacatcgtggctttcctctctatattcccgtctctttcataagcccctgagctttgaaagggccaggatcaggattgtcttgtttaaagttaggcaccgcatrcctagctcagttcttggtgtgtggtagagatctatacatgcatgaatgggtgaatagttagctggatgcaggcatgtatgtgcctcctccatatggatggagagtgagtagatagatggcgagatggatggatgagatcacacaactgatgcaggaagacagtgcatagatatgatcggtgccagagcaggcagagggagggggagagaggagagaggtgagtttgatgtcttcatttgggtggttatgccattagctggctcttgtgttggggtccatgagagtcacaccgatccct

SEQ ID NO: 56 - DNA, 600 bp, Bovine  MMBT02179
caagtctccaaatacggttcagcaatgaggaccagtatagaatgaaaaaaaaaaaattgggtgttttccttttttaatttttgtttctgtgaaaaacatcattaaaatagttaatattcacaggcagtatctgaggcaagagtaagtgtgtcaccctttgcagaaacatggagcatgtacaagtataatgttgcttttttttttagaatcgtgtgatatatttgaacatatagcagctataagaaaaaaatgctgccagtatgttggtaatggttgggaggatggttagatggctgcatrttgaatwaagcagaatcaaggtccagaagaacaaggctgaactgccacacacatccttactacctcctgcgtaccttgactccaagtattattgctccagtaacaccccaaaacttacagtgttctgaacttgatagtgtcttggggtatctgtayctttttttgacactgtaattcttgattgaccattagaattttctgcagtgtctcatatggtagctgctaaccatatgtggccaccgagcacctgaaacgtggcttacgcagcctgggaactgaacgtttcattttattgattta

SEQ ID NO: 57 - DNA, 600 bp, Bovine  MMBT01576
tttctaggtcatcagaacctagatattttaaattgtgtaactagatgtggtctctatccttgaggattcagattagaatagtcactcacctaaagacatcagttgaatctaacaaagcatatcaagcacccccgcagggaaaggagaaggggcagtgatgccaactcacctttggctccggctgatgactttgcaatccaaacgttgccctctccctcctctttctttctgttatatgaagccaggaaaaattctctctcgtctgtccttgaactatggagtggtggatggattccattytgagctggagcaactggggtcttgaggttggttgggtaaatcacgtaggactcggggaaccatgtgcaggactcagccagttctgggctggttttgatgagcctggcagacgatagaaggtcagtctctcttctgaggacagtctctccctctattcagaaaagccagtgcttcgcccacagctctccaaggaggcatggccagggcccggagctggtctccttatcccacacctcactcttggcctcactgggcagacctccaatggaccacagagcagcacacagctgttacacacga

SEQ ID NO: 58 - DNA, 600 bp, Bovine  MMBT00845
atattttgctgtttgataaacttcgtaaaacagtggagctgagtgattttgctgctgcctgaatggaagtattctaagaacccatgccaagaagataaataaggctgtggctccaggaggggagctgaaacaaatgtgcagcggagaggtacatcaaagtaaaactagctctcctgacgacccagctctgcgtgtgacggagcgtgtgcgtgtgcgcgggtgtgtggcggaccaagtgtttggcagacactaggctacatcgaggggcctgaagatgtaccctgggctcttgccagcccytctgacggcagccctgtacacaataggcctgcttgacatttaagtaggattaggcccagccctgcttggtacaaagggaaagcagtgttagccactgctggagattcaggccctacagccagccagcttggggttaattcagactggaatatgtgtagtgagaggacctgggatccttcagtgggcagggggcctcagtccctattggccagtgaaagatttattctgcactgatgacagggggtacaagcttcgagtgtaaaaacatcagcccctctcatatgtggctccagactcctc

SEQ ID NO: 59 - DNA, 600 bp, Bovine  MMBT01542
ggtgtgaaaatgatattctgggtacctttttgagtctttgtatttgcgagatgcatgatgaactatctacagatgggatgaagtgatttctgggatttgcttcaaaataaactgggcagtggggagctggtgggcatacagatggcgatcatcactgacgctgtgagatgggcacgtgaagatctcatcagaggttcctttctacttcggtgtgtatttgacattttcctgagtataatgcttagaaatcaaatcatgaaattatggatttaagtctggattatgaatcggcttcaagcyattacttggatggttaatagggacctgggcatgcctgcacacacagatcatcagctgaaagggaagatccacacttgcttctaggattgcgtgagactttggaaagtcaggtatacagaggactgtccagaaagctatcaagaaaagaaacccagtgtctctgaagacagactaaagccatgtaacttccactaccatcagaagccttcacatactgaaatttaaactgaaataaacgtcctggtatttaaaaacgaaaaagatacacaccaccacaatatgaagcaaaagttataagaa

SEQ ID NO: 60 - DNA, 600 bp, Bovine  MMBT01355
aactaaattttagaagagttgttacacagtgataaataaccagaaaaatttccactcatcttcttagaatagatccctagaaaaggaaagattgtgtaagagcatagctattttaaaggctcttgatacatgtagccttgcagacctctagaagaactgtgtcagtcgcactcctctcatctgtgtatgagcatctctttcattgtacacttgccagcattgaagattatgttaaaaaagtacttattttatcttttttctttttgatttgtcctttaataaaagaacactatttcttaycatatttctgacacgtttccccagcttatttgatttgaaaatgtttatctttttaattttgcttacagtttttatggaaatgaatttactattctgtaatcaatgtctcgtttccttgaaaggacaagcaaagaaggataactcatacagaattaccagaaattacacctgaggctcctataaagacagccaacttcacaaagcaaagcaatctgtcgatgtcacatgcatagtgcaggcaactatagatccctctccagaggtgactgtggcagtgatcctatcaccagggaagggcag

SEQ ID NO: 61 - DNA, 598 bp, Bovine  MMBT00662
  misc_feature (1)..(41): n is a, c, g, or t
nnnnnnnnnnnnnnnnnnnnnnnnnnnnnnnnnnnnnnnnncagtgaagaaagtggggggggggagctataatctgtaattgtatttgataaaatgataaattgaaaagataagtaactttaaatgtttagacgttacctataacctattaatcacttttatttatcttctgataaaaatttcactacaaggatagctaattaaaaaaaagcagttattctgataggcaaattctgaacaacctgataaaacgataatttttactgtttgtatgccttagatcacttttgaaataagtgyaaaatggtttatcttacctgtaccactgaggaattgaggtactctgcacatacccctaagggctgcactagtgctgagactgcctgaaaaaaagacagcaaatktgagaaataaatgtgagcaagttctttcctttcaacattaaacaaatccttttttatatgtcagagaacattttatmctcttgggcaggaaaagctgatataaagatgtcagttcatttaaattattgtagaaatttaatgtaacttaaatcatactatgccaataaaacttctttcaaggcttggatgagatg

SEQ ID NO: 62 - DNA, 600 bp, Bovine  MMBT00575
gttgcattgaagcataaaagaaatgggtttataaatcaaaatctttttctgtaggcccctggtgagtgcagcatttcaaggaaggctttggcaaaccttttctgtaaagtgtagaattgctttctattgcaaacagctcttctttgtaaggctgtttcacacacacgcatgagcttgtgtgcacaaattacagaggtaatatgtgattttgggtagaaggaaagagagagagagaaggagttagggaagaagaaaggaaaggaagaagggaggcaggaagccaggaaggtaaggcgagargggtgaacaagcagttggatatacaagcctggagttcaggaaaaggtccaggctgaaatgtacatttgggagctatcagcatatgaaaggcatataaagccacaagttggtgatgtgcccaagagggtgggggaggataaggagaagagaacatggggcagaaccctagaataactcaagggtaataggttgaggagccaagaaagaaccagcaaaggagacagaggagaagaattcagggaggtagcagtcaagagagggtgagatcccagaacagagaggagaaaaggtttcagagag

SEQ ID NO: 63 - DNA, 600 bp, Bovine  MMBT01509
ctgaggtcattgctgcctgaagtcacagtgccctcttttccatctgatcaatagcaagagttctttcttcccatacttgctccacggcggccctctcatgaatcatgaatgcctgggtgtgaataggcatgcgccattccaggcactgaggatgtgccagtgagactggtctcacccatttcacaagtaggcgtgtggccctacttgtcagctgatgccttcacaagtgagttagtctgacaggggtgctgtcatcacacaggggaccctgggaggctccttcagccagaatagaaaccrcacctgtcttctctataactgagaagtcttstgttcctcaggattgaggacaggcccactttatcaccagtgctttccatgacattctcacttactggatcccccttccatcagcgctgaccggtttcttctctcttctaacccactgggtcgagggaccatttgtctctctcctgtgtcatacgtacccagcccaagggggccagtccaggtgaccagacagtcggtcaataggtgatgctctagggcagcttaccgcctcatatgttgtcgatgcacacggacaacatcgatttatga

SEQ ID NO: 64 - DNA, 600 bp, Bovine  MMBT00552
ggttctgatgtccaggctcccatcctgctcatgtccagaggtcttggggccctgttggaggctgcagaagatggatttagagccatcaggtgggggctgaggcctctgcctcccgaggaggtctcaccaagggacgccatgtgactaagaggagggcggacactggggcctggagacctgggttcaccctgccccccactgcccctgcactgacttgccagcccttgagcaaaacccaggaatctctaagggctcgtctcctcctctgctcagtgagggtctcaacaggctcagagggtrgcctgtgcctgggttcctgaaccccagtggctagttggagatgagtctgatttaggagtttcctcccggggatgcatgagagtccagcaagctcttaactcagtatggaggggtctccatgaatggccacgatgacagctgttctcactgttttctgggaaatgggatgtgatggcaagctgtcggaagcctgagagaggtcatgcggatggtagcgggcttgctgtgcactggctgcwgctgctcaccacaaggaaggcctggcctccgtccaggagcactggttccgtgattcccaga

SEQ ID NO: 65 - DNA, 600 bp, Bovine  MMBT01215
tagcagctgtaggccttgcctagttgtgcaaatgacaaagaactacctacactgttcaccaaaattgtgatttatttggtcacttagacacattcttgtccttttagaatttcagagaaacatgcttccttcacgaattcgggtggtaaagtgacggtgactccatacggcaaatgcaaggtcatcgttaatggggtgcccatcacgaccaagacgaagctgcagcatttggtaaactcccctgcggagccacaggatttcctaagtccaaccaggagagctggagtgaggccggcaggrctgggcgctaagccccttctgtccctctgccaccgtgtcccagtgatgacgaggtcacagctgtggagttgggatattaactccctgagtgtctgggggaagtcgtttcacctccctggaccttgcttacaaaacagagaggggtgaactaggtgctcgccaagatccttccagctctaacgctgtatgatattttagattttaacaacctgccatggagggacttccctgatggtccagtggctaagattctgagctcccaatgcagggggcctgggttcgatccctggtcagggaact

SEQ ID NO: 66 - DNA, 481 bp, Bovine  MMBT00927
  misc_feature (1)..(180): n is a, c, g, or t
nnnnnnnnnnnnnnnnnnnnnnnnnnnnnnnnnnnnnnnnnnnnnnnnnnnnnnnnnnnnnnnnnnnnnnnnnnnnnnnnnnnnnnnnnnnnnnnnnnnnnnnnnnnnnnnnnnnnnnnnnnnnnnnnnnnnnnnnnnnnnnnnnnnnnnnnnnnnnnnnnnnnnnnnnnnnnnnnnnnncaagcactttctgaattttagtctggtccaatagacagtttaatggaatcagaaaagcgagagactaaatgacctattaaattaagtgtatctattaactgttccctggggcagtgttcrgtttgattcaaaatgacttcacttccctcggggagcggggagagagggagagcatttccattaatgacttcttattccacggaacaaagctctccaatagaatcagctgatcagcttcctctgttggcatcctggctcaggcagggacttgccatatatttgcttttgtctcagaatgggg

SEQ ID NO: 67 - DNA, 600 bp, Bovine  MMBT00583
gggaaaaggttatttgaatcacctttcaaaataacctacagcacaggagcagcatgcaaagcaaaaacttccaggctattgttagcattatttaaaatatatgtttcagagcttagcagtttatgggtcagcttaactctttcatttccccattctgtctaacctattgagcatatttaaaggtcctcttcaagtatccaccactagaagcggggaaggaagctctctatgtacaggatatggaataaaaacattccaaattacatcttgtcagcataagttttgtttgagccccasaarcttttctgctgttagggcattttggtccaagtttcccctaagtcagttacacttcacttcctctcctaaacttcttataaatcacattatacttctcagccatctctctgtgcactgagtatagtacaagataaacagacaagaacccaaatcattcaatttggatctgctggtggccttttaaaacatactgtctatccactaattgcccaataatgacttgatgtttattttcataaaatgcaacgttcaaaaatcttcagaaaccatacagtgaaggcagctgtttcacattacatg

SEQ ID NO: 68 - DNA, 600 bp, Bovine  MMBT01628
tagctccctaggttccaggatctcaatagaaaataacatcaacagttagtgaaattgtaggtgttaacataccatggaaaacagagcttgtgcaaatattaacacccaggacttctgtatagatgatttttattataaacaataaaatatatgtaatgtctgaactacaaacctttcgtgttgaaatggtctctaacatgagttgctttaatattatgaagcgaaaaagtttaagaatctcacagtggaaacaatccaacactgataaactctagtgatcaaagacattctcttttaatraagaacaaggacaattcgaaattacagaatgtcctagctgtgggtattatgagacaagccaactttccagaccgaaaggcactcacagctagggatgaaacgaactccgaaccaaaccagccacagtgggctggtcccttaaaaacagtggttactgttcagcttgagcagtccaaggacaaaggaaacactgagcagaaaacattcccttctctttaaacctaccactcacactacatatactggccaccctcatcactgctttggtcaagcaacatggaaggcaggtcagttccagtt

SEQ ID NO: 69 - DNA, 600 bp, Bovine  MMBT01205
gaaatgatagtatttggatactatttagttgattaaaatatattattttaaatrattttacctgtttactttttaaaatgtggttttagaaatattaaaattggatatgtggtttacattatgtatctgttgaattattttgtcctgagatcagttaggagacttaggaaaattcaggtgagacatcaggaggatcttgaatcagggttgtggcaacagggtatggtgggtaaatctgagaactgtctaggagataaaactgataggatttggcatttgggtaagagaggtggcaaactrgttgtaaagagaaaaagggagcctccaagtacttaaaatataggaaatggtattgtaatactaggtggcaagtgaggcacaggttgttatataattttgagtgtgtaatgtttcttaacaccctccagtttgatgtctttgaaatttatttgcatgttttctttaagattaaacttatttctgtttaaaagaataaacactttaattacatgtgaaggttactgagatccatctttaaagttgaagccctaaagtatctgatgaatgttaaacatttaatactttttcctattgaccttc

SEQ ID NO: 70 - DNA, 600 bp, Bovine  MMBT01734
agataaacacgagtctatttttcatcctcctttgcagtccttactcaatcaaaacttaacttttgagttcctactgtctaacagtaagcaagacaggcatgattcctacattcataaagctttcaaacattaaatgaataaccacctagaggaatatatgattacaacttttgattagtacaatcaaggaaaattttgctaagagacgaatggagatgggtgtttatatggaaagagggatcaggcaaagcatttttagggagaagtacagctgggggaggctgacacagaactggttarcctgrgattgggactatttcaggaagagggatgaatatctgcaaaatccttgaggcaagaaggagcttggtttatatgaaaaccagaaggaaggccactgtggttggaacctggtgagggagagggggagaggtatgagatgtagctagaaatctggacagaggataaatcccaagattctgcagaccatgctgaggatgtggggttttattttaaatacattagggaggcattggaagattttagggagagtgacatgattaccagatattaagcacacaaagaagttagaaaatagaa

SEQ ID NO: 71 - DNA, 440 bp, Bovine  MMBT01518
gtcccaatcccaagatgttattgacttacacgagaggaaacgcgcccacaaacaagataatcacacagagttaataattttcccagaggcccactgccgctgtgctctgagggttcaaacattacctggacgggaggatcttacaaaatgttgacagcggagtctgcaatagatgctgggaagtggtggagactgcccacccccacccggctgccccaggctgctctgcctccctgcacaacgcagcccccagcccatctttgccacttactcttctttccttccctcttccttctttcrctttattttgggtaaaacaaaaattacgacaatagctaacatgttgagaactttcctatgccagacctcccgcatagtttcattcaagcttcaatacagcaatactggggcttaccctggggctcagggtagggagttca

SEQ ID NO: 72 - DNA, 600 bp, Bovine  MMBT01791
gagttctgacttcaaggccagagaactttctggagttggacactgatatatcacagtgtgaccataggttggaaaaccgtggttgaagtttgtcaaccttacatgtaaagtagattaaatgggttctacatagtatttgcaaggtctttcccatggaatagcagatacatttagtatatgacattcatcctggatactcagaaacgttataagatttagctcatgaagcctaccctgacccccagagccaggaatcatgtctctcgtcctcagaacaccgagagctctttgactgaactraaacacttcctacggcatttatattgtgtggtctgtccattcttttcccttaggaccacmtcgcatctccctactagtttgtacatttcttggcagcatgggctatgtctttttcatggtggtatcacccactgtgtctagcctaacacacagcaggttcccaaaaggtttactttatagatttgtgaaccccacaagtggttacctgagaatgtatctgcccatggtcctttgtaaaaacaggagaagcagtgtgatccaaagagccggtgtggaggagattgttgatgtggaagggcc

SEQ ID NO: 73 - DNA, 600 bp, Bovine  MMBT01313
tttttggattatcttggcttgcatctcctgttgcatctcctctgtttatcagtcttctttaaataggggtagctttatctggtactgagggtaaattcgtcactcagccctgttgaccttggcttccttccaaaagcagactggctctcygactgttgccattggtttgtaatctctgtttacctctttggcttcttggatgactagaggggtatgacctggattagtaggcagttgagtgtctcagtttggttatgttgcctcagaatatttttcacacgagtctgatgaattatgatraattatctaccatgggggcatgtgtagccatgggaggagttctcctgtgagatttgaactatctctccacagacaagaagktcactctggttgccagctagcactctgtggcacacggggttttggtatgatgagtcatcttctgtttatttctgttgaaataacttcaatccacagttgcacagttgacttttaggctgtcctctctttcctatgtgaaaggttcctatatgaaaggatgatgcttggtccttcatgactctttcactaaaacacttcacctaaggctcagagagaaaa

SEQ ID NO: 74 - DNA, 600 bp, Bovine  MMBT01637
aacacctctagattttgtaattctcaatttcttggtttgatagtaatttgtaaaagttatctgcctttatttagtctttccaggatcttcccaacccaggaatcgaaccaaggtctcctacattgcagatggattcttcaccatatgagccacmagggaggcctaaagtatctgacttagttgttcttaaaatatctcagtatcttccttttctacattcctgtttggatcatttatgtaaagattaaattaggtaattaaattaagtacagtttggaaatgttccccagctgactttgrtaaagayttagcttttggtaggaacagagatgagctgcaggagaagttggctcctggtcatggagtgagggggtccttctgtggagctaaagctggaatgcagatttagattttccaggggtctttaaattaggtcagctatagggtcctgctgtattacatgttactagttggagttgcctaattgaaatttttaaaatttcaaggctgtgattatgaatgctacagttcaccagttatgtagtttaaatattacattaaaaaaagaaaatccttgcttctagtgttattgtctgacct

SEQ ID NO: 75 - DNA, 600 bp, Bovine  MMBT01631
gacccagggattgaacccgggtctcccgcattgtaggcagacgctttactgtctgagccaccagggaagtcttaagtcctactcaaggtaggtagagggggaaattttttaaaaggtttaggaaatagtccttggcattaacacagttccagaaatgttttttattcccataagccaaactggcaagtttatagtttagggtaattgtgtagaaaactcagtagcagggattaattaaccctagatgggaataccaattgggacctgcatagcaaatcataaaagcaacactcaagaaaracaaactatttctgagtaattaaactgcatcctgggcataattcacaaatatttatgtgagtacaaaaatactcagcacccagcaagttaaaattcacratgtctgtcattaaaacaaagattaccaggcatacaaagaagcaggaaaacatgacctgtaacaaggaaaataattaatcaatcaaaaccagcctgcaactgacacagatgttagaattagcaaacaagtacatttaaacagttatagttattctgtatgttcaaacagttaaacagggaaatggaagacataagaaagac

SEQ ID NO: 76 - DNA, 600 bp, Bovine  MMBT01474
catgctcagggttagagttcaaggagagttagggatgctgcctcaaggctgtgtctctaggttctccaatgctccttctgtttttccttgctcagcctcgtgagcagagtgaattaatccccttaggccctccagtgaatctagctcccctacaggcatggtcatccattctttccctagagtgttttagagaggaagaggcctccatatgaatgatttcttctttactccgccatggcaatgcagacttggaggaaatgttaaattacctttttgtatgctccttgaatttttaacagrtcatctttgaattatcttaaaaaataaaagcaacatggttttcctgattgtaaaattaaaccttgttcatgaagaacatagacacaaaaatgcaaatcacccacgactccaccatgcaaaagtaacacctgttaacatttgaatttctctttttatgactatttcattacattaytgargtaagattctaggtaatttggtaggttatttttttccattgatattaatggaaaacatgaataatattttctcatgttattaacactcttcagtaacataatggtagtggcttcctcttaa

SEQ ID NO: 77 - DNA, 600 bp, Bovine  MMBT01770
accaaaacccttatgtcttcaataacatacaatacaactccatggtgactttaaaatttttgtttgactttattatttatttattgttttaataatgcagtttccctggttgtggcatgtctggatcttttttctctcttgtgctaaaagcaaatggtttacatgccagtttgtggtggatgtagttggggatctccattaatgaaactatttctttagtttctgttcattctaatctgcaaacacaatgctcaggaaatgtaggaaaatgagctccttctattagggctgccatatacrattgtgcaagttgtggactgtacaacttacacaactgtacacagcaactctgtgctgcaatcgtcaatagggccccgtgctccagtctttcatccgtgcaaaaataagctgactgaaagagtgggatgtaaaggaatcttatgaaatcctgtgcttttcttcccccacacatgaggcaaagtttatcattcattatgtaattttaggttccagtctttattatggaataaacaacatttagggggttgagaaaaaaaagtacagtgaaataaaatttgaataaaattttgaagtgaaagt

SEQ ID NO: 78 - DNA, 600 bp, Bovine  MMBT01502
aaaggccctgatgctggggaagattgaaggccaaaggagaagggggtggcagaggatgatggttagatagtatcactgactcaagggacatgaacttgagcataaactccaggagacagtgacagacaagggaaacctggcatggtacactccatggagtcacaaagagttggatgtgacttagcaactgagtaacaacaacaaaggttgactttggtgggtgcaattgttttactagttgactgcttwacagaaggttatttgcatgtgttaacagataacttccggagacaaggctarggttaaaagaaggatgccattccaggttctgtgtcagsctgtggggctgtgtgtgagtggctgtggttgtgagaagccctttaaaacactgttcatatcatayccttcaggccacagcctcctgtagagctcatgtcagcccttggagtatatttcagggtgacagtcttttctgcccatgctactggacttggaatgagagagtagatgaaatgtaaattcagatacrtgtgggaatgagcagttgcttcttttgaatagactggcatggagttgaagatacaggtgacaggccaggga

SEQ ID NO: 79 - DNA, 600 bp, Bovine  MMBT01477
aatttactgagccactataataagataaccagatggagaagctaatgggctgagacaacgacagttaaatattatttgccaacatcagtacagtggaagtggagtatattataggccagtacttaccttttaattaaaataatactgttttcagcattattttaatatagcagttaggcagcagggactcagactattagtcttattatttttttaagcctcttttgggatgactaagcaaagtcagacaacctgaatgtcatagtattttgatccagctgttcaaagtctattttgttrcttgtttgatcctattaagttaatattttaaagaatatgaaacagtatagcaatattcacaaagatcaaaaatcttagaattgaaaataaaatttttaaggattcatttagcacccatctctacattctttgagaactttccaagagttattcaataaatcattgaaatttaaaatatcctcttaagtttctgtttttaagtacttctaatctgtttggagaaggcaatggcaccccactccagtactcttgcctggaaaatcccatggatgggaggagcctggtgggctgcagtccata

SEQ ID NO: 80 - DNA, 598 bp, Bovine  MMBT01746
  misc_feature (1)..(31): n is a, c, g, or t
nnnnnnnnnnnnnnnnnnnnnnnnnnnnnnnactcgagtttctccctgggccgggaagatcccctggagaaggaaatagcagcccactccagtatgcttgcctagaaaattccatggacagaggagcctggcgggctacagaccatgggttcgcaagagtcggacatgacttagtgactaaaccaccaccattttttaccctatcaacaaatttcctgtccagggactggacatctaatttatcaattaaaaaaaaaaaaagaccacagtactcaagcagcatgcaaatttaataggagrgaatcacgtccccagctccatgataaggaaaaatacatttatctctcaagagcaccagcttcactgagggtttttctggaagaactgatcatgggaaacttgggaggaggcagatcttgtgcttccagtgtaattgaaaggcaggaggcaggggtgtgtatgtggaaagtttcaggagaagggctggaggcaatagtgtaagaactcactgtgaatctactatagagagaatgtcacttacaggcttgagattagaacagataagtggagtgagtcctgctaatggagagctttgaag

SEQ ID NO: 81 - DNA, 601 bp, Bovine  MMBT01373
  misc_feature (1)..(1): n is a, c, g, or t
ngtcttaaaatgtggacagagttggatacttcacagatgttagagatgaagttagtaatttatttaatgattgaaaagaagcatgtttataattatgtgtttgatattattaaatcacatcaaaatatgagaaggaggaattacctctaattaaataaagttggttttataaagttcaggatattatgttctagtttatgttttgggaacattttatcctacacctgtacaatggtagatgttctattttttttaatcaactttattacttaagaagttcacaacaaaactgagcagaagrtccagagacttcccatatatccttctccgtaaacttgcataaggtcccccaatattaacatcgcccaccacagtggtacatttgttaaaattgttaaacctacattgatacttcatgatcacccaaagtctgcagcttacattaggattcactcttggtattgtacattctgtgggtttagacaaatgtgtaatgacatgtatctaccagtgtagaactatccagcctctttctaagctatgtcagttcatctcaccctcacctctaatcctcggcaaccactgacagttttattgtctc

SEQ ID NO: 82 - DNA, 600 bp, Bovine  MMBT01489
caactgtgcaagaatctgccctgtgtctgacttcagcaaaattctgaagtttctgttttttttttttaagtttatgcttaataaagaagtgtgctgatayarttctaagcttccagtgatggacttggccttcctccacacctggatgatcctgctttagtaaagctgttcaagtaagaggctgatcgagcactttcaagggatggccagagtgagtcactcccctacgtggaagtttactggataacttgaataggcatccagcttctaaccagaaaggagggtttcttgtaaatgggrtaacagatgtaatatgagcaaagtcccaaggagtttcccraagaaacttgaatgctttctgggaaagaaaggccattttttggtcacattctcttagcttctaatgcctctgtattttgatgtgtcacaagtgactcagcttctagggagatgaaaccagcttagaggagccactaaaacatccatgagcaaatagacttgggtgcaagactgaaaacgcagagtatgtgagagaacggggctggatagatagagcctgtgcatatagtcttggggagaacgtcccccgacacagtggat

SEQ ID NO: 83 - DNA, 600 bp, Bovine  MMBT01348
gtagagtcaggccttgatctaggttccttgtctccaaattgttggctctttgctcatatctgtgcttttggctctaaaaatcttaaggatggttttaaaaattagatgtgattaaaaggtaaaaatatacagaaataaatgttttactgttattgtcatcaacaaatgggcttcctccagtgtgcagcaatgcatttttttctgagtccttgaaacagaaaagctgcggcttcttgcattagacgaagcttgcacgtggatggcaaactacagcaatgtctaccgatgccgggtgtggarcattcgtgcttcaaaagttcatttgtggttgtttagaatggaggcytcattttcacaaacgagtaatgttataaatggtggctagattcttgagttatctcacaaggctgtttaattaacaatgtcttagagtacatttctagtttatcaggtggctgaagtaatgcatatattatgccagccactgcaacataatcatcaakttcttgatcaattaaggagtgtttactttgagccctgagaactgtctcctgacagcagtactgaatctgtcactataggttctagagtatgtaggag

SEQ ID NO: 84 - DNA, 600 bp, Bovine  MMBT01160
taaraaatgatgactagcagatctggggtgttcaagccctgcacattattaagaaaagtctggcccttgacccgtttctaggagacagcttctaagccttggaatatgttgcctcrtaacagtatccttrtttaacctgggccttaatgcatatcatataatttttgatgacagtgtgatctatggtgggagtcttaggccatgaaaaaccagtttgacttcaggtgtgactggagactgaatacctaagatcagccaggtatatctgattacttatctacaatcagtaaaatccctggrgactaacacttggataaacttcgctggttggctayattccatgtgtgttggtatgcgtcactgtttgaatcattaagtactattcacatgattccagtgggagatgaccactgaaagcttgtgcctggtctctcctggactctacccatatgcctttttcttttgctgattttgatctgtatcatttcactgtaataaaccataaccaataggtgtaataacttttctgagttctwtgaatctttctaktgarcaattgaatgtgagggggtcttgaaggccctgarcacactgtgttat

SEQ ID NO: 85 - DNA, 600 bp, Bovine  MMBT00618
cagtcagaggccacatctgtctaactgcttgcaagagccttttcagctccacgttaatccattccattcttcrtttattaaaggcttcagttggaatgagccaggcctaaagatttacctttggagaagagagatgaagtcctggtaagacttctaggtgtacgtgaatctgcttgtcgaggctgagctgtctctgtccatgtgtggttggtatttccagaaatgactgaattcttttcttcccatttagaagtttaactgtttgtctgtggtctcctgttaagatttaaaagccagatrtttctgctgcttctcatctctctaggtcacttttctgttgcaaagccatttttctcatcaggtggtgcaaatctccataaagtgtcctaccttgctccgtagaatgtctgtgcagtaaaaatgccggtgccttgcatatgcatagcatttcgtagttcttaaagcatttttgcatatattacctcattatgtaatgtcgttctgggctgtcacttttcccctgactgttctgtatttactcacctttttcaccaacttgaatacttttctttcttctcctaccaattttgaggatattac

SEQ ID NO: 86 - DNA, 465 bp, Bovine  MMBT00609
aggcgttaggtagatgtgcaataaatatttgagagcagaataaactcatttgagatgcttgactacgatgggaatgtaagctaggataataactggaggcagacgtggaatctgggtttgtttatttttgcttttgttttattttaagatggaagtgaatagggcatggattgagcagcaggaaactatccctctgtggattctatgaaggcgcttccaccttaactgtgaagttcttgggggtagaagtcatttgtgtttttcattatcatgtcccttagtgcctagtaaagtgtctcrtgcagagtaaacatttaaaattgttgtgagggacatccccggtggtctgatagctcagactccgcactcccaatgcaaggggcccgtgtttgatccctggtgctagtgataaagaacctgcctgccaatgcaggagacacaagagatgcgggtggatcccggatc

SEQ ID NO: 87 - DNA, 600 bp, Bovine  MMBT00573
aagccgagaggaaagggaaggaggagaaaaagggaaagagggagagatttctccaaagcaatgaaaacaactcattgcagactgaatgtcaaaaatggaaatagttaatagtaatgtatgcacttagcatatatgaagagcagtacctactatacagctaacacttaacatgtgttaattcctttccttaagaacaaagagcatagtagaaaaatgccgtctcaagttttggattttaaagaagttaaagtgtgatgacattagaacagatacccaacagcaacgatgacaaaaactctrtatctccttcttgaaaaaatactccgcaagtgaaaaaaaacagaatggggctgactataaagctattgatcagtcctctgtttcaaacaaaaagaggaacacattatctcacttctccaatatgtttaaacacagaaacacaaattcacraattattaactgcacaatcatttactgttttattagtctacagcaataaggtagaacatcttttgtatcttctaamagtcagaaagattcaaggcacttcaaatttcaggtggcttgtgtacagttcccctgcaaaaacactctcccaac

SEQ ID NO: 88 - DNA, 600 bp, Bovine  MMBT00509
gatttaatgtgctatcctattacccacagacacagaaatcgtaaaagcttcaatacaccttgcccgtaaatagttggtcctgtgcagtttcagtgcccatttactctctctgaaaaaaaatcctatcagtgagttttccattccctcacctgactcagcttccagtggaactctgcaggtttgtatttcttctcttctgaaggatcctgacggaggaggaaaaccagccggcagccgtggacatagagtgagtaatggtgtcggttcatctctgcagagagaaattctactggtaaaccrccagcttaactcactactcaccagacagcttttgcagaaactaacacctgtgcccagccatttttattctggctggccaaaaattaattctgttatttcacgaacactttgtgggttattacattcaatagttacacctgacacatctgtaaatcttctccagcaccgttgartttcattttcactttctacatgagaattaatcactaaggttttttgtctgttagttgaatattcacatcatctgaagtataactatattctgaagaactaccatcttatgagaytccagtatacatg

SEQ ID NO: 89 - DNA, 600 bp, Bovine  MMBT01284
tcttaggcaattaagcccaaataagatgaccatttgaagcataatgcacagattgatttgaagaggactcagaaaagctggtcccagagtggactctgccaacaggtatctacaggacctgrgacaaatcacttttcccatctgaacttcagtttctgtatatgaagataaatatgataattacccagcttatttctggattctaaagtaataacaaatgtgatattttggaaaaaatgtaaatataagtaattttgagtgtcttattttggcaattattaaggaaatacagaatatcaracttcatattcattttcttgccaaagtcaagacttttatggagtaaaagttgaaaaatattagacacatatcagtctattttccaaaaccatgcaaagtaacttttcaatttaattattattcatgcccaagaaacacttgccttaattatccaagttgtgatctggctgtaatcagcagaatttttctccatagagttgccatttattggcctaggataggtctgttatgggtctcgacttggagataaatatgttacctccatcaagatatttaccctagaagagagttttgcttctc

SEQ ID NO: 90 - DNA, 600 bp, Bovine  MMBT02148
catgtggctgtttggaaggacacctggtgtggccgagtgcttgttccagtcgctgcccctgctcactcaatcatttaattactcctctgacacttcctgctcccaggagggatttgcaggggtttaggaggctggcgagctacaagcccagcttagcctgagtcctggctggggtgggagctgaggggtggccacagaatccgggctcaagtcacggctcagctgcaggcaaactcctgaccctggatgagttagttaaccctgctgtgcctcagtgtccactccgggaaaaagggaatkcggctgcctgtgtcctcactcgggacaagggaggtcacaagatcttgtctgtccctcctggtctggaactcagtccagccagccctctgcccgagtcctggcttctcctccctcaggggctacatcatcatgtagtcttccctgactgtaccccctcccrtgggtctaacttttggagaatcccagtcacycttccttcaggcccctgctttttttttttttttaattttaattggaagctaattactttacaatattgtggtggtttttgccatayattcacatgaaccagccatgggt

SEQ ID NO: 91 - DNA, 600 bp, Bovine  MMBT01087
ttatagaggaaaatgatttgcaccttagagttctaaaccattcgaattatcaaccatgcatgattacagaataaagsaaggtctcaaaagttttccttcttaaaatttctttctcagggagcttctaaagctatgattgccaaagcaacatcagcatcttttagagatttgtttagaaatacaggttctgagacttcaccccaactctactgaagtagaaactcaggggctggcacaggagtggaggggtgggaaagactccagggagaggagagtttacaacctgtatcctatcaaackttgagcacaagccaaagcctgagaagcactttaccagtggatgtactccttccaaaataaggagtaaaccaaggaagaggaaacataagccccaagacacaaaacacaagtactccagagcagaagaacagaggctacaggagagctattacaaattaacatttacaacacatctgttactgttctaaaagttagccatttcttatgttcatatcaccccaacatcctcttaaaccttatgaaaagtgtgaaagtgttagtagctcagtcatgtctgactctktgcgaccccatggactg

SEQ ID NO: 92 - DNA, 601 bp, Bovine  MMBT02129
  misc_feature (1)..(1): n is a, c, g, or t
nagagcytcagaccscagcacagcttgaaaattcttgagcaggccggatgggaaatgctgagagtcccaagtcaggaggcaatgcctgctctggtccgctcctcccaggagggcacaggctgccatcaaccccggtgggtccagagatgaaagagctggaagccatgggtcaactgtgctctttgaaacaggctcttatagtgagtgtgctcaattattaaattagattcttcagagccaagtaaatcccaggtataggaaaaatgaaaaagagtaaggaagagctttggtaataccctckttggccctgcagtgaactgcacttgtgcagtcacaaatatgyaaagttattaacttaaatgaaagtaatgatgcaagtgtacagggagggtagaagagagagagtcagygagctgagggcatgacctcttagcatatacagtcactagataatttccaatactgataaatgaacaaagcatataaacatatttttaaataattgccaggaaaaaagcatctgaaagggttaaaagtggctaagtgacaggtaggaggtgtggggggagggtagtgaaggaatgggactagacaccactgt

SEQ ID NO: 93 - DNA, 600 bp, Bovine  MMBT01686
acagtttttctgtgacagattatttaactctgagtcaaaattatgccttgtgagaggtgtaaataagggcatatggaaattttgtgggaaaccaactaatgcttgtaaatgtttgtgacttagagcctgtgccgggatcagcttcactttataggacttcttggtcaggaagctcagatccctttattctctcaccaaatgttgtagaagaaatgcctttgggaaatggccctatttttggcaacttcctgaagcaagtgaatatactcttttaaagaagaaataaaccttgcattcggkgtatgttttttcattgaaatacatttcatatgtatcagatggcaaattcagattctgttgacttaatgaggaatcttcagatatttattcaaaaatatgtgtccattttttaaaaagttcactaatgaaatttcagctatttcaataccctagctccatacattctctagtggaaatgccactctccctttttccactaaatcaactctattattgaaacactgctactgaattacctccattttccatttactgaagttttcctaattgtctcattccttaacaacctctaattattag

SEQ ID NO: 94 - DNA, 600 bp, Bovine  MMBT00745
gttcgtggtatctgactttctcctcctagcttaacatttctttttggatgactgtctattttaagaaaatgtttactctttcagattccacctcttccccctcaccctcctygagatggtgcttggaggggatatgagaagctgatmgtgatgggggagyggagcacccatatacagctttgagctgagacacccatttccacttgygtctgcgttttcactttggtccctaccattaccaagtgtgcaagtgatgtaaggagccctacctggagaagagcacccactgcagctgagggmtgaccctactacttctgactgccacctcccacttattcagtcacactgagagcttctcttagacacctatacccagtacgaaaattgccaaaaccagaaattttatacttccacatgycaaagaaaaagatttgtgaaagcytgtgaaaaattatttatgcataggttcagttttgtagaatagtcaagacattgagcggaatcattttgtattctttatttgaagaatataatagttctatgaagttgggaaagatcaaatatttatgaaaataaggcaaggctttaatatctactgac

SEQ ID NO: 95 - DNA, 600 bp, Bovine  MMBT02382
ttgagtgagattgttcagtcagtcttttacctaacaaattcaacttggtaagcatttagtgagcacctactatgcctcaaaaattattttgggcacagaagatgaaaactgtccctgctatcagggagctagatgggaagaaccgcagaaacagaaccatcccatagtgataatttatgacacagacaggcttacagatcgatgagaacactgaggcaagaccgcttagcttttcaggctgcccgtggaaggtttccctgtaagatgacacctggaggacaggtaaaaattgatggccarggtttggcatctctgaagaatgccatccagcctctaccagaatatctccagagcccagaagcagagttcaggagaggagggaactcaggatctcattattgtgttgaaccaagatctccttctgcccttttctcctgcttctgctctctggagaaacaaaacaaatctgttcccgctttttggaagctttaacatatttgaaaatgttcgtcataggcctcttttcctttatccagaaagtgttgagattgtgaaagttatttctgcagtcccctctaaaacttcaataactacttctct

SEQ ID NO: 96 - DNA, 600 bp, Bovine  MMBT02540
cctattgggttatcaagcctggagtgggtgggggtggggatcaaatctccattaagaagcaacacattcacagcatgcagccttcatcttagaggtgagcactgagaagctgtggatgggattcgacaagcactgcttcctgatcagctggggcccttcacttatgcacatgtgagaggtacttaatctattactaagaaatagatgtttctgatcaagggaagaaaccacctgaggctatctcctgtcaccaataactttccattgagagttcaaagcagggcctcctgagagaccccraggcatcatttaaaatggatgagaccttgctattcagataaaagctctcttctttatcctcagtcacctaactatctgggcttcccaggtggcactagtggtaaagaacctgcccaccggtgcaggagacatgaaagacatgggtctgatccctgggtcgggaagatcccctggaggagggcatggcaacccacttcagtattcttgcctggagaatcccacggacagaggagcctggcgggctgcagtccacrgggttgcaaagagtcagacacgaccgaagtgactttgcacgcacgc

SEQ ID NO: 97 - DNA, 600 bp, Bovine  MMBT02776
tttatgtctgctacttttgttcctatggcatgtcaacrtgatgctgctgctgctactgctgctaagtcacttcagtcgtgtccaactctgtgcgaccccatagacagcagcccactaggctcctctgtccctgggattctccaggcaagaatactggagtgggttgccatttccttctccacagtatgatgctacaaaactaaaattcaaggaggttttaaatttgggagccaaggagaaatattcacaggctaactgctctcttttctatgttgtccaatgaaaacagataggttaacrttcccagtattttacattaaaagatcattgtttggacacagccagctacctgatattaaaacattcttctctgtttgccttcaaaattaagaagaggataaagatgtaaactattcagaaaagtacggatagaattatataatcaatttgttggaacttcagaggccagttaaatttttgcatcttttatgcttaaccatgcattctaagttgcctctacctctgatacctaacccctgaaagttataagctattttcattaggcatttgccatgaccctgccaacatctctacttaaaa

SEQ ID NO: 98 - DNA, 600 bp, Bovine  MMBT01568
aataagttttttcatatcaggaaggcctcttattctggagagactaacaaaacatactcagtgaggctgagggcaaaaatttttattcaagctttcccctttttaggtgtgacaactaccaaactgcgagaacaccagtggcttgacactctcgttgcaccagggtgcaaggcttttagtacatgtgttttgggggttcttcacctgggcctcaacaacctctaatcttactcctgaagacatgatgatgcattgcagaagtcctttaggactgccctcagagtctgtgcctgtaattcytactcctgaaaacatgatgacgcattgcagagtctgtgcctgttaccttggattgtaatccagttagaattcacagtcctcagaatcatggaggatcttctggcaagtcgatgcaaaatacatttaggtaatggctctgctgttttgatgctggcgtgctattcaggtgagatgcaattagtgtgcttacttctccctgcgatgagaactattaatggcagaatccagtcattaagaaggaatattatgggaattttgaagtgattttctatggctgtttttcactccgactttgcacat

SEQ ID NO: 99 - DNA, 600 bp, Bovine  MMBT02443
gttgagggggaccaggacagcatctggtctagggctctctctacctaacaggctttcccaggactgaggcaagcctctcttgagtattcctctcagtrccccagaagtaagaggttttccagtcatgttggtgggaacaggaactattctcaattctrttatgagctctgaggattgttccttttgatcatttcaagtggttctctcctggccttgagtaatttcttcacaagcatatgccagtcattactcaagggagctctcacggggagctcggcaagtctccagctcactttctcygtgcagccctcttttctggtaccctgccctrtgaagtctaaccaccttggcctccctggacttgcagctccatctcctcaattcagagagaacgctgggggccgcctgggtccccctccctggacgatccccacacgggagacaatcttacagatcaccacctgtttcctctctttcaagcattatggtctttctttccttgggyttttgrttgkttttttttttacctttctaatcactgacctatttatttattttttgaactctttattgttggagtatagccaattaacaatgttg

SEQ ID NO: 100 - DNA, 600 bp, Bovine  MMBT01525
acaggcatgcgtgtggaagggaaatgacttttctgggtaactgagggttaactggaagcctgtgttcttctgccttgttgaatttttttttttttttttctacaaatgatgagcatttccccaactgagtattttgaaaagttccaccactttctaaatatgtgaccttggtcaagttacctaacctcagtaacctcagtttccttatctgtaaaaatgcaccgcgcgcygcctctctaggttgtgaaaggcactagaaagaggcgtgtgtgcttgaggtggaggcgccagcaccgtaaytgttctyagtgggtcagcggagcggccagattggctgaagctcttcgtgggtatttagcattatgctttggaatccaatgtgcgttttgtacacgttgacrtggagattagccagaattggcattcatctgcaatttctatcgcagctaagtcctcccaaagagatggttttttttatgatttgctgctttctcataaaakccagtgcctgcaacgcaccaaggactcttgttctgtcgggacctgaatgctgtctttatctgggaaatgtctacagataaagggcagggctagggctca

SEQ ID NO: 101 - DNA, 600 bp, Bovine  MMBT01763
ttttaaaaatctcattttaactagaggagagattggtacttccatctccgtatcttcaatggggaaggtgtaacttttgagagtttattcactcactaaccacaagttgtgggtttgttgtgagccagtcactgggtatggataggaatgcgatggaatacttactaccctccacagagctaaaacttgtctgagaataccaaggcaccttggaaataacattctttccttttcagagatgatgacctgccgtcctggatattttcagtgtgatagcgggcactgtatttctgaacataygaagtgcaatggggtggctgactgtcgcgacgcctctgatgaagccaattgtcgtaagtttctagacaattcgtatggttatggctgtttagacccattagccaccacttcttagattgaaaggtcatagatattttctattcagcattcattgataattatcaatttacatggggcttgagtcatcatgtctatatatttcacagtagtcattcaagtatatttcacaaataatatttcaaatattatatatagatagagaatatgttatgtctgtgctaatgaaagtatttatatatt

SEQ ID NO: 102 - DNA, 600 bp, Bovine  MMBT02133
tctttcaggaggttccacattttgacaaaaccccctgtgggctctgagattttcaaaatgtctttcctgagcagggctggctttaggtaggaggcctattcgcagaaaggccttgtgcttggtgtaatactctgctgtcactttcttgaaattcttaataatctttggacagggatctcatattttcatttttcactggtcccatatattatgtcagtgatcctggcttgttgggcaggggagggtctctctaactagattgagaggtcctggagggtaagaagtaggctacaccatgaytcaagctacagcctcctggagggtgtcctgtacttgcagcccaggccgctgggctcctggttcatcctaggttttcctccccaggctcttgagaggacctcagaccccagaggacaggctgcatcctcctcaacctccctgaggacaagccggggctcctcctggctgtgagagcctgcaggaggacacagaccttgccctggggcgttcacctcagacagagttattccaggagtggttttctggctcagggcggctgtgcccacgcaagctgggccaaggcatggagctggcctgtcc

SEQ ID NO: 103 - DNA, 598 bp, Bovine  MMBT02152
  misc_feature (1)..(71): n is a, c, g, or t
nnnnnnnnnnnnnnnnnnnnnnnnnnnnnnnnnnnnnnnnnnnnnnnnnnnnnnnnnnnnnnnnnnnnnnntgtgtcggtaaggagctggcccgccttcagtggacatttctcaagcacctgagtgggccaggcttggtgcttggctccagggaatggcgtgaatgaggcagagggtcctcatcctcatagaacctgcatgtcggtgtataggacagaaacagggaagcgatggggaagagctgggggagattgaggtgagcttgcctagggaggaggcggcctccaaggagtctgtacytgcttgacaagggcaagtgagtgtgcctctgtctccacgtagagccccacagagcactctcgagggggctccctgggcctgacctctgtctcgcctgatgtagcccaggtccccttcttccctctttccatgaactcccaggggctggcgttccgcagaggcacccaccagctctacagcacatcccacgaccgctctgtgaaggtgtggaatgtggcagagaactcctatgtggagacgctgtaagtgtgcccggggagagggcatgcacacgtgtgtgttcaggttcatgggtgac

SEQ ID NO: 104 - DNA, 600 bp, Bovine  MMBT01875
tgcaacatgaaatgtcaccaatttcaactaagtgtttatattattttcctatttgtaaagagttggggttttcttcctataatgtcagaagctacataacagacataaactacaaaattttattctaatgcttcagttggtagattctccattggacaagactcattagtgctgagagaggggactgagggatttgggaatggaaaggtcagttgacaccagggttcaccctaagcagagttccaagaatttagtcctgtcaaaagattcttgggtgcagaaacagaagaactgggtgayctggggcccagggaagggctgggctgatgaggcctgggtggagtttggggtagtaggggaggagggatgtctgtgtacaaaagataaggtgagtcggaatggtagatgcagaaaactacacagtgactggctttccttttccattttcatctacaattagctggaaggaggtgttcctccccaggggtggagatggggaagccttctttctgcattggtgtctttgttcctccatcccatttaaccatatcattagcctaaaattctgtggtttactctcatcaaaggtaccaacttctt

SEQ ID NO: 105 - DNA, 600 bp, Bovine  MMBT00790
tgcagaagttgaagtcagcatccrcytccactgtgttcaagggagtacrctctggagctctgagaattccagcattggtccagcctcttcacttttcttcccagagggccagcagattggcttgtaaatagacctcctaaaggcttactctgacatctcaggattcctgaggagggcaggtatgttggcaggatactcccagcatacataatcacagtattccctcaccagtgacctggcccttagggtttaaggtgctctgaaaacatggtgttttatgattccatcttcctctacttyatactcatggtccctgccagaatatctggaccacctgttagccatgaatggttcaaagccaagtttctggaaactttgccaatagccaggagaggccactctctttaaggagcagggataaaggtgggctgactcctgggtggtcctcctgcttcactctgagaggcagtgggaaggagaaggttggcttcagacacattcacaggtgcaaggaagagccagctctcagttactatggtaacaactagggctggagggaggttgtaaacctataaaactatcctcaaactttctttccac

SEQ ID NO: 106 - DNA, 600 bp, Bovine  MMBT00567
agctgagacatgaaagttgagtaggagttaacttgataaagatagtggggacgatgttcccagcaaagggactggcaggtctaaagaccctgattcagggacattagtgcctccaggacacttcagggaagcctggctggagcacagaggaggggaaggtgggaagatgagactccagttgacactttatggattttggactttatcgtggggttgaatgtagttcaaggctggaagctgggtggtagccaactggtgtaacaaactgacaggggtcagaatggattagggtcaagggtyaagactgagcagatgagaaagcagagcagtacgaggagccccatctagaaactctgggcagacacaggatagcctgtcaggtgtcatcttgcaaagggcagactttataaggaccaagctaagctgragaccagagtgaatttctcatattcattttcaaagtgaaaaaaatgagaaaaataaagatttggacaaggacatataacaaacgagatacagaactagattcacaacacctaccattaacttgctgcttatctcactgtattaattttctcaaggtgaataatctcagtacca

SEQ ID NO: 107 - DNA, 597 bp, Bovine  MMBT01453
  misc_feature (1)..(1): n is a, c, g, or t
nggtataaaggggtcctcacaaaaaatttgacggaggccaccccagattccctggtggctcagatggtaaagattccacctgcaatgcagggcacctgggttcaatcccttggttgggggggtcccttggaggagggcatggcaaccctctccagtattcttgcctggagaatccccatagacagaggagcctggggggctacagtccatggggttgcaaagagtcagacatgactgagtgactaagcacaacacagcaccccagattatcacctttgaagtacttctgcttcaggaggaygagacaggttgaaccctctccaccctcacttaccatcagggccagagatggagctaggaaaaggaccataaggatcgaaggcacaatctgaaatggaaacaaatgtcagtgtacagggctggctcccttagcctcagatgagcccagggcgtggggctcagagtgagccgagggttggaccctttttaaaagatctgtaactttcatagtgtctcttgccctagaggccccagatgcatcaggagactgtcattgccgtgtgttctatatgggatgtactggctgctcaagaagga

SEQ ID NO: 108 - DNA, 600 bp, Bovine  MMBT01519
caaacaccatgctgccagaggataagacacaatcgagccggaccgagcctgtctcaacactggtcacccaacttctcggaggcctacgtgtttcaggtgacaacatgtcccagggagaggtgacaggaggtgactttcaaaccgcaaaatgacatttggacttccattcaaatgaggggtggtggcatctaaagagagaaaggctcactccatctccaccagtttgcaaggccacgrccaccagcaggrcctggacgctggccacccacacagaaggcacgcaagagagctggggaagcygcgtccaggggaccgaggtgagtctgggtttgaggacagagactgggctttgcttcccgttggcaagmggcaaatacagatcactggtaccactccaaacgctaggcttctcgctgaatccgagtgcaaaatgacaatggtttccaagcgactcctggaaataaactgtgggtaaatagcatctacttaaagcctggaaacccagcttcctttggtttgtgtttttaaatgctttgacgatgtggtttgcttctctccaagaacaaaaagaaaaaaaaatagtaaataaaggctgacagc

SEQ ID NO: 109 - DNA, 600 bp, Bovine  MMBT00930
catttagaaaagtcattcaaaaccccctcctgtgggagtggtccacaggggctcttgaggtcagactgggaggaactccagcctccgacrcaggactctccctggggcttccttsatctccccatctgaggggtgtgcagcaagcccctttcctgctgaaagcattaaaactcacacactgtcaggaccagaagcgtggtggttcagaaagtaacagtgatggtggaaaggaaggtaagtggaccccaaccaggtgaccctccccagagcacccccagcatgcacacagccaagcagagyggaacatctggggccaaagtcatccgtaagaaagatggtatcttacctgtccgagaaaggggctcggaaagcaggtgggaaacaaacgagagagagacacgttttatgtagtgaccgaccacgtggggagtgtcatctcctgtctgggccaccagcaacaacacaccaagaggacatagcatgcaagacaggggccctgttatgaggcacgcaggacgaccgggtgcttgttaataaccagatcaaaacagagtcagattttaaaaactctcccaacaggctctgatgtagcctcttgta

SEQ ID NO: 110 - DNA, 600 bp, Bovine  MMBT01943
ggtggccaaagtattggagtttcagcttcaacatcagtccttccaatgactattcaggactgatctcctttagggtgcactggttggctctccttgccatcttactggatctcagtaagaaactcccctctgtgtctccttcaccaaagtggagtggggaattggaccaaggcagccaagagctggtctctggaggctgtccattccatccgcagggcacagtaccccgggctggctgagcccccagggggccaccagctgagtcactgatgcctcaagttttggccttgaccttggacycttgccctggggatctgctagtttagagagagagaattgggagtgtcccagcttctccacaaagtggtgcctgaaacctggatttctattcaaagcctggagaatgtgggctcccctgcccctccttccatggtgggttgggtggcctccaacacctcctcctggaagagctaggctgaggctmtctgttcccagtgaatcatcagtgactcaggagcccctggcccagagcaggtgctcagtaggtgaaggcatgaaggcacgcacagctgcctctcgttgggggtgtctgcacaaaac

SEQ ID NO: 111 - DNA, 600 bp, Bovine  MMBT00571
cctccctgtagccatctggggaggtattaaccccattttcttggggaagggggcagagggaggatctgtccttgcccaggtagctatctacaggttctttggaggcagtgttaggatcaggaccttggtaaaattatgtccttgttcataacctccagattttattttcggaaagcataaaactgtgcttattcgtgaaccttttagagagcctttctcagaatgggagtcaggcgtttctggtcagggagcttcatcagttgaggcctaagtgtttgggtgccagtggctcttccggtyccctcttgagctagacatctggatgtaacacaactgcagttgaatcaaaaaggaaacatttccaaattgattgacttagttttccttgacctttctactaggagtgaaattagagggtgaaacttaagggcttccctctgagaggtacgttgagttgtggcaggatttggggtgatccaagttaaaggtgaaatgcaagaccagatgctcttgaattcaatgagaaaggataatgttatcagaatactctcccatttctgtttctgttcccttccactaccttaagataattgtggccct

SEQ ID NO: 112 - DNA, 600 bp, Bovine  MMBT01135
tgtgaatagtgtttttggaatctaatatgtaagcctgaaataagtgagcctgttgaatagtgattaaaatgataaaagaacagaaattaagggagagagaacaaaagggccaccctgttctccagtcttgctttattcatatatttagttcttytgctttatatttttccaaaagactgagagattaagcagttcatttgtcttgatcctcaacattcagttttctttcccgtgttagtgtgataaggacctgcaatttttgaaaaatcggaaatcttcatatagtcagtgtgtcaaggyttccatcacccatactgagctgtaagggttgtactgctgagggtggctctgatccagtcccagaaatcaaagtagtcagaatgaaaggcaaagaactgactcacggcaaacactgaaaggcagatcccccgttaccaaaaaggggttgagtggtttaagacacagtgaaaagacaactggaacgagactaaaattttggacgaatccattttataatacatatcatttcctggactgaggaaaggttaacatgtattttactacattgctttgtaggtcaatcatttcagactcttaaac

SEQ ID NO: 113 - DNA, 598 bp, Bovine  MMBT00858
  misc_feature (1)..(8): n is a, c, g, or t
nnnnnnnngatctgaattcaagtttaaaacattctgtctttagaggtgaacctgctgtaaatgattaaaaaaatatatatatatatagcttcagtctttttgcttcctagagtttacataagtctaacatgttgagcctctaatgatagtgaaaagtcctcagtagattgagcagccttattttatttttactgctttcatagtttttcttttgatacttaccattttgtatagtagaagtggcagaagttaayggttttgagtgagctttagctcaaaatacttagctgcttttgttaycctagaagcagaggaagaccaaatggaaaaactgattccagccaatcttcaggggttttttgttttatggcatttgggggatgggattggcatttttcttaatttccctgaaattttaagcctttgaagcctaacagttatcacatgttatggctatctttttaaaaaagtaagttattgggtagcctggcccctccctatgacctacctctcagattttgaaatgtcttcctggtatagtgggaatggcaaaatcaatctgctgctcttcaattgatgtttaggaatgttctaagcc

SEQ ID NO: 114 - DNA, 600 bp, Bovine  MMBT01149
agagctgactcatttgaaaacactctgttgctggcaaagattgagggtggaaggagaaggggacgacagaggatgagatggttggatgccatcaccgactcaatggtcatgggtctgggtggactccaggagctggtgatagacagggaggcctggcatgctgaggttcatggggtcgcaaagagtaggacacaactgagcgactgaactgaactgattctaaattaaattaaactgaaaaaagcatgccttcaaatataaacctttgctttctttctccaaaaccgcaattctattcayctttaaatttaacccttgtatcaagttcagttccaaaaaaaaatcaattgcctccacagcctcaaaatgtacatagaggcattcattacaggcatgcctggctacctaagtgctatgagtcatgcttattttcaaagacaacactaagggaatgtcaatcaaaaaaactgtgaaaaagcatattaagaaaaacgttgaaagtgaaagtgaagttgctcagttgtgtccaactctgcaaccccatggactatagcctaccaggttccactgtccatgggattttccaggcaagaatactgg

SEQ ID NO: 115 - DNA, 600 bp, Bovine  MMBT00742
agaaacaaaaatcaataaagctgttttctttaaaagtgtttcataaccatcacaacagcaccagaaggactatatgtgagtatcattcatttttactattagaatttagatagagtgaaatgaaaaaacttcagaataattgatttataatttaaaatacatgtatgaggattttcatcccaccatttgtatcaaatgaacaagagaagtggtttccagtgtctagagaaataaaatggtttgtttttctcctatttgcmtatttttmttatactcggttttgcttgtttgttctaaaaygtgtgttttaacaattctgagaaagaggggacagaaaagatgacagtagtataaaattagaatattttcttaagttctttccctcagaaaataagtaaatgcaaaaaagagcgacagagaccctcctacatatctttcttttctggtttatatagcatttgcaaaatctgatccatagtcaaaggcacacttttcctttcagaaaattttcaaacgatacttcttgcttcaaacaatttaacaaacacatttctactaaaaatttgtttttaataytaaatacccatcatgaacccttta

SEQ ID NO: 116 - DNA, 600 bp, Bovine  MMBT01200
tagcaaggtacttcgtgttttaccatatgtaaaagtaaaatttatgacaatagcacaaaagatgggaaggataaattgagaatatattattacaaggtacttacatataaaatgccatcaaatcttgctgactaaatttttaagtagtttaataacccctacaatttttatgggacaaattaggcaataaatatcaaaactcttgtttaaaagtaagtaaataaaagtatatatttaaatgtagggcaataattctaagcctacttaaaactgtttgaaccaatgcatagataataagaycagaggctggggataaamatggaatattgaatgatactcaattaattcaaagaaggaagaaaaaattttaaacacaaaaatagaaaagagctacaaagatggtatattttaatacaacagtattatcaattacattaaatataattggtctaaatataccacttgcaagattgtcagagaaataaacaaatccacaattataaatgaagacttcaacattcactttgtattcaatttgcagtaattgatagagtaagtacagagaaaatcagtaaggatatggaaaatttgaaaaccact

SEQ ID NO: 117 - DNA, 560 bp, Bovine  MMBT01216
cattttcacatacaactaaatataaacaagtttgagattcacactactttttccccattttgtgtttagatctaattttattatttatttatttataggtaaaataaggaattcatgatggggcatgagaatcacactttcagcaatgacttcattcttttgacttcactctttacttcttctcaagcaagtctggtatttttctcttttatattcaccatttttgttttgactgtaacagaaaatacagtcatgattctcattatccacagggaattacgacatcatactccaatgtayttcttgcttagccatctctcttttatggatatcttgcatatttccaacattsttctcaaaatggttactgatttcccrtcaggcagcaaaactatttcatttgcagcttgtggmgtccagatatttctatcccttaccctcttgggtggtgagtgtcttctcctggcagcaatgtcctacaatcgctatgtagccatctgtcacccactgtgctaccccattcttatgaatgactatgtcagcgttctcaaggctggagg

SEQ ID NO: 118 - DNA, 600 bp, Bovine  MMBT01222
tgaaggcaagttcatttaaggtaagtaattattaaatagagatttaagtggttcaactccaaccttttgtcttggataaagcaaaatcatcagacttatacctgagttaaaagacaggcatcctaaaatcaggtacttatgtctaacaactagtggtataaaagaaattgacagcggtgaagctgcctatgctgttatctaaactgtcttcttgacctgtgatgtttatgtaaactataaatgaaggtattttaaattggaaataaaagtgggagaataatataccaggaagaataagaygatgcaagggactcaagtttccgggaaggagtactgatcacagtgggcactcaaagatgctgtatacaattaattttcctttttctcaacagtttctgaaatcctttagatacctctttgtttcgaagactgtagatgagagggttsagcatcggggtgaggatggtataaaaggctgataccaccttgtcctggtccggtgtgtgattagaagctggtctcatatacataaacatggcagctccatagtagagtccaaccacagacagatgtgaggagcagatggtgaaggccttgcgg

SEQ ID NO: 119 - DNA, 600 bp, Bovine  MMBT01301
gcaccagaaatcaatgcttctttcatgaaagtaatattattttgatgtgattataattaagttacacagaagagggggaaaggatctggaccgatcctttctactggctttttctaaccactcaaattcatttatcactagcagtccttagatttgttccaaaatagaatttaattttaaatgtggtccagggaatacagtaaagggtcattctaaagtaaatgtataggtacccactaaggaaacaattatgacaaattaaggtgatttaaataataatgataacaaaaacaaatataygaactactaacctttatggaacacttatcacatcctaggcactatgctaacatattcaagttgaaccayatgaaaatgacaatttcataaggtagggcctaatatattttytcatctaatccttacaactaccccaagagaagagtagttttccataattgcagataaggaaactaaaatttagaggacttaactttatttcctaaagaactaggaaataaaatggggactgaagcctaggtgcacatccaaagcccagggtctcattacctactgcacaatgtcagtaacctccatgtc

SEQ ID NO: 120 - DNA, 600 bp, Bovine  MMBT00784
ctccaggggatctttccaacccagggcctgaacctgcgtctcttgtgtctcttgcactagcaggtggacgttttaccgctgagccacccgggaagcccagtaacgactaattttgacttttggccttttaaatttagaagtaatgagagtttaaattctcagaaaaggctataatttaacttactaataactcctatcttgtaaatgtactttggggtttaaaatgttcacatttacaaagttgcaaatacagtacaaagaactcatgtatatctttaactagatttgccagttttcaayatcttgccatatttgctttatattctatctatatatgaatttttctctgaactatttgcccctttaacccttaatgcttaagtgtattatgtttactaagaaggatattctcttgaataagtactattattaaattcatgaaatgtaacactgatactttaatctataggctcaatttccattcctcccgttgtcatcataatcttcctcatagtgatggtgccactcgttacacagggatcacagatgtctttttagcctccttcaatctggaatggctcttaaacctttcttcgatga

SEQ ID NO: 121 - DNA, 600 bp, Bovine  MMBT00559
tgcaaacgatgtgactgacaggagattagtctccaaaatttacaaacatctcatgatttttaacaacatcaaaacaacccaatcaaaaaatggaccaaagacctaaactattgtgtatgttttaaagtatttatccagtgattgcacttgactgtttctcttgttggtaaaggcaggcgtttgcagtcaccaccacacttctgaatttctggtgtggtttgcggtccttatcattattttaaatgtctagttataatgaaggggacagacttcaagtagaggcagttttgagaggttcayggaattaatttgccctaaaatcagatacatgtctggtttgtaagacatggcatataaacattaacttttgatctctttgtattttaggtggtggcaaaaaaataccgcaacttcgatattccaaaaggaatgactggcatctggagatacctaactaatgcctacagtagggatgagttcaccaacacctgccccagtgataaggaggttgaaatagcatacagtgatgtagccaagagacttaccaaataaaagagcacttatgagagaagcgtcttcacatcttcccctgactaagaa

SEQ ID NO: 122 - DNA, 600 bp, Bovine  MMBT01400
tatattttatgtgattccaactcaacttctacaagtataaaagcaatataaccaaaaacatgccttttggcaaagaataaaatataaggagatgcaattccgccagatggcaaaatcccagactaacaatttgtcgacttattgatggacataactaagcccctaacttactaaactataatggaaatatagaagaattctgccattttgtagatttagctgcatcattgaccaaattgcatccccacaacatgacatcagatagagaaattctgaaaaatcacctttacctcaccacaytggtctcctgkgcatgctaatggcattcttactgatttctctgctttccatttttttcttctccaattccmtgtacatttcaaccatgttatgtttctaaaatatacatgagaggattaccgttaccttttttaaaattttgcaatggctccctccaatggagacagtccaagctccgatgtaaataaagcttttcatggttaagacccaaacctgacccactagctttatgtctattatttcaagcatggccttggccctaggatgacaccatcccgttctttgtttggtccacaaaca

SEQ ID NO: 123 - DNA, 600 bp, Bovine  MMBT00522
ttgyactctttggagaaaattgatggaccctctgtcctggaaggagcacaggttggtggttaaggagaggcccattcatttccctccatgacaggaggccaaccacaatggtagctgcaaccatgcttgctcctrttgctatgaacatttgggacactaaaataaattgactgcacaaaaagattctttactttccccaccacatcatcttaatggggaattcataccactttgagctgcatttactgccggaatggaataatggcttctaaaattactttagcacataatgaattgtayctaagtttactgggttatcggacaacattttggttctagtgaaggccattttccagaaggccttggactctgaatcaattattcattcattgaattcagagatgtgaatctttcctttagcttgaaatctccatctcttctgcttgaaaagcttcatttcttaaactcacaaacatgttctcataacaaaaactaagactgaaaaatgttacagatctcagaagtgggcaattaattcaaataaaatacaaaagagaggataaaaggagtgaaggcaaatgattgcagggtaataagggt

SEQ ID NO: 124 - DNA, 600 bp, Bovine  MMBT01421
tatagttgcaccctttgagaacttcacaactatgatgaggcaggactttatttgcacctcgaaaatgttttactactgttataaaggcaaaggcaaaagaaggggaaatatgtttaattaacaataattgaattttcataatactgtttaatcttctagatatgcttatgaagagatgggtattattattttttttctactacagatgaggaaaccagcctgagagaggtcaagcaatttgcctaaacttgaaatgattttaagtggttgggctgattcaaacctaggttagtagcctcygggccatttcaacaataaatamcattagagagactgcattaacatcctgcgaagtaagacgaccactaaggsactgaggagtgatgaaagcatatagcaatgggtcatgaatcaggaaaggcttccagaatgaggkaacagaaaatggaggaaaagcggrggaatgcagcactgaaaaacagaggatccagtaartggagcacattaataaagaaaagaaaagacatttgccattaagtctgtagaaatatttccagttggtttccagtctcctcatattttctatccagccaaacagca

SEQ ID NO: 125 - DNA, 600 bp, Bovine  MMBT00896
tgctttaacaatctgtaccctttcttcctctagttacattctagcctctggaagctccttcctggttgtatatacttcctagctacctcatcctcagtaggaacacttactcttcccaaactttgaaaccatggattcttcaggagttttatagatagaaaaatccttctgtcccttttctttcataaagaagccagagtcctagcagtctttaatggcttatggatttatgggcttctctactgcctcttaccctcctaccacatagaattctgrtgaacagatagttctaagtgtttygaattggcctaaaygtcagggagacatcagctgactgaggtgtattttgcagttttgacttcttctacctacaagtaaagctaagctaccaagttcagctgcttctttctcctkyaagctgctcaaggctgttagtggctgaaatagcaaaactcaacccatttcagggctttatgtaaagccagaggcaagttgagtcaggtgcatactagcccagttcagatcctgccagccgtaggactggttccctcccctgttggttccacgacccagcaatctggggccttggctaagctattt

SEQ ID NO: 126 - DNA, 600 bp, Bovine  MMBT00495
tactcccgcagccatgttcatctcaccggtgtttttgatgccatgtccattctatgaagggctctgcaatcataagagtgagtctgtgattgtcagttaaggagaggttaaatactgtttgaaaaacctttttcatctaatttatgctgtgcctttgaagacgaagaagggagaggagagaccataacatcttagaccagcagaggatgggggagggctgtagaatatcaattccaaccaattctattccagcccataaaggagccagtactcacgaagaaaatcagcctttcataaaayttcttggaaatctggtcaagaaagcatgcgtgtctcctgcagataacactgctgtattataggcatttgactcgatcagtgggctatggaaaaataaaacacccattttaacacagtgtctggaaatgctgcctagccatggaaagcctgggggctggcaggcttcggaacgatcgggtgggtggctagcacgtgctgcatccttcagaacagccccaaagtccttgaaggacccagcattggctcacctggggtgccactcaagcatgcaggttccttggccccacttcagccctgctg

SEQ ID NO: 127 - DNA, 600 bp, Bovine  MMBT01495
cagtacacccagtgattgggaaatctttgtatgatatttggagatggggagaaatttagtataagttatatatcctgacccaatttagtgcaaactttttgaactaaattaggacatgagtttgagtgaactctgggagttggtgatggacagggaggcctggcgtgctgcagttcatggggttgcaaagagtcggacacgactgagtgtctgaactgaactgaactgaaggcactattatactcaatgttactactagagattgtagtgtgagaatagcctgtagtaagtttatggtgyttttcattgatatgattattgttactgtagtggtagttttgtttgtttwtttgtgtttattttttkataagagtggagagagggtgatgtttggaaccttgcaaagatgtcatatatccaaagtaatatatttctctagctctcaatgcatggtatctaagttaccagagagtagcaagtcagttagttttgtattagtacatggcaagacgactgttgttcacaggacaagaacacattatccacactcacaaaaatgtcaagtttagaaactaattaattctaataaatacctgtgat

SEQ ID NO: 128 - DNA, 600 bp, Bovine  MMBT02142
tggcaggaaagtcttctagtagagaatagccatccctttgctccactgattccccacctgagggctctctacttccccgcagtcttgaacacctgtgagaccaacggaaagaggatgggggctcagccacccccagacaaggtggagttggagagaaccacttggaaatgatccctgtgagtggatcagcttggacacagcatttctgttcaatatgaagaaactggagcaaagggagtcatcacagactggattttataaagatcactcttgactgcagctggtggaaggaggtagtgyactggtcagatgtgtcgctgcagacagaaggaaaataaaaggagtctaacgatttacagaagattaaaatttataatgtttagtgataaactcaatrtttgctccataacaacatcaactgaagttatacacctacaattataaaagaaaaagtattcaatatgtgcttcagtcaatctataaataagggtgctgccatggatccccaagttataaaatgtcagagtggcaaagcatttatgaattcatctagtctggtcatggcaagcaagtttcatctcacatgacaactctaattga

SEQ ID NO: 129 - DNA, 600 bp, Bovine  MMBT01728
tgagtctgagtgaactccgggagytggtgatggacagggaggcctggcgtgctgygattcatggggtcgcaaagagtcrgacacgactgagcgactgaactgaactgaactgaactaaaaaaataaataatacctgttyctccttcattaaactcatgttttagaaaaaaaaataggcataataagagagagaacatgatttagttatttgtcgataacttgctgtaaggaggaaggargaaaagcaaggtcatgaatgagctatttgaatctcattgaaagagatactgataaacttcygtagagctctcttcatcatagagttgttaggatagggatttattcacaagccactaggaagaggcttttaagtaaatgagactatcattctttccatagttagttagctagtgttagttgctcagtcgtctctctttgcgaccccatggactgcagcctgctaggcttctctgtccatggcatttttcaggcaaggatactgggagtggttgccatttccctctctaggggatcttcctgacccagggattgaacctgggtctgctgcagattctttaccgactgagctaccagggaagc

SEQ ID NO: 130 - DNA, 600 bp, Bovine  MMBT02109
atagattacctccccacaaagctacaataaacagacttttttgttactgctaaatatttatttcctgtataagagtggtcaggaacatcgcctgcatacaatcaaaggtatgaccacaatattgctctgaagggttgaacatggagaaaaatgtgtggtttatagtataatattcgtatttttagctgtattttctggaaacttatgctatattgtatgcaagaagaactgataagacctcttagtcttttacatggttctttattcctagaatttgtcttctatgaacatttttttccyaaggctgcaaacactgagaactaagcatattcccagcactgctctagtcattagaagagataaaaagatgaaattatatattatactcccctttaaggagtttagcaagccatggcactttcgtcacagaagtcctaggaggtaaatggctctctgaagaatgatgaataacgaaaggaagaactcatatgagaactatgtagaaacccagaaaaatctttatgatgagaaaagcagattaaggtggtatatatggtacaactgtcaagacacggatgcatgggatcacattctggaatg

SEQ ID NO: 131 - DNA, 600 bp, Bovine  MMBT01741
tctgttctccactgtgagcattaatagggcagggcatggttcccagatagatgaaagtgacttgtaatatcttaaagcaataaataataagctaatatttattaattatttagtgtactaagcactttatagccattattgtttttaatccctacaaaaccctttattttccttgtattttatagatgaggaaacagaaaagatccagtaatttatgcaaggtcaaacacctcagaataaagaaaggagttaaatctaaggtgtcagcacattcttacccactcttctgcttccaaactyaaaaatatcaagaaaactcttcagatgatgaaattttttaaatataatttcacattccttgtagtggtcttggaagaccaaggactgactttagatttgcagtgtcatagtatggcttagaatcacgggaagaagtctccactctaccacgtcagggtaactgaaccaccattcagcaggtgactgcttaaagggacatgttaagatccttcatacggcagcataattctgccatttctccttcccatcttattaccattcagtaaatattgtcatcctttggtatttcttatcaagata

SEQ ID NO: 132 - DNA, 600 bp, Bovine  MMBT02174
aatcatttaatatttttccttataggtctgacttctttcacttaccaagttttcaaggttcagccatgtcggagcatgtgtcagaatttcattcgtttttaaggctgaatagtattccgttgtaggcatataccaccttttcttacccactcaccattgatggacacctgagttgtttccacctgttggattttgaataatggtgctgtgaacattgatgtgcaattatctgagtccccgctttcagttctttggggtataaaatctagaagttagaattgttggattatatggtaattytgtgttcaagtttatgaggaatttccctcttttctcatttttgttactggaggattctaccaacctttatagttgagaaattcctagatcctgaaggcaaagtgtttggcagtgtctggcacttagttagtgctcagtatgtagtattacttaggcttycttgactgttctctgccccacagtataccaaatgtggaaataaaattatccagtgtactctctacttaggaaagcacctgtgaactggtctggccagcaagcagatttttcaagattaggtagtcattaagaaaaagggga

SEQ ID NO: 133 - DNA, 600 bp, Bovine  MMBT02025
tttgccaccacctgctgggaatttttcataataaaggcttcccttgtggctcagctggtaaagaatccrcctgcaatgcaggagacctgggttcaatccctgggttgggaagatcctctggagaaaggaaaggctacccactccagtattctggcctggagaattccatggactgtatagtccctggggtggcaaagagtcagacacaactgagcacctgttgggaatttwtcataataaaattacaagacaaagtgtacaaattcactgtcactcctcaggagagcccttgtgcagtgygcaacctgcccaaccatcctcagcaacctggtgtaccacatactctatgtaatgccacctccccacaccyggccctgccccaaataccccacatgttggcaaatctctctctcaggcatactggcagcccagaggggagagaagagaccacggcttacatgagctcttgtgttcccttctccgcggccgcctccgccccattgtggtccgggggctcatgggctgggatccacgaggcagagtgctggggttggtgcaagaaaaggtgtggttcacggtcggcgaggagaagggagatga

SEQ ID NO: 134 - DNA, 600 bp, Bovine  MMBT02086
agtatttagaaatatacaaccaataaaagaataaacaaattaagtattaaatgcaattgctcccaaagaacagaactgaaggacaagagggggggtgattttgaactttttaacatgattttgttgtcttaatgtgtacatatatagctgaccaggtagctgatcaggtagaaagcttctagagatagactcaaaaattcttgtaagagatgaaagaagtgtttattctgatcttttttctaatctcatctaaaccatattctcttgcattttgcccagaggtaagtatggctgtcatcyagcttgaattatatgcttgtttcttttccaagatgactctaatctgcctcctccctaactgggtggagaactggcttacctggttgtaattatgcagtagtcagagaagacaggaaaamacactctggtaaagattcttaagaacactgaaataacattagaatccctagatctacacgggtagatctaccctctaaaaacgaggcggtggaggaggtgagggtggttgagactgcttggatgcgtgtcgatgctacttacttttctagactgtctttccccagtctccatctacccctg

SEQ ID NO: 135 - DNA, 600 bp, Bovine  MMBT01826
gccaagtccatcccacagattggtttttgaacagcttgtaaaccaagaatgattttatatttttaaaggattgtaaaaaatacaagaagaaaaacatacaacagagaatatatttggcctgcagagcctacaatatttaccatgtatccccttaccaaaacagtttgtcaatcactgacacagtcatgttagtaatggagacaaattagctctgagctaaagactgctctggacccatcctagcaatccttaaaaggatcctacaaattcctggtaatttagctaatggtgaacaaaatytagcactattttatgaaatacaacaaaattcagtgcccccaaacacaaaattcatccaataagaattgctgaggttgtaagaaacaagaaaatattaccctgaattatatttctattgctgtataacaaactacccccaaaacttcgtggcttcaaaccatgatcatttatcctttcktatcatttctctgagccaggaattctgacagaggccatagagaatgcttctttcygcttcacagtgcttgaggcctaaactgcaagatttgaaatctggrggctggaattttctgaaatctc

SEQ ID NO: 136 - DNA, 600 bp, Bovine  MMBT01731
ggttctcagcctattccttattgctttctgagaaagttattatctctattatttaaaatagatttacaagctcactatttccttacttaaaaatataaacactatgaaacaatttatgaaacttcttgagaacttttaacttaccaatattgaattataagctctttgtggacaaaactgtcttcttcgcatttgtctgtttggtgttggaacttaagttctctaacctgtttcaaaaatccaggtatttgttggattaagtaggtttctaaacgtgtaagtatagttatttactcataytcagcatatctgtatataatgttactcaaactgtgatatagatactttctattaattttttataaaaagcactatttgaagagggataaataaatgaggacttggggaccaaactaattatcagatctctatagtagcagtaactcatttagatcattgcctcacagatatcatcagcattggttaaagaatctattggacaattgcagtaattccagaccactttttaatgtggatttcacttggagaggtgggaaaagagttgattttattttagttaaatgttaataattcaaagag

SEQ ID NO: 137 - DNA, 600 bp, Bovine  MMBT01644
taccaggctcacatcagtcccaaatttaaaattgtagactttatatactagaactttctaagccttctggcccctccttttggctggcatcgaagagaagctttcttcatttgcatttggtactgctctctggcagcctgactctggcctcagaaacttctgttccagaaaagggaaggttggactcactcccacaaggatataggaaaatgttagtgcatcttctttgcctaaatcaagtcaggacagctgaartgtgaccttggaattgaacagtgactcttccctggcagcagtgcyctgctcacagatctttttgtgttctgatctgatggtatctggtggttctgaagcagggctcagcttccgccagtgatggagtatctgtgagttgtggtattattgggaggttgggcttttgtgtgtgtgaacagaaagagagctctggggtgagaatgagagttcagagagtctcttatcaaccacttctaggcatggttatgtcaaaaccaacttgagcagatatatttatttcttcctttttgaaagcctctggaaaaaaattatagcttttctaagtaacctttcctgccaagaact

SEQ ID NO: 138 - DNA, 600 bp, Bovine  MMBT01209
cctctgaccagtctggaagtgatgggactggtttataagcatcaaatgattcttgccaaaaccatttaaaaatcatttcccactgttttgttggcctccatactgagttctaactcttgagattgtgatcctatcaaatatttctcaatcagtttggcctcctggaaggatgatttcattacctttctttgttgtacatgcgtggcacagattgtacaacatgcataatctcctctatctttcgcctctttttttcaaactatttctttgtctcttgtcctctattctaaatctaccagyattcatgtttttttctcatctttttatgttcttttgttttggttctttttgttattttacttgaggtgtgtatcatgtttgggaattattaatccttctctgtaatatcctatttatgcttgataatacatatccatggcttttggtttggttttgtttttttgccacactgcgctgcttgtgggacttcaattccccgtccaggaaatgaacccagaccatggcagtgaaagttcagaattctaaccactaggccaccagtgaatgccccatatctatgtattctaaaagcaaattctg

SEQ ID NO: 139 - DNA, 600 bp, Bovine  MMBT01475
aggctcctatgtcatgtgaaacatattaaacaaatttgaattcttttttcctgttactctgacagtttaattttcagacccagccagagaccataagagccaacgttgagaaatgttttcttcccccatactgtgaatacaagaaattaacctttatatcttttttatcctccaagactctcatagatatgggcacatacatttacataaaattttaattaagcacacaaaaaaagcaaccaatagacaagtcaacttcagatgcccatgtaacctttggaaaactctgtctgtaatagytgttactagtaatagaaactcaaattggtttgagaaaacagaaggaggttaggggtagggtctgtgcattgaacagctcatctacaaatatgtcaggatcacaaaactgttatcaggatcctatcattttcatttcatcttttaaatcttctttcttgcacactggctttgttctttggaaggacctcttcccatgctcggaaatacacctatggcagctctaagtgtaggtggcctaccagccagcaatcccagtaaataaaggcttatcactcagagtaaagccaccagggagggctc

SEQ ID NO: 140 - DNA, 600 bp, Bovine  MMBT00991
catgtcacctggccatagtggtaggcactgggcaccatttatattcatattttaatttgaattgatatgttatttctctccccaatagatgctagaagaaagtttttaagaaattgatttgttttgatattagtatttatgtcaaactgatacagtttctttgcattcatcagttcatttatcctctatccagatctgtatttgtcctcattgtaatccaattaggaagcataaaaaaatgcctcagatttactaaacaaaaatatcaacttattcttatagagggctgcataaaattcytaagttagagtatttttctatattattttggaattggtttttctaatattttctttagttgtataatcaaatttttacacatatctctggtataagtgcagaaatgttctcatttaataatgcattgtctgggcatttttatgtgtatcaattattttgtgtgtggttagtcgctcagtagtgtctgactctttgcgaccccatggactgtagcccgtcaggttcctctgtccatgggattctccaggcaggagtactggagtgggttgccatgccctcctcatcaattattttattcct

SEQ ID NO: 141 - DNA, 522 bp, Bovine  MMBT01435
agagcctggaggaaaccttaccaaatatctgtaaccccattcagggctatgactctgatgactaatgcgagctgtcaggaaagaaaaagcccaagggcaagtcagagctctagccatagcctgatagaaatatcctgtaagaacacctcggctcaccaatcagccttatttataatttagtctcttgagtaattcatccatcaggtgggaatgccccaagcaaatgagcaaagtctatgatgccagatatatttcatattgtaagtaaataaattaccatgccagttgatacatcagtcyctttttagtttggttattgtgaatgttgttactacaagaaaataaatggagataacataaaagatagacaggtttaattaatcagaaattttttgccctagcctgtgatatagtgaagtagggtgaaattttttaaaagttgcagacctacatgaatagcaccattccattttattagaaaaaaataggtgtggtatatgcatacacatgcatacaaatgca

SEQ ID NO: 142 - DNA, 600 bp, Bovine  MMBT02273
ctaagtgtatttaacatatattcattcatttaatccattgtaattgtgtgtctactattagttaggcactcttttaggctctaagagtgcagtgataattttccaaatgaatcacttagatttttacttaaaacattctaataaacgacttttaaatatttaaacttattcaaaaattttaaagtacatttgaaagacatgacataccatttcagccttatgaaggtatgattgatagataaaattatagtatgtgtaaagtgtacaatgtgagaatttcatttgtgtttacatttatcyatgtttactcccacaagcaagttttttttttttaacacaacttgcaatatatctttattgagtggttactatatcctaggttttggactagaaatttcagaaagtgatgatacttagtatatcccagaatcagaaaatccaacaggaagaataaagcagttaaccaatactcataatacaagggaaaatatgttttgcaatgaaaataacaattggtgctaggagatttgggggaggtcacatgagcctcaaagtcataacatggaaggcttcggacagtgaagacagaagggagagcct

SEQ ID NO: 143 - DNA, 600 bp, Bovine  MMBT00735
tactttaaaaacttactaggatgcactgtgtttcaaattatattttcttttccagggtgtttcacattgaagaaaataacaccattctcaagcctttaaactgtcctacattcacaaaaggggcgggggtggggggcgatattgcactgaaattaggatcttcaacaacttcttaaatgcctcctttttaattgagtgaaagtaatagacttgtaattgtttcaaatacmatgtggtaagctttgtgattaagacctcttatttctgactgacatgaacaattcaataggaaagagagtyagccatggcatgcatgggatgttatgtgctacaagtctgggtaccagcattcaaaaaatagagactgagccttcttgtaatatttctgagttggtgagcatgaagggagcaaacttagtccgagctgtgtgttacagattctataatcaggaaaagacaaaaagaaagtgaagaccagtacctcyaggctcctcccccagcagtaaacactggggcaccagactgtgagagccctgcctttctttaagtccatgacaycaatttctatttccttcaacatcagaatgtcaatgaagtaga

SEQ ID NO: 144 - DNA, 600 bp, Bovine  MMBT02033
agggtacggaatatacagaggaatgaaatttagagacttccaaatcccactggaatgtgcaaattaagagacatgaaatccatccccatcatgggtctcatgaatgtttttcattgaccttttcatcatgatagagtttttaaatccacaaggaaagttaagatgtcaagacactaatacattttcatgtgtattttgactttgaatgagacaatctaaccttgttttttattttctaaaaaagctgttgatctatttgaaggttattgtaacattcagcccccagaaatcattcccacygaggtaaaaatgagactaaagcaattattcattaaattagaacatttaaagaaaactcagtgctagattcagatgacgccaataccttggttgttcaaattatagtcaactttttccaaataagctggttaggaatctaagaatgaggccgtaacccattgccttgctgaaaaacgctagataacgtccctccagcagtaagacattcatgaagtccaaagcacagcattactcattcctcacttctgactcaaattttcacaaataatccttctttaaatgttgctgcaatgggagata

SEQ ID NO: 145 - DNA, 600 bp, Bovine  MMBT02071
caaatatggaaattttacacatatttgtcatttattacwtggttgattgaatttttaccatgttctaggagtaggagggaattatggaggttaacgagacgtggtctcagacctcattacagttatatttcatgcagtggttcttaatctagaatctaatataattatttgggaagcttttaaaaataccagttcctggatgttacccagcgtctctgatttgactggtctggagtggggccgagacatcaggtgtggttgttagttgcagccagaatcgacagcttctgttaccaaatyctatctgcatcctcttgcgttgccataataacgttctatagactgggtggcttaaacagtgcacgtttattttctcgcagtttggaaggctggcagcctgagatcaaggtgctggccgattcagctgctgttttttcctgttcttagcagggccacccatctgattagggctctacccatgtgarctctcctggtgactcggatgataaagaatctgccagtaatacaggagacccgggtttagtccctgggtcaggaagatccctgtggaggaggaaatggcaacccagtccagtattc

SEQ ID NO: 146 - DNA, 594 bp, Bovine  MMBT01867
taacacagtgagagatgttccttttatatatttgagataatttagctcaatgttcatttgaaaaaatgatggtgctaatagcggctcttcagcttcagaacaacagaccgtcctgagagagcacagaagccacggaaagtgattctcatatcaggctgtctggaagggattggataaaagctggaggaatttcccccagaccaacagctgcctgagattgtatggcaggatctgaaatactgtatgaacccatgaacttgaactgattggcttaaaaccaatagctcttaatggaggaayatgagatagagtggggggcgagggggttattatgaatttcctgattgtccaggtaaattgtaagtcattgcacataaatcagaatttctgtatgctcagctgtggtaacagtttgttcttcctgctggacctttctgtccaagctatgaaggaatagatacaaacaagggaggataaatgaatctgctgtgtgggttttgccttgggcttcctgagtattatgtaccaggggccattgttctcccccccaaggaatcctttactccaatcagaatccaatacagtaataaaaat

SEQ ID NO: 147 - DNA, 600 bp, Bovine  MMBT02018
ctctggggagatttgaaatatactggcactatgaatttcatcctgagagatgtttattttttttggtctaggtgaagcatggccataggccaggtgattctaatgtacagctaagtttaaaaacactgacttaaagattctttctcctaaaatacctttctccatagcttcacaggataaaatctcacctattagtatggaaggttcccaactctgccttgaaacctttcccagaataccgttaaactcatttttggattatctgagtattgcacagggcctggcatacggttgggactygataaatgtctgggggcatggtacatagtagagacacagtacatacttattggaagaatgatgtatagttggtcctcattatttgcagattctgtacttgcaaacttgcctattcactgacatctatttacccccaaatcggtctgtgcagtgctttacagccattccacagccatgtgcttgtgcagagaggcgaaaaatctgagttgccagaagcacacattccagctgaggctgaacaaatccctcatgttgaaacaagtgtcctaaaaaggactggttagctctatgattttcaca

SEQ ID NO: 148 - DNA, 600 bp, Bovine  MMBT01432
aatcatgcatggattctattgagaaatgctacatgtgcatcatgatgcttcacattaacataatttaaaaataattacctacaagtctggacccattccctctttgtttttcatgttcaaggtcttttatgctcatgaagaatatatatgctttttctatgcacatagctagaaagtaaattgcagctctggtttggaaatggttaaagatkatgaatgggtaagttaatttgtgtgacatgccttgcccactttccctacctcatctaatctggattgagattttggaggcatgggtcytctctctgactctgttactatttaygcattgtaagtaagccactcacatttcctcaaccctggttttctcatctgtaaatgtccagaggagaagrgatcatctttatacttctgagattctaaggctctcatttggagagccaggtgaatattttgatggcatacgagagataatgtcaatacataygccctggaacagctctaacctgttgataacatagtgaaatcttttgtatcactcattaaaatgaccctgctggagcttccaagtaacctcatgctccaaacccactcctttca

SEQ ID NO: 149 - DNA, 600 bp, Bovine  MMBT01382
ttaaccaccaaattcgtgtgactcacttcattgtgatatttgctttatagcagtgatctggaaccaaacctgcagtatatccaaggtatgactgtagagggaagtgaggtcggtctaggacctagaatcaccgttcttactggattgggagcaggaggaaatccagctggatgggtggcaagtcatagaccacgcccaggccagcttcagggaggtccaacaagagatgaaggataaaaagagaaggaacaggggagtaaggaatacttggaaacccaggaatatggctagaaaaatcayagttcatatctgtggtgagaaggggagggttagagagagttcagaggcagaactggcaacatcaaggcatggactcatttttagaaggcctgagatcctgggtgggccaggtatcagtggcaaggaaactcgttgctccaacacaacgaatatccagtcaatataagagggcactgaacaaaacaggacaggtggtaggaagggttgaaggtcacctgagggctcaactagagtttctttaatttctccaaaccaaagccaggttggtcctgcagagcttacaaggagaagccacttggt

SEQ ID NO: 150 - DNA, 600 bp, Bovine  MMBT02703
attcctggtgtgataatgctggggagggaaaaatccatgcatgcaaggcagccttggagcagttcgagcatttactgtttatttctaagctacacatctgcaatgagcactagaccatacttaaaccataatgtatggtttgaaggtcactgccggttattatctgaccggtaatgaccgcagaagtatacattattgctattaggagccatttttgtactattttcagttttcctttttattgagtagctgctgacacccccagagcttcacagaattgggttatggtcacggaaaatyctcagtcatttcacggggttttgtttggggggagaagctggtatgtagctgctgcttttgtttgtgtgccgtcaaggggattgaagtttatatgaaatgttccttttattttgagacggcacttgggacttcccatcctgtgaagccttattttctcctttaaattagggattaaggttggaggagttggattggtttattttcttgctctttctgaataattagttattatgtctctgaaataatcacagtgtcaatattatatattctggaatcataaagcattatattaggggcttt

SEQ ID NO: 151 - DNA, 600 bp, Bovine  MMBT02951
cagtttgggaagatgaaaagaattttggagattggtygcacaacaatgtaaatagtagttaagatggtatattttatgtgtagtttaccacagttaaaaaaaaataaagtatcaggtggtgataagggctattgaaaagacaaaacgagatgattgtgggagcacgagggaggttggggaggtgtgagctgttattggacatttggtggtcagagaagaccaccctaatgatgactatcaggcagaggtgtggaatatccgaaggaggggacacgcatctgggagaagagcattttaggyggatgttaaatgggaatggtcaaaggtagggctggtttgtgtttcggaaacagggagcttggcagtgtaactcaagcaaagtaggtgaggagagtggtagaatgaaatctcagaggggtgggggtgaacagatcatgtttcaggttatgacactgagtatgtataaatgcatccttgtatgaataaaatatgggtattatatttctctgtgattgcaggcatagcgttggtttttttgaaagcagatgattgtattgattgaaatcgtatatgtttcccccctctacacctctgcggtta

SEQ ID NO: 152 - DNA, 598 bp, Bovine  MMBT02672
  misc_feature (1)..(166): n is a, c, g, or t
nnnnnnnnnnnnnnnnnnnnnnnnnnnnnnnnnnnnnnnnnnnnnnnnnnnnnnnnnnnnnnnnnnnnnnnnnnnnnnnnnnnnnnnnnnnnnnnnnnnnnnnnnnnnnnnnnnnnnnnnnnnnnnnnnnnnnnnnnnnnnnnnnnnnnnnnnnnnnnnnnnnnnnccttctcttaagccgcctcttaaactccaccctttctgttggaattatcctgccctccacttgcaggtaaatgaaaggtcatggaatctctgtctcctagtaacgtcatgatcctgtgtggtttgtttgctctyctgattgtttctgtgtgtttccctttgggaagcttccactgttctgtaacacacaagtctcctctgcctggcttcagagacagtcagcaaagccacacttctccctagctctaagcctcactcagttacagctttggggcgacagtatgttccaaagctccagccatycgtttcttcttattgttttcaacttcctctcaaagatacaaagttttcaatgattttgtctactaagaaagaaaatcctgttgcttaagtaataatttcttcattgattcacttatagccaacaatatcc

SEQ ID NO: 153 - DNA, 600 bp, Bovine  MMBT01524
tggtcaggatcctaccagtgagacctgctggggaaaggagcacctctgggtgggggcggcgctgtagagtggggagggcggcccaggaccaaagcccacggtgggcactacggtgtataggccgggggcggctggaactggttgatgacctcgtactctgccgggtagggctcgttctcctccatctcygagagcagctccagcgcttgctcctcctcctccgtggggtagtggcgcaggaggttggccgctgtggccaggatggaggccccgccagcgccagccaccaggtagaagctracggcaaaggtgacgtaaacctgggacccgtggtacttcttatgctgctgctgctgggccaggatgagttcggaagcccagtaagagaagccgatgactgtggcacactgcaggactggggggacagagggaaaagggggttggcaggcaccccgcagcctgggtgcttgaaccagctgcagccttcccacccaaaccccattctcagagaagctgcctgcccccacacccagtgccggggagctcgtatggccagggttggggacagaggcctgaccctgccgaggccggtcagattct

SEQ ID NO: 154 - DNA, 600 bp, Bovine  MMBT02510
tttatccttttctggtacacttaaataattttcttatatcttctttacataaacaatcttactattatataaggccagctaactggtgttgtacttcaatcaggcattacaaggttgagaaaagaaagaaaataacattttttgttgttttaagtttcacacactataatacataaattacacctacatgttatagytttaccctaaagttctcaattatgaccaaataattcctatcacatcttatctcttctttgtccattttatattttatgttatgtagaggggagaaagataccygggaaaagtcattttagtggcattgctgagaataaaaggacatttcagcattttttctgatcattaaaaataatgcaaaatatcaggaataaaagaatataacaaaataatagtgactcattatgtcaccatccagaggttgaatatcttgaagcatttctgttttgtctttttgctgtacatttttctccacatgcatagatgtatgtatgtatgtatttyaatttgggagcctggatgctytcttaaaagacaatttaccattttttttgttcggatgtaacacaccaaggataagct

SEQ ID NO: 155 - DNA, 600 bp, Bovine  MMBT02870
tgtcatttaaatgcctaatttccaatgagtttctttaagcttgtcaagctaaccaagtcccctaaaccttataaaggtgataaatattgtaggaaagagttatttctgaaaaaagacaacagagagtagatayaaaactaggagaaaccaagcacagcagaaaactgataccccaggagatggggatcactataattgcagaaagattaggataaggaaacatgatcacagcatccttgccatgaggagaggaagaagactctaacttacaagagtggattaacataatttctcttccayacccttccccttttgttctctttgaaactacaattttgatttaaacagaatgactttacttctcccagacacaagcacctttcattattgcaagaatttcttttagcatttggaaaagtgccaaagatccatgattcctccagattttaaccacatttccaatactgtgcatccaataagatatgacacatggacataatgggttcctagaggtgttttttaaaaaaaataaaacttactttgttacagtagcaaacctttcttagactgacaagacggggtagaatcaaaatatctttt

SEQ ID NO: 156 - DNA, 600 bp, Bovine  MMBT02871
gtcaaaatattatgacaaggtaggagaaaatataaaatctctgaaactcacagttttatgtcatttggtacaactcacagaaagctcaacccatttcaaatttattttaaaatgaattatttcagtactactaactttatctgcaaatggaaaaagcaaaaagtgtgcttaaaaggaaaggttacaaaaataatggaagtaaaacaaaaaccaaaagtttgctagtttgcaatttattttttaggcctttgaagtttgggatcctggacgatatatctcatctgtaaagctctgacatgytcagagcaaagttttaaatactgaaaaacactcattgtttttaaagttctgcatcacacactattgggtgtactatttagcactgcaacattttgagtggccatgaaggtcaccttcttcatttcttaggtaaaaatcatcactttctcaaaagagtaaactacatagaaaatacagtacrtagtttcttatgtcttaaacagccacattcagtttcctttagcttaagtaccagtaatgtaagtaaatgaaacagtaagcaattggcagcacagtaatgttaaggttctagcaaacttc

SEQ ID NO: 157 - DNA, 600 bp, Bovine  MMBT02949
tagcagcagcagcagcattagaagtgaagggaaaggaagattactaatgcttgggtggatgcagcttaagatggagaattcaaaatgagatcatagatatgttgagtttgaaggtactagggatgctaagaaacaactgagtgaaggtgaccaatattcagatgaaaacaaggatctggagttaaagaggtctaaaattgaaatgtgtgtttggaatcatcagtgtgatgaggtcattgaaacatttgacatcgattaatgaaaatacagaacttgagaagacacctgagaatgaagacygcttaatatgtggtgccaaatactgagagtatcgcagaccttgtgaagcatttctggaagccagatttcagggttctggaccatacaggtagctaatatattcaaatacatcaaaagttaatgtgactgggagctgacagtgaatcggaaaggagaaggaattctgtggctttatagataaagaaggaggaagagaattttaaaataataattataatagaatgtaagtcagaagatctggtcactcccttactggcaggttgagctggggagagaagaaaccaatctttaaagaaacag

SEQ ID NO: 158 - DNA, 600 bp, Bovine  MMBT02762
tatctttgtctcttgctacataagcaaaatctctgtgcaaacaaagtttatcagtccattagaatgaggaacctttacaacacacattctagttatgttaactgagctaggagccagcgtgtcagaggtaaacagagtatgcagtggttaaaaagcataaataaatgtcaacagccacctcaaatagaggaacagttgtgtggatgtgaggaattcatttttgactaaaataactacaatgttccccagactctgtctgttgagcttctggaatcttaatgaacagcacataatgaaaaytgaactttatgggaacctkctatctagtaacaacaaatgtcayggttataaatattatgatcacaaaacagaacacaggcttgagaggagcatgaatytgtacgcgcgatactgygacacacaccatgatgtagcagaagcaaaacaggctctgacgtgtaaacacgtgcccagagactggatccgacccacggctgcagagcaggctgagaggcagtcacggggacacggaaggacgcyacagaccgaagtcccgtcagaggcactcgattctgctaatcacgcctctcactccagggc

SEQ ID NO: 159 - DNA, 600 bp, Bovine  MMBT04308
ggtatttatggtgtgcgtgtgtccatacygcatccatacacacgaggaggtcagaggtgaggccagccatgggagtacagcacagcaggtagcctcctccctacatcttgcagtgactccttcaacttcttcttttttgtccactcccaacctgttcttgtctcacattcagtattgtgccctgtataatatccatagtcccaagracagattgccagaggggctctgaccaatcagggtggctggggaagctctgccaggaagggaagaattcacagatcgggaacattcactctgagwtaaggcctgytctcaatcccagctggctatcagctaatttctgcaaaaagatgcctctttttccagaagcatttacatgtcaamtggaacttccagaggatttctasggttttaagataatcttttttttaattaaaaatcatttttaagaagtgatttatggcaatactggagaaggaaatggcaactcactccaatattcttgcctgagaaatcccatggacagaggaatctggcgggctacagtccatggggtcacaagagttggtcacgacttagtgactaagccaccaccaccac

SEQ ID NO: 160 - DNA, 600 bp, Bovine  MMBT03007
gtgaactgtggggtctcagtgtaggttgattcccatgatgtttattgaattgaactgggattggtagagaggaaggaagacgggagaggggaggagagacaagggaagaagggcggcaggagacaaagccaggtaacagcacagccacacgatgcgtctgrgaacctgccctgcggctcctctcctagcagccttttctggaacaggtcatagcctgtgggctgaagacattccaccctaaggctcctgttgaaagtggagaccaggtctctgcccccagtccaaggaccctgcctgtcwctgctggggtgtggggagggagctctcccattgtgttgggttttcatcacttaagtcttaattacaagcattatttaaatttttcacttaattattgtttaytgagcatgsttgtagctaagatgtatttatttgctatgtactttgtctgattttagtagattttttcccccttctctctttttatctgtattctttattctaataatgcatgttcaggttaaaaaaaattttttttttaaagcacagaggaaaataaagtccctggatatttcatcctttagagataaccactgttga

SEQ ID NO: 161 - DNA, 600 bp, Bovine  MMBT04010
tatgttactgcagttctttggatggctctctttatgaaagccagtggccagagatgtttgccctgtttttaccaaaaccrttttacagccctggacagatttgacagttcaggccggcttcttggtgtggtttagattgagagctgtaaaatcccactactgagaaagtaaaatcaagatgtacgaggatgctaaatccaggctgtggacaatcctttattgtttccgttttggaccgaattgtaaaatgtcctttggaacatgagctagaggtkcgatgccgaccaggaccaggaagywtaagtttctccaccgtagcttcctcgtaaagggtccagatgcaataactttcttttcagtttgccacccaaaagttaacgcagggaatactttgtgaaaagtatgtgtttccattctaacctgttactttgtgttttgggaaagaaaagagaggatgcaagagagagatggagaagaaagaagggcggaagggagagggagaaaaagagagagagaataaatataataagccagagaactaaggcatggtttgtcattacccagaagtgctaacactggctcccaatcctcaagctctga

SEQ ID NO: 162 - DNA, 600 bp, Bovine  MMBT04390
aaaaagttcctagaggcattagttctccatgctcaacatttcaaaatacttggtcttactttgacacatctaacagtacttggctacattatcatattcattttctagcctacaaaccttccactcatctcttatgtgaagtcagctttcctgaatggtcaacttatcaggtgtctacctcaggacttccagagaaaatacatggaatctgtatatcctaggaggaacagatcaatgtcacagtgggagtcatgggccctcggaaaatccagcagcccatccattccccaacatcacacwcccatgaaacttttttgcaaccagaaactcatttctatattcttaggggttttacttttccagagtttcttctctaaatgaaaaactcaaagactgttattaaataaaatgtatctgggaaaagctaggaaaaaggtgatagattctctagaaggaattcaaaggcagcatatacatattccttgaccaaggataaatgtcctcttaggctttcaaattccttgtcagtaagcttttccaactttctcagatgccaggtcagcctttcatttagatgtttaagctggttttagaaaaggc

SEQ ID NO: 163 - DNA, 600 bp, Bovine  MMBT03968
cacatttcacaggatccctcgcatgtgggtcccacgctcgcacgtgtgtccaccatccagatggatccgcaggtctgactcctcgcttcttaaacagtttgcttcatccttatacaaaattgcttacgcgtcagctctttggaccttgccctgtgtatggaaacggtctcagtagactgggagcttgggttacaggcagacacagagaattacacatactggaacaagccaccttggttccctttgaaatccccctaaatgaatgctgcctgggaatcggtttcctgggctactctgtcwtcggggctgtaagagcctgagctctttaggaacctgggcagatattgtggctgggaggacggctcactgttctcacattgttccctgcgctggggtggggagcactttcccaagcaaagcgagaggcaacgccaagtattttcaccccctgtcgctgccgacaatgggaaccgtcctggctgctcacagaagccgagggcgcttcctcgctagctcacagcataatgcatccgaaagacggcctcagggtaataaatgggcagtggctagagctcccggtgcagcccagggaagccctga

SEQ ID NO: 164 - DNA, 600 bp, Bovine  MMBT03694
attcttaatgttgcaaaaggaatgctgttttgaaaataaagaggaaaagatagtggtgaaatttcatctacacagatcttagaaaaaatgtcatattgtttgaatatttataggttwaaaaaaaaccacaagtatataatcttggtaaaaagtatctcttaaacaacagaaggtcaagatttaagatttagacttcttcttgatggcctcatattgttaccacaggctgacagaatagctggaaggcatttctacagcttttgaacagatgattacttactctgatatcccaatattatwattttacaccttaatggcagatcttattcttaaaagccaattccatttwaaaaaaaaaaagtgaatgtctgaacttttgacaaagacattttaaaaactcggtaaaataattattgctataaaatctagaagtcctctttcttacaatttttacaagcttgcttacttyctttgtatagaaaatcctttcatattatctagcttcttttaattttcattaatattagttgtaccagggcaatacagtaatatcttttctgataaaatatcaccagttgtgacaagtggggagtgaccaca

SEQ ID NO: 165 - DNA, 600 bp, Bovine  MMBT03351
aaatgtgtataaatgtatacatatgacatcagcaaagagaaatgtataggaaagacaatgtatagttctcattagcctcacactgatttttctctctactctttcgcaaatggattagtgattatttaatgttagtctgacttcctaattacgtattcctttctgatagccattaaagtggtttgttttatgtaaataaaggtacaagggttcacctttgattattttggaaaagcctgcatgagaaaacacattgtattgtttggactttgatatattttcaggaagctaagatttttwaaaaatgtaatattcccaagaatttattgttggcagaacattcaagttgaaaccaagtaaaggaattttgtataaatctgagggccagtcaaataaagaccaatgaacgtttatcaaatgctgagaatgtattggaaacttcttgaatcttggttcatttttgttctgctgaattatatacaaaactccatttaatattagtaagcatttacctatgaatgaaaggaaaagactaagagtcattacagacagcttctatactgcacatgactattcttgaattaaatcaagtttttacta

SEQ ID NO: 166 - DNA, 600 bp, Bovine  MMBT03473
atgaaggggcatatttaaagcaacactttttccattaagagaaaagaacaaataatgactgaagtataacacccacactgctggatagagaagtatcaccagttgaattttgcatgaattagtgtcagcagtcaatgaatttttagcaaaggagataaacagcaaaggcagccagttcaaagaacttggtatcatttaccaagtagaaaatactaatttttaggaattccttagatgactgaatttgttgaagagagtaccactaagtttcagtatgggaaaataccacataaaaattgwtcagagactgatgtttagaagatagtgaggtccagaaattaccattagtatctttggaagatagtaagttaaggtactatagaggccaaaatggccaatgaaatatagagcactgtaggatatataatacaaaaaatctgattttaactttgcatccaaaatcatggtctctctacaagccatattccaagaattttattcttttgttaattcataacagaatggaaaaaggcttggaaaaggaaattcataaaactttttttttctttatcattgcagtataaaaagattagaagtatc

SEQ ID NO: 167 - DNA, 598 bp, Bovine  MMBT03348
  misc_feature (1)..(137): n is a, c, g, or t
nnnnnnnnnnnnnnnnnnnnnnnnnnnnnnnnnnnnnnnnnnnnnnnnnnnnnnnnnnnnnnnnnnnnnnnnnnnnnnnnnnnnnnnnnnnnnnnnnnnnnnnnnnnnnnnnnnnnnnnnnnnnnnnnnnnnnnnnngacttctgcctgggctcctttgtgaaggcacttaatgcccaaatctttacaggcatctgcacagcttgccctcttctcaaagtcctacagtctccagggtgcttcataccaggtgggcacagatattggtggctctggaacagttcttgggaatccaagattwccctacttagctaatgtgctttttttatccaaagcaatcggcactccccatgatcagattccagtacactctttgaagtgtcatccagttgattatcttctatactcacctttaaaatacttggactattatatgtagtctgtgtaatgttttacctttagagaaaatttagcatcctttgaagtaaggtttcagaaggacctaatcctcyttttttaattccttgaatattcttaggcatgggtttttgtcattgagtttgtacaattttaagttttaaaagaatttagagctgcag

SEQ ID NO: 168 - DNA, 586 bp, Bovine  MMBT02984
tcttgtactattgcctccaataaactgaactctttttaaatcaccaacagttatttaaggaaaaatataaatgcaaatgtttcaaaacattaaataagtaccatgtgccagattcaacatcacaagtggcattaaagatccagtacttttctgcttaaaaaccaatcacttctctctaaaaaaggtcagaagactctagttcaaaatatctactcaaacatctaatacatcaattaaaacaaaaataaaaagccagattctaagcatgtctgcccttaacaacacaggatggtttctttwctcttctttggagggagacgttcatttgaacatccattcgagtttaattttaastgactagaaaaagcaaatatttgggctgcaggaaatacaacttaggacaaaggaagccacggctaactttctaacatttacttcatgtgattcattctaacaataaaacctaaacagtgaacattccctctaatcttcagagcaagttaactctacagcgaaaacgatgcatgccccatcaccagactctatgtttaaatgattacaatgtaaagcatgttcattctcacaa

SEQ ID NO: 169 - DNA, 600 bp, Bovine  MMBT05002
cttcctttattccaaagaaggtttggtttctgaaaaaaattttggccaccttagttccctgaccagggatattgaacccatgctccctggagtggaagcacagtcttaaccactgaattgtcaaggaaggaagtccccaaaagaaggtttccattgccataggttattcatagcaaccgattacaccacaaaagctattattgttaatatacttttagcaaagtcaaggcacacacgatacatcaaaaatgcatcctcaaggaacttgattccctttccactgcacctgttattctttgwtatgcaaaatgttatcagtgcacataggctactgtcaaaatatttacacaaggcaatgaaaacatgcttagaatgtaatagtctgcaagatcctaattgcctaatgacagttcagagtcctacaatacactgcttcaatctctggaccacccagatagaatgctgaggtatactcttttaaatgaataaaaatagttggagttataagcacaaagatcttaaaaacatcaagtcatcattgccaggttctctgacygggcttagaaacacatatgctttcctagtggccttaaataaaac

SEQ ID NO: 170 - DNA, 600 bp, Bovine  MMBT05289
tgaatcttccctcctaggagattataatacccatgactgttgaaagtcagtgggacccattccaataaaaagaaatgataataatcctgagaagaaatgatagcatagaattttacactgaaaagagatgcagtttgccatttcattccaaagggctttattcctcttttgagtgaaatagataaaggaagacatagtataaaggaggaacactgctgtttttatttttatgtgattcctactcagtttataatttgatgatgttacttttcaaaaacatccacaagtgacttaagaaawacagtttatgtctcagaagttcaaaagaaagacatccttccaattatcagtttcagcagaagaaataacaaattattttggcagtagaggagtaaaataagaacactggtaaagcagtttcataaaaggatacatcagagccattgaaatcatggaatttaatttcagaagataccttgagttcatgtataccagtataaggcacaagcttggggatacaccctggtgtatatacacactaaactacatcctattttttttaactttttattgaaatatagtagatttacaatattgtgc

SEQ ID NO: 171 - DNA, 600 bp, Bovine  MMBT04904
cttcatcagctctataaccctgcaagtttcattattagggtttcctgctacacttttaattttcagttacagattgactaggggctgccagtatgtctggcctactgatgtttgctggtagattatccttgtaaaagttactattgtcaggtttcattttgtaaaggtagtgaagactggcaattcacataaattcctcagcctcattgctcgtgatggtctaacaactaagaacaaaacagaaagataggctcattttaaacaaatcttcttgcttcaaataatatactaaacagacawacagcacccccaccccccggcaaaaaaggaaaacaaaaaaagaaaaaacaccttacagttgaatttactgagctgaagaggtcaaactttgccagartcagggactggtaactgacatccagttatccagttcagggattcattttcccttttttcaatagtgaatgaaattccctttttaaaggcttataatttattgtctaaaactggaactgggacaaattcaaagcaggatgaaaggaagtctccaaaacaatagcattgaaattctcccagggctgtttcaattgtgagaactta

SEQ ID NO: 172 - DNA, 600 bp, Bovine  MMBT03790
tgttaaatgcaatcaacattaatcacattctgtagaaggaaatttcatctgagcttggctcaattagaagggaaggacagagatgggggaaaatctagggcagagtgcagaaggtggggatgtgcattcacaagatgaaaaataacacatgttgacattttgacaaaataaatacatctcaaacatctgctggtttgggaatgttttgagtactccacagkcttgttgacacrgttctagaagtaaacaagaatccaataccaactgactccagctcctgcctttcaacaggggccagawaacagtacttttacttgcttgaaaattaaaccactttaaattccttagctgcaatgacactccaagttttttttttttctctccattatgattgtccagtctttactgcctacttggagaataattaatgaaccacaggaaatatcctttctcatgaatacatagcaagaaatttcatcaggcaataatctctcgttcttggtatctcactataatccaagtagcacagggtttgaaaacataacttctaggtttgamtccaatcaaatcttgtrgcataacactatctcctttccctct

SEQ ID NO: 173 - DNA, 600 bp, Bovine  MMBT05446
agcgtacacataaacttgaatatttcactgtgaactctcacttctagatgagttatacatcagtgcattgagaccatgggcagacagatatccaaagcttcaggccatggtactaaatatgtggccaggctctttctattgatgtgattccttgtttttgatatagaaatggcagaaataagggtggaaaaggcattaccaagatgaaaaagacattattttatagattcttctacatagttaaaatggtcaatattaatcatatttgtacaataaaccatgatgtctaagaatcagtcwttaggacttcctttgggaaaagctcaaagatatttattttaagaatgtagtttcccagtaaagactaattagaatatggaagaaaggacaatcacaatgctacaaaaagtagcattaagaaatacaaagatgtttgtgtcatcactcgtgatgattttaaaggttctactataggcctataaacattmattaagaatttagtaggtgaatatttatataataaagccactctcatttactaataaaatctacattccttatgttttcctcacacacacaaaattatacagctaaaataac

SEQ ID NO: 174 - DNA, 600 bp, Bovine  MMBT04399
gggaaaagttgtgaccaaggattttgagaggagtttatcctgaatgatctgggtgggccctaaatccaatgacaactgcccttacaagagtgaaggagaaggaaatgtgacagaagaggaggrggcagtgtgaccatggaggaagagactatagcaatgcagccacaagccaaggggcatcagaaaccaccagaaaytgggagaggcagaagaggaccctctactagaggctttggagggagcgcagccctgccagcatcttgatttgcgacttctgatctccagaactctatgagaatwaatttctcttgttttaagccacccagtttgtgatactttataactgcaaccccaggaaactaatacactagtttctgagaatagaatactgatcaaaacatacatggtccctaccctcctagaatatacagtctaggggagcaaacagacaatgaacgagtgatcaaaggtaagtaattaccgactatgatgaaacaacaaatatacttggatagagaagagtgcagaggagcgctttatttattggatttattggagtttagggtcagcatctttgaggaggtgatctttgagctaagt

SEQ ID NO: 175 - DNA, 600 bp, Bovine  MMBT04677
gttatgaaccactcctcccacttccagagaggttttctgtcttgtgtgagggggcgggagtgtcatgaaaactttgaagaaagctatagaaaacccctctctggaaaaatgaccactggggataaaaacccgtatacagtacaggagattcccagatccctttgcagccaatccatgaccttacaaactgattcacaccaaaatgcaaatgactaacaaggttcagtatatttccattttaatggggagtaaagcccttaagccacactggatttcactccaacggtgggtttagacacwtcctaaagcagatgggaagcatttcctagcttctgagttcttcccaaatccctgctgtaccaacatagaaaactgggtttggaggaggagaagtaacagagggaagaagggaaacagggaccattcttaggctaatttggaatcaaaaggccacctgagactggacccaatggggcttgttgggaacccacaccagatattcctggtcagcccagggcatctgatcttgttaatggccaataaaaattagggggacaaaggctaagccctggcagctcaaatgaatctcctctgcaagag

SEQ ID NO: 176 - DNA, 598 bp, Bovine  MMBT04198
  misc_feature (1)..(107): n is a, c, g, or t
nnnnnnnnnnnnnnnnnnnnnnnnnnnnnnnnnnnnnnnnnnnnnnnnnnnnnnnnnnnnnnnnnnnnnnnnnnnnnnnnnnnnnnnnnnnnnnnnnnnnnnnnnnnaatgagcctagagtccaatcttggttaaaaaccagacaaaaacatcttaaagtcatcaaaaaagtggagcaccagagaagatgatgagatagtaagagtgaaaataaatcagtaacctgctcagttttcactaaagcagacagacaaaaggtcagatcagatatacctacatattcatacaattaaaattttwaaaatttttgtaatgtcagacttttaaaagtcagactttaactaacataatgtgttcctctctcttacaaattaattttaaagtatattaaaaattgtttgcaaacctgacatggtaccaactccaatcacaagacattctacaagagcatccagggtgaaggtgggacctaaaatcgccatcccacgagcaatgttctccctcacttcatcctgaaacagacaaacagagcaaatgaggagaaggcaggaaatcattttaagaacttttggagcatcccagggcttttactaaatca

SEQ ID NO: 177 - DNA, 600 bp, Bovine  MMBT11032
ggcacaggggtgcggtgttgtcagggctgggggcctgtggaggggcgctgtggtacacagcctgaggtctgaggtgggctggccccgggagaatgggaggctgctgtggagagttcggtttctatacacactttgttttcccacccggggaattcaggctgtgtcctgttctctgctcgagtatattgaagtgtttattctcttaacatgtaacgtggactgaacacctgacacgcccagcgttctaataccacagacaacccttctgaggatacaggcagcctgtccaggaacctaaawgtgtctcgagtgcacrgtgccacgtgcagcgcagtttcccggaagccagcgtcccccaagcggtcttgcgagctgcgctgcttcccgcaccggggtgggcggctgagggttgcggcccacggmttcgtcttgtcccctctgaggggtccccgccctcgcctcatgagccccagctgtgctctggttttgttggggagactgtattggtttttagacacagaagaaaattcactctggtttaaattggcagaatggcttgaaattattttctcattcccagaagatttttaaaacaatttt

SEQ ID NO: 178 - DNA, 600 bp, Bovine  MMBT07908
gggtggcctgattaatggactgaggaataagcccgctgggagccggaggcaagtgtgtggttaagagtcccacagcctggatgaaatcctgactgccaccactttttgtctgtgactatggacaagtcacttgatgcttctgagcctcaatctctccattcataaagtgaataatagtactttctgtttagggtagtttgaggatccgtgtctgacatggagtaagaactatgtagctagttattattatctttgcttggggagcaaaggattgcttcctttactgtgtccaggacaaawgcagaccatccccagggatgctttctggttcagtgctggactgtgctgtgtttgtgatcccttgcctagtttcatctagcagaggagaaagamcattggacttgggggtcagaaaacttgatttaggatgccttcttccactaatgagataagtacacttgggaaaaattccttattctgtccaagtctcagtttcctaatttgtccaggggcacactcacctggggctcactgatatatcgtgagactcaaattagatacccagtttatacgggtgtgctgtgtaggctggaaagcact

SEQ ID NO: 179 - DNA, 600 bp, Bovine  MMBT11253
cgagccactggtggctccaggtggaaggccacatatgcgctcagagagccaagaggggtcccagctgccccctctcctccaagacagcggtagggtgtgaaaagggctgagacacactgcggggacattgcttcatttcacgttcacgtgagtcttctgaggggagcactctctttagctccttttgcaggttggcatagtgaggctcaaagaaactctgctcccctcaaggagatgtaaccatgaagtggcagagacgggacttgaaccgaggtctgtgggtccaaagtctatgctttwaagcgctcttgtcatccaagctttagaagaagcccagaactttcgactgaactcctggggatgaatctagtgatgggctggtaaatatttaacaactagctctctggaattaaaaaaaaaaaaaagccttgatttgtcgtgtctgctggtttctgcggtgttaaaacttccacttctgctgacgtcaagctaccagcatgatatcactgaatgtggagttgggaagagatgaacccgatctgctcctgcacragagaagagccagcttcagcacaccactgcatgaacatcctgccctca

SEQ ID NO: 180 - DNA, 600 bp, Bovine  MMBT09527
aaatctaacagctgtaatgttggacggagatgcatcaggtatttggtagaaacatatatcgtggggaagtttaaggattcaaagtctgggcagcgtttggtgaaggtctttgggatattttaggtgtctggagccatagggctggaagctggagtgaggatgcggaatgaagggcagagccccgcactgaactgttgagggaggagagagaggctgtgaccaggagggaccaccaccaaggcctttgcaaagcttagacggcctgccctgcccagttagcctggatgtgtgttcgctggwgtatgagaaaaactctaagcaaataaggtaaagactgagaattccctggtggtccagaagtcaggactctgcacttcccctgccagggctgagttcaatttctggtcaaggaactaagatcccacaaaccagagggtgcagtcaaaaaaaaaaaagagagaaagagagaaagagagataaataaatacaaggtaaaggctgctgagagcagaagcagttgtgatctgcacatttctcgaacggtctctaaggttgagacccccagggaagaatgggctgggtaccactggcgttaggctg

SEQ ID NO: 181 - DNA, 600 bp, Bovine  MMBT07138
agtcaaatccatcgcattttataagatacaaagaaagacttacaggcacctggcccagaatggctcctttccgctgggtgacgaggccattccctctgtcygcctgtgctgaatcccgcagcatacactgttccactggggcygggaaacaggtgggctcacaccatgcagttgtttttcgtggaatgtccgtttcttcacgatacttgctgataaacccgcatggcctgcatcagctctggactgttgaccaggggtcttcccaaacggggtcttcattcagctgcatttaagtgagcwcagagctgcyggrttagggtgaaaattcaatgtgctgcagtttgaaactttccacagaatttcaatattcttcttaatccatcatcccaagcactygatttctgttgttgtgtttttgcaagttaagcaaaaatatgggattacgataaacaaaatttccacacagcacgctgtatgcacctgtgctcyaagtcctcctctccccataatgcctccaaactatgtgggtatttaactcatttgagttcatttttgtgtgtggtgtaagaaaatgttctaattatttacctgtatctgtcc

SEQ ID NO: 182 - DNA, 598 bp, Bovine  MMBT09774
  misc_feature (1)..(111): n is a, c, g, or t
nnnnnnnnnnnnnnnnnnnnnnnnnnnnnnnnnnnnnnnnnnnnnnnnnnnnnnnnnnnnnnnnnnnnnnnnnnnnnnnnnnnnnnnnnnnnnnnnnnnnnnnnnnnnnnncccctcccccgcccacacacagcaggcttttccacaatcccatgccttgtcatttgcctttccactccgccaaatgtttcctgttttctctgccaggtgaactcttgcacattcttcaagatccagctcataggtcacctcctccaggaagttttccwtgccctccaggcagagtcagcccctttcccwtgctagctgtgtagaagtatacgctacttctcccagcctgtaattatctgcttgctggcctgggctccaccgtcctgttgttcacagatattccctcctcctctctggagaaggaaactacttccctgactcactggcctcactcaggcttgaccatgtgacttgccctgggctgtgaagtggaactcatgagtcagtgaggaayagaagcttccaaggctaagtatggttcaccatgctctcttttccctttgctgcaaaggatggcaatgccccatccagaaaccgcgctgccagc

SEQ ID NO: 183 - DNA, 598 bp, Bovine  MMBT09810
  misc_feature (1)..(74): n is a, c, g, or t
nnnnnnnnnnnnnnnnnnnnnnnnnnnnnnnnnnnnnnnnnnnnnnnnnnnnnnnnnnnnnnnnnnnnnnnnnnatagcaatttatatctctggcagcccaaactaaaaatagtcaggctataacagagacagggatagactttaaaagcaaggaagctgagtggccatgtgtgtaacatgtttgtgcccacctggaatcactcaggttaaaaatgaactcagaagttgcagagaaaaakattccttccatgtgacttaargtagtttctctctaagggcagggtcaagattctggcaawaaggaaagggaacagcaagtatgtcaggcaccgtctggggccccatgggatggcacatggttctgccaggaaatttacattttccatttctctctgatacaatcatrcctcccattgcctcctgaagaaatcattatgaagaaattagtcacccaagacctacatgaaaagcagatgtaaaatgcaaataaaccccccaacactgaggctattctcttcgccccaaaagaatgaggaaggttctcaagagttatgggaaacagcacccacttaggccagacacctccacttaaagcaa

SEQ ID NO: 184 - DNA, 600 bp, Bovine  MMBT06699
cccgccaacctttaaaccaccaaagggaaggaaaaggacaggggtgtgtgtagtcactggtcaagttggggacaggcggatrcactctgccagctacagtaatcaggccgagatgccccgattgaatcactgctcatctatagggaaaaaagactctcagatgggaaaaaaaggaaagagtgaattgagtactggagcagggagaggagggtggggaaggtggtgacaggagcagacggctcctgcttgcctctctgctgcctgccacagggccagaagcaggcggaaccccacagcacwcacgcggatttccactctgctcctcagcgggggaaactacagtgacaggaccctcatcacagacaagaaccaaagggctctgatctcaacctttctaactgatgctctgaaccgcctgtcaagcctcagctggcagcaagcgctagtactgcatgacagaacacaggtgtgcaagtgtgtgtgcacacacgcctaggtgaattagattttttgccacccaaataagagataaaacccaaagacagacagatctatggcttcgagtatgcatgtgtgcatgctcagtagcttcagtcatat

SEQ ID NO: 185 - DNA, 600 bp, Bovine  MMBT06652
gacttgggaactcatggccaggatgggggtgtttccactttgcggttcatgggcttggcagctggagctgtcatcttgtcrcccttgaaacatggatgatatcctgtagaaccgcattccagacccttgatagcttctgtatgtaattcccacttttgaagaatgtctttcacaagctctgtggactacatttcttgggaaaacaagacccaacaacaatgcaaacagcagcacaccctacatggtcaccgctcctgagttttgttcctggtgggggcatgactccagcccctcatgacwcgagggctcagagcagtgtctgggtcacttacctgtatctcttcagaagcccctttatcctttcgggatgggtatggggagaagatgtggaaaacggaggaaatgagggacaggacgggagaggtgtggctggtgatggagggtaggggcagccctacttcctagctgtcccagcagtgggctctggataattgcttcaatgtagaagtctcagttctgcaactttgaaatgccaacattttacagttaacgtgggccaggaatcagatgatggctaccaaaagcttagcgcggtaactg

SEQ ID NO: 186 - DNA, 600 bp, Bovine  MMBT05949
ttaattgaaacagtccgtattaaatagaatttgttgtatatttatatggtcttttaaagggagaagggatgataaaacatagagacagcgtgagttttattcccaaattcctataaatgtagcaccttagaacgtgtgtctactatagctctgtgtacttaaaccaaccatgtctgtatatgagagagttagacttacagagatttaatacatgttttgccccctctaaaagaaattcccagcataaaatgaatatatctgagtttttaatgagagatatagtcaggtaaagtaattttwaaatgcttcagtaaggtaagatagaagcacctaaaaatgttaatatgactgaatttttaaattatttattttaaacaatgatatattagaagtttcttgaaggactagaccaggtagaactattttacatgtttttagcatatrgtaaactaaatgttcattaaatgtttgttaaaagaaggaataatttgaaacctggttttggtttggcttaaacaattaatttagaagacagaaaaacttatttatgatgctattagcccagtcacagtatttgatctttgcctttttttttttttt

SEQ ID NO: 187 - DNA, 600 bp, Bovine  MMBT11359
gcaaaatgcaagaaatattcaagaagagtaatcatgaggaaggaaaaacaaagtgctgaagcataaaatgtcataaagacaaatttttcctactactctttttctaggatcagtcctggcacccacataaaactctctctctagattcctttccattgtaccctgaacaataatcttatgtcatctctggcatataagcagaggttactgatttgttctatctccctcttgccaaacaacaggaagagtagagagactagaattgcaatgtcttaagtctaccgtctaccaatgggatcwcttggaaaggcagttttcctgtgcaacctgtcttctctgactgaaacctactcagtaagcctgttcattcctgacctcctgcccccttgacactgatctgtcctaaaggggatgccaatatatcgtctgtcaaatttatattagaaagccagagcctaaggtccctatttctatattgcacacaatgctctatgtcaaactttgataaacatgaaatcacattttcaaaggttaaaaaacaagtgtcagtcagtcaaaaatatttgatcactgtgagtgtctcactggttgaccttgaac

SEQ ID NO: 188 - DNA, 600 bp, Bovine  MMBT06749
gaaaaacatacttgttggcacaaaaaccaatcatgtttcatgtagcttttccttcctttattgaaagagaaaatatagaaattttaggatggtttgcctccatcttcataaaaggcattgaatgaataaaattggaaaatcaagtttatctatagctctcttgatatttagccattcttgcacacgtacacatgttcgtgatcatggaccactgatagtttgccaatagtaggggatgctgattttattcacttatcctaagaaccagagcaagtactagacacagactatgacatattwtagaatagcaaataataaataccttggatttatagcttaatttgtggcttattttcacatacacttaaaatttacctctaatccatttcttacttcttgagatagttatgttctaaggcctgtgctgaaccttatcagagaactagaaacctgtggcagagattgctagttgcttacataatatccaatgtatttytttttattatggattcctgaaattttattattttattttattttgcaagatgtcagttctccaaccaggaatcgaacctgggcctggaagtgaaagtgcagagt

SEQ ID NO: 189 - DNA, 600 bp, Bovine  MMBT06761
gtttatgcctctgaagtttcttcttggaagctattgatgtgatggtaaaagtaaaaacttgctttaagcactcatcatacaaattaaatttcaagtaaaagcaattgatattgctgctgagtaagttcttccagtagattgctcagacactctgcaaaattgcctgctgacctactgcatgggccagagatgccagtggcctgatagccaatagtatctatcataggtgacatttatagtggagagctctaagcagttgtgccaaaagtacacagcaactgcaaacaggctatttgagawgagatgatatattaaattatatcctgcactttcaattgagaaatgagcatcctggagaaataaaacattcctgaaaccaagctggaaaaaaatgaaaatgtgaaagtagctaggtatttttactttgataactggatatgtaaagagttggcataggcacacttatgaaatgtagagtacatccatcactttaatgctttaggtttcgtattgtgacatatacagaattatctccattttacagatgagaaaattgaggctcaactagattgattttatctgagtttaaatgggcttccc

SEQ ID NO: 190 - DNA, 600 bp, Bovine  MMBT06770
gatgaatattccttttctctcctcttcaattgattctgcccatttttctgggtgaactgaatgttctcaaaagtcacaacagaaatgtcacaaaaactgtggagaaaatgtgggtttccataaaccaccaaagtgtgttcttgattcagaaatctcagggggcctgtgtcttcaaagtagatttgttctccacatataactcttatttgtaygtatttgattgtgatttcattctctataaaagagaatgtttcattggttctgatttccttctgatgtttttgtcccattttgttaacwttcttggttcctgcttcatagccttcagggatattcaaactagaaaaatgctttgcttgcacttcatggatgggaatgagaatgaaattgctttctggttctgaaaacctgaattttaagaaaggaaatacaaatttcccaaaaagttagttgaatatattgccaagcttggcttgtactttgggtttaatgaacagaactgtacataattatattgaaggatactcttataaagtcatgcaaatgaaaacagctttgccaaatttatcataggctactacaggctgagacacttggcac

SEQ ID NO: 191 - DNA, 600 bp, Bovine  MMBT07334
aactgatcaaaaaaagccttggaaggtgtagatgggcaaaaagaaacatacatggaccgttgagtccacacccgacttctgcacttcctgaggctatgcagctactaagcccacagacgccgactgaaggagatcaaagtctctggtccattgccctctcagagctcaagaccacacccgccctcaacaaatgccagcgcggcgtccacgtcacagacctcatctacctctagacaaagcagggggaaagcagccatcagtctacatttcccaaagtcagagaaaccttaactatgaacwccccgatggcccgataaagcaaacatgctctgtctttgctccaatgatctcatkctccgtaagggaaaygcaacctgaaaccaaacacaggtccagggcaggactatcagtataaagactggcttggcagactcacacttctcttgcactygtagaactaaagcgcttgcttcttttttccctctctttcctgcctcatgcattttctgaacatcagcaaaaaactagttctgtcatcaaaaaactgctctggcctggcttttaaacttcgctgctggcacctctcagagaatcgatcag

SEQ ID NO: 192 - DNA, 600 bp, Bovine  MMBT06143
actgatgtatacatgatccccctaatccttactaaattcttaataatcccaaactaatatttttgaatgtattagatgcacaatgcattgggtactgcatcacaaaataagcctgtgttaaagctggtcctctgctgccatctagtgtaatcataaaatgccaaaattaaaccaaaagtgactggaaaaaaagtacttcggtggcgcatctaaataataaatcattaaaataaactagttcaaaatatggtccttaaatcactggagataatgctataaaacatttaataatttattttwaaaaatgtaaatctcttaccacaaatgcattctggaggatataaatagttcattataatgaggatatcttaaattataaaaagattgctacttctatcttaaatatcttggaatttcttgggtcacttgatctgggggaagctggctgcmatgtagtaaggatgttcaggcaactatttaaggacacacagaactccagagttagtatgaagattactttaaactgaagacatttgagattcaagagatgctgaaagaagccttcccacaaaagcagaaacttctggaaatgaggtttcc

SEQ ID NO: 193 - DNA, 601 bp, Bovine  MMBT08496
  misc_feature (1)..(1): n is a, c, g, or t
ncaccagggaagccctaacaagatattattaagcagaattcagcaatacatgaaaaggtagagttgaggtcagaacaatgaacacattgcatcccactatcccataacaaascctgacagatatcacwaattgatcactctttttttctggctgaatcattctcagcctmtctctctccaggcagccattatcaatcagttaaagttggcatgtgagaagaaatctatttgacatcattgaacaaaatggatcttaacaataaaaagttgagatgctataattctatcttcctattaaaawtttgagatcattttacaggcaagcatttcctgcaatgtggggtcatttactccagaccagacatgggagagcaggagttccttattgtgagcaattcacacaaaaggaagaagccataaaatactaaatttctataaagactgtaaccttgtttgtcctcatttactgctgtagcatcagcccctaagaacaaagtctggtacatagtatcatccaggactgttgaatgaatgaatgagtaaattcttagggaagcagaaaaacagctctgtctttgtagagttgttacagttactgcaa

SEQ ID NO: 194 - DNA, 600 bp, Bovine  MMBT08172
aggcaggaggcacagacagccaaggaggatcgaaggctgattctgacttccctccagacagactgtgagatgctgggagtcaccccacccttccttctggactgcacttgccacttgtaactggggaggatggtagattccacacagggggttgagcttcagaaagttgaacagaggacaagctcagctacaagtgctgtggccaagtgggagtcgtggttctccctgggtgatgggttttgtttgttttcattagttgatttacaaagttgtgttagtttctaggtgatagagtttttwaaagtatttacttatttattcggctgtgccaggttttacatgcagcatgtgggrtccagttccctcaccrgggatggaacccaggccccctgcagtgggagtgcagagtctcagccactggaccrccagggaagttccacaggatagmatttgaagtgctgtttcttcccgtttctaattcttactttctagtatttctgacagtgagcatgtagtaaagtaaaacccaaaagtttcttttaatgatgcaaatgctaattgtgataaaaactttaacatatgtagtatgtcctagaataa

SEQ ID NO: 195 - DNA, 600 bp, Bovine  MMBT05616
cccaggtcacttttagttatggcgttgggagaagttttctgttgagattttacccctgccacattagaggcagaattcaatattctgcagccccaaaggccagtgttcaccaattctagtctcattcaagcaaactgtataacactctaatgccaggtctgaaagcacataactatctgctgtaatcaaaggtttaaatgaccatttatttcatcttgtatctgcctgaggaaatcckttaccagcctattttctccccttagagtaagaacatttgcatgcttgcagacaaaggtaacwatttcaaatgatatatattcttcaatggtgaatatttgctttttaaatacaragagtagagatctagttattattatgggattttacatattgctcaaattaactgccaagaaaagcctctaagaaataaattgcctttatgtaatattacctttaatttcttctagcaaatgggataagaggtttaagtaggttaaaggaaatcaagtaaacatatttatggaatacaatttttcatggttaaaagcctaaaagcaaatatttcacagcttactaagaatgtaccagggaactaggaga

SEQ ID NO: 196 - DNA, 600 bp, Bovine  MMBT06834
ggcagagcaaacacctggattccagtgtgctttcttttaccatttaccaaaattacctggagcttttttttttctcccactctccattgtttccaagaatttaagccatttatgatctcttaatccatgacaagatatccatgtcctctgaaatattttttttccccacatatttccaagttgtcaggatttttagtttctcttctacttaacagaaaatttctcgtatctactgcctcattttcaaaacacatattaaaatgtgcaagaaaaaaattccaaaaacagacttttcagtawcagcttttacatcagacatgggcatacacataccacacatctgtaaaggactgagcagctcatcataatcagggaggcattttcaggtacttttagagttacattgctcagtagagctggaggaagagatagaagtatttatatcttttctaagtggttctttttaactattaagatgtcttttaattagaaattgtaggagttgtcattttagaattcattctgcctgcattctacacagtctttgggaaaacatattttccctaaaggaatttaagggaggtgatggcaactgttaaa

SEQ ID NO: 197 - DNA, 600 bp, Bovine  MMBT06816
aacaaggaagctgggattttaattttgcatggaaggaagtagctcctacttcatcttgcctccttttctaatagttaaagccttccagctccctaccacctccatcccttaccatatgaaattatcaaaatcatgaggatctgagcaacccagtcatttgygaatcttctttctgccccatctttactggctttactgttttcatctctgacacattkactggctggggccagatctatcaggtaatgacgtatgctttagtttcccataagttctggatattgggaaacaaacagtgawtaatttgtttcctcttgggaaagtggtttragtcccatgaaatcaatgaataaaatgatgtgctacagacacttaccttcagctggattcccaaacagcttctcactttccattcttacaaggatgtgtgctgctgatgctgtttatcgagcttctttagtgaaggagtccaccagttaaattgttatggagccttttgtataagaattctttatgaatgccaaacatgttgctttcatggaggacatatagtataattaagtgtttctcaaactttagcatcaaaataatccaaaatgt

SEQ ID NO: 198 - DNA, 600 bp, Bovine  MMBT06973
ctatgaaatataatacctatgattattgatctaatttaaagactatcaaygtctgattttacaaaagtagtcaaatgttgccattctacataagaaattacattaacagcattcttctatttaataataaagaaatagaatatcctgaatatttcatatagttataaaatttcttgagagactgggaagacaaggtctgtttcagtatttacatatattatcactgaacttctgatgtagaggatcataacaaacctattatctaattattatgaaaactctatgtgtagtagaaaaagwaaattgttcaaatatacactttaggtagttaaattggaaactgcagttgcatttcttgaaggaatgcaatcatcatcattttattggtaccacattactgctacaatagcaataggctgcttttttagagaaaacattctgtgctataaacaagcaataaagtataagaaagccatcaacaaagatataaaagccaacttttgttacggtatttcttattattttacaccacatgaagtaataatatttctacttctaataaaatatctgagtagtatcagaatgaaaaggctaggaaaa

SEQ ID NO: 199 - DNA, 600 bp, Bovine  MMBT06802
agtattttcctcattttacagatagaaaactgaggtccagtgcagtaaactggcttgcccagggtcatcccaccagtagaagacagggctgctggacttaacatctgggttccttccatgatccccacttataaacgactgtaaaaacaaagggataagcagagttctaagacaagctaactaaagcaattccaaaaataactattacagaccaagcaagaagtttcgtttagttctccaagttctcaaattgaatttcagcaaggcttcccttattggacctgagttgtaagatcagtwcattttctagagtgacatcttggrgaaggggrtgggaaagaaygcttgggacaattaataagaagaccctccccccaccatgccttgcccccattaccagcttacctttatcagaagatgagaattaaaagtgatgacacaccagaaagcttacaggatgggaaacctaactcaaagcatcagtttcgattctatgtgaaccatcggctctctctctttactctttccatctggctttctggtctttcatgattgggtctttcctgaaggaaataactcccaaaaggaagtagaaggctc

SEQ ID NO: 200 - DNA, 600 bp, Bovine  MMBT06271
tactcaattgtacacttcagtttattactgtgtgaacaaagactctattgctgatatgagagctggttggcaacccatttagacagaattacatggactgggcactatgaggtgcctgtgcccaggggttctctcctcccatctggctcatgacacgggctttcactaatttcagttatgtctacaaaaaagaatgatgtctgactgagctttcttatttcccagacaacctagaaaaaaaaaamaaaacatgtaagtatatttttaaagagcctaaaagtgcagatttttctcttattwgttttttctaggttaatttattctatattggaagttaatgaaagtcaatatattttgcttctaggcaagcatcygaatattttaagaatatttcatttgattatctgcttgctatttattgatcctactgcagtggtctctggacaaaattgtgtgcagtgaggagcacaaaatgggtctgcccttgtttggcagctggtgataaygaaatcaccccacttcttagcctgttttgaaatgtaagtaacagaagagagttacttctgttacttkcaacctagacagcatattaaaaagcag

SEQ ID NO: 201 - DNA, 600 bp, Bovine  MMBT08344
tcttggaagacacagttgttccaaggagcctccctgtggtcagatacgcagcaaaccttctggcctaaagtctgaggagaaggactcttcttatgtaatgtagccttccattctgagtcagaaaaacccatcctcccagttattcaactgtggcccagagagggtttttctaactttatctgaaaatcagttgagtggaatgctaggagagtggtcatttgtacatggctacagctggtgaggaccctaaattgtggacagggcagaatggtggaagttaatagcaaacattcatacagwgcttattatctttcagaccctgtccttaacactttgcacacataaatttatttaatcttcacactaggcctatgtgataggttacattatcttcctcattttagaaatgagggactgaggcatgaagaggttaagtaacctatgatcacaccactatttagtgaaagacccgatatttgaattcaggcagtccttggctccagagtcaatgctcttaaccccttaagtaaaccacctctccatagcttgctctgctctgggccttttaaattaagaagttcccgtgacatcatagcatag

SEQ ID NO: 202 - DNA, 600 bp, Bovine  MMBT06968
aaaattctttataacctatggttaacatttcatcccttctttgtgtgtctggaaatgattgaccgggcttcagactattttctctgatgtactgcagcctgaaatccaattgttatcttggttcaattaaactcaaacttattggtttgtaggacacaatagtaaagcccaagcttagcaaaaccttttcagaattcagtaagaaactctctgaatgcagtctggttaccagagctatgtatgcatacctctgttgttgtgtttatatttcctgaaggcttaggaataaatacatttttwaaaaatctgagatgacagttctgcatggatgtcatattaatagtgaatctttgtggcatatataatgtacaaaggtacaattcctaagatggtcatcatgcccttttctggattctctgcctrtatttcatagagataatcttatcaaggagcatttctagaatggtcacttagctcatatgtccttttaaaggtacatcacatcacaatttggctgtagcattaaaaacttaggtacagtcttagctattagaactagattaatggttataagcaacatctttttttggttgttgttat

SEQ ID NO: 203 - DNA, 600 bp, Bovine  MMBT09729
gaaaagcatggtgacatcagtgaagaacaaaccactagtataattcgcaacatctcctagaaattagagggaaaaaacaatgagacagtgtcattgccctccacctgagaaaagaacaaagaattttagaaggctggtgagggtgtgtggagactaacagtcactcacggctggtgggaattattatatgactatgtgctcctgaaaagcaactgtaccaatygttgaaagatactcacatccttttgtaattccctttctagaaatctaccctaagacacacgtaaaatgctttattgwcagagatagtcattgcagtatgatttataattttttaaaaaggaaataacctgaatactgtccmacaatagttagaatggtgattttcaatataactttcaatgggcattatggagccattaaaaacaaggtttatggagcctttataataaacacataggggaatggtttatgttgccatgttaaatgatacagtaggatataatactgtatatagaatactattttaactacataaaagttcacataaaccaggaagaaatgctctaaaactttacacagttccctgtagattggttg

SEQ ID NO: 204 - DNA, 600 bp, Bovine  MMBT09289
accatgcagtccatggaaagggtagaaaacctacctacctagcagaattaacatgaggagtgagtaagaaggctaaggcaaggctcagaagcaggtggaccacacacacagctgaagccgtcttcgttgcttgggtcggtgcatcttttgcctaatcttccaaactgccaagcatggtcagactttgttttgaactctcctaatgtttaaatattggcagcttagtcaactgactttaaaatactacaggttaccaaagaagacagagatgacaaataaggatgtgaaaaacgtgcagtwgtatatgacatcgtttatatgacattccggaaaagccaaaactatatacagtatggaggactgatcatagttgctaagagttgagggtttgaccttaagagtagatagcagtgagggaatttctgggggtgatggaaatgttctgccgtgattgtagcaatggacacaggcctctacttgtcaagcctcatggacagaaccagagaaagacagcaagctgtgtccttgggatagtcagtttgtaacctatttattacattcagaacccaatttccatatgatgaacagctcacacccatt

SEQ ID NO: 205 - DNA, 598 bp, Bovine  MMBT08750
  misc_feature (1)..(101): n is a, c, g, or t
nnnnnnnnnnnnnnnnnnnnnnnnnnnnnnnnnnnnnnnnnnnnnnnnnnnnnnnnnnnnnnnnnnnnnnnnnnnnnnnnnnnnnnnnnnnnnnnnnnnnntcatttaatttggaaatatttcatttgtcaattcacacaaggtttatctcctcaaatgtgattttttaaaaatatatttttagtgctagtgtttatgtcaaattaagaatatgtagcaaaagttgacttaaagagcactcatcttaactattacaagttgtgagagttaattaatttcatatatttagctaaatcattwaatcactgtggcttggtaaagaattaatctaaaatcagtaagtggagtcatcatgtagaaataccaaggttttattgtaagtacaaaagaagatctctcatctaagcagtatgcatagaatacatttaaaagtgcatttaaaaatcaatattacattttatgtttaatacaggtcagtgacagcatatgtcagtggaaccaaaggacattttctgtgaaggtagcacagaaattctctatttcttaatgcacattacagttcactgaacctctctattatctaattctgaaatgcccc

SEQ ID NO: 206 - DNA, 600 bp, Bovine  MMBT05678
taaagctcctccccctgattctaatgtgcagccagggttgaggatgaccgccctggggtggaagagaggtctggtgaaagcgctgagtactcaggacaagtgagggtgccctggcgcagccggctggtgcttcagctactggaagagaaagaaaactgacagagagtcccagtgctttccaatagcttaggtacgaagaggctggggtatccagtgggataaaaagcagaagatggaggggaatatccatcccactagttaagatgtgaaattccatcacctgacattggaaaccagaawaaaagagggggagcacaagatattcaatggcactaaggcagcataagtgaacagggggtttggtgtgratctttcctcgttagagsctggttttcatgtcttactttggaaatatgtaactgagcagaatttattgactcgatcttataaaatatgaaaatcagctgccagcaatattgttcagcctgggagctccagacttacatgtcaggaattgatgacatgtgggttccttgatctcggttcacaatcggaagtcagcagcatcaaaccgtttctaccttgtccttccccagctag

SEQ ID NO: 207 - DNA, 600 bp, Bovine  MMBT10143
cactgagagtgtcgtgcaggggtttgtcctgatacccgccatgatgaggtcttgcgggttctctgaccccactgtcttacgtgtgtgtttttcagatttctgggtttctgaggaatcagatcagctctccccttacatactcttggctgtggctttacagagctattattcctccaatgcccctatttttcagcaatcagaaaaaattttagaccacagtgatttctttcttattttgtctatttggtaacttttttactcctttgttttagtgaccagcgggaatgaggtttgtgtgcwtaatccctcatcttgaagtgataatctctactaccacataaaagactttaaaagagttacagaaaaattcattgaatacgttttttttaatagccagttttggtctaacttaaaaagtcagtgaggcatatttgcgatattgttagattttcatgctcagaacaaagataatgctggtttattttttttttaaaaattgctgtacgaattagcatacttgtttaccatttttaatgaacgtcggtgtgtttcaggccacgctgtttcagactttacctctccagcagacggacacccagg

SEQ ID NO: 208 - DNA, 600 bp, Bovine  MMBT08653
tttgtgagtagcactttcagctgtgcgaatagaccattgttcgtgaggcttctcgttgaaaattctgctttagaactttttttttcccccactgacaccctaaattttttccttgtgtacctatcaatagcagaaaggagggttcaaaaacagaaaggaaatgcagagaatgagaggcacagagtggcaaagtcagggagagggggagaaagagagaggaaaaatgcaccgtgaagttcaaatgaacctggagctaatgacatctgcactttgccaactccagttcgttcatactctatwaaaatgccacatttaggagtgtaatgaaccttgattccttgtcagattagcaaaggtttcgctatctgactctcacgtttctaatgcttacatcttgaaggctcrgagttgagcaagacagggatygtagacgaaaggccccaggacacaaacccttctggattgcttttctggattctaagaccccaggtggaagtgcggctgactgctacctgtgtttccaaatctcttctcccacctttagctgagcacttggctatccaggcaacgasttcattttctatcctttctagcggctac

SEQ ID NO: 209 - DNA, 600 bp, Bovine  MMBT04426
cacctctcaagagygcmtttcacttaagtactgcccccagtggctgcatcttcctgaagtcagctcagaatctaagaggagctgctggttggaatacaaagagttaatgtagaatccttattccagctcggctctgtttccatggcaacagctaagggtggtgaaatcttaaactgaaatccctaggagccagcaggctgccagctgtaaagctggactcactgctcccagcgccacctgctggctgaatgccaccagtgcagctgacctacattccaacctcatttatttgccctgggkacgtggtccagggcagggtcccctgtgctgactgatgatgtgtgcagccttcatcccacaaatcagctggactccacctttccytattacacyctaaacaataactaggcacaaactctagaggcttggggagaagsggggaaaggtgaaggatatacctcacgtgggcttgtttattattagagcaaagtttgtggcttacatacaactggagtaagggcaggggaactgcttcccaaaaaaatataaagaaaaaatagaaatgcagggtgcttcaggtccctaatcataccacaacag

SEQ ID NO: 210 - DNA, 600 bp, Bovine  MMBT04544
aggggcccccaggttgccctcacgtctaaccaagtcagggattcacactacccccttagttgttacaatttgctggaatggctcagagaactcaggaaaatattatatttctgattacaaaaggatataattcagagcaaatcaaggggagagatacaggggatgaggtctaggggccccaaatgttaaacttccgtggtctctccccatattgtcaagaatgctttaccctcccagcacgacaacatgcaacagcacagagtatcgccagccaggaagccccctagagtttcagtgtgmagagttcttattgaggtttcattgcataggcatgrctgaccracttgactgaatcatcggtcatgtgactgaactcagtgtccagcttccttctccttgtggggctcaaagttacaactttcctaatcccatggctggtctttctrgcaccatcagcctccrttttgagtcacctcattagcataaactatcaggtgtggtctaaggtgccgccatgaataacaaatacagtcctatccctccagaatttttgaggatatagaggttactgaggatagaggttatataggacatagaggt

SEQ ID NO: 211 - DNA, 600 bp, Bovine  MMBT03468
agagagctctgagcaggggccacattttccaacaccgggggttggggagtgtttctacggctcctatcaccctctccctcggtattcagtcagttcagtcagttgagggcaagggtttgagcccagctcctaacaaatgttgaaccatatctagggcagygctactggactgaatggtacctggttcttggagagttgatttatcttgaaataattataaaaatcatatgcaagaagcagtataagragcagatgtgaaatccccttatcacactgttcccagtgggcttcttatccccmcctcctcactgctgccgcttcttcttccaggaggcactggttagtttcctttttctcaccctcmtttgcttcacatttctgagagttgtctctggcatataaagggtggtaccgctcggccagcggggtagttcaggggaggaccaaatgcctgtggatggcttggagtgctgcttggtgaagggaggatattcagtcaggtgttatattcagcaacacagaccttgagtttctaacgtgaggatatacaagggtgagagtggcgggagtaaaagcccttctcattatctcttgctttga

SEQ ID NO: 212 - DNA, 598 bp, Bovine  MMBT03262
  misc_feature (1)..(18): n is a, c, g, or t
nnnnnnnnnnnnnnnnnncttttttgggtcagatgcctcacaatcaacaggatggctcctgccaattaaaaaaaaattcaccacttcgtatacaattacagacagacgattcaggatattccgaaagccacccaagaaaccttgggttaagcactcctggtttacaatacttggacccaacaaggtcatatggtcatctctacttctccccctctttttaaccttccaagaccaggaaatggggtggctaaccggattacactggatctgaacaaactagcttgttaggaaaaaggcttmtttcttaggtattttacaacagtttaaaaacgttaataacggcaacaatttcaattaactcaaatgttttaatgatgtcaactacaacaaagtctgaaggatcagttaggttagatataacgtaaaagttgaggaattatgaatttaagaattattaagtctttctatccactattgacagtggtgagacttcaaaaatttctacagtagttattaaatgtatttcaaatacaaaatattggacacaatatttgatctaaatactaaaaaacatatactgcacaaatgtcaaatgtaa

SEQ ID NO: 213 - DNA, 600 bp, Bovine  MMBT03728
caagaatagtagagatggttacctttgtttttattattgctgcattaaagggtacaggtaaaatctttgatagtaaaagaaacctccacccatttttagagaggatcttttaaatgtacctacatgtatagataagtagattctttgctatatcagacactgaagtttcagactaaggtggaggatttaatttcagatacctctcaagctttatactrttattataagtagaaaatgattccagccattatgaaccaagatccagaagagtccctgctggttttgtctaactctgacttmaccttttacaactygtgtttcaccttccaaaagacattctcccaccccccaagccccactgcctgcctacagagatacagcagggcatcgctttacagtcccacgtggctttagccttgtggagccagagccctatcagatgtgctgctccttcttttctgcagcacrgcagcagcactcaaacagttaaccrccttcyaagtgtcccagtaatacattcctgctgcaacactcctcagctctccagaatcgaatttctgcaaatgtctgtacatggagacactcactccccagctcaac

SEQ ID NO: 214 - DNA, 600 bp, Bovine  MMBT03887
tagatttatagatgaataaatcaggacaagtgcagctaactcttttatttatttattttaaatataattgatggtaagaagtgtagagaaaaaggaaagtaccaggaaaaagattcatagctcagagcaacagtagaacttctggaagactgaatataattctatgagtaaagaaaatttagactatttgaatgctgagagtgatactctagaagacaggaagaaggtcaggatttggagtaagtgaaagagttctatctagagcctaaaaggctcaagtaccagggatggtcattaagmaagaggatttttctatataaaatagaaggatagagaaaggaatgaatgaacatgcagaaaatctagcttatgtttgaaaaaaatagtagtttgatttgatggtttctatcttctctataacatgcaaaacagaagtagaagcatggaatgtgagatactcaaagttgtgagataagactatttgaaatagttgcttcaggatgtggctattgaattgattcaagaaatcataaatttcaaggctgagcattgagaccagtgagcattagtgaccaagattaaaggttcaatcattctgcc

SEQ ID NO: 215 - DNA, 600 bp, Bovine  MMBT04620
attgaaggactgttgaacatctgtcagacattcccaaccctttcattgaaagttgactggcctccagaagattgtatactttcaatattccaaggaaagaagtcattgtaacttttataaaagacaaaaagaggcagcaagagaattttgactttgcagtgttttttttcccgtctcttatcaaccagctagtcactgctgcttctttgatgttaaatagatgcttgtttccattgaattttctgggtgacttgtcaggttggttgtgctttactctgatggaacatgtgatgttaaaamcttttctccccctctctggaaattcttaaactggcagccataccacagttttttctgtagattttgttacagatttgcttcataaagcttaaaaatgcaaagtttaagaaacatggtattaatttaagtgatattttaagttcatactttctattaaatttgattttctattctgttytttaaatttcacttaattttcactagctattttggtgagaactttgagagamacatctgttacgttgctccttcttagagtttacattttgttagaatatactctgcatttactgagygctt

SEQ ID NO: 216 - DNA, 600 bp, Bovine  MMBT05414
agacctctgtaattcaaatgtcacactgcaatttcaaattggcagccttccttgagtttcattttacttgctaaggaaacaatgaagcacttattctgatgccagcagaattgtgggaagagacttaagagatttgtattttcctgaatctttaatctgcagaagagagcaactacactgaccaagtggcacattattattatttcaataattctttagwtgtacaactaattgaatcttggaaaatatggtgtattcacataaaaattgactcatatgattgcaaaaatgctgattatmacatagatctagaaattatagcaacagaattgayagtaaacaaaaagtaagaccaacaaaaatatcattgatggtgtttctacggrttaataataaaygtactctcaaacttataatttcctttgagggaaaayaatttttactcctttcctcattatggctatctggtggtttgtgacaacaatttcttcttgaaaagtgtctgcaataccagcactcaaaagtcttctcgtcagttttcccggcatctttaaactggacagctccagccctgattatacccaacccttcccacaaacc

SEQ ID NO: 217 - DNA, 600 bp, Bovine  MMBT04095
tccaggtttctttatatcttcatgtctatactatatgtcagatagtgagaaaggaaaaggaaggttccagtgtcatttactctgtgtttataggtggtgtttagtcactaagttgtgttccattcttgcaacttcatggggagtagcccacaagactcctctgtccatgggatttcccatgcaagaatagtggagtgggttgctctttccttctccaggagatcttccccacccagggatcaaccctttgtctctggcattgcaggcggattcttgccagactgagccatcagggatgamacatgacatgaaaggacatatgacatcgataaaactcactgttccaaacttagaatctctcttctctctctcagtcactcacacacacatacacacataacttgagtgctgaagaaaacaagtagataaatgttagatcatacaataaaggattaagtaatgccaagcaagtgatggtttgtttatcactgtaataagttagacttacagtctggttttatgtccccaatctttctctactcctgttaccatctccttcaacattgcatttccatcagaaatgcatctgaccccttcaag

SEQ ID NO: 218 - DNA, 600 bp, Bovine  MMBT04098
aactgacaaactgtattactttaatttagtcaaaattagtgctaaatatatatagagagagtggatagacattacacttttaacaacaaactgtatgtttctagattttactgtgtaagaaaatttatagctgtagaaataaaacctcatttctgcttcatttttaatggtctattttcattcccagatttcaaagaaagcttgcacatgtcacagacgcttaattacagagctgaaattaatgatgaacattcgaactgctatagttgtcaggactccttgcacttcatacaactcaamtaagacatgtcacaatgaattccaggtctgcatgtgaacaaagtgaacaatctgtgggcctccaaggaacgtttttctgtggggagctcttactttgttcccgttatttgagcaagacctacatctggtgtgaaagcagccacttgggttccaatgaacaaccaactctggttttggagaatttcaactaccagaattaattgtgccctaccaagacagaagggcttccctggtagctcagctggtaaagaatccgcctgcaakgcaggagacttcagttcaattcctgggctggaagat

SEQ ID NO: 219 - DNA, 600 bp, Bovine  MMBT04761
tgatgactttgactttggaaaatagggagaaggtacttggaggtatgagggatcaacgtgacaaagagaatattgtacaagggaaaatgcagtgaggattctgatcataatggcatcaytgaatcttgatttgcttcattatttgggcatccccagtatctctggttctgtttgcctgcagattataaggcttgaagataaaagtgcaagtgaaaagataaatgagttttagaaacccactcccaataagttctggatagcatcacactagtaaaacattccacagctgacttggaaagmaaaacttgtgcctcattcatcttgttgttaccctgcttcacccttcttgcctcagacttggttgcctgagaagagactcaggatgaaaagctgtgtgcagaatctttatcaggaagtactcttaaaagtgggcttcccagctggcacagtggtaaagaatctgcctgccaatgtaagagtcacaggagatgtgggttcaatccctgggctgggaagatgccctggaggaggaaatggtgacccactccagtattcttgtctagataatgcccatgggcagaggagcctactggcctacag

SEQ ID NO: 220 - DNA, 600 bp, Bovine  MMBT05140
ccccaggtatgtctaccctggcccaatgtcaggtatttaaaaatacaaggtgtgtataactaaggtttactggctctccattatccagctttgtgtatataaaaaacattctttaggaagaccctgagtttttttctattttaagcctgttagggacgcctgtaacaaacagaataatcatcctccaaacacccagtaccaggcactgtgccctgggtgctttgttcttatctgtgatcctctttcagaacactataaaaacaaggaaactgagtctccaagcagttaaataatttactmagggtcatccaactgaaaaagcgaagccagttctgagactccaaaacgtagattcttttcaccctttgcatgtcaccagaagagccaagcagtcattatctatgaaaagaaatactttaacagccatatttttctttcatctttgctgctctctccaatcatgtttcttcctttttttttttttaagtgaagaaaaaatgactgctgcccgcattaggaaatgccacaagtgtgggaccagcctcatcaaatctgaaggctgcaaccgcatgtcctgccgctgcggtgcccagatgtgct

SEQ ID NO: 221 - DNA, 600 bp, Bovine  MMBT03342
atgtcaggcaagtcaagaaaatatggatttaaagatacttgaaatttaattgttttaaacagcatgcaggccaaacaaaatygcatacaggtaacactttgtttaatgagtctatagatgtgagaaacatggaaccagagcagagggcctatggagacaaagtatgagataaatgtagatgaatccaaggaaattttgtaaccataactactgtagttgggtaatttggtttcatcattttttggtagtcattacaattgagttgggaactccatttgtaatgcatacatttttaaagamctttgtagggaattccctggcagacyagtggttaggacttggcattttcactgcagggggtccaagttcaatccctggttaggaatcctataagttgcacactgcagccaccaaaaaaaaaaaaaaatttgtagagatgaccctctgagttctatgttcttttcagtccgatatcatccttaaaaccttccacaatagtccgaatcttctatcctttaaatatgtctacagctttctactaaacccctcaatgaccaatttcatctgagaaaatagaaaatttctataatttagtagaaa

SEQ ID NO: 222 - DNA, 600 bp, Bovine  MMBT04902
ttactgttggagaaaggagttaaaagatggaggaagacaatgaatcatgtactgttgaattagaattggagataccagtgtgaacttaagagtttccagtgtcrgtagatagatatagcaaatctgggacccacttcttggcctctgaataccattctcagtagactaggrcctgttggagaaatggctaatttagggaacgtgtgagatgaacctgcatcatcttatcgtgcaagaaagttgttcaaagaatgatgagattgtgtcaaaatgattcagaagcagcttgaataggctctmgtggccaaatttggaataatttgaacatcaaaataaatattgatggcaaaatactgcaaataaaattgaagctcataagtctatagtgaaagaattaatgaataaatggaaactatgatgaagggtggtatatttttataatctcaaagcatctccttttagaatactaattataaagattaaaaaggaactttacagtggaaaagttkggcaatggtcccagcagacataccagtgtgccaggactgagaatatggcatcacttcttagatactgttgacaaagatacacaccctgaat

SEQ ID NO: 223 - DNA, 600 bp, Bovine  MMBT03267
ggaacaaaagggaaaactacaaaaggcaaatggaaaaattcaaaagctagaagtggagtcatggtggaatatagtttattttagtaaacaaccccacatctaagtggctccgtggaagcactattacagcccagcccaaataccgctcctttgttatgtgaaccagtcgttattgaaagacttaattacatttgcaagaaaatgtgttatgtgctttaggagtattgtcatcaaaatggtaatagatattttctatataaagagtttgttatctgtttatagtagtaatagcaagcattmagccctgcagtttacatgttgaattttatttaattctcccagcaacctgaggctaatgtaaataaaagcaactcttgaaatactgttttcctaatctgaaacccctaaygaatacctgttgtgtcttcctagatctgagttctataagcacattgtgctttctggagggtctactatgtaccctggtctgccatcccggttggaacgagagcttaaacagctttacttagaacgagtattgaagggtgatgtggaaaaactttctgtaagtatcagtcagtactccaactgttagcatcc

SEQ ID NO: 224 - DNA, 598 bp, Bovine  MMBT10415
  misc_feature (1)..(42): n is a, c, g, or t
nnnnnnnnnnnnnnnnnnnnnnnnnnnnnnnnnnnnnnnnnnaattcaaattccggaaatggacctgctctccatttatttgattatttttatgacaagtttgtttgtgacaaccttctcccggacactcccaagcagattctgaggaaatgagagaaggaaatgcccagattgttcaagtggagcagagttcagactccaaagcagctttaatcctatgtctggagctgggtcagaaagttcataattagaacaagggcgggggttcagcctgggtctgacctaggatgaaaagagctkagatttggtttggatgaatatcctaaccctcaactgtgattctgactactgtaaccttaaaaaaaaaaaaaaaaaaaaaaggactgggcaggatctccaggagggcttcactctctgttttttaaaaaattttatcatcatttacaaaaatgtattaaaggctaagaggagggggggggtgcaggaatgaaagtgggaattcatacatcaaagttttttgggggctccaagaaattctgttattgctggtcaagttagccagtgctaagattttctcaaggcctgaagtctactgcat

SEQ ID NO: 225 - DNA, 600 bp, Bovine  MMBT08244
aactctaggtagtaggactgtggatgatttttatctccttcattgtctttttaaacttgcaatctaaaaawtcagaaacatatgttatctttttmtgattaggaaaaaaaaaatctagyagagcagtttccattttgaggaacagaatccaaagaagaattacctgttctggttggtgtccgaatggctgccccgcttctttccaggggcccgtcggcagaagtcccctgggaatatggtctgccacagctgagaaataatggaacagctgtaagtaggtcctttattttcagaaaattktaggcacacaccaggtatgtatatattaggataaaaaacaatcacatattctggcactctacttattcctctgatggaaaaaaaatcattttgtcttttacatggacattgatatgtgggatactgttttggtcagtggtaaggaaagcatattaaaaagcagagacattactttgccaacaaaggtctgtctaatcaaggctatggtttttccagtagtcatgtatggatgtgagagttggactataaagaaagcttagtggcgaagaattgatgcttttgaactgtggcgttggagaa

SEQ ID NO: 226 - DNA, 600 bp, Bovine  MMBT08526
tggacagaggagcctggtggactacactccatggggtcacragagttggacacagcttagygactaagctactacctgctactactatgaactcttagttryagcctgtgggatcgaattccctgaccagggattgaaccctgggccccctgcactgggagtatggagtcttagccactggaccaccagggaagtcccttcagcatgatattcctaaccaatttcctaaaattgtatcccygcccaccaatcacactctttcttcctcttccttgctgtaccaacagcctcagaggtackgtacatttcactaatatatctgtttattttctgtcttccccactagaattcaagtcccatgagagaggggattttcatctgccttttttttttttttttcatgttttatacccaagcctcaggcactccttgacacacagcagctgctcaatgaagagttattgtcttcttaattaatgtagctgccaactccaggccaaacaatcctgcagtgaggtgagggaaggtgggttttgatggagccttattcctcctaagaaatccatccaccctcctagaaaaggctccctggtcaaccat

SEQ ID NO: 227 - DNA, 600 bp, Bovine  MMBT06762
cattattcattaaaaattagatacttgtaaagaaaatacaaatgaagcctaaaccaaagaattgtaaccagaataacttcagtgttgtgaataaccaagttttttgactgcctcacactgagaacatcttaatattcttttggggaaagattaaatcccctctgatttaatagttgataaattatagtgccagactaggatataacttagagaataatttgacttctgccttatatttgactgttcaagtttctttggctttcatgtttgtaattcattctctttagttcatacctaaakaatgtatttttttcctgtgtatacctttaaaagataatatattcttattaggaggaaatacaaaagctgaaaaaagaactggaaaattttgatccatcattttttgaagaaattgaagatctgaagtataactacaaagaagaagtgaagaaaaatattctcttagaagagaagttaaaaaaactttctgaacaatttggagttgaattaactagtcctgttgctgcttctgaacagtttgaagatgagcaggaaaatcctgttaatttccccatatactaaaaggccatctctaacaat

SEQ ID NO: 228 - DNA, 600 bp, Bovine  MMBT07993
tgggacttgctgggcagcaataatcatggcaaattttctgccatgaccacatttagatggtcattcagaagctgatcccaattggacactgttcattacacactaattactatttgccctgcagtgattgttatgtgtgacagcaagtataaatgcaaacctagatgcttaccactgcccttccaaaagggagacaaaggactgcatatacaagtgtccatatcaagttattttccattttcttagataatatttagaggcaaatatttctaaagttcatgtccatgcttagaagacatktaactctgtatacgtatttcagatggtggaaaataatgtgcttcrgtgagaaaacactgtgatatttgtcttatctgtatatggaggtatggggaaagacctcarttgaaatgtattataagagatgagattttaaaataagttccatttctgtagtttatttccatgtacatttggtcattttgagagttgtttgataaagattattgrgctcttatggttagcaaaattctgttccatgacctgaggtgacatagataattaagatatgatctctgttctcaaagtgttcagagttag

SEQ ID NO: 229 - DNA, 600 bp, Bovine  MMBT05543
acaaattacttttgtttattccctgatttctttacccgtctccctacctgctttcccctcccagtgggcagaggggctcagaggactgtggctataatctcagctctcttggctactttgggggatttacagggaaatcagtacttggcaacttgtatttttcactgcctggcccgaactccagacatgagcccctttctcttatttgaacaacattcatatgtaaggaatagatgtcctgggagagatctctgcatcctggtcctctcccatgttggggctgcttgggcagcagtgacmtctctgtgttagacgcagcagacwtcatggcttacaaaaaatgtcagccagggaagtgctgccctgccaaccctctgtccccacccgtgccctctctgttgctgaactcacaccacggccacacagagcaaggtttagaatccatacgagctaccgttaacacacagacttccctttcctatcattccaacctcaaagacactccaggccctaggaattcccagctaccctaagcaagtcaccgtgatcttgaaggagctgttacctggggctcggcagctggaacccaccccagtggtc

SEQ ID NO: 230 - DNA, 600 bp, Bovine  MMBT09779
catctcattctgctttgcaaaaccgtgctctcagaggcgagggagggctgagctcacaggcttggagcacagctccccgggaaaggctggccaaggggcctggagccccgggggtttggggacagcagaccttggaccttgggtgtggcacccagcctcttttgttccctcctctgtgtaacaagaacatcagaagcaagcacctgacatgcatgattgcatttaagcttaacaacaaaagcctcataacctagggtggttgtggggcttaagaatcttcatggacataaagtgctcacmtctctgaytgccattaaggaaggtacaggaaraggcgcagggctaacgcttcgtgaaggctgcccagctgttatctttgggggaaggggtagggggcagggcatacctgtgagcaaagacttccccaggccgttgggctgaaggcacacagcgtggccaaagtcgcagagggctgcgcggctcccatcgctggacaggagcacgttgtcggctgccaggccaccccggggaagaagaggaacaggtgagtcaccragggccccggcccaatatgaacctccggcggggcagttttctggc

SEQ ID NO: 231 - DNA, 600 bp, Bovine  MMBT06966
gatagaatacatatatcaaaagatattgtttatttttttttctcatctctggctcttccaactagagtgtaaatttcacaaacacagggacttgtcttaagcatctagaacagtactggtagatagtcacgcattcaacagttatttattgaaacaaacaatgaatgaatctcaattttgtgttcaacgccctgatcgggatcagcagttcctgaacctgggtatccttcagaattcttgacaggaacttaaaaatatatcagattccagggctctaccccagatctacttactcaaaamacagagggaggaagactattgaggaatctgccctgctggtgcctctcgtgtgcagtcaggcctgggaaccaatgatataggtgccccagtttcaggaacacagggggaaatatgagggagtgtggttagcaggtgaatgttgaaatcagcctatgtttgactcctagctttgtcatttccttattgttatagattactaaaatttctgagcctttcaactttctcatacttaaaatgggtatcataccagtatcataaaatgccaaaatcttcagtttcctgtggcatggtagaatcaga

SEQ ID NO: 232 - DNA, 600 bp, Bovine  MMBT06280
gtggcaccaggaacccacaaatcacagcctgaagcactcaggaccttggacgtttgcttttgtttatgaactgtgtagggtgcttattttctgcttttcatgatggctacaaccaatcttttcacactgtatttatggtgcttttctttctttcttttttattaaggttgttttatacttggcagtatctaaatgttgtatctggaatttaaataggagaaaccgtactttagttttatctaactgaaagaggccgagatcactgctggacagaaggtgattttcctttgaagagtgagmagggaggtcaccgagtggatgctgttatgacttggtgcctttcgcagctcatctcagcacakcctcacatcccagtgggctggggtctataaagcccagtttgcagctgagaacacagtaaggaatggagcaggcttaagttttggttggttggccgactgaattgaaaagcatgtatagaagacaaaagcccatggttggttggccgactgygttgaaaagcatgcacagaagacaatagcgcctagttgttctgagatcaaatatacagacaatgttgcacaaaggtctcaggtcaag

SEQ ID NO: 233 - DNA, 600 bp, Bovine  MMBT10155
cccagaaacagggagctaggcacgtccaccctgcagactgagtcccacggcttccccatcacattcttccaggatacgaactagcccctcccgtcaaactggggaccccatggaggggaatctgggttaccctcaggagaccgtaaggtctcacggaggagggagtcccaagggaagcatagcacacagcccatcccccaccagaccacaggttgctcgggcgtggccccaccccacaagccggcctgcccccacttacgcatgtcgaacagatccttcttgggrctgtcctcgggctgmagggactcagggccgtccagaccctgcgtgttgacatacagatggtcctcgtagtctcgggggccccgggcrtccgcctgcacatagccatccccgggctgggctgggaytggggagtcagaagggtgtgagttcagaggagcacaaggtcacgcggggaagctctggggagaggtccaagaggggcgccccgcccacrcctgtgtccctccaggaagcctgccctttarcgcagcaaggtcaggagtgaaaaaccccatgagagcccagctttggggctgtgagaggcgcagaggtcta

SEQ ID NO: 234 - DNA, 598 bp, Bovine  MMBT08176
  misc_feature (1)..(65): n is a, c, g, or t
nnnnnnnnnnnnnnnnnnnnnnnnnnnnnnnnnnnnnnnnnnnnnnnnnnnnnnnnnnnnnnnnnaactccccctgggtgcacggcggaagatgaagccactactgccacgggtcagctcatacctggtgcccatccagttccccgcgaacccrtcactggtgctgcagccctcrgtcaaggtgcccttgcccctggtggcctcrctctcagagcttgcccgccacagcaagcgagtctgcatcgcccccaaggtgctgctagcggatgagggggtggcctctctgcccacggcaggacmggtgacagaggagaagctactcctcrtggaaggactctctcctctgcttcctgtcccatccatcaaggaggaagacgtccagcctggggaggagacaccacatctagggaggcccatcaaagtcgagagcccacccctggaagcgtggccttcaccctgcccatcggtcaaggaagagtcatcccactcctgggaggactcgycctgytccccaacccccaggcccaagaagtcctccagcactgggtccaggtcccccacccgccgtgtctccgacctgctggtgatcaaacacagg

SEQ ID NO: 235 - DNA, 600 bp, Bovine  MMBT09426
tcccttcaccatctgtcttccagatgaagcccatgaacgtggaatatctcatgatggacgcctccatcctgctgcccccgacaggcacgccgctgactggcatcgactttgtgaagcgactgccatgtggtgacgtggaaaagacccggcgggtgagtgggcattggccttggcctctattctgggcagccgttcaccaggaagcacccctaggacaggagaggaagggtctctgaccacatccagacccaccttctagctcgctctcagagagccagagagcaacccccagccccacgmccccaccatccacaagggcctagctttcccacgagcactgccttttgtctgggcgtttgttttttaattttggctgtgccaggtctttgtagcactccgtgggcttctctctggttgtggctagaagattcagttgttgcggcacatgggctgagttgctgtacggcgggtgcgatcttagttccctgaccagggatcaaacccaggtcccctgcagtggaaggcagattcttaaccactggaccaccagggaagtccctgccgtttgttacagcagagactgaaagctgttggtggcag

SEQ ID NO: 236 - DNA, 598 bp, Bovine  MMBT08150
  misc_feature (1)..(14): n is a, c, g, or t
nnnnnnnnnnnnnntcttcatgaccttgtgggggctttcacactttgtctcttcttccccctgctgctttttcttttctttgccttctggaagttccaggccctctctgccgactgacaccaaagtcttctcagattccttcttctctcagacactgtactcatctgtgggctccagcacatgggtcacatctcagctgtgcttcctgagatgttcacatacacccaaggctgagccttttcccagttagtgcagccatcatggcacttctgtcctaagtacagccgctggtgtcccccmggaasaaggaaatcctcccacgtcaccaccatagttataacacccagaaactagcgccctgacatagcactgttagctggcatatggcctgatttcagattccttcaattctcccggtatttataggtttttaaaaaagtctaggatccagtcaaggaatatgctttgttttagtcattattttttttttaatttatttttaattggagaatagttgctttacaatgctaatctcttttaagtctagatagtctctcccagccttttaatttttgtttttttatggcattgcattttt

SEQ ID NO: 237 - DNA, 600 bp, Bovine  MMBT10010
agggaaggccctgttaaccgaaacgcccacatgctgcttgcaccacctgctctagagtctgtgaataaacctcacctcctgccgtttctaatggacttttgagatcactttcccatctctggttctctgtmagattctttcctgctgaggtatgtgaggcaagcctgccgttcccagtcagtcccaaccccacgtcccctggtcagccgccgtactcaccaggctggcttctccagagcagagaaaccacccagctggttttaggtgacaaaaatgtccaaaagatgcactttggccccmctaaaacttccatagggccctgcagtgaggtgtggagccagggaactaagggcacgcctggccccctgcccctcacaggttggccatgcctgtgatcttacaccgagggaacagttttatggggctgtaaacagtgtatagcattgsccccttagctgcrgtctcttaagcttagcgcagagttaaaatcttcatgaactttggtttagtggtgagagctggacaaccagctgcccccgctgcaggagcattattgcagccaaataaccacagaaggatcccaaatacagcagaaccggg

SEQ ID NO: 238 - DNA, 598 bp, Bovine  MMBT07698
  misc_feature (1)..(20): n is a, c, g, or t
nnnnnnnnnnnnnnnnnnnntataatgaggagggcaatgaaatggcattccgagagtcaatggaggagaaccctttagttctctcctcagggaatagctgaacaagtgattgttatcagagaacattctccagagttcccagccatgcaggattactcacttcccccctcatcaacacccactactcggtgcacatctctgaaagattttatacacgtgtcacatagacccttccccacatggcaggtacgccgcacgaacacggtcatacgcatctcactaaccagccacccaaacccmrccggctctgctgctaccccagtcagcacaggttagagatcccttcaacaaaaycacagtgagtgttggactcagatgtctctcatctcctccccttcaaaaaccatgttggaccccacttagtctctactctctgctcttgacacacaccagccttaaccctatgcatttacacctttctaaccatcctatttaaggacataattttaagatgtgtgtgcagaggtaattaccagggtgttcttcaagccttagtataatattgaaaacgcaaaacatcttaagtgcctagcattaa

SEQ ID NO: 239 - DNA, 600 bp, Bovine  MMBT06381
gagggcactgctccccacaagcaccaagctcttggtcagactggcagatcacatcagggccagcctggatgtgtgtggcctctgccctgtctccacgctgcctggaggctctgggttgcagctgctccacattcagggctcacagcaggctcgctcagggagctgctaagcgaggcatccaggctcccttcggaagccatgaaggcagccttccctcctctgccccttcagatctatgacttcatggacctgctggtggccgagcacccacagcttgtcagcaaactccagattggcagmagctatgaaggccgtcccatctacgtgctgaaggtaatgggtgcatgccagtrcatgtatgtgggcacttcctcaagaatggatgcccgcatctgtgcataagcccagggtgacagaaaacacggttatacagactccgtgtgtagcacaggtgtacacacacctgtacacacaatttaaacttttaggtgactcccctgttcccagtaaggtggcacattgtgcaaagtatcccagagttgggtagtccaaataaaatgttttgctcgtgaccttcgacagagctatgtgtgggcctgg

SEQ ID NO: 240 - DNA, 598 bp, Bovine  MMBT10805
  misc_feature (1)..(34): n is a, c, g, or t
nnnnnnnnnnnnnnnnnnnnnnnnnnnnnnnnnnaatactggagtgggttgccattccattctccagggactgtttgcattaaggtacagccaaactctagtttctccccagttcatcagagctcatcagagctgttcctggggtcctgtgctgtggaagcttgctgcattcttaaattggtcccaccccgccctggtggtgaacactgtcctgacttgcttccacagtgctccttgccttacctctgctacccactcctttctcttcctctccagggtcaaaagcggctggtgctttcmgagagctgttcccgggactccatgagcagccagcctagttgtactggactcaactattcctatggtgtcaatgcttggaagtgctgggtgcagtcgaaatatgccaatggagaaactagcaagggtgatgagctgcgctttggccgtaagtacccaggggaggaggggaaggggagagggagcagggctgtgattcagctgaaggtgtccatagggcatcctgtgcagatgtagaggagttacagaataaggggagatgccatctaggtttcaagactgaaggctctttgtgtgattg

SEQ ID NO: 241 - DNA, 600 bp, Bovine  MMBT06413
ataatcttcaattaaagattactggttatcttctttagtctgaggttgaaacccaagttggatctatatttcttctcaaaccctaaaagaatagtaccaatataatatgtttgtgattgggcacggcagcccactctagtattctttctgggaaaatcccatggacagaggagcctgacgggctatggtccatggggtcgcaaagagtcggatacagctgaggtgaccgagcgtgcataaacaggatagagattatgtcccttcagtttctggcaaattttgtaatccagtgggtgacamggatttattgtgccaatactagtaattacttctacttacacagcgacctaacttcagttcatgtgcagctcctgaaggctcctattcaaaggcccctttcccctatatcacctctcttggaagtaatggatctgctgttattttttattaatataaaaaagtatatagttccaatcagaaaatgtttttgtattgttgaatttaatctacttcaatggtatctacattttgtatcttgttcagtaaggctttcttcactaaggatatatatattttaacttccactttttttcctagtgt

SEQ ID NO: 242 - DNA, 600 bp, Bovine  MMBT06992
tgtatgtttggttttaaaaaatatgttttggagattatgaataattagcacccatttaacaaatacaacttgatattcagtatgtaataatacaacataaataaaagcaattattacttcaattatttaaaattatctcaactgccattaaaaatacaaataaaacagttacatactgatcacttgtcattttaatcataaaccatcattccttagataagctgaaaaaaaatatttattcaacacacaattactgaggacctactatgtgccaataagcaactcaggaggtacacaaamaaagcatggtcactgcrttcagctctcaggaagcttaaggactaaagaagattaggtaagtgtgaaataaatgttctagctctaaaatatctgtaacaacatattatggaagascagagaaaagagtaattattttcrcctttaaaaggctttaaaaggtgtcccaacagaacagyrttggaatttaacaaaaacagaaggaaaatacacagtttacrtttgactgtcaataaattacaaccagtattactgttcacaggcacttcacaagttctatttcacctaattatctcaacaacc

SEQ ID NO: 243 - DNA, 600 bp, Bovine  MMBT10295
gctgtatattctagatataaayaagatcactgaataaacaagggtcattggrtaaaatatggtacattagarggatcagtatttaatgacttatgactgggtcaaggcataaacaaatatttttcctcccctctgttgatcgaattgtatgcagcatagaaattctagagcacaaagtctttattccaactgccatttgaaattctgaaacagttggatgtgtcatcaatgacccaacccatatggccacaaggtatgctgagatcttctaaatggagcaaattatgcaggtgtgagtamagaggagtgaagaagyaaagatggtttgagtcggaaaagacatctattccctacaaaatgttctggaagatggcacttyctaacaagttgggatgcaggttgtaaaaccctttggttacaaagaacagaatcacaactgtgtcgaaagatggaagttastatcaagctactatagcaacaagttcagcataaactggtgtctcctttcaactaggacagtagttttcaattaggaaagatcttgcctagtgggagacccttgscaattttgtctggagagatttttgattgttacaacta

SEQ ID NO: 244 - DNA, 600 bp, Bovine  MMBT07448
gctacgaaggagaaaatggtcctttgtttctagggaagggatatttgaaaartgtggggtgctggtaaaagagctggctcctgagaaggagggcattcctggctgagtgggttgcaaggatgaatgcacaaaagcctggtgtggttcatgcgttgacaagactgggagctgtgggcgtggttgggctttgaggggtgagaccactaggaagacattggctgaagaggaggtggatccaggagtagcaggtgggagcctttcctctgtcagtgatggggagctacagaagaattgttagamagagaattccatgatatacatgccttttagaaaggttagtaaatggaaaaatcagaaaatacagagcagcaaaaacgacaggaaatcaactgcaatccatcctcactgttgaaatccgagtccatcactcaccagccgttttttcctacaggtacgtayacagacatgcttttttaagactcaaaatgatcaaaagttgtacacacttattttgaaccattttmgtttattttcacaagcatcagagtttcataagcattctaaagcttcattctgataagcacactgcaatatattata

SEQ ID NO: 245 - DNA, 602 bp, Bovine  MMBT06494
  misc_feature (1)..(2): n is a, c, g, or t
nngtcttaagggtcttcattaaacatctgccaaattaatgaaaagttggtgtctagtgctatcagggaaaaccgaaggcttccaactgagaggataaatgcctgtaaatgggtaagggttaaggagaaaaggaaccaatgcctccatgggcattcaaattattccaagtttctggagaaagtgactgctgaggggccataaatctcttcactgtgccactaattgctcctggggagagtgtgtctcacacaggctgggaaagcttgaggggataagatgattctctctggaattctccaaamgctgggttgttgatgaattctaaaggggtctgtgtaccagtaaacagacccctttgggccatctggtgctaaacatccataattaaaagtctgaatttgcaagacttccattcatcagatagcaccaatcaaagtgatactatggaactttaaactttcagatgacaggttagtgagaaagggaaattatgtttattacccactccgcatcaaggttcagggcctcttatttaaggcatcgatttccatggaaacagcctgtgaggtggagtatgcttattagaatgatttcttgtaaca

SEQ ID NO: 246 - DNA, 600 bp, Bovine  MMBT06496
ataagtgatgggaacaaaattgtctagggaatccacaaataactttttaaaaagtcataaatctggatttcatgcctcatagttttcaacaactgcaagaaataggtcaaagcctgggacacggtgggttcttttcctcccgtgtctgagggctggctctgcaggctccagtgggaaccacgtcagcgttccagccgcacttggtcctgaatcacttttcattgcttctagcactcactttctccgccccccgccccaaaatcgtgatcaaatacacatggaaataacttcttggctttmcagaactgttttatttgatcctttaaaaactgtcaggtagttggcaagaaatttgcaaaagtataaaaacactagagcaaatccatagtgtaatttaaagttgggggtccttggcaaaattttggaaagggctgaaaaaccaagccccaggcagggctctgtactcttgattgtctggagccagtcttcctcaggctgtgggtccacttcacctgggaagctttaaaataatgctgccaggacccacctcacggtgggcaggtcggagcctctgggggttggaggccttcgtgttaggag

SEQ ID NO: 247 - DNA, 600 bp, Bovine  MMBT07194
agtagtgattattaatagaaacttaaaggaaatagcaagtaggaaatttttttcacctcattaatgttaatgtgaattagtataaaaattatttataaatataatcagaaaaataccagagtataaaacagtcctttgaattgaaaggatgaaaatggttttatgtgttgaaaatatgtctacttgacacttaatataaattcaaatgttaagtatgcttttctttaatattatcaggagtttgcattttacttttagaaatgctttggaaatagagattactaatattttccttaaaamagtagaatatttgagtttttaaaacttggtttcaatttacttayggcttactgttcagaaaacaaggaggaaagccttctggaaaggcgaaggcagctatctcgtgatatcagtagactgaaagaaacagaagaagctctcttggccagatttcccaatcttcgatttgcctataggtaagagttaaatcttgaaattgaacatggtagtaactaggatatatttttgtgtraaagttaccgtaagctgcttttccttaattgttttttcttttttccttaaatctttattgaatgtttc

SEQ ID NO: 248 - DNA, 600 bp, Bovine  MMBT07414
tgtggtggggaggggctgaggtgcaggctggagggaagcccggagatcactgggtacacagctctgttctcaagccagcaggaggcacatccctccagagccttctccccatggccctgctttcctctgccggaccttcccagacaaatgaggactttccccacaacctgagccgggctggtggtgatgctgttcatttaatgtatcgctggacacagagcctgcatgggctgactgaacatattctaataacttaggggggaaaatccatattgcaaatcactgtactctggctttacmagaactatttattccacgaaccgcagagcgttcatcattctcattctccttggagcacatgaaacggcacacagataaattagggaatccctccctagccccttagctatgaaaaaaagaaaggagagaatgcaaacacacaagaatcctggaaaacagctgatccaggcagtggctttggtctctacatctgaatactcatcacagttggtaacattaagccgtggtccccctccctgggccagagaagagagtcatctgtcacccagatgcagaaggtctctgtgcagcctcaggggg

SEQ ID NO: 249 - DNA, 600 bp, Bovine  MMBT06701
tttggagtgaggtgggtattttcttttaacttgggtgagatcagggcaggctgcctggctatgtttggcttacatttgaacaacccagagcccttaattctcactcccagctagtgtagcctgggacatgctgtttataccagggagaagagcctctcatccggtctggtattgtgggaaggctggggtgaggggtgagaaggagatggagtctccctgcctcttctaagagagtaaccacgggggtgtggttcaggttcttctttctttcctctgcttgtatgtccacaaaaggttacmctgtaaaagtcggtttttcagccaggatcatccttgttccatgcagattttctaaggtggacttgtgttatactcctttgcactgtttcccatcactataattattttaatgatttgtaaagtggtctccttatttagcgatctgaggttagtgacccttaggaatagcaactgaccttgagcagacttccctgaatttacagaactgagatgataattgagtagccttgaccctcaagttcatttccattcagggaacgtcagttccacgcagatgtgttggtcgtttacatcaggcac

SEQ ID NO: 250 - DNA, 600 bp, Bovine  MMBT09199
gagatcatatgatctcaaataataataatcatagatcatattataggtgctttttggagctcaatgtaagcttagggagggcagttttctgtattatttccaaatacttggcagataatagtgagagaatcaataaagatatccccatatagggctaagacaggttcaccaatgacatcccaacatgaataagggattttatttttttaatgacttgaaaatatgacgaattgtttggaaaagtatatcaaattatctgaaactacagtgcaaaatagattaaaatgcttacatgttagmaagtagaaatgaaaaattggtgaaaaatttatagttttgaactaaattataccatttaattataacagtgtctctcatcttttaaattaataagatattgcttctgtttttaatgatgtcaatactgtagtcagcttggactcagttggtaagctagtttatcataacttgaaagtcatcctatatttatagtatattaaatgcatgaaccaataattctgaggctggaataatgcatcaatccataatgagaactgcttttaatttagccattgataagtaaaagataattcaatattc

SEQ ID NO: 251 - DNA, 598 bp, Bovine  MMBT10759
  misc_feature (1)..(173): n is a, c, g, or t
nnnnnnnnnnnnnnnnnnnnnnnnnnnnnnnnnnnnnnnnnnnnnnnnnnnnnnnnnnnnnnnnnnnnnnnnnnnnnnnnnnnnnnnnnnnnnnnnnnnnnnnnnnnnnnnnnnnnnnnnnnnnnnnnnnnnnnnnnnnnnnnnnnnnnnnnnnnnnnnnnnnnnnnnnnnnntcttgacagataatgcggttccttcagcagctgtagcctggactgtcttcctcttgatttggtgtagttcctttagaacttcaggagttgaattaatctaaccccacaattgcatgtttaagagtcmatggggtcaacagggcataagatcttcacagaatcagcatcacatctccaaaattagaaggcacactaaccctcagcctctaaaacagatactcaaacacatttatgtctctgggacttagtacatagggtaatacagaggtaatacaatgtgcaacccacattgtagttgtcatcaaatatctaaggagagacttagtgacagcaaaaggaaagaaaatagacagagaatacatgggaaaagagagtatcttcctggtttcatcctcagcagtatgtggtctctctgtgccagtagt

SEQ ID NO: 252 - DNA, 598 bp, Bovine  MMBT11339
  misc_feature (1)..(63): n is a, c, g, or t
nnnnnnnnnnnnnnnnnnnnnnnnnnnnnnnnnnnnnnnnnnnnnnnnnnnnnnnnnnnnnnntatcagattcatttcctcccattctcttcctagggcttcctcccctcattcaggtcttatggtgaccctaaaagctcccatgctttcatattcctgcttagacatccagaagttccttggtcttcttgcctccaatccatttccaaagttcctgggtaagaaaaggtactggcccaatttgaaaggtgctcatctttgaaacaatcaacagggacaacagcattggctcaactttamtaaccatgtggatggttgggtataaagagtgatttctagaaaagragtgccaggcatcaaacccactgcagtccattacagcttctctaaatcctgcatttccccattcatatattcatcatacctaagtataactattgatttaacatktacctttcaggttatkctataagctyaaggaaggtggaatatgtgagtctttcttggtctctatctcttcaccaagagtagtttctggcacatagacatcctccaatatatttctgctaaataaattcaactattttaaaatgaaatt

SEQ ID NO: 253 - DNA, 598 bp, Bovine  MMBT06260
  misc_feature (1)..(27): n is a, c, g, or t
nnnnnnnnnnnnnnnnnnnnnnnnnnntaaccctgataaaggaggattttttggagtcgaggcaggattggaagctgaagccatatttcactagatatgtcagtgtaagaaagttacttaacctcttcatctgtgattcttctgtacgtgaatgggacgacaatagtattcccttacagagttcatgctttgcccacagaaagctctcaagaagataattattatcatcatcatagttaacactattcttggggagggtatccaagaccaggagtgactgaaggaacagaagctgtgacmagcaagtggtcatgccagagactgagaagaaaaatatgaaactctgaacccaatgagaagggagcaacaggcagccgggtatgagaacacaatcaggaggtgagccagcttctgaatctaaatgcccgttgtctcatcctctcaactcttaagggatccaagctgaacttggagccacctgtccagagggcagtgcccgtggcaaagagacagaccatactctagtcaagatgaagactcctttcttttctgttgatggctgagggacccatcccagttgtaaaagtttctttatgtc

SEQ ID NO: 254 - DNA, 600 bp, Bovine  MMBT09544
garataactaaaytttcccatgcctcatttcccccatctcctaaattaaattaatataatctgtcatatttctttctgtctgtgaccttggagagtttccagtagaaaagacctgtgaaaagttttttatattttatatattcagttactctttcagataggcaaatgaggtaaagaaatgctataccttatctgtaaagcttccatttaggtcttcttaaatcatgaatgattgttcagacagctttctatcagcatgattttgtcagggaaactgaggcagagttatttgtatgcttmyagtcactagagaatgaattgatacaagaaatatcatctccagagactattggtgaactccaagtatcactgtaatttgaagtgtgtccaaaamaatgaaaacaaatgtgataccaaactgatttgtcaaagaaatctttwaaaaatcctgttgcttatctggttttatgtcctttaagtagcagaattatgaccaacaaattactttatcaagatgataccctaccttgttgaaactgaatcttgaaatcactctccttttacttcaagactgaaacctcacattacaggtctctgtct

SEQ ID NO: 255 - DNA, 600 bp, Bovine  MMBT08970
ctgatgacccaaattcgaactgataaaattttcattcattctacaaacattttctgagcacctaccaagtgtccagcactgagcatcctggctctggaaacaccaaagcagacagggtccttctcttgtcctccatttgtgaagcctacattacagctcaatatctacacagttaggcatctactaggtgctgaaatacctgatcaaccaagatccctctcctgcttttcttgtggtttaaaacagattttgtcttcatgtctgaggatcttttgtacgaataatgctcaaaaaaaaaamaaacaaacccmaaacacagttcttttttaaaagaaataaaattacttgatgaacctattctgctactatacctactccccacgccctgaattaagcaamcacattaacaaagcctattgttgccttttaaattagaataaacaaagatgatgccacgatgacagcccaaaacaatgcactgtagtgttacccataccatatatgtcttctcaatagggaggtgcacaaaactggtataaaaattagatgagatattgtctcagaaatggttattaaatattagctataacagctgataac

SEQ ID NO: 256 - DNA, 600 bp, Bovine  MMBT06144
cccatctcccacctgggcataaggccttgaagacaactgtatgataaatgttgtctccttggtgtccaagaagtatgtctgatcatcattttttgtataatacctatttcttttattccagcayacacatrttttacaatttaacattggtgaagtcaggattcatcctataatcgttgactgctataatttaattagcagcattttttcctctcagtggtacataaactatggggacatcttagattcagtgaaatcaagcatcattcaagcatctctgataacagctatgtttactcmtctgtcctctctctatggtgaatcattctcttctcaacatttctttaattcctgttctccactcctatggttgtctcctctttacctcatttaaatttctacctttctcacrtagagtcacattattayaataagactgtgctaaatccgcaggtgtcattggctcatgataaaatgctgtttacaattctgtttgctatagaatgaatgccarttcacyacataagctagttaaaatacatctttatttttgttaagtgtgaacagcccaccatgctataggagcttccatttatgaag

SEQ ID NO: 257 - DNA, 600 bp, Bovine  MMBT06715
acagagagagaaacctggacctttggattgcctgataaaacattctaggataaaacattctaaaaccctttgcaggctgtgtgccataaatagccatttaaagatttgtaattcagacatcgctttcaagctttaactcttctgggttgcttttgccatgtttttggcatcatgtacattatcttggaaaatacagttttctgttttgtgggaaaggtgcactgtgaaaagtcctctggagtaaaaatggattggagaaaatttatttcaaaatttattccgtttgctggaattaagtamacaaatcaaactggctccatccctttgtgactgttgtattatttttgttgttagaaaatttatgtgtgccgggattttcaccctaattgcactacatgtccttatagccaaaaggagtggaagagccggtgttggagattttcccggggaaatcctgagagcattcattatgaagtgtaccgtgcgggagtggttcagggtaaccacagtgctcctcatggccccagcgattccagccatggtggttcctaatgccactttattggaaaaacttttggaaaagtacatggatgaggatgg

SEQ ID NO: 258 - DNA, 598 bp, Bovine  MMBT07486
  misc_feature (1)..(117): n is a, c, g, or t
nnnnnnnnnnnnnnnnnnnnnnnnnnnnnnnnnnnnnnnnnnnnnnnnnnnnnnnnnnnnnnnnnnnnnnnnnnnnnnnnnnnnnnnnnnnnnnnnnnnnnnnnnnnnnnnnnnnnnacgcatagtctttatattgatgtaactgagtcagaccacgtaccgcagacattcgacctttcttgtatccttatttctcacaacactcttatgagcatggacttttagcttctctgtttccacataaaacactatcaatcatattgtcttgaaatatgctcaactattaatttttactccttmttactctttgccagtgattatttaagccactcaattaatcaccacatttattaacataaccaatatgtgtaccatattgttctaaatgaagccagtatacayactcacacttggtaatagactgctgtaaaaggagtttaagattgaggaaaatcctctaagatttatttctctcttaattgctcccttatttccaaaatttaacaaattgccattgtcatcttggtttcctgtagagaaggaagaaattttgtttaattacttctccctgtgtttctgctttgggaaagcaagtgac

SEQ ID NO: 259 - DNA, 600 bp, Bovine  MMBT08119
ggacctgcagttcatcaatttccaactactgtgaaccaacgaccagcagattaataggatgtgctgaggaagagccgcccgctcacccactaattgcttgtttacgtaactgatgagcatggcactcattacgggttgttagcacatcaaggcagtgtctgctgatactgggaaaggcctgaggtttgtggatcttagctggttgtcagcaggcacagtagctacttctggggtgctctacccccacagaactgccacggatcgagagtttagtttcaggcatatgacctcacgtaattmcatagcaagcctgcgaggaagggactrtcatccctgttttagaactgaggaaaccctgggtcagagacactaagtgattcacataaggtcacacagctcatccatggtaagctccacagcgttaaccgctctgctgaacagcccccacctccaacacctgccttcatactcagtgatgtcatgaatgcaagtgatgtcatgaatgcaagtgatgtctgcatctttcatgcaatttattggacactctatgctgtgtgctaagtcgcttcagtagtgtcagactctttgtgacaccatgga

SEQ ID NO: 260 - DNA, 600 bp, Bovine  MMBT06831
accaacaaggatctactgtggagctcatggaactctgctcagtgttatgtggcagcctgggtgggaggggagtttgggggagaatggatacacgtacatgtacggctgagtccctttgctgctcacctgaaactaccactacactgcttgttaatcagctatatctcaatacaaaattaaaattttaataataataaagcaataaagatttccaccactaaaggtttttaaaaataaaaaggtgtttatagaatataactaagaaaaacatgtatccagaggaagaatgacaagttatamataaactgaaaacaaaatgctaatattagggtataacaacctttgggtttttctcttaagattttcttccatgagttgaaatttctttaataaatacaataaaatactttaaaaagcatggaaaagggaaagtgacagaagtttaactgaaacacaaaggcttagcttaggacaactgagaaatgagaacccatgagtcaggaaaaagctcagaaggtaatttctgcttctggataaattagacctgaggttgacttagggaggaacatatccagacagagaaggattcagatgcctcaa

SEQ ID NO: 261 - DNA, 600 bp, Bovine  MMBT11119
aattaacatcccacatgcttggagtacagccaataagtaaataaatagccagaacattaaaaagaaagaaagaaagtgaaggcatttgtgtatctatctctcagggttcacaattcagaaggattattaccctagatctttatttaaaaaaatttttcttttcccagttttattgagatataattatattgatatataattcaccctaggtctttaaataaggaacttcaaactatgaaaggatcatgcttttttagtgtctcaattttttttttttttaaaataccagaaaactgttamatttcaggatggcaggatgaccaggatagctactgtcttcatcygcctcctaaatgggtacactttttagtttcttactttgaaatatytaaccttgtacatacttacctatgtgtggatgtttatcttgtctagacaagataacaagggctagaggcagtgacctcaccttcactatctcctgcagctctatgatatggagagacacgagccctgcgaactcccaataaatattaactgaatcaaaaaaattactatatgaaattccctctgggtatgagtggaaaaaattcttgcttc

SEQ ID NO: 262 - DNA, 600 bp, Bovine  MMBT09252
tgtcccatttcctgcaaggatttggcactctrtccctgaacatgtaatatgaagcaacaaagcagaagtcatcaaaattggcaagaaatgggtgatgccattaaattttcacccacttctgatacttgaggacaagatcaaataacctgtacattaccacagaaaaaaactggactatccttgagtacaatcctgccaatgacctgagaagacgagcctgggggagagcgggtagggaggtgccaggggacctagtgaatgaccccatttcagaagcaaacgcggggatgtattcaatamattcyagtagcaccaagtcacatgaatctggatgcacaaattaaccccaggctggttttaaatcatctctaagagactgttacacatttcagggagatctgagaatgttgtgcacatgatcctcgctktgtgcaagaagatgcctgcctcaytgaaggacaggtggctgcctttagcaactttgtaagtagattaaacacaccaaagaagcagtgcagagttctggataccaggatgagacctgcagcyagatggaacagcacaggagctgcgtaaccttaaccaagtgctgcacattcc

SEQ ID NO: 263 - DNA, 598 bp, Bovine  MMBT06769
  misc_feature (1)..(41): n is a, c, g, or t
nnnnnnnnnnnnnnnnnnnnnnnnnnnnnnnnnnnnnnnnnactggttgaaattatagtttcataaatgaatgtcagtggtatacaagtaataataactttttgttacaaagtaggattttgctctatatgtaatgagtaaaattattaaatgcaatcttatgtttcattactgacagcttgttataaaaaaggaattaagactgaaattttaattattttcataaagtagatcagctttttcactcatgtgtagtgaaacctactcgactgagactcttttgaaggaagccctcattamattacatcactaaatacaggactgacagttcatattccaaaytattccctccctaaactcttcaaytttaaaggaatctaggaaaatattaagttcaacataactataactattaagttaacataactatacaaaatgaaaacattgaatgcatatctttggcactatttggaatgcagtatttggaaagaattttatgagactatttcattggtagtaccaagtaccatcaacatagatgttacgatccaagttggtggtaactaaaaaggactaatttttgttgttgctttgragc

SEQ ID NO: 264 - DNA, 600 bp, Bovine  MMBT08679
tctgagctgtgctctgaccggtgggagcagttctcactgcggctcagcatccttcttcctgaatgatgttgtcaagcagcccttctacttgcagagttcaaccagagccacgaaatgagagcggtgttaaaagaggagtgtttccaagggaggcagaggagggacggtgagaacatcctaagggtttaatcaggtcacgctgcaatccatccctgagagatctgggctaggcagctgggagtaccacagaggcatggctccagaattgttttcattatgcactttcttgaaaccctctgmagacgctcacctttccacctcaaatggctatgtcatcacctttatttctggctttaatggatttttctgagcttttagctttgaagccgtatagaaagaacagcctcacctgagaaccatagctgttacccagatcaaatgtcaccgtccttggagacagctttaactgcagaatgatgttcaaatttgggggctttaaagcccagcaaatagattctatatatttttgatggtctctgaaagaagtttcagaaagaagacctctattttctctcaatttaacactatatctgttataaa

SEQ ID NO: 265 - DNA, 600 bp, Bovine  MMBT08666
gattctccaggcaagaacactggagtgggttgtcatttccttctccaatgcatgaaagtgaaaagtgaaagtgaagtcgctcagtcgtctccagctctcaacgaccccatggactgcagcctaccaggctccgccatccatgggattttccaggcaagagtactggagtggggtgccattgccttctccgagtaaatggtactaacaacattaaaatcacacttccttatccccaaacacctgcaagctttgttttcaaactaaacaccccacactatctattgcttgattacatttttmttaattaaatggtgtatataacttgcattttcagttaacacagcaaaagaagccggcattctcataagtcatttttatgagttgggcccctatcattttaatgtagcaattaattaagtgtttaataaaactgtgttttattatagcaaagcctggtttcaagagtctagttacagtcgtgtcagcattttttgtttaccaactcctttttaacttctcaataattgttctataaaaatttgctttgggtacaagctatgaaatgctgtaaattgcaataataagctattgtttagatat

SEQ ID NO: 266 - DNA, 600 bp, Bovine  MMBT06639
tggcagcttgtgttaagcttatttgaatatgtttataatgtttacagcatgcaactttttttttttcccacaaggtgttggaattatcagtcatgaatggcatctgaatgcatttatgttaattgcagcaaggctttaaggatctttgagggctattttgtgacttaaatcaggtggaagttaaaacctcttgcagggagaagtatgggtctcgcacgagttattggcattgcctcagagtttcagaagaaggggcttgtgctttatttttacaggtggtaaaaggacacatatgaatamtataatgcctgctagtacaagtacaatgacttcatattgatcacagtggaaaccagaagttattctgatgttctgtatgactgcagcaatttgcagagaaaaaaaaaaaamaaaacattttctagagaagatcagagttgccatagcattctttgtacttcagattccttgaaagactccataaggcagagagctcaaaaagccaggcaaaccagtaaaaatcaattaagtccatcaatggaaattttgtacattgacaaatcatggtttctgttcttcttataaaataacaaactctac

SEQ ID NO: 267 - DNA, 598 bp, Bovine  MMBT11086
  misc_feature (1)..(46): n is a, c, g, or t
nnnnnnnnnnnnnnnnnnnnnnnnnnnnnnnnnnnnnnnnnnnnnnccagtgtgaataagagaaatattagcctttaaagattttctttacagttcccttgaaagctggctggatgaagtcagccagagaattatataacagcaagcctcatttaaagcaacagtgcctttctataggactctggggtttcattgacgggtttttgctataaattataaagaaaaagatacaaattttatgaaaaacagatagagggaccctcccattcttactttctgttctttcaccgaagggatacmatttctagggtgttcatttaaaaagaaagatacaaaacctctttcaaggaagataagaaaaaaatcacgttcattaacctcacgcagtcatagcatgcttaatcttgtttgaattaagaagaaaaaaaagaatgaagagaaaatcttcctaaagcattcgttttaatttaagagattttgtgaaattttacaaatatccagctatttttttcctctttcaaatggaaccagaccctttgaggtagggaaggatwcaagcatcaaatagtctactgctgcagtgttttctgtggtgctt

SEQ ID NO: 268 - DNA, 600 bp, Bovine  MMBT06185
agcctggtaggctacagtccatggggtcacaatgcaaagaatccagtgcaactgagcacacacacacagatgaaagtcaattctaaatacaaatacatggaaaggcagagagtcataaacagaaaaacaaagaacaaggtctccattgtgagtacatccaggccagtgcactgtgttaagtcacaagtactttgagctttgctctgtatcatatttttgatatggtgatatgtacctaccatgtactttgaagtgtactgataatcaaagagagaaaataatcccgtaatagaagagagmacacactttcagctacttctgtgagttaataaataacctggagctttyggtcttttaacaataaagtttctaatgttttccttctagaaattagatacaaaagtcaaagttttgctgtccagtgaaaccagccttgttttaaaaaagagagagaaaaaaagaaaaaagaagctgtttctaggcaaagagcagaggacgtgggaataacatccttcattcagcttcatcccctcaaaagctcatttgtagaaccgggtaaacacacacgttctgcattctatttttgaaattacgttgagg

SEQ ID NO: 269 - DNA, 600 bp, Bovine  MMBT05501
gaaatatttatgtctgctgtcttacagattaggtgccggttgtagagtagctataggaacaatctgtctatcctttctgaagtttctttattctttcccgaatgatgaagcctcctagatcccacctcaatgaacaaagctcaattttttactactaaktgctttaagtaaggcttctgtgatctaatcactaattggatgcttgcatttaagaaakaaagatagctaattaacagaaaccagtattgccagtattaggggtcagacctttatatgtggtagcatggtgatgggagaccmayggtgaagtttagaaagtctttgggaacttaaataggtttttcactcagagagaagttgaaacaacacacccaaacctaagagggaggaggctttctgacagaggatgaatccgtgggccctgggaacctgtgccttctgtattttgtcagcagtcagaaatgctcaaagtttaaaatgtaattactagaaatatgaaatgaaggctcatgagccacttgtgaaattgccctagaatagccaaggtgattacaattgaaaagaaatagaaaattttactcgcacaggatasgccaaatt

SEQ ID NO: 270 - DNA, 598 bp, Bovine  MMBT08420
  misc_feature (1)..(58): n is a, c, g, or t
nnnnnnnnnnnnnnnnnnnnnnnnnnnnnnnnnnnnnnnnnnnnnnnnnnnnnnnnnncaagagaaagagaatttttctctcacttgttcccagtgcctggattagaataatgcctggcagagaagatgtaatcaatgtgtcaaatgattgtggggggaaaaaaaaaaaaatcccagtgttcccctttagggtggatatgagtcctggttgtagagaggggttcaaacagttcaaaactcctatcaaattccggaggagagaggagaatccaggagttctaattcacacaaatgccatgmagctttcacagggcctccctttcccttccgtctacaggaaagtgagtggtattcaataaccaagttctmaaaccacagctyagtggggaaataaatcagagtccatggaaacggagtcarggagaagtcatgtactctagatcagaacaaagagaagctctggatagaacaagatagggggaacaaaactgcagtaaatatccagacgtgctaaggcaacrctcccagataaaaacaaacaaaactaatcaacccttaagagaaaggaacctggcgtgcagaggaatgataaaacccc

SEQ ID NO: 271 - DNA, 600 bp, Bovine  MMBT06717
gtagtctatacttttctgggtggaaggaaattctgtgaatcattaagttaaaatcaaattgggaaaaaggtcgattgagggattcatttttcattaaatatatacctctcacccctttccttacattttacattttaaagaggttgttttggttgctacatttttgttttctttctacctagttctgcttttctgtcatggcttacaatatcatctttcaaagacaatgctgaaagttctctggggacttgtgttgctttattgagtaatctttgatcagattgtaatggaaatccctgmaggtgatataaaatgtgtacatatatttgaatacataaaatatgtattttttttatttcatccatctttgacatgtctaaatatggacttatttagcatsttggcctcmaaacaacaggctcatcttgggggcatatttcaaaagagtkatgattttaaaaattgatgatgaaaataattggatttataaattctttgaaaatcagggatcctgtctcaacagcartagtaaaaactgctactgaagtatacagaaactgagactaaagatgtataatgtccttgtcctattaaatatgt

SEQ ID NO: 272 - DNA, 600 bp, Bovine  MMBT09200
taggatcttccaaaaatttgggattaggtcactcacacatgtcagtgtctaataccacttgaacttggaagaaaaacaaatttataaccaatactggcactgcagtgcggtcagctttcattttgtgtacatcaaatcacacgctaaaagacagcagcctgaatactgaggcaaaagcaagagataattaggaagtgatacagaaagacacaacagatgaagaatatctgcctccatgccagatattcccatttcctggtatcagtcctggtgtgactagggcatactttcttgctcttmaaataaattccctttaatacataagtaagtttaaatggattactgttgctttttaccgaaagagcttttaatcaaatagacagagtcctgattaatagatggttttcagaataaatgcatttcctttagccttagctttcctgaagtcagctattttctaaaacccatttttccattttttcttgagctttcatttagctggcttgagacagattatattaactgattatagctatgtttggtggtatgaccaggactcttatgcccttatttccttaagtgtggaggttaagtatgagg

SEQ ID NO: 273 - DNA, 600 bp, Bovine  MMBT06357
taaaattaaaaacctagtacagtaaaatgtatatagatatacacacatgtctcataatatatatacacattatatatagtatatataataaagtcttcactccaaccttttaattcacttcttaaaatgtttaatatttaccatagtctatagtacataaaaatacacagtaactactgggtcaattagtttttagtagtgtatacttctttctttttttagtatcaatacatcagaaaagtttaatcttaaaatctaaagaaattaatggacctacttctgacatttcatacagaattmtttttaaattattccctaaagctgaacattacagtctaatatatgaatgtacacccatttgttcaagcaatactatgccttttagtatcttctttgcttcataaataatattagctagtcacccaatgcattagtaaaattaaatagtgaataatagcttatgatttattattgtctttaaaactctccaagaacttaattacagtagttayattagctacagtagtattcattacattagttcttatataattttaatcttgaattgactgcttttcataatctttaatgagatttatt

SEQ ID NO: 274 - DNA, 600 bp, Bovine  MMBT07994
aaaaaagggcctgagtagaacctacaatttccttattataccagatgaatgaggtatttctatgcttagattaattgagtcatccatcttttaaaaatgaatgtgccgtcattacaagaaagactcaaaggagccacagctcatgaatcatggtttcaactgtgtccttgttgtaggctgactcagtttctccaaagaaaaccctctgatgctgacttgctctaaatcactgacttttctttcttcaaatttgatttaaacaaaacggtaagaaatggaagaatatggtttctacccagmtagatggggtgctgaagcaartggttcgtctggtggaaaaagcaggtatttaccattcgcatttgcaagggtcaagaaactgcctgccgcaatcccttctcctctgagaaaaacaaacaaagctcaatcctataaaatctctcaccctaaaytacccttttgtcaaaacattaacatacaatgggatactcaaaagccagggttagagaaaaagtrgtttgggcatacaaagatgataacataagcaaagtagccaagtcttcaatttggagactattctcagttacaatgttgaagaag

SEQ ID NO: 275 - DNA, 600 bp, Bovine  MMBT09540
tatagtcagtgcaaaattatattccagcatgtgtagtcattcactgtcctaatagaattacctgttcaggggagtgcctgacattaacagaaaattgtatcaagtgcctagtataaggcaggcattgtgctgggttctaagggctataaagctgaaggaaaagacatgctgaggatgaatgggaaaaggaagaaaggattctaaatatggtgcttagcagaggcggggttatatctaggctataacctgaagggtaagaaatcagctctgtaaagattcatgtgtaaagtatttcatgcmtcaagaaaataccaaattcaaaagatctgtgtcgtaagaaaatttgtcacgttcaggtagcatgtgtggctggaccagagcaaatgaatgcatgtgcttgaatggatgtgtttatacatctatatatggttcttcatatatttttcagtccttttatttccaaccttaaatcctacactcttttttttttccttgtacctgagctgaatggctacttaaatagttggagtctcttgaagtcacattaactggtgttctttttcacagaaatggtgaacctgacagatagggagggtttcc

SEQ ID NO: 276 - DNA, 498 bp, Bovine  MMBT10843
ttctcgagctctcgtggatccatgttattttcacgtttacaacggcaaacccagggctgagttttctccccagacctgatctgctttctgagttcatcttcaggtgggaagcaagactcattttggtatggaaatttcatttctgtccagatcatggctcctgcccatgaccccattcctgccccagggaccatggacggacatgagactcttgactcagctgtctttttggctttagtcttaggcacagatttatcctcacttctgtttcttttaccatcccaggaacaagactttgcmtcgactccaccagcagcctccagcttgtccttgttgctgaccttatgtctagccccacgctcaaaactgacatctttctcacacttagatctgagtgcattactgttctcactgtcagcccaaaacaaggaccttaaactgatctcctcaatatcagggctagatgctctacttagctcatcctcatctacatctcca

SEQ ID NO: 277 - DNA, 600 bp, Bovine  MMBT06343
taacttcactcaatgttttcttattatatctcatatatgcatatttaaatgctaaaatkatacttatttttattgtatactgcaagtaaaacaatacgacagcatatattgtttcctctaaatccagtcttactgccagacctacctaatttcaagggccaatagagtatccatcttcaattctccccacattcctacatatagaaatgtacaaagtcagggttatttttagaaaattgaaaactgatgctaagcatattttacattttaattttcaacacatgctcctcttaaaaaatmattgaaatgtagataattcatttaatatttgtrtaaacattcatggtatggatatattaatatttactcaaaattttcccttattaatgagaatttactctttttgtttttktcattttttgtataaaaatgtggtttaaataataacccttaaattcatcttaaagyactgctacattagtatctaaagtgtacattctctaaatgagatcgttgtgtcaaaaattatgtgtatcttaaagtttctcatagttttacccagtgtgtacgtgctcagtcacttcagttgtgtctgactct

SEQ ID NO: 278 - DNA, 600 bp, Bovine  MMBT07422
cacaggcgcccccattccaaactctttcccttaatttctagactctccttggtgtgaacccctcagaggaccccctgtgccactgttaaccctgaggacagagccccaggcccctcctgctgggctggccaagtgtcctgtgcagtcccggctctgttctgcccctgggccagygctgaggcttagggcagacgtcctggctgcttttgctccatatctgtgcccaacaattggggaacaaagatcagggtggatacaaacatagaaaatgagaatttctcaggctttgccttggtcacmtgggaggaaaacccaaggtgcccctcacccaatgtcctacaagatcacccccctgcagtccccatmtgcagagaactaggacatcagaggccccaggagtcaggaaagtggctgaaaatgtccaagagtcagactggaaacttggactgaacttggcgttgctttccctgagcgctggagagctgatgaactgaactgatacccggtgagattccatttaacgagttgtttggcaagggctacttctgaaattaattatcaatcgtttctcattattcttagatggcatttcttaaatca

SEQ ID NO: 279 - DNA, 598 bp, Bovine  MMBT05741
  misc_feature (1)..(108): n is a, c, g, or t
nnnnnnnnnnnnnnnnnnnnnnnnnnnnnnnnnnnnnnnnnnnnnnnnnnnnnnnnnnnnnnnnnnnnnnnnnnnnnnnnnnnnnnnnnnnnnnnnnnnnnnnnnnnnattgagggcaggaggacagggtgcgacagaggatgagatggttaaatagcattaccaattcagtggacatgaatttgaacgaactctggaagatagtggaggacagaggagcctggtgtgctactgtccatggaaccacaaagagtaagaaacaacttaatgactgaacaacagcagtgataacgattgagmggcatcagagaagtgggggaggaattccgtagctttggtggtggtgatgttctctatcagctctccatccacagagcagagcatggacccatcctcactgaatgcattattgtaactacacgtgactgyaactacatgtactgtattcttggtgcttcatctgcctgcctcctgccacaggagaggaccctggaggtcattcacaaatctgagtctccagcagttacctcactttgtctaagataggttagtctgattatttaaatgatagtcaacacactggtactgatcttcagtg

SEQ ID NO: 280 - DNA, 600 bp, Bovine  MMBT03175
aggaagcaaacaagagacctctcctgtggtctcaccatctctcctaccctgaaaggagaagcacatatccaccagcccatcatcagaagccagcagcatctctgttgttactgtaacctctgaactcttgaaacctcaggcttgagggtagggaaaaaatgcaggttttctcctcaaacctacagttgtgcaggaggacctgaaagggtaggacagcccagaaaaagagagggagggaaggaggagaaaaagaaaaagattggctggtaagaccctgcagtttgggatcaagaccccagsaagtcttcttcctacaagttyatgagcactatcctccatcatagcctttctaagggtttgagaaagagcccctagaaagagcccctgcatggggctctctggaagcccactccttctcaccccctgagccacacagcctggcctcagtctcacctgggacatatgcgtcctctcctccatgcccctctcctctctccaaggccccttggtacccacatagccttccccctcctgccttttgcttataggcccatatgctctttgcttctgttcacccagctatatcccagtcccatctat

SEQ ID NO: 281 - DNA, 600 bp, Bovine  MMBT05276
catgggaggagcatgactcagcctccaggcagagctggggtgggcagtgctgggggaggagggaccctcccgtgggctccctgttgaccgcctttcccctctgcaggtcacagaggaagttcaccggctgctgcggcggggttcctaccgcttcgtgtgccgaggcaaagtcagtgtcaagggcaagggtgagatgctgacatacttcctggaaggcaggaccgatggaaatggctcccaaaccaggtccctgaactcagagcggaaaatgtatcctttcggaagagctggcctccagascagactggctgcgggtcaccccccggtacctcctgcagccggcctcccagttggagctgggccaggggctctgcagggctcggggcttgccccaggccccccaggccaacacctgccccctggagcctctgggaaggaggcttagtggagcccatgccagccgctyggggcacagggcacaaatgcttgaggtattgggggtctttggggctcccccagggaccagcccagccagcagagcagggctgggagctggtgactgggctgggkaaggggcacagtccaggcatgacttgaagc

SEQ ID NO: 282 - DNA, 600 bp, Bovine  MMBT04574
caagaaaatgttaataatgtacattaagtttaaaaatgtatatttgcagccattaaatattgtcaaaagcacaaaaaattgaaatatttttccagtattcaaaaactattatccaattcagcaaagatgttgctcaagtcactgacaaataagtgaagttccaacatgtctctttgcttcactttcactttattaacgtatgtgaaaatgtcaaccagcaatcaaagctatacaggcatccctcattttattgccctttacttttttgcactttgcagatactgtgctttttaaaaactsaaggttggagtgagtctaccagcataaacttttttccaaccacatttgctcactttgtgtttctgtgtcacattttggtagttctcacaatgttttgtcattactattatttgttatagtgatctgtggtcagtgatctttcatgctactactgcaaaaagattacaactcacggaaggctcagatggtggttagcatttttaagcaacaaaatattttttaattaaggtatgtattattgttttttagatataatgctactgcacacttaagaaccaaaacattcatgacttgctttat

SEQ ID NO: 283 - DNA, 600 bp, Bovine  MMBT04537
taaatgtccttgtcaccagaacaaaatgactttccctacatttaaaaacaagtgctgacaactccaaaaacagattatttctaacaataatagttgagcttytccacatacgcactgtgtcctgggcactctgctacctacttaatcctcagtgttttcaatattcccattttatagatcagaaaactcagagcttgaatggcttgcctraggagttgcaattagtctcttgtggagcaaagattagtgcccacgtctgtcttcaactacagtgaaagcttttaactatctcgctaaacsaagtctaaaaataaatcaattaatccaaatgaaggggctggagaacattaagaagttttccctgttctcaaattctaagattacttgaaaaacatgttctgaaatattatgtaatatattctgaagtcaaagaaccatgcctttgtttaacagccactgttctggaagctccattccttagcaccccatctagccagccaaatactcaaggttgcccatacagattacatgctactgagacaaaaacaaaagtccaaaatctatggttataccaaaagactgtgtgtccccgccatcgaa

SEQ ID NO: 284 - DNA, 600 bp, Bovine  MMBT03731
agtatgcttttatttgcagtttgtctttggttagatcaaatttaaacttgtgtctcaccttacctgccttcttctgcatcaccactggaatagaccaggagctgcaatcagtgccacagtgatgggagtgttgggggtggagaccagggggcattgtgggagggtgaaaacaacttcctgggtggggtttcaaggcactgatgagtgtttttagttataaggaaaaagaaaagggagtcctcccctttcctctggttttccttggatcacctcttcagtgaagcctgtaagccgttgttsctgcaaattttgtttaaataggcactcaggtcaaaattgctctgtggtgcttgtgccttgatctagttgtgtcatgaagaggaatctgtattctgctgtcatatagcattgctagatatgaataagactatatggttcttcccttgaattgcatttataaactaaagggtactagagattacctagtccagtgattttctcacattttttttttaaatagcacaaaaaccttttcaaacttatttgtaagcctacaaacaaaacaaagaagaggtgctgctctgatgtagctcttaggct

SEQ ID NO: 285 - DNA, 600 bp, Bovine  MMBT05257
tcttcaacagtgttgggtggtktccactggaaggaagcactgcagcttgtgttctatagtgctatttgtgcctcacaggtaaagagctyttacagcaccctcaaacctcaggagtctgggtgctgtggactagctaggggaagctgactttctggatagttcattcataagaagagtcttactctttatcctgaacgtttcaaatgtagggccttcaaagagaatttttcctgttaaatgacctgttaattcacatagtgatttcttttaaatatagccccccaaaacttccaattcatsagagtgaagaaaacagttattcagataattaaataaaatcatgtctccctttcttcagtatgagctcactcaaccaaggagtagagcaagaagcagtgctgtgttatttctggtagggacattatactgtatatttaatttgacataagcagaaacttaggcagtaaattccaagtttgaagagatgcagcactttactatcattccttagaaaaatgtcaaaatgatgttaaatcatagcagattagataaccttgggaatcttttttttttwaacccatgtttaagagtttttaaaaa

SEQ ID NO: 286 - DNA, 600 bp, Bovine  MMBT03724
cacctccgcttgctccccctgctactgctcttattctctgggtggactccgggtggtgaacaagatgtcagcagccaygttggtgctgttgccccctccttacctgagtccccctcagagattccaatacatcttagatactattgagttttgtcttggtgttttggttcatttgcttgtttctttttaagaacatcacaacrttccactataataatatcctagaattcagcacaacggaggaatgaggttttttgttttgttttaaattctgggaaaatagattaaagcagttaaatsttactcttgatgtgattaaatcagtagagcaaatgtacattgcttatagcacagtcaaaataactgaaaaarccatttgtataaatcagtagagatgtgaaaatagtgaatgtaaaaactacagtggaggtctcttttaagctacccatgcagtgatattttcatacagaaaagagaaaatagaaaaaaaaaaatacattaaagggtattaaaatggtttagttatattcaaaatctatcttgtcaagcatagtaaggatttgaaaagaatgaggtaggaagcatggaaaaggataaatt

SEQ ID NO: 287 - DNA, 600 bp, Bovine  MMBT03388
acacatatgagttgataagttacttcaataaatctaatcatctttaacatctcattcctttaacccttcagataaaagactttcatactatgcattgaaccaaaagaacagaaataaatggtatcaactcaaatatatcagtaatagtatttgtccaaaatcacctttatcatgtgtacatatttcaaamttttttttttttgcaggccctttccatatttggattatttatcttcaatgagctgtttccttataacatatgatgtctgcctagtgattctcccactgttggacacttgsattttctccagtttgttataataaataaaagccagtgataaatgtcttcacacaaaatattctttggattcttttgaatgattccattgggatgtaatccaaaaagtggtgtgcctgggcagcaaagtctgatcattttatgacttcttctgctttgccaactagtcccccaggaaaaagtcctcactttgaagtgatactcagaagctctagatagattgatcagtcctgacaactctgctagctttatcctcttcaataactttagctaatacatgtgtaggggctacttcagtgctg

SEQ ID NO: 288 - DNA, 598 bp, Bovine  MMBT03260
  misc_feature (1)..(34): n is a, c, g, or t
nnnnnnnnnnnnnnnnnnnnnnnnnnnnnnnnnnacggcaaaaatcacacagcaaaaataccagtgaacttgaattttgaaaggtcatgtattccttctgcctttccagctaagagttattatgagtctgtgaaggtaattgcatttcatgtacctttattacttcatgtgtaaaataaaagcactgcatcagaattgctttccaattgcctgtttttaaaagtattcttgagatgccattccaaattagtaaaagatcaatgaggaagaaataacagtaacagaaatattaacacacastgtagtgatgattcactgtttaagtgacatacctggctaatcgaaggaaaacaaattttccttttgattggttttcttttgttgcatccactcagatattaagatagaaataatatgagtctatatttttcttttcctttcatttagttgacctttgatacatttcttttttcttaaatttcctaaagagaaagtcaacgaatgtataaattggcatgaggacatgtgcaattgaatgtgcttttccattttaagtgaccttaccttgtgaatgcattaaagtgctgacactcaggag

SEQ ID NO: 289 - DNA, 598 bp, Bovine  MMBT05294
  misc_feature (1)..(64): n is a, c, g, or t
nnnnnnnnnnnnnnnnnnnnnnnnnnnnnnnnnnnnnnnnnnnnnnnnnnnnnnnnnnnnnnnnctcagaggacaccacagaggactcaggtgtgatgagctccccctcggacatcgtgtccctggattcccagcacgacagcatgaaatccaaagacaggtggagcacagaccaggaggactgcagcgaccaggacctggctgggacgccagagccgggccccccgaagagccccttgtgggagaggagcagctctgagaaccggcatctgaggtgaggcatgggccggctgggaaggsgggtcccctccagcctcmaaggatggaggcctttgtcccagtgagccagccagggctccatagtgaggagcctgactggggatgtgttgcacgtggttctgtcttcatgctgtgtctagctattcaggtatttataaataatgcatagtgtcagcttgttcacatttacctttcatacaaacagcaccataacctgtttccgcaatatcacgtgtttacgatttgtccctggtgacgtgtgtgttcatgagttcactccctcatccagttctttatgacacttgagccgttctggttt

SEQ ID NO: 290 - DNA, 600 bp, Bovine  MMBT10747
gggagttccaggcaggtcccctgctgctaccagttcctgcccaggtgccccagccggctgccagggcggcctcactcctcgaacaccatgccatccagctttgccagcacacaggccgggaccgtgctggggacgaggactggggccaccggacatcccgcctccccgcgcaggtactgcttggtgcttggccccccctgatgaggccgctcctccctacagctcccatttcatctccctttagtcctctgccactcttttttccccactttgtccctttcttccattgtttcctctctstgtgcaactacctggttccctgcctgaaaggacgctggagccagagagtcctcacacaagtcagtatggcccctcagagcttcggtgtcctgctctgacacatgggtggtaatactgctctcctccgagggtgatgttccaccaaaggtcgtgcacgggcagccagagccatcaggatctcctccctttctccctgcttcctgttacctccttcctgcccctaattcgcttcctctttctctgtgtcgtcatcaccgattacagcctccagatctctgaccaactcttcccaccactggc

SEQ ID NO: 291 - DNA, 426 bp, Bovine  MMBT10968
  misc_feature (1)..(3): n is a, c, g, or t
nnnatgttctacacatcttgcagtgggaactgtcaaatgtcacagtcaacattgccacagtatcagcactgacatgaatccacaaacccactgcaggcccaggcctgtaacgaaatgcacagcctaggaaaatgtgcatctcatatttcctacatgaactgaaaaaaacaactgtggcctgaggctaacagcacagaagattctttgagcttttcctcaaatactccagtttagaaacaggttgcagagtgtgagtatggagagggggaagccctcttctagcccaagggatttcgtttscctccagggacatttccaggtctgacacttggtgagatcctaccagagcagacagcttctaccagggtggcagagctmgagatttccctagggggaaactgatgcggggggtggggtggggggggt

SEQ ID NO: 292 - DNA, 600 bp, Bovine  MMBT10863
tgaggaagaagggggtgagaagtgagaggaagggaagtggttccagcagctccttcctggcttaccccccctccccccacacacaaacacacacctcccttttagcctcactcccaggctaggctgggcctgggccagcctgaggtccctgactcatatctctcgtgtcccttatgtaacagagccaggttactgaggcatcaagcttctgcttgctcagtggcaggcttccctggggccaggcattcagaagcctgctgggggtctaagtagagctcactacacttccaaaggaaaagsctcccctgcctagtgtcaggccaagagtctgctcagaggcaagtgccaggtggtgaaggtgattcccccctgaggcccccacgctctgcagcacatgtaagcaggcaggtgagctgctatggacttaagcgtggtttggggtgttcttgagggttggcatctcctgctgtcacctgatggtacagtgctgaagtcagcctggtgcattggaggtgggggggtgcagaacaggtgtcacaagttcttcttccttttgtatctgcttgttgggtcaggtactgttctggggactttagggag

SEQ ID NO: 293 - DNA, 600 bp, Bovine  MMBT10221
cctaaagcaagcataaaagcagagacgatgtagtggtaccgtactgtactactgcacttttcaaggtactgtactgtaagattaaaaatgttttctttgcttttttgtgtttgttttttaggtgttatttgtgtgaaaagtattgtaagcttgttatagtacagtactacacagccgattgtattagttgggtacctgggctaattttgtcggacttacaaacaaatcagacttgatgaatgtgctcccggaacggaacttattcgtatatagaggacttttctgtactcagtatcttcscacacagagacccactgctccagggcagccatggccgtggccaagccccgaacattctgacttcccaaaggcatgcgtttggtgcagaggcaggtgaggaagaggccctcctctcatcagctgatgacaatgtttggggtatcctctctcctccctggcacccctcataggcaggatcaacttttgcaaattgccttccagacccctgactatcggatatagcatggaaacatctagttcaggcctggctcaataaatgtttaattaattaatcaatcaagccaaatcaaagattaggtt

SEQ ID NO: 294 - DNA, 600 bp, Bovine  MMBT09135
aatatgaataaataactaaataaatgcacatctatgattctaggcattgtcttaatgacttcctttggagtctgtcagtttatctccatgagaagcatttattgtagccatgagatcatgcctcataaacctcaaagtataggaagtatcactgactaggctactagtcaatgctactttgctctgaaatctattttttctcttctccaaccaatgactgagtgcagcagaggtactaatacaaacccattgctggaagacacgggattcccttgatggcctgtgttggctcaggattcsctgagcscttgctgaccatttcttagcctgcacatcatgccagaaagcttccactcaaccttccttttgtctctctttcactctaggtcacacttgcttcatggccarcagctctttcagccttactcagattcctctccaatttctctcataggcatttccctaataaaatccctcttgtgtttagtcctcctttggtatctgcttcttggaggacctagaccaatacaccatataatatttgtactatagttatccccatgctatagattggggaatctaagataggaataggttaag

SEQ ID NO: 295 - DNA, 598 bp, Bovine  MMBT07843
  misc_feature (1)..(94): n is a, c, g, or t
nnnnnnnnnnnnnnnnnnnnnnnnnnnnnnnnnnnnnnnnnnnnnnnnnnnnnnnnnnnnnnnnnnnnnnnnnnnnnnnnnnnnnnnnnnnnnngagaggagaagtgtccaagggcacagggaggcacagagccagcctacaagcctggagtctcgatgccgaggcccaccttcctttcatggcattggatagacctcgctggcccagccgcatatcagcggcatcatctggcttatcctcaatcaacacgtgcgttccagaggaggcagaaattgacgaagaggcagccagttcctggsgctgatggcctaacraaaggggaagcttgagctccagactccttccttgttcgagtatccctcgctggccgaccccatctttcaccttccggctcccagggacctggacagacccttggcctggagggggcagcctgtcccagtgccagctcagcgggcttggcccttgtaacaatagctggaagggccttttggagcaagtacttcctgaagtgcccagaacagccgctgccgtcctggggcrcaggaacaatcacagtgcacgccagctcccgccctcctgggagcctcagggact

SEQ ID NO: 296 - DNA, 600 bp, Bovine  MMBT06883
acatcatcacttcggtgactcatctgtggtacaatctatcttgcaaaaggagaggaacctgaacgcagcacgagttatgctgagcagggcagaagaggccgtggggaggggttgcctgagaaaacctgggcatctaccttctccaggtcccactggaggacccgcaggccatcaggaaatgagcaccttcatgagatctcagggttttaacactcgaaacgcagcacttcaatttcacaggtacagaaactcggtcataagggcaccagctgaccccaaaccacagtctgagtcagaaasagggccagaattcagaagctggtctgcaacatcacaccatgtcctagcccactctactaaactgaaagacacacttgagaggataaactgatgaatcataatcacactgtggaataaagaaagaattaaataaaaaccagttgcaacctcaaacatgtccataaactctaagttggaaaggtagtcttaaaatacastttccaactctttggaactaaaatcaaatttaggacgctgtagcaaggcagttcaaacaaaagctaattttgtttaatgaactaaccaggaaggcattgtgaa

SEQ ID NO: 297 - DNA, 600 bp, Bovine  MMBT08705
gtacatagatgcacatcgatggcagagaagacaccatgaatgatatgatgtgacgctaaaatctagaagggstrstgcctgagagagagtgaccaaagcyactctctgggaaccaaagaayagtgagtgaagcatgagaactggaagctgtggtgcacattctgggagtctgaggaccagcaggcaggcattattcactcctgagcatcctggcctcagatgccaatcaggctgagaataagaggaaagactccctgggcaaagagactggtaagaagaagtgtgtgtgtgtgttggggstcgggggcggtggacgacmayttctgagactgtgagctgawgcaggaagtgctctaagaggctgaatgaagagatgagacttaggattaaggtacacctccacttcaagccaatacacgaataagtgaaaaagctgccaggtgtacaaaagacattcggggaagaaggcagggtaaatccaggtgtcctggggcctgaagtttatataacatggaagccttcttgaaagaatgctgagctgtgctcagttgcttcagttgtatccaactgtctgccaacccatggactgtagcctgccag

SEQ ID NO: 298 - DNA, 600 bp, Bovine  MMBT09620
tttctggctctgcgatgtctctctcctgcacgtttcactcaatggcgtcgtayggcacrcagccttttgtgtccggctgcgggttttcaaggtttatcatccgtgtggtagtgcagatcagcactttgttccttttgagagtcaaataatattccattgtctagatggaccaagtttttgtttatccactcgccggtggagggacgtttgtttccgctttttgtttattgtgcctgctgctgtcacgagcatttgtgacaagtgtgtgctgtggctgtgtgttttcaatttgtgtgggastgggcctgcagggctgtgcagtgcctcggtgtccaattgtctgaggagcccccactgccgccccagcagtgacccatctcacactcccgccagccgtgttcgagggttccgatttccccacatccccaccgacatctgttattgtccgtctgtgattctagccgtgctagtggggtgaggtgccgtctcacggtggtggagttttcatgcaaaaaagagatcgggggacacaggcagttcacagaaaattctcctgggctcaggacagattcggggtgaaggcattactggacatggaag

SEQ ID NO: 299 - DNA, 598 bp, Bovine  MMBT08573
  misc_feature (1)..(97): n is a, c, g, or t
nnnnnnnnnnnnnnnnnnnnnnnnnnnnnnnnnnnnnnnnnnnnnnnnnnnnnnnnnnnnnnnnnnnnnnnnnnnnnnnnnnnnnnnnnnnnnnnnngccatggggtcgaacagagctggacacgcctgaagtgactaagcggcagcagcggctctaattgaaagtgtcagacttccttagtggtacagtggataggaatccacctgccaatccaggtggcatgagttcgatccctggtccaggaaaatcccacattcagcggagcagctaagcccatgtgtcacaactactgagccagsactccagagcccatgagctgcaaccactgaaacccaagagcctagagcctgtgctccacaacaagagaagccatcagggtgaagccaggaaaccacagtgaagagtagcccctggtcagcacaactagaggaaagtccttgcagcagcaaggatccagtgcagccaaaaacaacaacaaaamaaagtcaccttatactgggggagtgaagaaagaagaaaacaagagtggcgggggggaagaaaaagaaaaacagcacagaaaacatccagtgctataacccaagggaagccctgagg

SEQ ID NO: 300 - DNA, 600 bp, Bovine  MMBT09235
cttcctgacccagggattgaacctggattctcctgcactgcaggcagattctttaccatctgagccaccagggaagtcctgttgatccggaccctgttcccaaacagtaaactcagcagttatgctgttgaccacccttaagtccataaataaaaaatttaaggacactgcttaaaatctctggcacgtggtgagatatagaggcccagaagaacccttccaggattcctagggcattgctgcccttgctgatggggcaggattgcagacaggacctgtgtttctggcatccttcccccsaccccactctgttctttctgacttgtgaagccttttgttagatgattcaagttcttttcttagcacagttacaagagggttaatgagctgaattgcccaaacctttgtaagataatttttctcttaattgaattcttggctcctacaaatggattctaaattattttgaggtctttggtgtgggccttgaattggctgattatgaaaagggggaaatgaaggggaaaatgttttgaaatgtcatgccatctttagggaaagaggggaattacacagtgtaaattttttatgttctctggc

SEQ ID NO: 301 - DNA, 600 bp, Bovine  MMBT07435
atatctcctgcattggcaggcgggttctttaccactagcgccacccaggaagccctagaccatttwaagcttttgtatttagatttctaaaggcatttccgaaagctcatccctttacagagcttctccactttcttatgcacaataagacccaattgtctacaaagagcttctgatctgtttctctgcatttcttaatgaagttsstaagacctggaaaggttttgtttgagaagagaactttgccaagtggggtctgcattagtttttagatttaggccagcggtctgaatgggacasggacacttggggaagggtagaactgctttgggtcagcaaagcacaactgagtaactgctgagaaattcaggacagcctgtataaaaatgagtcctgtgatgggttgaaaagtagttcccccaaatatctacgccttagtccctggaacctgtgaatgttaccttctatggcaaaaaaaatagtctttgcagttgtggttaatttagggatattgagatggagagattattctggattgcccagtgtgccttagatgtagtcatgtttccttgtaagagggaggcagagggagggtctaca

SEQ ID NO: 302 - DNA, 600 bp, Bovine  MMBT08179
ttgccatttctttctccagggaatcttcccgacccagggatcaaacccaggtctcttgcattgcaggcgtattcattaccatctgagccacagggaattcaggaatccccagattaaattaggaattagagtaggacctctccttcttcccaagaaaccatattgttttaacaaatctagrtctgtgcaaggatttgtctggtgggtcgtctgatgaatgtttcactagagctggacaggacttagcaactcaacaaaaacaagtagggtcggattttggatttggaggggcacaggcasggcctctgtctcyctcttggctcccacataacctcttccactttaacaagggcttgtccagtctttaaactgtcatgggaacagcaaactgacctctgtcttctatttccagacagttccaatagttagaaaattcgttctcagattaagccaaaccctggccctttttaactcccacacatgcatccccgttctgccttttagagcaatgcagaatgaactaacctttttttttttttttaatggcttctccttaaatatgggatggtttaggccttctcagcctccaacggtatcagt

SEQ ID NO: 303 - DNA, 600 bp, Bovine  MMBT05487
actccagctgcacggactgaaagggcagcacagctggctgtgaacatctgtgaatacatctgagaaccagagatggaaggggcttgggtcaagtcacacagggagtctcctggcaaktctcccctccctggcctcagctgctggcacgtcccgcagttgaaagctctcctagagccacttcagatgtctgctctgctctctcccgctccctcctgctccaggcttctctgcccccgacggcccgctgggacactaggcatcctctggacagggaaatttgagggcagaatgctgagggcsgaatgttcccctcacctggccactgagagatctgtgctaggattctggaaacttctcagaggatgaaagactctagtctgctccatcaagaraaaggacctcaggaagtgaggccaggagactgtgatttcaactagcatccttcccccgccccctgctgctgtcctcctgttcctctctagcacccctctgggtcttccagccttttccttcctccccttcaagggggcccttgggcaggaataaacagtctctctgaaatagagaaccatggaaatrsacaaagttggcaagccagcc

SEQ ID NO: 304 - DNA, 600 bp, Bovine  MMBT08841
tttgagtgagctccgggagatggtgatrgacagggaggcctgatgtgctgcgattcatggsatcgcaaagagttggacacgactgagygactgaactgaactacaatgactaaatataaaatacactcaaatgatttcagtatgacttttactacctaaaaaacaatggaacttggaatttaggtaattccatggcagttcttcccaagccagtaacaataaatcacaaaatytaagagttagaaaaggctgtaaggataatttaattcaaccccttatatcacagacatagaaacaaasgccccaaaagtttaaacttaaacttgtacaactaatatatgggggaaaaaataactagaaccttgatgttctgcctcctcaaccagtatgatttcaagtcttgcctctaatatgatgtaaagttactgaaagtatccttcaaatttctttattggttctatattatactgtgataatagtcagaaatgaccactatttaataaakaaaaacaaggaataaatcattaaaagtattttaattactataatcttgagatcaacaacatattggcaagttttctgcagtagaagtacattcct

SEQ ID NO: 305 - DNA, 600 bp, Bovine  MMBT08218
catctcattctagtcatttagtctcagacagttttttattgttatatcctttgttgatattttgattcagcttttcttttaccatatccatttgttgttttgccagtagaaatgaagtttataaattatggaaacagtaagtaggtttcagtaacttttttaaatgcaaagatttgcctgtaaaaaatggaattgtgtatttggaatggtcagatgatcagtgagaactcttcaatgctggaacaaatgaagtttgacctacacatttaaagggtacaatgtttgcttatctttattatstatcttgccctatgatttcaacctatagtttttaaccattttttcttttaactttaatacaatgacgttatttaatttttcaaaaaaatattgtcaccatcacactgtccaaggataacctttgggaacatttggatgtatcttctccaatttaaaagtttgaactgagaaatgggtgggataaaaattggattttaggtggcttaatttgaccaaagcatattagaaagatctgagcaaagggaccatagaacaagagagaccatattgagctatagtgacaagtcagacataagtcaa

SEQ ID NO: 306 - DNA, 600 bp, Bovine  MMBT08756
caaccaagggtctcagtttaccgataattgggtgcaagacttcaatacttgtattagattagattttctctgtattcataaaagtcactgcacacttcctgacttcaaatgaaaaaaatttattatctcataattctgtaagtcaagcgttaaggttagtatatttggtcctctgctcttgatttcatgaagccagaatcaaggaatcagctgagtatggtcctatgagacgcactgaagagaacctgttcataagttcatttaagttgttgaccagactgttgctgatgttgcagttasggaactgaggtttccatttccagctgatgtttgcttcaaaaggctgcgtgtttttcttgtcatactttcacatgatctgcttaccaactgctacttctccttctgtgtcatctttcctgacctctatacataccccttgagctaactcttctgccttctgtcctgctttttaaaggcacctgtgattgcaaaaggtccccctagattatcaaaaataatctccctattgtgttgtcagctaataaccttaatatagtattcatctatgcccacttttccaggtggcactagtggtaaaga

SEQ ID NO: 307 - DNA, 600 bp, Bovine  MMBT11275
tgtgctttgggcaggattctttttcttacaaatgacagacatctagctcaaacaagcttaagtgaaaagaggaatccagtggcctatttagctgagcaattcatgggcaccttcaggcaaagctggatccaggtactcaaatgccattctctctctcctccttccccatccatatctcagtttggggatagtcagagaaactggacaatgacagcttcatgtatagttctcatgacttaccagtcttcataaaataaaaaatgagaccttctccaccacccctgccaaactctagcaaasacactgattggctggattggggcacattccatttcctgaaataattcattcggcctgggaagtggtagggagggcagcactagaactgaccagcctgtcagtggacaaatgaccacccctccatactggggccagtcaccataactgacagccccctgaggatcagatggagtgggaaaagaaggttttctccaaaggatcttgggcagtcaagtaacatctattcacctcacctatgaaatgaaatattcatgaatgcttttaataagtggtttacaaacctgaccacttacccagggt

SEQ ID NO: 308 - DNA, 600 bp, Bovine  MMBT06944
aaagcaggttttttttttttttttttaaagtaggcatttgaattgtttttcctatgtggcttctgaattgagttgtttctggacaggttttaaagtttgttcatgtctcaccctgcgctgtatacttctgaccttagaatggcttctcatgcattcaaaatgaatttggttacaaactgggtaaacagatttataaccatagggaccacactgataaattgaaattgtgccaaagcaacttgagaagtgggaggacaaaatggaatagaaaatccaagtaaataactttctggcaagagstcaccatagaaatgtacacattcattttcaaattatattttatttgcaaatgagtatgatgggtttgtcactatgtaaacacaaacatcacaaatgaatccttcaaacagacttgacagtggtgagtgcttggggctgrtgaaatactcaaagtattttgtgctgccaggaattctatttatgatttatactaatctttgttttttactttatccctatttataagatgtataatgacttaatctatgttctagtgattgcttgttcaaccattttggtatctggccaatgtgattagta

SEQ ID NO: 309 - DNA, 600 bp, Bovine  MMBT08667
tcctggtggctcagactgtaaagcgtctgcctacaatgcaggagacccaggttcaatcccttggtcaggaagatctcctggagaaggaaatggcaacccactccagtattcttacctggaaaatcccatggatgaaggagcctggcatgttgcagtccctggggtcacaaagaatcaaacatgactgagcgacttcactaaaagcatacttgaaaatcttccagttaaatttcttcatctttatataggtctttttatttcctaaaaagatgacattcatcaaatatttagggaagtagstacaggtcaacatagctcttttcttttcctctttttacaaaacatgctatttaaataaaagagaatcgtcacttcattgagatagatctcaaaagttgaaaattacctgtaatctgttgataattataataataagcgggattttttttctaataaacaccatcaggcagagactactatagttcagacaattttaagtctcaaaacttctgcattgtgcttttaaaaagttaaattaccatttcctctggcagaatcaaatgggatgggaatggaaatgtctttttcttgcaagacaat

SEQ ID NO: 310 - DNA, 600 bp, Bovine  MMBT09081
tcaactcaaacacggaagcagggagacaacaaactatagcccacaggccaaatcacacctgcctgtttttgtagataaagttttaatggaacaaagccaggctcattcgtttacataagaggacagcagagttgagtagctgcaagtgagactacacggcatacaaagtcagatattcactatctaaatgttacaatgaaggtctgacaacctctttaactagagcatcactaaaatactgattaaatcacagaaattaaaccatgtcagtattgcttattaagccagtgttcagtctastgagtagaatttaatatatttcactgactttaatataaaatatatttaatatagttacctttgtagcctcttggttttgtttatccaattcttctaactcagctattagtatttccttttcagtaatgctctgattgagttcttgttcctttgcctccaaatttcgtcttaaatcacataattctgaatccaaatccacgtcccttgcagctgtacttttaactacttcatactcattgttcagttttgaaagtgacatgtgaagttcttccttaaatgataaaagaagataaaacacca

SEQ ID NO: 311 - DNA, 600 bp, Bovine  MMBT08398
ccaatgtgctctttttgtctagagcatattcttattttcaaaagtttacagattaaaagggaattggcatctttatgaattctgaaagctgatttgagattttaatgatccccatcagctttaggggcattcagtggagacacttacattgttctgtggtccttccccaaagcatcattctagaacctgaaactggacatttctttttaattatatggctctggtgatttgaacagtatttctccatgaagcaatacatcgtttccttaattttaaactaatggaagtacaacctcatcsactctcagaggccttgccatttttcatactgatgttcattcagccatcctctgcaacactctttgtttgttttgccttatacacaacactgtcgtgaaagaatacagctcctgtgcatcmcaggcatcccatttacagttttagtgttgaaaatataaacctcattaacaggcaatagctaatttgactcacttagatagttccatagttactaagagtatattatgtgttgcacattacaaattattttgtgagttttagggtctagtgtaccctaagttaagaattttttcaaatact

SEQ ID NO: 312 - DNA, 600 bp, Bovine  MMBT07426
gtgacaaaatcaaaagttctcrataaggctctgcaatcataataatgtgtcagaaacattaaaatgtgtttccatatataaaaatgagtatggaagtgagggttgaggacattttaggacatttcttgaatccacaatcttaagttattaaattttgacaagttcaaatacaagtcaaaaccttaaaatttattgtgatttatttccartcattttcacagagcaccatttgaattattatgtttgaagcttattaaagacaaatgaatggcacatttatagtctatataaatgcacagsctctttcgggaaacagaaaatccacagtaattctttgtcacagacttcgtttctgagctgaaggtgagagctggccaggatgattgatcaaagtgaccaaagatgctggtgaagttcagggcaggtagacaagtgtctcctgttgtctagaaacacctgcaaatgtctaaactgtgctggtcctggttctcagatgctgtttcttcctctttctgcattaggaattcctatgacctggttaagcaaatactcagtggaaggacagtccaatatttcatgatgaaatgcaggggaaaataa

SEQ ID NO: 313 - DNA, 600 bp, Bovine  MMBT05989
atggcaccaccagtttactttaagtaactttaagtgtaagtaatatgactgataggttgaaaatgatattgtaattctgaagcaacataaagtgtttaaatcaacagccctagcatttgacactgtcgtgatttatgattgtccaaagaaattctatttaatgtaaatgtaatgcaaaccacatgtgtgtaatttaaaatttttagtaactacattaaaaaacacaaaaagaaatgggtaagttaattttaataatatggtttcatggtgactgtagttgacaacactgcattgtataastgaaatttcttagaactgaaatattctcatcagaacaaaacaaaaagtaaatatgtgtagtgatagatgtgctgattaacactgggggacgggagagggtgtgaatcttttcaaatgtatatatatcaaatcaccacatagtgtactttaaatattttacaactttgtgaattataccacaagaattaacccagtacatcaaaaatattctgatttattttaattggaggctaattaaaaaaaaattctcatttaaaaactttacagtataaaattattaatgatatgtattacattcta

SEQ ID NO: 314 - DNA, 600 bp, Bovine  MMBT06515
ttttaaattacctaaatattaaaagaaatgtattaataggtacttcatgtgctagagaaatgtagacaatgttaccttcagtaggccaggaaatggcatgtcagggaacatggctcaattgagggaaattaataaatgagagcattgctgtcattccaggcccagctgaaaccttttacaagcggcactcaccctaggcactgacatttcacccaagctcttaggagatgaggaggatgtactcagtgagacttctgagcaaactacttcttgccatccagttgaatatgggttaaagastaggaccagagcccagagaatccactgacagacaggcctgaaaccagagaaaaggttgcttttgaagctgttaaggccattcatcatcaaggccctscaaccttctaccattaatttttcctcctgcagacactgcctggattctccaggctggctttcctttgcaggaagctcttgaggctttgcatctagttggcagaaatgcagacctaccttttcttgtttcgcgagccaagaatgttatattcccacatgaccatgaaaaattgggccagacaatccgccattcccttaaaaaag

SEQ ID NO: 315 - DNA, 601 bp, Bovine  MMBT06514
  misc_feature (1)..(1): n is a, c, g, or t
ngaaatgtgtttgtataatcggacagctgtaccccagataccttcattattgctaacagtggaaaaagactataatttcttcgtataattcttacaatgaaacaagtaaatactattaactagaaaaaataatcagtctacagttagcccacacacatccaaatttaagccctttcaacaagaaaggaaagctagaaaacctttgccaaaatcagaacgttcccattgagattacataagtttctgttgaagtatatttagataacatttaatccattgatcttttggtattacctttcasatgtttcataactttgtctttttagtattcaagaatattatgtaaagatcttttctgctttggttctttatacttaaaatgatcccactcagctatgctctttgttttatttttaatgaatttttacactgacttgccactctccccacaaaaaagaccaacagaacagtataatttwtaatttgaaatggttagaaagtaaataaaagtcacagggaagagaacattttatttaaaatacttggagaaaaaaagttttatttttaatactaaaaaatgtttggctatgctagatcttat

SEQ ID NO: 316 - DNA, 600 bp, Bovine  MMBT06336
ggaaatgttttaatttatttaagatttaaaaacatgttcctaagttcattacacaactgccaacattatctgaattatatttattttaagcactgtaggttctggttatcttcacaaacatgtacacacatgactgcaagtatatgttgaatataaaaaacatacatgaatgaggaaactcatttgaactgtgtctttagttacaatggtattgtgccttatggtgccctgttttaaatggcacatcttctaatttacctgtattaaattctgatgtggccttatctccctcctgccttsatattttcaaggctctgatttggctgtatttattttataaagtgaggtagtctgctgaccgcaactggagatttaatttgcaggttccatatatcagaaaactagaataccatggggtaaatcacttagcttttctttgtttccattttcctcctcacttgatctttattttctttttgaagatttttttttccccaaaaaattcactaaataatgtataagatttgaaggtggtgtttcttagggggattaaggcaaatctttcctttgagaggagaaaatggcccattgttgaagcaa

SEQ ID NO: 317 - DNA, 600 bp, Bovine  MMBT09940
catattttaactgttagaattatatccagagtcattgtgatataatctaattttgtaagaaacatgacactgggtgtttttttttaatcatgataaatgtgcacataacataaaacttaccattggtgacatttagcgcattcagagtgttatgactgtcaccaggatctaatgccagaacactttcctcacctcaaaagggaaacctcattcccattaagcagtcattcctcactccctcctctccccagcccctagtacccactaatctgctttctgtctccatggacttgctgactskggatatttcacataaacggaatcataggatatgtggtctttggtgaccggcttctctcactgagcgtacataatgttttcaaagtctgtccctgtcgtagcctgtgtcagcatttcattcctgttcatgcrtttctgttttaaattgtactctttggctcagaaatcttgcatggctctgcattgcctgtccaggagaagtccaagctcttccacatggcatttgctcttctgcagaatcccgctgcccatcttacctgcaccaacccactctgctttcttagttctacacctctgcct

SEQ ID NO: 318 - DNA, 600 bp, Bovine  MMBT07847
taggaaagcctcttgtatccatctttagcacagggaaatatcagctttgctttcaggatttgtctggccagatttattggcttggactccctcttcccataataccacttagattagcattaaacatattttcatctctaactttcctttttctatgaagtcatgtgaaccaatttctcctttctgaatgctatgtaattccttcagatctgttaacatatcttattagtctatgctatctacctggaagccatcctgcttttcaatatatatttgctcaatactattcttatctattasatattgacttagagtttaattctcaagggcttattttcatgttcttaggggagaacctcagaaactctcgattcacagaytacagytggatgatgattttacattaacaatatggagatttactactactaactcaaagcgttgttcattgtattttacaaggcattcttagcaagacacaagaacagcagaaatttgcttgacattttattacctctgcccaacaaactcaatctccaaacatgagaagatagttgacctttactattagtcaccggcctttaaaggatttttattatt

SEQ ID NO: 319 - DNA, 600 bp, Bovine  MMBT07328
cctgttttcagctcacactgttgttgccacagaggagaatgactgcagtttggtagaaatgatgtgtataaacacatacttttcaccgtgttctcacgcactccaatcaagctagacagcttgcccctgcccacgtttttctctctcttgactgcttctctctctctgtttctctctctcctctctcattctttcttctcactactttctctttcctttccttctatgactgtggggtataattccaacttcgggacccagttcaggtgtcacctattgcatatagcctctttggaattsacttactttcatccagaataccgggagagtgaaggtacactgtgaagttcctcactatattgaaaatactcactgataaaatatattttttcatgtaaatatcttacgtagtaatttgaacttttattaggctggttccaaattgagaaaggattacatcaaggctgtgtattgtcaccctgcttatttaacttatatgcagcatccctcatgcaaaatgctggcctgcatgaagcaaaagctggaatcaagatttcctggagaagtatcaatatcctcagatacgcagatgacaccacc

SEQ ID NO: 320 - DNA, 600 bp, Bovine  MMBT05655
aagtataaaaatgattaaaaccatacagccacatcactgtagaatgtgcttgagaaaacatacactgtgacttcaatttcacaatgaagggggtggtggttaaaaaaaaacaggtcaaacaagttgatttgtgtaactccttccccttactaaataactcaaagttacagcattaacagtaagagatatttgttatttacagtctaagatgttagaatttcttttttaagacaaaaagtctagagttctgagttaaggactcacatgtactgaaacacaggcagcagagaagattgtagsaacaggctacaaaccatccaaaaacttaaaaagcaagctctttatctccattaaagaggcgtgcttcctctgtgtctgctagcctcttctgtcaggtaccacgttggatatcacacgactacctggagctattgcctcattagcaggggaatcctcagcctctggctcccaacccgtaagtgagacgtaacgcaacacagaccccaacaatgggccacaaaaaagagaccacaaggggaacaagtacataaacaagagcagctgcctcttctgctcctaaatgacccaccttaccaatgc

SEQ ID NO: 321 - DNA, 600 bp, Bovine  MMBT06354
ggaaaccagcacatagccaggctgcgctgggtacccaggatgggatgccgttctaaaaaccaaagctgcctttaaagacttttgtctcatcaacaataccttaatgcataggatgaaataaaaactatgaaaagtctgagttacatgcaacttttaatattataaacattctagtaaaataattatgacaataatattcacagtgatcaaggataagacagagacagatagatagaagcactgatctgtattccaaagatctcacttcagtcatcagttctagctctcctctcctaaacscttaaatcactgaacactgtctcccctttttgctttttcagagaggtgcgaataaataatgcattacctggaattccttgagcagaaaaatcagtaagaacaagtgctctgaagtcaacaaatcaagactagaataatcaaatcatgagacagagatgatcgctagatatactttttaatatggataaggaataaaacttgtccacattactcaactgctagtttccaactagcatgtgaatagttttatagatagatgaaatgatatttccctttctcacctaatctaccacaaaaaaa

SEQ ID NO: 322 - DNA, 598 bp, Bovine  MMBT06369
  misc_feature (1)..(112): n is a, c, g, or t
nnnnnnnnnnnnnnnnnnnnnnnnnnnnnnnnnnnnnnnnnnnnnnnnnnnnnnnnnnnnnnnnnnnnnnnnnnnnnnnnnnnnnnnnnnnnnnnnnnnnnnnnnnnnnnnngaacatatgttttatgctaccaaattatgcatcattattttgaatagctaaccaaagtgtgttataggtactaaagcttcatttaaattttagtctatttgcagctttttcaaattctcaaggcagggtagggggtgggggtggggcgtggctcttctaaggagatgaactctaaaaatttgtttctsgaagatactgcaaaaatctgtggtcacagattccagactgttccaaacacagctctctgagctcctgtttgctaatttatgatgtatctgcttttacccactaggtttgtgctttatcaccagcctcagggagcccwtcaggacttacgaaggaaaggaagtctgagagacatwaaaaaaaaaaagaaattgacaccaagccagggagccttttatatgacatgcagcatagggtgaacccttggttctgaagggcatgggttcagttgccatctttacattcttcatgttatttaaa

SEQ ID NO: 323 - DNA, 603 bp, Bovine  MMBT09206
  misc_feature (1)..(3): n is a, c, g, or t
nnnactcctcttcagtaaggtattttcttatcacagagctatggttttataatcatttatatcgaagtcatggagaaggaaatggcaacccactccagtattcttgcctggagaatcccagggacgggggagcctggggggctgtcctctgtggggtcgcacagagtcggacacgactgaagcgacttagcagcagcagcagcagcagcatatcgaagtaaagtcactttaaggctgtcaacatgaaaaataatttgcttagaagaaacagggatatggttgtttatcctttggcagtatatstaacttcaaactcaatgagttaaaaatctgttcttttcagaatataaattaactgttgggaatctgtgtaccaaatgattatgtgctgcatatttctctcttaattcatgcacaccatgtattgtataacattacctcatatgccgtaatcatcacgtgtcacatgcaagatacataaaatacatcatgaatgtcccaccagatatcaaagccatccaagttctaattaacttattcacagactgtttctagttcttgccccagaacatataaacatcagaaataagaagtcagtctaaa

SEQ ID NO: 324 - DNA, 600 bp, Bovine  MMBT06324
atcagtttactttcaaatgggcttttatgtttgatacaatgccttccttatcattcctaccacaggtgaaggtctctttggttctgacctttgatgctgtgctcatattctctacaccaagagctccaactcagaccccggcgtagtcctctacgcagggctcaggcagctttagacagccccctaraaggtagagagacattgcaggaaccaccaggagaacagacccaacagaaactgtgtcaaagaaaacaaccacagaacagaaagaaaggttcctgacttcagaaaaaaattctsaattaaacaaaggcttattttcccaaagcaagaaacccacttaaccatatctttgggacaaactgttattttgtgaaatgaaagagacaagaatctttaacgcctttagactcatacggaatattgatcacatgcaagttacagctattcttaaactgtttgcttttctrttttttcaaatctgaggcagcatcrttattctactattatttgagctcaaggtctttctcagaagtaggaaaaatctaataattgtctacaagcacattatgctgagaggtagcaagacaattttcattg

SEQ ID NO: 325 - DNA, 600 bp, Bovine  MMBT08441
gaaactaacttttgtagcaacaacctataccttttttcgccatcatattatgcttacctggtatgctttcccaagctcagctgatagggtaatcaattttaatatagtcatttctttttttcatttatttatcagctttttaagcatccataatatacacaatccttgctatttactgtggaaaaattaaaaaagaaaacttcacaaacccacttcacttcatcctgaaggatcttacagtcaaactgaataagacagayataatacagatakaattgtattggtgatggacaggggagsctgatgcrgtgcagtccatggggtcacaaagagtcggacatgactgagtsactgaaatgaactgaactgaatacagataaatataaaaccttaaagtatgtaataagttctataaaatgattaaagcagacaackcaaacacttttaagtagtaagtgatatttcacctagagacatcatgaaatgcttcatgaagttatggcataaaagtccatgtattaatggtgataacattatccattctagtttctaaatgtatatttttaagatgtcagcttacctgcagtgttatacgaattt

SEQ ID NO: 326 - DNA, 601 bp, Bovine  MMBT08000
  misc_feature (1)..(1): n is a, c, g, or t
ntgccagtggtcgggggcaagggtggtgagaagggagaatggggagttagtgtttaatggggacagagtttcagctcaggaagctgaaaaatttgggagatggattatggtgagaattctacaataatgtacaattgtggtacattaagtggtgcttagtgccactgaacggtacagytaaacatggttaaaataatatgttttatattatgtgacttttatcacaataaaaaaaaaaactgaatgcaacacaaagaaggaagagctatgaaattagggtttggagagagagattaaatascaagaatgagcattacgatagttattttggtacctggcttcagttatatctgaagtcagtcyacctctayactcttcagttttgtgattcaataaaatactttttttccccttaaaaaaaaaaagtcagagccaggcagacacccatggaggccacactcaactcccatggcagcgaagaaagttctggttcatctggttcatctactctgctttgagtagagcctcaacctgaagttacagttgtagaatgacttagtgccagcgggaacttggcarcaacctagcagagagaacacag

SEQ ID NO: 327 - DNA, 600 bp, Bovine  MMBT06338
agaattcctctagcagtatttgctttttttaatatcttggtcaggtggtacttcagacgtcaaaccgagtttgtatataattaatcatactgttgtgtttaggtgtgtagaattattaattgcatatgatgctaatattaatcatgctgctgatggaggacagacacctctatacctggcctgtaaaaatggaaataaagaatgtattaaactcttgttggaagctggaactgaccgaagtgtaaaaaccagagtgagtacctgtattttgtattttgtcctctaattacaatatgtctscaaactctgcagttcaaaaaataaaataagttaaaatacaggttgctttgttttgtttaaagttttgttttgctttgaatatgttggatcctcatggtctgacctctgtttatctgattattcaaagcttgttagttagcctttctttttagaggtagtcggtgtagtaccagggacttgtaagccatcgacaaaggtcagctgtcattcattgagttgtcgtcatcatccacagtagtgctcacttgtaatgtgtataaacaggaagcagatttgtggcaggacagtgcccattggcag

SEQ ID NO: 328 - DNA, 600 bp, Bovine  MMBT08004
tggatgagcaactgaggcatccaggtaaacagtggggcatctctgactccaatgttcacactcctgctgctgcaccacccagcttcacaacaggcgagtgtgcctgaccctgctttggtgtgtgtgtacttccaatccatacagcacacacagtctgaaggctaactttatgcaggccactgggccacacagaaatgaaacacagagtgtatgcacaacctagttgagaagacagactcatacttactattccaagtgtaaagcagactgtgatgagtgctataaatgagggtacgaacsaagtctttgaaaggaatatttcttgtacacactattcccttgtaggtatttgtgccttgaaagtgaaagtattagtcactcagtcatgtctgtctctttgcacccccrtgaactgtagcctgccaggatcctctgcccatggaattctccaggcaagaatagtggagtgtgttgccattaccttctccaggggatcttcttgacccagggatcgaacccaggtctcctgcattttaggcagagtctttaccatctgagacaccttggtacatgttatttggcccccttgccctctacgtg

SEQ ID NO: 329 - DNA, 600 bp, Bovine  MMBT11160
cctgcattttcagtatgcttccttcagctctgcacattgcagttttgaacatagttaatgcttgctaaagattaaacaaatttggggaccaggttcagagaaaaagaaatatgaattccaggtatccttacttcttgtacagtttggctttgatacttattaagggctaataatctgatttttttatacctcatttctcatctgcaaactggagttaaaatggtgatatactatgtgtgtcttataggattactttatgtatcaaaaaacatgagattattttgaaaactgagcagtctsctacaaacacttggcgatgttactaatctgtatcttctacactgtggataaggctggtgtggtatrtagagyacataagcattgtgtaagcctgcttttgcaaacacagggtggcgggaggaaattggaaccctgggtaaaatacatagtaagttccaaatgaacatgagataataaaaaggcttgtaatatgtatttatcagtcggcttatggaaataagcaagaatgaccatctatgaatgtgaccttaaaaactgttaccaataagtgaatatctctgtgaatatagttaaatatca

SEQ ID NO: 330 - DNA, 600 bp, Bovine  MMBT08291
ggtggcccacactgaatgcagctgccacagtggccactggagaaccagctgaagaaccacccaggcgagcccagtagagactgcaggattgtcacaaataaaatgcttgttgtttgaaatcacatagttttgttacacagcagtatataatgaagcactccccatcacccttttagaagcaataataataatgagtatcattactgtaagaggaaaatggaaaagatctggaataaaaaagacaaacgtcattctaacaaaccgaggatactggacaccaagtctggcatctggccctgsagtgaacagagttctttctatcctcttactgtgytgcattgtgtatcatgtgtactcacattatcaagaggtttggcaagtctttacttacagtgcatgaccaccaaggactaaagtcctttmtactggcagcgtgtcactcacagtgtgaaacaactcagttcacaccgtgagtttctgagaaaatatttctcaggtcttataggagctgatcagcttacagagtcaactgatatcaacaagcacccagttgactcccaaccaatttgcgcaaaaattaagattctcaagtgggttagt

SEQ ID NO: 331 - DNA, 600 bp, Bovine  MMBT05667
tttatacctctacactctgcttttagtgcaggacaagaagagcccatcaagaaactgacctgaggctcaggtctctggatgaccctcaccaagtccaaccaggatgctcaccatgccaagcaccctggggtatgccttcttttgtcttaatgcacagacctgtttccctttcagcctcccaaaaggggctgcctttttctaacttgtacaagttgctctacaagctagctgaagtaccatgaagtcaacttgttatttattcacagacatttgctatactgaacatagattttttccccscaattctgttctgtgcttatatccatgcatacactacattatctcttttatttatttatgtttttaaaaaggacttaatctttcttttagcagaaacagcatcaccgtcatagtttattttctgtaaaatttcaaggttcagaggaaggatgcaaagcaagtttatgctatgtctcagatgaattaggatccagataagtgacttagccaggcttcctgccttccctttcttactggtttcacaagcgcctcagaggctcagcatatgaaaatctagaaggaacaatgattgccctattt

SEQ ID NO: 332 - DNA, 600 bp, Bovine  MMBT07720
gtatacctgccaaactctaccttgctcccccgtctgtactctgcaggtgcctctcttccgtatagtaggacaacgacacgtgatgctcaaaagagcccaggaagtgcttcctgcgctgtgtccctgctcccctgaccctgtccttccccaattctctcctcatatgttctcagcttatcacttggcatttccacacacactccccccgccctgttctctttctcccagtgacatgtctctccacttttccagatgtccagagcaatttggctgacctggcagttcccttctcttgggctsctcctgggaatatcttaaaacattagaaaacagtgactgaaagagcttccaagactggatcccaaacctgyaccaccgtatcctcctaggcggtgcttgggctcagttacttctcaaaggtcctcttctatatctcagatcgtgtgtcaccttgagggaaagccatttgataaatgtctgcaattggatttcaccctggggcaggaatgtggcttcctgtaagagaaygttactgaaccaggctctaaaaatctaacaactaccctggttcaaatctcagcttccctacttcctagctct

SEQ ID NO: 333 - DNA, 600 bp, Bovine  MMBT04992
cttctctgtactcagttcaggttttattctgcaaataatcctttccaaagtgtatttgatttgccctccctgtgtccctaaccagaagggaaccacagaagaaaacattgctgaagacatccatttccatcgcttgcgtagacctgattcactaagaaaataggaaaaggttaaatgaaaaacattctagggaagttacaaaccatataaggggatgggtgagccacacgtgggcgtcattttttttcttctcttctttctttcaacagggagacacatcgcctcttcctcccactgtcycagactgtctgcgggctgatgtcagggtggctccttctgagagccagaattgttccttctctttagcagacaagaatatcacccacggcttcctctatcctcctggtttgtataactcttttttagagcagcagcttagaaagccctcatcagctggatgtgggcatgtgccttaaacatatgctccccaccaaaactacctgcttgggctaaactagctgcccaggaggcttccagtggttgtgggtcagcctggagctataataaaaactaataaattttgcagtgggaaccacacat

SEQ ID NO: 334 - DNA, 598 bp, Bovine  MMBT03176
  misc_feature (1)..(107): n is a, c, g, or t
nnnnnnnnnnnnnnnnnnnnnnnnnnnnnnnnnnnnnnnnnnnnnnnnnnnnnnnnnnnnnnnnnnnnnnnnnnnnnnnnnnnnnnnnnnnnnnnnnnnnnnnnnnncccacctagttgcctgaaccgctggccacatggggccagagcttcaaggctactagactcacaaagcacatcctgtggcctgaaacctacaccagctgctgccgtcctgcgctccctaaggaagggtgggcccagcagagaggagagaagccggaaggaggaaagggcagggctgagggctggtccccggggragataagcctctaatggcggcagcatctgatccgcctctccttcctgctaatcctaaatcacaacactgtgaaatctgagcaagtgtgaacgccttgggctccagctgtttttygtgtcaggcctccatcccagcctgtcacakcaagaagcctgaggatgcagtggtgaratggtgtggggcgggggcccaatacctgcagaggggaggggggacactccaggctgrggtgcactgtggggacccccgcctgatctctgctgcccggctgtccccgaggctctgggtcagccccctg

SEQ ID NO: 335 - DNA, 600 bp, Bovine  MMBT04699
ttcgaattctataaaaagagagtatatctgtgaacaggaatatagcaacacaacacccagaacactggtaccttataaaatcagcttctgtctagaaaaacaaaaaacaaagcaaaacatgttggaacaacaacaacaacaaaaaaacaaaatagaaaaacactaaaaaaccattccacaccctctgcatggaatgctgccaaatggaaagggcactctggaaattctttcttccgatttcattttctgatccataaatctgctgagcacgcgtatcctttcctgcacagcctttttccygttacaaatctgtcgtggcgattcactaacctgccatatggcagagtaaatccattcaggaagacacgaggctactctgtaccttaccacactgatttaacctaggcagactagcttctctagaggaaagacatatctgaggcatgaaatggaaatcactcaaaagtgacacaaaagccaatacacaatagagaataaagagaacacaatcatgggtatactcagttcaagaaattttgattgtattttctttgtatattataaacatttacttaatttgttgcagtttgaagtaaaaaa

SEQ ID NO: 336 - DNA, 600 bp, Bovine  MMBT04613
agttctgtctgttctgaggtcccttcccrtctctacagagtgtgagagtgcagagacctttaggttgaccagatgcccaatggggacatggcagaggatttattgtattaagtatgagatgggacaacaygctgagatgctgctcacttctaaagctgctctgattttaagagagacctgtggaagatggtcataggaagtcaacaataaccattgaggattgccacgtgtaccagtcaccaagcttcagtaggctgtgttgctcggactgtctggtgcccgtctgcccttaactttttycccygagtagggaagtcgagctttttctcactatagccrggagagggagtgggagttggtagtccttgcatctttctggagctgatttttccctgactcttttctctgctgcttctttttgtccccactttggggtacaggggctggagcagattttgttatgctgggaggaatgttttcgggccatactgagtgtgccggagaggtgatcgagaggaacggacagaagctcaagctcttctatgggatgagctcagagacggcgatgaagaaacactccggaggggtcgcggagtatag

SEQ ID NO: 337 - DNA, 598 bp, Bovine  MMBT03137
  misc_feature (1)..(79): n is a, c, g, or t
nnnnnnnnnnnnnnnnnnnnnnnnnnnnnnnnnnnnnnnnnnnnnnnnnnnnnnnnnnnnnnnnnnnnnnnnnnnnnnnataatctgaaacaggtatcttgcttcttaagcacataagcatagtgaataggaacagctgtactatccactgaaataaactaggatgacccaacttggagctctttgacagctccctatcttagaataaaagctaaagtccttacgagggcctttgcccaattcatcttcctactcttccttccctactttacttcattctgactactggcctccctgccrttacctgaacaaggcaggcacactcccacctcaggacctttgtactggcttttccacctgcccaaaacatccttccctaagccactgacacgacacttcacccaaatgttcccctcttggtatggcattctctaaccatcctactttaaaatgcatctgttcctgacaacacttccacatcccctatgtctcctttactaatttctctccattgatcttatcacgccccaaaatgcaatttacttgtctatcatcatattcatgtgagctattatcccaccccactagaatattagtt

SEQ ID NO: 338 - DNA, 600 bp, Bovine  MMBT04453
atcatggatgaggtgaatgctggcctgcagagacctgggcaggcttctggtaccaactgcaactgagctgcagtgaattcatccaaggccctgggagtgaccccacccagaggccagcactgtagagtaacagagggaccgaggcctcagcaataagacctgagttcacagctctgcttggccacttactggctctgaggtttcagacaggtttgaacaggactgagcgcggttctcaggggatgagggaaatagcccagtaaccttttccctttggcagcggacagggtggggctctcyaggccatttgtactcgacacgcatgcacagacatgctcacagtcccacgctcctgcctcatgcctgcccctgagtccttaccctcccctccacccggctcttccacactcgggatgaccatgccctggggtgttgcacgttttagcctgctatcatgtcccactcagcagatggagggcccagggcccagaagaggtgacagagctcgtctgagttaagcggcagcgcccgggctggactccgtgtggatgcgttcttgctgttgtcatgatcgccgcagtagttttgtggtttgctgta

SEQ ID NO: 339 - DNA, 600 bp, Bovine  MMBT05221
agacataaacatcatcactggagcccttaaactgtatttcagagacttacccattcctgtcatcacctatgatacctattccaaatttatagaagcagcaagtaagtattgagtactaattgtttaatggcaccaaatttttaagtgtgatgcttttgacttcaagaaaatgaaaactcagaacctgattaaattatggcatgaggacttgctttgccaagtgagggcacaacagtacaattagtagaaacccagacacagtacactagctgagtggaaccagtgctaagccagttctaytcgactgatgctggggaccaggcagttctgtctctccccactgtttcttctatgctggaaaccaacacagacttactctgttatatgttgaaagtgaaatgcttttctagtaagcaatcagatagtcttcagtgagggctgtatagattaactactttcatctattaagcagaatccccttgctaattgattaaagtcatatcccaagttagggcaccttgatgctgttcaaaattagtaacaggccgagaagatactgtatcaaatactatcctaggaactctcaccaatatctccttt

SEQ ID NO: 340 - DNA, 600 bp, Bovine  MMBT05061
caagctaaattgcaaaggaagcagagcattaaggtcttactagaaggagctgagtgcctggctttcactgagtgtgaaggttatattctcccacttaaagagtaacatctgctctaccaaaataagtaagagcagatgcttcgccatctagatgaagatgaattttgcattctggattgaatttatcagtactgttgctgccaattttaaagactaaacaaattgttgctgccagtgccccctcctgcagtcatgcttagctccttggtccaacagcccattatctgactgcttccagtygtaagaactggagactagattacacttagtccttgggatccatgagatcagacagggcattcctggaaccagcagtttcttgatcactagagaagggcacagctagaggggctttcctggtggcctagatggtaaagaaactgcctgcaatgcgggagacctgggtttgatccctgggttgggaagatcccctggaggagggcatggcaacccmctctgtattcttacttggagaatctccatagacagargagcctggcaggctacagtccatggagttgcaaagagtcggacacaact

SEQ ID NO: 341 - DNA, 600 bp, Bovine  MMBT04698
aagctaaggtttgaacctaagttgatctggctccaaggctttactaccaggagttgaggagatcctgcagagggagggcccttgcaacctgccctcagccacagttggcctgtgaggcctcaagggtagaaactctggctcatccttttctgtatctgtgctgctggcctggggctctgggctgaacagtgcccggtccacctgtgagctgatgaatgagtgttgcccttgtgtgttgtgcagaatgacgacagctactgcatcctgggggtggagrtcacctacgtaccctcccagaayggccagcccctgtggatccttggggacgtctttctcaggtcatactattccgtctatgacctgggcaacaacagggtgggctttgccacggccgtctagactcagtgcctggactcccgggcttccttctccctctggacactccaccctacagggggttctctctgcacttcctctctgcatttagcctcccttctctggactctggactctctctaataataaacagctcttctccacgttggccatcctgttgtttttagagggcggtcgcagcctgtgaggctcagggaacgggac

SEQ ID NO: 342 - DNA, 600 bp, Bovine  MMBT04909
acccaagcaggaatgcccgactctctgaggtggagaatctgactgatcaagaagaagctgacgtmaagttaccagtgaggcacgagcaggttattaagggggctcccacatgtccatgcccagtgacatcttggggattgggtcaccacggagaggctcccagcactgagcatcttcttcaggactccaaatgcaagagcagtcactgaattcagttcaatgaaagaggaatagctaaatggtgcccagagtcagcaaactggaacaccaagaaagcagcatgcctccagtgtagggaaytgaggactgctgtggcatcaagggcggaccatgcaaaagggctcctagggggtcggcagcaccactcaaagtgaggcaagggtgacgctcttcacttttaatagaatgtttatcttcatcatcatcatccttaaataaccaggtatagctagtgacaaggaatggataagctgtctaccacacagagccagtaaacaaatattacaaggccctggggacatagggaacaagccagtctctgccctcatggcttttatcctttgggtcatccttacactgctgacagtgtatggcaaggat

SEQ ID NO: 343 - DNA, 600 bp, Bovine  MMBT05271
acgaggcccacgctgaccccagaacctggtcctgggaggactcacttggcgcagtagaggaagtggtccctccagtccacctgggcggtctgccctgacagcgtctggttggctgtgagcagcagctgagtgcggttgttctggaagtactgcaggaggctgttgacgcagcagtcrgacagactggcgttatgtgggttgaggggggcgtagcaggtgtcccgcagggagacgttccgctgctcctctggcgaccacacctgcagatgccgcagcctctcctgcaattccagcacctcyagcagcagatccgaggacargatcccgctgaagttcttgggccccagcagcagggagtcatacctatagctgggccggtgaggtgctgtcatgaacacctggctggttcggaagaaggggccgaaatacttgtcgtggaacgccttctcacgtcgggctaggctgttgggggctgaccacaactccacggggtccgtggtcagttctataaaagccaggccccctgccagggccaccaccacaatcacagataccgccaggatggtcagtggccatgaggccacccaagtgccccagcac

SEQ ID NO: 344 - DNA, 600 bp, Bovine  MMBT04556
acaggcctgtgctttccagccatgcagcctacatgggaacgtatgcagcatcatccatgttgttctgggagcccctaggctgtccaagacacctggctaaacagatgttcagcaggttgactaaacaccaaaacctaagcttcttgggacataaacactacagatatcttcaaatccatcaagactcaattttcctgtgctctcctccctgctggctagcagctcagccaaaaccagtgcctcacactctgaagtgggaaactttctaccccaaaacctagcctcatttcatggaggacycacgactggaggtccctttctgaggccccaggacatcatgcatcatcatttgcagccagagctgctgggcacgtgttagaacagggactgccttatgagagctcttcaagttccctgtatcttgtgttcagttttcagaaccactgggcagaccctttcccccaaaagcctgtgggtctgggggcttctatggcctttctcagccccatatatcccatcatactgttgaccgggagtttgtccaagtctgcatgctcacaaacactgctgcctttctgtgggtaccaagcaggtcccttg

SEQ ID NO: 345 - DNA, 600 bp, Bovine  MMBT05149
cagtagcagcagcagcagtaatatatctacctcataggactcccatgagatttgaaatcttttaaaagtacaagacaccttctacagccaaactttggataaatacctagaaaatacataacacctattattccgctcagtatgagtctatttgaacttttccatggatttcagtgtgtatcagtgacctgcaacacaatgcagagggactggcattgcctaaacccagctttgggaattaatggaagtggggcaggagtttgatatcagacctaaaggactgatgtcagtatcaggctygtttctctgcccacctacctccccgaccatacacatcgtctttgctcccaagaacagagcttctcaggagtattttttaaaacatctttcaggttattcttaagtctcaaatattgaaatatctatgaagtccttggaaccctagacagagttttgactttttacactgtattgaatattggattccatcagattgaagacactattaagttgtaccattattttaaagtgatgctaagaaaaaagatgctgccaattacattatgacatgccattaatttcacatttgatgcaatttta

SEQ ID NO: 346 - DNA, 600 bp, Bovine  MMBT04417
taaggggctcaaagatagacctctcttacaccaaaagccctttctcaaggccatggggaaaaagttaagtatacacgaatcaggaacttaatgcttctttttttcctttgaattataaataagggaacataaattaaggggaaaaactgctaagggaaagtaaagtgggcagagtttcagccaactctgaagctttgaaagcatcttgggaatcatgttgtgattccttctactaggcccagcaagagatgctggtgagcagacggacaatgagaacgatgtgggacaagcagaaaggcyttggatatcagggggaaggaggtatattaaggcagtgctagtgctrttgctgtgggagaaggcaatagcaycccactccagtactgttgcccggaaaatcccatggatggaggagcctggtaggctgcagtccatggcattgctaagagttggacacgactgagcgacttcactttcactttccactttcatgcattggagaaggaaatggcaacccactccagtactcttgcctggagaatcccctggacagagaagcctggtaggctacagtccatggggtcgcacagagtgggacat

SEQ ID NO: 347 - DNA, 600 bp, Bovine  MMBT04756
agagtcggatatgactgaaccaactgaaatgctgaactgaacctgattctgatttcactacaatttttataagaagaacaaacagatgtcttaataaaatgaccaggtggcttataaacaaagaagcatcatcaagttttgtgtacagattaaaaactatacaaaacagctatagaccagcaatgggttttactattttttccattttgtgtacattcttgtttaatacacataattaaatgatcgttttgttactaaaatcttctgactcactcattaaaatcactttattttcaaaaytgttgaactcacatttcttaatatgtaaytcacatttagtaatctgttgtttatctcagctttcaaaatataattaatctgtactgatctacttgacacacaaaatgacttttggggaactgtcatcattaggctggcattgccttcttcccactaaaactctactttggatttaatttttttaaaaaagcttacaracaaaaagagcatatctcttgaaaaataaagaaatattaattctaataataaagaatrtacaaggctccccaaatcttggctcattttgacattggaaaaaat

SEQ ID NO: 348 - DNA, 600 bp, Bovine  MMBT04503
aatgaagaggggctgcttccttgtaaatagttagagaaacagaataattgttataaaattgctgttaacagtgtaggaaatgcatagcatgcactgcttagatatatgattccatttcaaaattagttcaaattatgtactttctacctgatactactcttaacctttgataatgttcataactgatagagatcattggcattttgtagaatgtagtaaactgattcattttaaagaagcagtgaaaaaccaagaaattactacatgaatataaggaacacaaacccacaacaaaacatyggggctcaggtttgcatttgggggaatgtattttatttttatggcttttagatgagcatttcccatactttaatgtttctgaaaacaaracagaagcagagttgataatcacctcagggggttagattttctatctctacccacattcatattctcagagttggaattcaacttgttcacagcagtaaattctcatcaacaataactgaaaagtttaataatttagcattcaggtcattcttattatatactttaataggtgaactataattttattaaattaattttaaagctcactat

SEQ ID NO: 349 - DNA, 600 bp, Bovine  MMBT04748
tcttgccagcattgccctgtgtactgtagtcttgaccagtgtaggaatgactaaaaaaaaaaaaaagaataaaatatcaaaatcgaatttataaaacatactttgatcacctcaaaggaaattttcaaaattctgacaaaaagtcacgagaaaacatttcatacgtaaaccttaggagaaacatagccaagtgttttaaaggtatttcatagaatatgtttaagtaactttccccataaataatacagaaatatagtgctcatctgtgtctcccgattcctaatctagagtactgtttcyttaagagcaatatgcaaactgttgttaaagttcacactcctctactactgaccccttataacatcacagcacagtggtggtggtggtttagtcactaagtcatgtccaactcttgtgaccccatggactgtagcccaccaggctcctctgtccgtgggattctccaagcaagaatactggagtgggttaccacttccttctccaacagcacagcacaaagctagggataaacagagcttatgtctgaagtcattgctcagcaggccctagagtgagtcaccaagactctccacactctgg

SEQ ID NO: 350 - DNA, 600 bp, Bovine  MMBT04519
ccagggatccaacccaggcttcctgcattgggagtgcagtcttagcctctggatcaccagggaagccatatgaagaccttagaatctcatgcttawtttaccccaaggcaacctaatattaagccaaaccaggcctgtaggagatgagatttctaagaagaggttgggggtaggcagtgactacaactgagaaaccatatagaacattttaattactgtgatcattatgctaatttatgttgaatagggacagtcctatttatactttgagaagaccactctggctgctgtgtgaagaayaggttgagaatgataagactgaaagcacgggactggttgggaggctgctgcagttttgttaaaagatgatggaagttcacagtaaggcagtggaaggagagatgtaaggacataatctctagattatgaatctcgtaattagacaaattttgaaagcagcagggagagggcatgtagatttactggacatgggaggtaagagcaacagggagatctgcgtgactccaggtttctgatatggacttctgggtgaaatgtgggtctacctaccaagatgggagaggtggaagaaggatttca

SEQ ID NO: 351 - DNA, 600 bp, Bovine  MMBT04838
ctcatctaaggatatggtcataccatgaaaatgaaaattacttgcagactttaaatataaaatatgagmaattcacaaagttgctataagaattttctccccacagtttcaatgccttaggtttctcagaaagttcccaataccttttttctaaatcatgcatcctgttggttctgtagagaatgaaaaagagaaagtgagtaagacttatagtatattttagggccagacttgatatttctgactcaaattcctaaaataaacactaaacaattgtgtcacaaaataatacaaacttgyaaatatctggaaagtataaactttataagggaaaaaaattaaaatcagtcataatcctattgttcaaggaaacccactgaattttctgaattttttagtcttcagaaagactagattgtagctgtatcaactacatagatgtaactgtatgtatccacattaattaggaccatagtgtatattctaatttatattcttttctcatttaatactatatcttgagcattttccattgatattagaatttttacaaaagcagaattcagtgaatatatgacatttcaacttgtagaggtgtca

SEQ ID NO: 352 - DNA, 600 bp, Bovine  MMBT04568
ggggaagagcctgcgcgggggaaggatgaaggtggtccctgccaccgtggcggcgcaccctcctgggtccgctcctggccgacctccccctgactctggggagggcgggagaggcagcctgtgtcctcgcgggcagggccttcctgtgacccgccagggaccccgcggccctttcccacagccctcccctcgagccctgctgcagctctccgtttattttttcaggtgagtaaactccgtatcaaatgctggtttctcakttgcttttaattaggcttctgggctccactctttcatctyggtgaagtctgcgccacttttccccagctatttttggtcctaaagcccggggtttgctttcattcagctaattgaaggcacacaggaaagragagaggggataatcctgatcagtcgaygtttctgaaggctgtgataaaccacacgtttgttcagcagcagaaaatcactttcaaaatgttagctctgcagccccttccctgaggggccgggatgcgacccaccaaggtgaaggtcacaggtcaggtggggtcccaggagccctgaactcctggggaggctggcaggcgggtgagatgc

SEQ ID NO: 353 - DNA, 600 bp, Bovine  MMBT04463
actaactgtgtggacactgctccagcatcttcacattatctcacttaatcttttcaacaactctatgaagtaggtactattataatctccatattgggggatgagggaaactgagacagataaatcatgctgaggaaatatgtataatatcataaataatatgctgaaaaagaggcagagcttgaacttgaactcaggtggtctagctctagagtgttaggctaaaatgaggatatttcatccccatgtcaactatcaactatcagtaaccatctgtgatgctatatggagaactgtttytgactgtattcaaacccgacaaggagtgctacagtcaatgggggaagtgtactacccayaggaagatgggagagatgtgcatagtgagtatttacaacacagacctgagatccaaagactgaacaaccaccaaccacaamcgcaaccttgcccaaatatgacagataatagtaaaataatcaaagataaggtcacaggtttagcaatgttgctatgggtttgaacactggtgaggacctcttagcacaatgctggatggctcaaatagcttaatatactaagatcttagatcattatcct

SEQ ID NO: 354 - DNA, 601 bp, Bovine  MMBT04428
  misc_feature (1)..(1): n is a, c, g, or t
ngaataacattattgaatggtcaaaggttacgatcatttttaatggtttttaatgagcttaacaagttgtataaaagttaattttccatttcaccttctagagaaattaatggacttacgaaatgagtacctgcaagcagatgaggccaataaaagatttttggaacagaggtatggtaagagggtgattcagaaggcactggaagagatggaaagtaaggagtggctagaaaagaactcaaagagctgcccatgttgtggaactcccattgaggtaaagtttggggacagacttggaggyctccctacttgcaagcatgttatgatttcctcaagaagccttttaattttgaactaattaagaaaacatatattggtatttattaaaccttcttggaagattcaaatttactactaattattgttattggtattaaatatatgtagatgtcccttttcatacagtgcttccatacagtgatggtttttctcagcttgtatctacctcaaaattgaatgagttatgaggaggccatgttagaactatagtcaactcaactcatctatattatttttttttttaaaaaaggctgacttctca

SEQ ID NO: 355 - DNA, 602 bp, Bovine  MMBT04423
  misc_feature (1)..(2): n is a, c, g, or t
nnggcaatgttacataactggtcaggaaatgcctttttgaggaggtgatattgaagttcagatcttcaagattacctgaattgtaacttgaagagccagctactgaagtctggcagaagtgcagtctaggattggggaacaaatgtaaaagctcaaccgtgttatgcatcttagctgaataacgttaggcatgttccatacaattgttcgttcattgttctaatctctaaaagatgagaaaaaggaatccacccctcatatacttaaggttcaagagatttggacaggaaagcactcaacayaggcaaaaccaatacaatattgtaaagtaattagcccccaattaaataaatttatattaaaaaacaacaacaacacaggrcctagcagtaaatggtcaacacagcattattttagggtttactattgcgattcccatatgccacctggacccgcactgaccatagataatttaaaaggacctacgttggggggctggaccagcatctcttctcccctaactgaagcctgttctgaaccacaaaaacgattcctatgcagggcagggcccgcctccacatgttacttggatacaaacactc

SEQ ID NO: 356 - DNA, 600 bp, Bovine  MMBT04408
cacgtgggctgtctgccggatctaactgtctaactcagggtctctcccgttcaggctcctggggaggaagggaacttcctcaacctgtggcagatayargcctgatggaaaagcagycccattaggtgacatattgacaaacacaaatccaaacagttaagagacatgcagggcacagggaaggttacactgtggttctggtgtaaatgccccagctctgtcccaggcagctcagaaagagaatgtctacaatacttttcgttgtttcctagtccaggtcttggacttcttgattgtctygccaagtttacatttgtcaattttcgtttgtcttgttcacatctctaacccatcctggactgtgttgatcctagagtcaatagcaatagcttgctgaattgaaaaaggcttacagttatgtcaaagggctgaggaggcagtacaccaaaataaaaatgaaactctctctgtagagttggacttgtcatctcagtaggtgggcccttgtcaagcccctgagaacacttagaactaccaggtcagcccaagggatggagacccatctccaaagttcattattcaatactggtcctgcacttt

SEQ ID NO: 357 - DNA, 600 bp, Bovine  MMBT04407
ttttgataccctggactgggaacagtgggttaacccctgttcctgggcaataaaawtcccagggcagttcttcagtctgttcattcttatttacatcctagaaatcagaagcttcaccagggtgtagatgtcttgtgctcagatggctctactgtttacgcacctttcaccggaaagatcatgggccaggagaaaccttataaaaacaaaaatgccatcaataatggtgttcggatctctggaggaggtaagaagtggtgtatgtacctggggcatatagtggagatctctgatgcttayttcatgtgtattctatacagagaagttgcattcttctttcaaaggaacaaaacctaggaactaaaggacaagggtactgtactaaaagagcccacacattttccaagatgtttcaccactttccctacagtcatcttttttatacatacactccccacctagctctatacctgactggggcactttcctcctgaggtccacatggctttgcttaatattctccaagcaaaatcactttcagcaatattagctataatgaatggatgctttcatttaccagttccacaactggaaaatgtt

SEQ ID NO: 358 - DNA, 601 bp, Bovine  MMBT04942
  misc_feature (1)..(1): n is a, c, g, or t
nttatctttcttttaaatatgtgtgtacttatctctgaacttctctagtaaagtgagtattacaaaatatttcttataacaatgggatgtggaggtatgggttcatagggctgagagccactggtacaagtgtgtayaacacagaccctttrctgstaggaggtctagcaagcttgctattgtattgataagactgtgaacctttaaatcaagccaggctggattcgatcctgattcctcatttactaaccrtgagacctcaggcaagtaacttaaattctttgaatatcagttttttcayctgtaaaaaactcatgttttcctctatctcataggatcagtgaggataaaaccatgtaacaaagtacttaacacagtggtcaccacattcgtgtttggtatgcatgtttgtgtgtgctaagttgcttcattgggtccgactcttcgagactctatgcactgtagccccccagcatcctcagtccatgggattctctaggcaaggatactggagtgggttgccgtgtcctcttccagggaatcttcccgacccagggattgaatccagctttcctgagtcttctgcgtctcaggcrgattc

SEQ ID NO: 359 - DNA, 600 bp, Bovine  MMBT04392
ggacagtacccatgaactttccaaacctcatttttctgttctgtaaaatgagttcactctcttgccaccttgtatcattgtgattatatttgtaaaggcacttttgagtgctgtaagtactaactgttgtaactttgcataaattttggttaaactgtgttttctttccaatggccagcttaaccataacttttctggctgttcttttaagtttctggctatgggccaaattgctaaaatatgattgttttggatttattattttctgttttctgtgtaacattgttcagatgttagtayatatcaaataagtgtatcaagaagaaagaagaaaattgaaaactagwgtgttagtaatagagtatttttaaatgtaagcaaatttgtatttattaaatcgatttgtatgtgtatgatgtttatatttttaaactccagtgaaaaactcagtggtagatctgataactttctgttgtggtagctgttaacaattattaaaacaatttaagataatttaaaaattttttactttttaaaaaatacattagattgatgtctgcaagagcacgctatgagagatacagtggcaatcaagttctt

SEQ ID NO: 360 - DNA, 600 bp, Bovine  MMBT04385
cagtcagcccctacacagatgatatgatcttaccacataaaagtatgaataaaataaaatattgaaataatgttgccataaaaattatccttgagatgtgtatgttttcatattaaattttggaacttaaaaaattccaattagtctcttgatctattcatggttccatataatccacctaaagaaatccctaaatgatttcttatatatagtatctaggagactggcatcccgagtgatttaacagattaatactgtttctgtctccttcaattatacactgtgcacttagatccaaaygggaaaacgatggcaatggtattggtgttttcccacatgataaaaatcagatgacttcaagagctggagagacaaatttcatttgttttatttattaagcacattttcagttgtgattcctctttacttctcattttaaaagaagagaaaataatacaagtcacccctcaagctattagtcaagtgacctactttcaggcatccttctcctggattaggccagcgctgatttttcccagatgaccatattctcttttattcccatacaggcattcttagagttttaaaaggaaattgtgg

SEQ ID NO: 361 - DNA, 600 bp, Bovine  MMBT04985
gtttattgattaaatgagtcactcaaaaatatttttcactasggacttcccttgtggggccagygcttaaaactctatgctctcaattcagggagcatgggtttgatcccatgtcaggraattaagatcctrcatgcacatagtatagaaaaagtctcactcaaaatcatatgctaataaaagtaaaatttctccagaataaaactatagcaatgagcactttccttamtagcaaaacatagtcttaggaatattgtctaaaataaaaaagttaagttgcctctatctaccatatgataytactattccccttgctactgagaaaagacagggagggaaagagaacagaggatgcagtcactttccccycaaggcatctcatgaacagctgaagacccctaataataggaccatggctacacttcccaaatgagttcggggatcatactgtggagagtatggccaagctttcttgcaaaacacaacagtgagatcaggatggtgtgagggagttgtacccaatagacarcaccrcacctctcatgggcatccagactctctttgattgttagtttagaaggaagaggcccaggtaccagc

SEQ ID NO: 362 - DNA, 600 bp, Bovine  MMBT05008
atgaacagattaacaagatgtggtgtgtcaatacatgtgtgtatatgcattcttaaaaagaatggaaatcttgtcacatgctacaatacggaaggacagacttaatatgctaagtgcgagtagtcagtcacaaaagacaaatgcagtatggtttcattcatgtgaggtatctagtgtgatcaaattcataggaacagaaagtaaaatggtgcttgccaggagctgagggataaggaaatggaaagttattgcttagtgggtacagtttcagttttgcaagatttaaaaagttctggagaytggttgcataacaatgcaaatatacttaacayttttgaactgtgcacttaaaaatggctgagaaggtaaattttgtttttttgtcacaattgaaaaatgtttaaaagataaatttcaaatttgatctgtcagtctcagttacattttcaagtgcttggtttcaattctgcagtgcagctctggaatataaattatgtgagtcgttttctgacagtaagtatttgcctacatatttaattgtaaagaaatgaaaaggtagccaatagatcaaacacagaaagaaagaggcacggaaaagat

SEQ ID NO: 363 - DNA, 600 bp, Bovine  MMBT04344
ttcatatttactgtcaggaacaagacatcaatccccattgtgtccccactgtagtttaccctttctagaagatcatgatggaacttgacaagatacagaaataagaaatataaaacttatacaggagtataaaaaatgttcactttctctcagataatttgactgcaatactagaaatttccctcataaaatcaactgaaaaactattcaaaacataagaatttagtaactggcatggtgataacattagtagtagtttttcaattgcctcattctctaaagtattgtattagttaccaytgagtgatcttttcttttctttttttattttattcatggcatgaactttaactggccatgatatactgacatattatacttcygcatcatttaattcaatttgctaatacaggcatttctttatctgaatgaattctgaaaagtcattgaatattaaattttgaataacaggagtctttgttctattattttaaatgtgaaaaatattttgttycaaatctatttcaaaatctcaaccaattttccccaaatactacttatatatcctaagtacttccataataacttactgagaattcc

SEQ ID NO: 364 - DNA, 600 bp, Bovine  MMBT05383
agtccatagggtgggaaagagtcagacatgactgagtacacatacaccatacaacattatatatgtagcagtacatctttttaaattttaaatttgtttatatttttaattcaaggataatagctttacaaaactatgttggtttctgccaaacatcaacatgaatcagccataggtatacatctgttccatccctcttgaatctccctcccacattcctccccatcccataacagtacatttttatctagcatttaaatggatattctgtaatattatattcagttgaggaattcacaygatgaaagctctgttctttatgtcatataaagaactttagaggagatagcagatttatatgtaaaaaataatatttaggtatgtaatgagtgtaaatatttattttcaatgaataaaatgaggcatttgmcttcctctagttaacttcaaataaatctagggaacaataatctaacattttaaacatatttcagctcaatacagagattcttttatgaaaatagcagaatctaacatataaatgagttgccctggaaaatagtatgtttccattcataggaatactttaggctatggctg

SEQ ID NO: 365 - DNA, 600 bp, Bovine  MMBT05062
ccaacatgaagaaacatatagttatagttacgtaaaaacacagacacagtactgtcagtcaacgtaaatgcaaggttgcacctgccactttcttttcttccaagaagaaaaaagaaaagaagggaaggagggaatgaaggaaggaaggaggcaaaaaataagggagcagggcaatagagagagtgaaagagacgcaaagagaggatagggggaaccctgtacagtgtgttactgagctattctatagatattttagcaatgacttgcagtagccctttggcttcactaaccttttacaaygaattgctgcagacaaaagtgacgcccacatatccttcacactcgccagctgctgctgaatggcagggatgccttccggggaggtgttctgaaggacagattctcctctggtcactatcatcttcatctggatctctttttcctgtttcactgataacagagcctgtaaaagcccatacagaagtcctttgtcatctgtatgtttaacatcgctagctttaaatatttcagagtccctgtggatagcagatgacctgccgtcgtgttgagccctggatctcttgggctgatcaggaggcc

SEQ ID NO: 366 - DNA, 600 bp, Bovine  MMBT05073
gtattcttgcctgggaaatcccacagacagaggaacctaatgggctatagtctatggagtcgaaagagagtcggacatgacttagtgaccgaacaacaacaactgccctgaccccactctattattaaacattaagaattcatagatggtgtttccagaaatccctcaagtctgagaagaggtgaaaattatgttgcatgggattttttagagakttgaggattaaaataagattttgatgactttctggytaatcctgacgatacatgaaaatcaattttagtggcactattataactyttcttayattatacagtttgttgtatcctacaaacaacttaggcaaataaaatgagctaacattgtggagatatataaggcttatggagatggtgggtgttatttgaatctaaatakatattccctaaaaattgatgttcctagttacagccatacctttaaaacattcataacaccagttaccagatgcattcatatctgttgaccaagcactggaatattgactctgtcaactcaagataaagaagcagagataagarttatctgtctccaattattgtaactattgcatctttattt

SEQ ID NO: 367 - DNA, 600 bp, Bovine  MMBT05360
cacttgtgctgcttcctctatgttttgaggactatgttcttctcttatgttgcaggcacttgttgtaataaaactggaaaaaatattctctacttgtgttaaaatttaattttttaatagtctatttggtttgtgttactttatacatgtttgaaaccacaaacataccccactcatcttccttattgattctttctagaataaccaaatatcaggaaacacctcttatgtttctaatcataaatatttcacaatatcaattttagtttcaaccatttatttctcctcagtgacacttcyttttcaggtactcttgactaagcgtcttcactgaaaattccttcttcttacattgttgcttgctgctgctgctgctgctaagtcgctkcwgctgctamgactctgtgcgaccccatagacggcagccaaccaggctcccctatccctggggttctccaggcaagaacactggagtgggttgcttgctaggagtccttaattttgttatcataaaccttagaggaaaatcttttttgactaatttttagaagttcacatcttctctcttttgctaaaattatatacttccacttaaagaag

SEQ ID NO: 368 - DNA, 600 bp, Bovine  MMBT03295
taacctctgctgatccacaatgatttatacttccttgtactttcaggtgatatcatagtattttacattgagatctttttgttttcacttaaaaatcgtgtttcaccctttccaagtcattaaatatgccttctacacactgttttcaatggcttgtttgtgtatactatgatttatttaccaagacctcttgtttgaaaatcaagttgattayaattttgcaccattataaaccttcacttgatatatatttagtctttattgagcgcttggaaatttaggygcaagttccctaagggraaactgtgcttgtcttgattagttatctgcctacagcacagtgactggctgcatgamtttaactattaaagatccaaattggcaacaaaaatgcaatttgaagtgaaattaaacctcaaaaaagattcatctaagtgaaatgaaacatcagaaaagattagttttctgatgtctcatataggttgctttttggaaaactggaagacattctttcatctatgactacaaatcctgttaaagacacaccgaagatttattttcttgcataaaaagaattgtgggggtttacatcagggggca

SEQ ID NO: 369 - DNA, 601 bp, Bovine  MMBT05245
  misc_feature (1)..(1): n is a, c, g, or t
nacatggcttaggaagaaggaaggccccttccctggggggtagaggggtggaaggggtgcagatgaagcccccagagtttcctgaacaaagggatttcagacagcagtttacataagactctagctgggggataaattaaaaacccgggcttttttttttttaattaaacagtgcttttagaagtattgcagttcctgtgatgcttttcacagacaaaaggaaaaacaactgggtagaaaaagtcaggaactggcatttatcaacaaagagagaaagggagacaggtatcccctgcttttycaacgttcacttctcgccaccttgattcgatgaaagacctacgttagtatctattgtcatgaactgaaagaaatccaaagaggagttttcactttcataaaaacagaaaaaaaaaagcgaaaagcaaaaatagtgttcatcatctgttgtccaggagccagagtggagccaatgagtaacctcgagtactgagagaggccccgcccagctccttccccagaaaccacactgaacacttaggtatcagggagaaatagctttgaaccatgtctgtgagcttctgtgcttgatctccactta

SEQ ID NO: 370 - DNA, 598 bp, Bovine  MMBT05120
  misc_feature (1)..(197): n is a, c, g, or t
nnnnnnnnnnnnnnnnnnnnnnnnnnnnnnnnnnnnnnnnnnnnnnnnnnnnnnnnnnnnnnnnnnnnnnnnnnnnnnnnnnnnnnnnnnnnnnnnnnnnnnnnnnnnnnnnnnnnnnnnnnnnnnnnnnnnnnnnnnnnnnnnnnnnnnnnnnnnnnnnnnnnnnnnnnnnnnnnnnnnnnnnnnnnnnnnnnnnnacttgtgtccctgtgctagaattttttcctgctttgaataatgtcacatgacttgtgttttgctttaattatttattttctttccttttctgaagtcaacagytctttatactaccttcgatgaagtaagtaaacttctaagatatcttgagataaacagaacgttgcatttgtttaaaataaaaattaaaatataaaattaaaaatcaaattaatttgattttaattaaaattaaatcaatcaaattaaaaaccataaatcatatgctcgcaggaaaatattgaggacataatatgcttatgcttactcacataagcagaaaaaaagaaaaagctgatgatagtgttgagtatagctttccggctaattagtaattatggaaaggccacaaaatacatgt

SEQ ID NO: 371 - DNA, 600 bp, Bovine  MMBT05121
acttgtttacacagaaaactgaacctggggctggcttggagtctggagcctattctgggcattgttcaccgcaatctgcccagaccctcctcccccagcctcaacctccaccacacgtgttctgcaggaacagaacctttctttgggcaaaggggatggaaacaggattgggtgaccacagtgtcagctcacacactgctgacagtggcatatttaatttgataaaatgatggtcataagctttcattcccatgaggcctagtaaagcggtgggtaaaataatcagggtctccaacaaayagagatctcagttgcagttgttgtagccgcggttctgattatacaactgagcctaccctggtcactggggtcattcaggctacaagctatgcctgccggcaaaaagaaaacaccaacaccagggggcaaatccctctctccactcctgtgtctgatatattgggtgccttctaagccctaatgagcctcactttgtacagtaaatttgctgagacatcaaaaagtatttaaaagaaagttttctgctttttcctaatgagctaggtgaggatttatggagtgtgggggaggagggaatct

SEQ ID NO: 372 - DNA, 600 bp, Bovine  MMBT05217
ttgtacggccctcgttcaaatgaaggccagcccaggagaagctagaggccatgagagccggaaacatcagataataactctgctaaatcaactctcagctcttatcagtatgcaaaaatctcccaggcagaaatggaggagaagaggtcaaaacatatgtctccactgacaatcatacatctggaaataaaaccaccttacaaaatgacactgattttctactagcccacacaaagctcctgaccacttcacaacagccttgtaaattaaagaaggtatgatttttccaatttagacatygggaaactgaggcagygagcagttacccaagtgttcaaagactcacagcygatgacaggttgagttgggtgaaaaaagccagggggcccaggtgataattccagcattcattcaatccctctgctttcagagggagtacaacacacggtctctactcttaaggtgcatatgacttaattagaaaaataagacrattacacactaaatcaaacagtgcagttgaagaaaaatcaccaatgctaagcatataccctttgcaccctttccaactcaaaaccatactccttttctgaatttacg

SEQ ID NO: 373 - DNA, 598 bp, Bovine  MMBT05343
  misc_feature (1)..(60): n is a, c, g, or t
nnnnnnnnnnnnnnnnnnnnnnnnnnnnnnnnnnnnnnnnnnnnnnnnnnnnnnnnnnnnactgttgccataagacctaatgttaactttatcccaggacactggagccaatgtttctgctaaaatgtaatgagacaagcgtacaaattcacgaagttcactcttgtccctacccctttaaagagtaaacttatatccaaaaccaaaggtgagcacaaccaaagcagctgatgcgatcacaaagtagaagggaccctctccaaaacctagttcccagcttaaagcagaacaggcacacaygaagattaatggctgtatttataattatttactctttaatagagatgaaaatcctgctctattcccaagcagactaaaaggcattttcaatgctatataagatctgtcctataatatagttacattacaacagaaaaataaattctaaaccttaaagcaaacaaatatattcttataaaaaaaaaaaatcaagtctgcttttaaagcaatgagcttacatatccaagaaatcagagtcacacaaaacgctctcaatagtgaataactaactcactgctgtcactgtatcaaatatttc

SEQ ID NO: 374 - DNA, 598 bp, Bovine  MMBT05456
  misc_feature (1)..(1): n is a, c, g, or t
ncacaccagcacatccacacccacattgcaagcagcatgatagaaaatggaagaaagatgggcctrttcttacattaagacacattccagagttgaacataccctcccatcatatgcaattrgccagctcttagtaacatgaccatgcttaatggtacaggaggttgaacaatgccatctttatactgaactttatattggacatcccatgtaatgtccaccaatcaagggttccatcactataagagaaggggagaaaagatactggaggacaaccagtattgaagcaatctctctctygacaaatagcaggttgaaattttagtgaataagattaggtaagaatataatagaattttctgtgaaggttgctgaacacagttaatttaaaatgtgagaaatgcttccaaatgtctaaaaatgggatagtgtttcatttgtaaatgagatgggttgagaaaagggatagttcatgctcagtctcagacttaatgtttatattcagaaatgacaaaggttaaaagactggactaaatgaaagtttaagggtctttcttgaggcagattgctatagtcaggattgtatgcttggcagaat

SEQ ID NO: 375 - DNA, 600 bp, Bovine  MMBT04892
agactttagagctagaagataattgagagattatttaaatcaattcccttcattttgaagaaaagtaaagtccagataagttaaatgcatatacagtgccaggaatagattcagatattccaaatgaaagtggcagccagacttacagaggagccagagtctatacagtcttacagctaaagaaaacatgcatacacacacacacacacaaacatacatgaggtccactttcaagtgttctttgttcttatttttatttaatgcacaaaagcactacgttttattgattcataaatatgyattgagaacataccatataccaggctttctattaaatgttaacaatacagtgtctgcccaagtatttgtcttctaaaacaaataaacctacatgacctgctttgaaataaaggttatattaaatcagattttatctatgccatgaagctatgactcctaattctcactaaaattataattctaaaggcatagatattgcttgaaatagtattttcagaaaattgcagtggatgacataaataaatagcatgccatgctaaagtttcctataagaaagagcagatcaagttatgattgcca

SEQ ID NO: 376 - DNA, 600 bp, Bovine  MMBT04522
caggatcctcaataatcacttgtttctctgtgctgggtgttgtatttggattatctgggttttgccacaaatttatgatgttggtagtgtgatttattatacccattttacagatggggaagtggagtctcaggcagacttgatggctcacccaaggggaggaggtggagccaagggaactagtgactgactggagtctggggaaggggagggagtcaaaagccacatgtatttctagaaacaatagcaggaaatgtacaaaaaggatgagttttgggaaatgaaacggttacagagtcygtttgttttggggagagaagcgtctagctcgttgatggaaatgaaagtgaggaactcaggagagagggtaggagctagaattctcataaataaatgatttttcttgctgcttaggaagaaaataaatgtagcatcccagcaggccaaaaatattagcatttaaatacagccttacacaggtggggaaaaagggcaatttccttagaattaaatcagactttttctttcctccgaggctcagaaaggtccattctgctcaagtgtggtcttcagagtgttgctccacgttctcagtgggac

SEQ ID NO: 377 - DNA, 600 bp, Bovine  MMBT04926
tgtgtgtttttttgtgtgtgtgtgttttttttttttttttttttgaagctcctcagtgattcwtaatgggtagccaagattcagaggtatacatttagcctagtcaacatagctcatagagcaaaaggaamcaaagaaggccaaccccaattaaagactcaattttactattgctattcattatcctaacagctatatttatgtaattactaaatgcaatattcttgcccatctgccttttcaaagaattctctggcacagcacagatgatacgaaacttttactgacctctccacaggygtaacacatagcagctaaactgaacaatttcaacaaagctcccattctgacatgctacacagaagcaatacaacacygtaactagtgccagcagtgataggaaatatcctaacacaacaatcaacattttcactgtggcacaacagggcttgttcttggccccttttctaatttgttttttattcatttatagaccaccatgatttttttaacaaccaaattgtatggttttattttctcaattgcgagtyaacctgaacagactattggccctaattatggacagaattaagaactgga

SEQ ID NO: 378 - DNA, 598 bp, Bovine  MMBT05447
  misc_feature (1)..(19): n is a, c, g, or t
nnnnnnnnnnnnnnnnnnntttattgagcacttatatgccagacactgaaccaagtcttcatatagatcataacctttgactctcaaaaccaccataaaatgtaggtcttgtcattatcttcttttatgaagctggtaacttgctcaatgttaggcaatgaagaggtgtagaaccacacaatttagttcaaatgtttgtgatttcaaactgtacttaaaaaaactatgctacaaagtacatgtagaatcagaaaaattcccccaaatattctggaataaaatgaaacagtgaaagaatgytgaccaaactttttttttctcagattaataagattttaaaacttacctctttatggaaagaagtagagtaaaaaattggcaaatgggaatttttctaatgataacccttttccctcaagcaagcagtgacttttcaagccaatatttactaatattgattgaaatctaaacatacagtaagttcagctgaaaaaggaagttttgccatatcaaagaactttaacacagataaagaagaaaatgattaatcctgggggaaattagaactttgatcccatgtttacctgcagatgacact

SEQ ID NO: 379 - DNA, 579 bp, Bovine  MMBT05176
tgttccatgtccagttctaactgttgcttcctgacctgcatacagatttctcaaraaatcctgggtaatttcatactaaataggggcatgtgatcgcttccttcttttgagctaatcatcccagagagggaatcactcctactttgtatcattccccagaggtgaacttcaacttctccaggaaaagtgagcacattttattaacctgcaccacatgaagtttgggaggttttttggttaatrgaccaacaagctgtcattgtagagaacaacttctagcctgtgggcctggataaaatyatagaaatggagctatcagggaaaatctaaaaagtgtggctccacgtaagaattgtacgtatggttctctctctctctttttaacatcatatgtgtttatactttcactaaatttccaaatgtgttaattcaaattagtctcctaagtattcccttctgtcggtagcatttggctgtacagtaaaatgagcagctgccacaaagcattcgctaatgctcccttcctcagagggagattagtacaaatttaaggtttgtggtaatccccacctgcagcac

SEQ ID NO: 380 - DNA, 600 bp, Bovine  MMBT04347
tcaccaacttccaagggacatgcaagagaagctatttaactttcagtcactaattcaataaagaatttcaataacccaacaaatttaattaaatgggaagtacagatgaaccatttgaacttaataccatcaatcttaaayttgttaaataagaaaatcaaactcattttcatacagaagaataaagggattacgatttagtatttgatcttcaaaaatgtttagttaatgttacagttgatggaaactgaggaaataagagattgtgaacacatatatccaaagtgctctaagacagayacaggtaataagtatctatgttacatattttatacaaggtgccgattttagtcattttctgttttatacrttccccctccccattgtctatatttagggcttattggttttttatttgttttagagtatgtamtcttgttgaagaaagacaygcaatgatttggcatgggaaagagatgttataatagtaaatagatttatgactagtaaatagtaactagatttattacaatttaaaaataaatgtgaagaggtgtaatatggatggttgtatattgacctgagaagcaatttccatac

SEQ ID NO: 381 - DNA, 600 bp, Bovine  MMBT05468
aacatcaacagcagcaaggagaaaataggtttgactctggtatgcttaatttattttatttttagcaattttctgagaagcactctgcctttgaagcaaatttctattagacggagattattttccaggtatcaattcagctaaactattagttccttaatggttctttttaaaaaactaaataattaaatttaaaggacttttttgaatgttccctcaaaatgtatccttattcatggtgacctttgtacatctgccaaattactagcataaaacacattggtctttcattgcattgaytcattttccttccttaaagatttaggggaactcagtgtataaatattttaaaattatttcctagaagtttccttggccttctagtgataayagattgcccttctgggtcaatctcattccacccataggtcctagataacattaaaaaaatacaatactctcagattgttaaaaaaaacaaagtcaccatcctatgtccaacacagcataagcactttctccttaaaccacacccattactggtagaataccatagtttgacaaagaaacaaataaatttaaatgcaccttatctccatc

SEQ ID NO: 382 - DNA, 598 bp, Bovine  MMBT05377
  misc_feature (1)..(99): n is a, c, g, or t
nnnnnnnnnnnnnnnnnnnnnnnnnnnnnnnnnnnnnnnnnnnnnnnnnnnnnnnnnnnnnnnnnnnnnnnnnnnnnnnnnnnnnnnnnnnnnnnnnnnttcatgtggatatatagtaaaagctgaacatcaaacgaaaggggcaaaatccatttaagcaccctcaaagtgcattaatcttgccagcatacaactgcaatgtaaacactatgaagggtaaatagagttggaaagattctctcatctgaatagcttataaatggtatgcctttggggaagaaactttgcctttacaggtaytrtgctacctttgcaatgcccctgagcttgggatagaagctgaacaaatagtcacatttagtaatcttgggccaatgctatcatgtgaagcatggagtctttaatcatgataatagcaataaatgctgagtaaatacacttctcttctcttttcccctttatctcctttagcaccccttgacattcttccacacctcatcccacacatggcatttcttgcaaacttcacgtttgggcaccacctgccacttataacagtaccactctgtcaaaatatttttagcagctgcaaattaaa

SEQ ID NO: 383 - DNA, 598 bp, Bovine  MMBT05332
  misc_feature (1)..(129): n is a, c, g, or t
nnnnnnnnnnnnnnnnnnnnnnnnnnnnnnnnnnnnnnnnnnnnnnnnnnnnnnnnnnnnnnnnnnnnnnnnnnnnnnnnnnnnnnnnnnnnnnnnnnnnnnnnnnnnnnnnnnnnnnnnnnnnnnnnngtgctacttaaatccacagggccccgggctgaggctgtaaccactgccatatgagttgtattcacaacccctcctcacatcagaattctgcatctgacaatcagttgcatcaagaaagaatttaaaagaagacataactgtcttccctcatatgaaaattaaaatatcatytgccgcaagctcaagagactacaagaaaagcaactcccacctgtgtgttgactcttaaacttgaatgtgcatcagaaacttggaagggcttattcagacacagattgctggcttcctcccacccccactctcactcccaggaaatcaagacgggaccttgcaaatctgtgtttcagacaagctcccaggtgaagctgacggaacccagagatgctacaactcaagacatgagaaatgtgatgacaaaatctccacagttcttaacaacaacccaggtctgtcaccatccatgtaactg

SEQ ID NO: 384 - DNA, 598 bp, Bovine  MMBT05115
  misc_feature (1)..(13): n is a, c, g, or t
nnnnnnnnnnnnnatttggtaaattattaatggaaaacagacccttttatagattattctcccgccagtgttattaccttcagtacatcaagcccacttatgagtaataaaataacacaaacaaaccttctggaaagggatctgtgaagaatgatctgctttttctttgcaatcatatacatacaaacccagaaacgctcgcttctctcagccaacgaaaacatttggtcatttctgctgttgaccacagtcctcgcggccactcctaaaaattacgagtcccgaattgccataacctaygctggttcagaaccagatcttccatttgtttaagctttcttgaaaacagaggtctcataatattttgggctttgtccagtgacgcaaatgtatcccgatattccccataatcccacctaaactgacttcctttgcggttacgagcagacattaataagacagtcggcaagcggccagcagcctcagccgcgggttcgccgcacaggccgacagacctaccggggcagcggggcgtcttgtgggccacggcggtgccgccgatgggtctcccgttgggcgtcacgcaccagcagtagcc

SEQ ID NO: 385 - DNA, 600 bp, Bovine  MMBT04625
gcctttttgttcctgggaaactacagggaatgtaccccccaaaatgttgtttttagaatataataataacaatgacatgtttattaaataaatttttctaatttttactccagtggagactcacaaaaacccaggatgatgtaaagggacagtgtcaccatcatcaccactaccatcatcatatttcaggtgagaaaaatgagattatgaaaggtcagcttggatgataagtacatggcaatgatgggaaatgagttccgttcatctgacttcccattcagaatataccaaagtgccctytgaagtacaggggagctggaagttttacacgtgtaataaaagctaatttaagggtatagttttacttcccatagctccatattctaaatttgcagctttcttactcttaaataagaaataataagagtagtaataataacacatcaattatctgagtttttattagacacccaaataaatgctgtccttataccagcttacagaatcctaaacattatgaagagtcaaaagctcagaaagtaaataacacgctgctgctgctgctgctaagtcgcttcagttgtgtccgactctgtgtga

SEQ ID NO: 386 - DNA, 600 bp, Bovine  MMBT05071
gttgtggtggtgaaatactgtgaaagtaggcaaaagcagagaggtcacatgtgaaaacttagttctaaatagcgctctcgtgcttccaaaatctgcatatagaacagaacctataatgttaaattcatgagctatttcccaaagaaattctgaactggatttcatgaaaatgtaaagtcagttttccagacaagatttatttatatcaaatctagcatttaaaaacagctttacaacttataattcaaaccaagttatacacgaaggtctatatttagatccccaagcattatggaagcycctcattttccataccttttgtcagcagccttcagtatcttaactctcttctgtcagtcgccttcagttgaaccccaacaaggtctgatgaggagacaccacattcatgaggctcagttcacagcttctgaatattaatgataaaactccaccaagttaacttgcagatagcaacgagcaacacagaaatctggagaggtgaaaactgctgatggtgctagaagataaataccaggttctccatctcattttttgagctgtgggagaattaagacaagagaggcggggaagggagggagt

SEQ ID NO: 387 - DNA, 600 bp, Bovine  MMBT05453
acagatgagcagcagctgttaaagatgaaccagatgtcaagggagcaggtctacaggcagggaagtcacagaaacggcagctgggccccaggaatgtgcactggatactgaggtggaggttgcctgaatgtgtgctccttgcatgccagaggcccgcccctggggtgcggagaatacaagatgctgggctctggcccccaagtccatgggctccacaggtgtgttctgaggcccagatatgcacactttttgaaagttcccttagtgactctaatcatcagctgggtttaagaatacctygtatgtttctcagagaggcarccaagctcagaccaagyaggcccactgggtacccctagaacccagaacaatggcaggtgggagctggggcagggctgatgatgactgtaggagaggttcctgtgcccactgaggaatgaggtagacatgggagagaatgcacttcaacagggtccctamaccctaaagacatccttagaaggcctttgaggttgtcagtagaaaacatgcaatcagyaggttcatcctgcctaaggagaagtgacagctttgggaaagaccagatgacaaactagaaaa

SEQ ID NO: 388 - DNA, 600 bp, Bovine  MMBT04333
aaaaaaaatactrtcccaaagagccttgggaaggcgcttaaatgttcccagtggtggagyttagccatgccaacagcagcaacagcaagcacagcgaaacatgmtgctgcctcctctcagtttatggggaagtggtaatgtttctacacttcagccacgcccttcactttgcccacctgtcatcttacttttagctcttygtcartaagaaattctgccctggttcttccttttgagttctggctattctctcttatttccctgtctgaaaactactgttgctgtaatgcactggggaaygaaaacttcaaagccctgatcttaaagaatctcttcctgcagatctaggtatgacacgcatggtgctagagtgagttggaaaggcacacttagtcactttctgtgatatctttgtagaatatattaatacccagagagtataattacagcatattttagatgtagaattaacttaggcattatagtgtgtttttgaatacacctcaaacaaagcagaagtatataaagaaatctgaaagtccatattcagcaatatggcagagaagatttgatatcctgataactttttaccaaacacct

SEQ ID NO: 389 - DNA, 600 bp, Bovine  MMBT04592
akaatgcgggctgcggcagctgctggtgacggcgatagaatcagataggttctgccctgcagtttgtaagtgctgcctgcctttcaaaggcagagcctccaaacagtacaggagtgaacaagtttgcaaaggaaacgcacttgcagtctgaaaaccagagcagctggatatccaactgtgtgaagaaattcagagggctcttcctctcccttaaattgatattactcacccccgttttatagagtgaaagcatatgcttaattcctcaacaactcagaccaatttccacatcacagccayatacatggaatactcgattccacctaggtggtgactatgtgacttttttgcttgggtattccttaaggaggattataaaccaatggctctggaggtgacattttttaaataaaatgaaatgtgttgtaaatacaattgtgtatgacactatgtatgacattccaggtggcaggagtggtaaagaaaccgcctgccagtgcagatgtaagagacgtgggttcgatccctgggttcgaagatcccctggaggaaggcatggcaacccactccagtattcttgcctggagaaccccatggaca

SEQ ID NO: 390 - DNA, 600 bp, Bovine  MMBT04883
gtgtcccccggaagggggcgcgatgttttcgaggttaacaaagctgcggggtcagctaaggtctccgctctctctccatccagaccagtcatttcaccaacgtccggtctccctggaggcggagcccttggaggcgctcggtgagacacaagctgggagtattgtggaagttcgggctagactctggtggccctaaaatacggctcagggtgcaccgagcaacccgccagttggttcatttgaccctggggcccctccgtagtctgaaaagtagtgccgcgaactcaacctttatggaayccaacacacatccccttgaaataggatcacgctgctaaagtaaaaattttgagcgcactctgtccaggatacttaaagtcttggttttctgttcactgtgaagataaaaatgggtcaggcatggcgctggatacttcaaacggtaaagtacaagaacgtccagatatttgcattgtgttctttacaaagtcgaggtggttttgcccataacaaaaatggcgtcgcaacttgttaacctggtacagtcatgtgcccaaagacctggatgggggacagtatggcttcaggtgactaacggat

SEQ ID NO: 391 - DNA, 600 bp, Bovine  MMBT05472
gctctttataaatacaaatgctagactggcaatataaaatgtaagtaagaaagaagaaatattagctcaaaaaatctctagtcaatgaactttacattttaaatcctagattaggttaaaacatatgaaatggttagtatgttgcaatttttaacccacaaaaatgccagttttacatagttctacctaatatattaaacaaaaggcaccaagtcctcaaaagtagatacaccagaggaatgtgtattatggaaattttggcaacacacacttcttcaaattttaccaaaagcagaaaayttgaaaggctaatcaggaggtctttcagagtcccccacgctggtgacctgctctccaggagcagaggaaacaaactgaaagtcgtgacaagggkagattaaaccagtcaggtggttcaggaaaatgcactcgggtacagtttctgcaacatgtcagtgctgtgtggatggggtatcctggaacttttgggaagatcacacaatcagcagagagaaaccaatccagacaaatccccctcattctcatccattgtcagatgcaactgcagccttctgccaggatggtgtggaaaaacagaaa

SEQ ID NO: 392 - DNA, 600 bp, Bovine  MMBT04681
aactatagaacattttcacaacccacaaactgtctgcctccactagaatgtcacgctccgcacgaatgtggccaacctggaggtacatgcattggattaatgacaagccttgctctgctttatcagactgcatatttgcttaaacaatttaaatactgttgagtattaaattgtgatgatgcaaaagatacagcttatgcttaggcaaacctacgaattcaaaattgacaacatttgacttgaaggtattcggtgatgaaaacctgagtgatgaaaggcttgaaaatggcaaaaatcaayggctttaatgcaaatggaaactttaacagtgctataaagtgaacctcttgattagttaaaattaccattcttttcatatctttttgttctaataattcttttttgatcaaagtaagtccccaagatgagactctaagcaaatcctgtctcaggtcttcagagacatctgtgaagacggcaccttgacagtcccagatgctgtgatgccacagtacctggtcacagctgtgcacacaggaggcactcagttctgactgaactgaaacatgacaacagctaagaagagttgtagattcattt

SEQ ID NO: 393 - DNA, 600 bp, Bovine  MMBT04670
agggaattgccgcgaggtcacccctaccctgctcccttacccttctgcagctgttgatatttctccacttctccctgcagcttcttctggattagctcagccatggcggggacgaaagcctgcgggtagcaggagaggggcgctgggtctcgctctggaaggtacccgggctcccctttctggcctgcggaggtgacagccctcttgagaggcagcccctcggggcacccactgcagtctctcctcgtccgggatatcgactcacccccggcctcagggartggcagaaccccgaactcytcaaccgaaccgctccccgwctcacgctctcacttcagtattgatgaacccggaagtaaatagagaatgctggggaaagacggcaccggaagctgtcatctgacgcacgccgggaaatgtagttctaacatggtcratgtgtggtgttctgctaaaaagaccagacgcggaaggatttaaggcaagatggagaaaccgagatgggaaaagaaactgcacggttgcttgggtcttgacctcggagtgcccgtctttcatcacttgggcataagttgcctcactggggtccttggtcccgcc

SEQ ID NO: 394 - DNA, 600 bp, Bovine  MMBT05226
tgtaagctagggagggaacaggatgggggagggaagcgggggtgggggggaaggaatgaggatcaagatgcttaactctagctgctgctgggagatgggrgaaagaagctgccacagaaactgtgcgtccctggggagtgacaaagctcaggaggaaatcgggcttgtttattgacatccagcttgctcattagcttgggaacacgacatccgcaaataaaggggagagcaggaacagcttcaaggctaagctctttccacaaacaagtatttgaatcaatcaactcagcctggatcccrgagatggagacagaaggtgtagccttkcggggaggggattgatcagggacccagctcccctgagggatgcaggcaatcacccctgactgcccctccctgactcagtctttttatctgaaagaatgtcagactcatgctctgccttcagggctggagggagagasctatggggttatgggaatggaagcaatttgccaaggcactgctcagtttggaagcatggagtgtgctgctggggtaggagtcacttccatcattgggtttcyctcgctgtcccacagccatgcacaccactccaca

SEQ ID NO: 395 - DNA, 600 bp, Bovine  MMBT03650
gtggtgtccagctcagggcaagtaagaggtgatgggggacagtgccaccaagtctgagctcaccctgcttgctgtgtgcacgcctgcrtgctcagtggcttcagttgtgtccaactctttgggaccatatggactgaagcccaccaggctcctctgtccatgggattctctaggcaagaatactggagtgggtttccatgccatcctccagggkatcttccccacccagggatgtaacccaagtctcctgcactgcaggggaattcttggcagtttctttaccttttggccagttaactragagacaaggggttgaggcaaggaatacgaccttattcggagagccggcagaccragaagaggtcagactaatgtctcaaaataaccatcttgtcatcactctctggatgccactttcttttatagaacagagagggagagaaggggagggagtaaagtaaaaaggccattagtcttacaaatatctcctgaaatggccaacatcagggaaggggtgtgtttatctcttccttcctgtagccactcacaggtggacagggtcttgaacaaaggcagtttggttttaacattcaggcagtt

SEQ ID NO: 396 - DNA, 500 bp, Bovine  MMBT04605
  misc_feature (1)..(1): n is a, c, g, or t
naagactcagtagcaaagyrctagaaggctgagctgatccctgtctcttttttgctaacaygtaagtagaagtgaacatgttacttccagcatayaggaaaaccaccgagtcaatatctggatggraaacagaccacagacatatgcccagtggctctgttcacaccatgggcgccgatcacagagactgtaatagaaaacaaaggctaagtgacctaacttgacacgtggcaagaggtgtctgacttctcggcgcgccagtctcgcttaagaggacggtgccagacagtctaggaattcrtggcagacacactggcagaagccatacaccatcaggatgacgaggctggaggggaccaggctgacgaagacgacccccagtgtgaccttcttggagaccagtaagtagatgcccaagggcagggagctgaagtacagcaagcccagcaaccacaccagcacccggatggatgtctaaagaccaaggacgtgcagttcca

SEQ ID NO: 397 - DNA, 600 bp, Bovine  MMBT04206
gctgagatggttagatagcatcaccaactcaatacacatgaatttgagctcaaactccagaagatagtggaggacagaggaaactggcacgctacagtccatgaggtcacagaatcagatatgacttagccactgaacatgaacaaataatgtatagaccttgtttggacctgattcaarcgaactaattctaraaaagacatttttcagacaggcaaatgtgattatagattagaagataaaaaaataacttaaaggacttccctagtagtccagtggctaagactctgtgtttccaaygcagargacccaggtttgatccctgaacagggaactagatcccacattctgcaacgaacagttctcatgttgcaactaaagagctgcatgccgcaacaaagactgaagatcctgagtgctgcactaagactcagcacagccaaacaaatatttgtttctaaaaattgcttaaaaccgcttatccatttatatttttagagatgtrtatttaaatatgtgcaatgtgtgaagtgtgctttaatatactaaacagaaaaattatggaaagaataataaatgaagcaaatggaataaaaaatc

SEQ ID NO: 398 - DNA, 598 bp, Bovine  MMBT03436
  misc_feature (1)..(152): n is a, c, g, or t
nnnnnnnnnnnnnnnnnnnnnnnnnnnnnnnnnnnnnnnnnnnnnnnnnnnnnnnnnnnnnnnnnnnnnnnnnnnnnnnnnnnnnnnnnnnnnnnnnnnnnnnnnnnnnnnnnnnnnnnnnnnnnnnnnnnnnnnnnnnnnnnnnnnnnnnntcaaaaaattagagatcggagcatgtcaagggtgatataagacatttactcaagatgtttccttcgtaaaacattcacccctacccacattctgctgtagccacctccacccttccaacttcttttaaaagatttgtctctgcttcaygtctcttcatcctcatctcatattcaactctcaacccactgcaatctggcttcagcccacattattctactgaaactattcttgacaatttggtatgacctccttttttgttacatgtactgggtgtattccagccttcatctttactttctttctcaacacttttgaccctgttgacaattccttctcttatgtgcattctctttacatataatttgtgatattttatgctttaattttccttccacgcatgtggttactttttcatagtcgtctttctgggttccttcgcctctgt

SEQ ID NO: 399 - DNA, 600 bp, Bovine  MMBT03292
cacccagagcgagtccccgtcctgggctgtagccaagtccccccactgcttggccctctgtgaacagggtgtgctggaaccctgtttccagcctgcactgtaaggagttggtgagaactgatgttaacatggatggtggaagcagctgattacgtgaatgtctccacacggggagccccgagtcaaagctctcatgcacattctcttagggccctagcaagctaggaaagcagtattaccgtcacccacatttcagagagaagacagaaggggctcagaagttaagggacttgccagagycacctggctcctgcaccatggaacctggatccgagcccaggtctgccccatgacacctgcactcacgccccaggtcatgtagtctcctgggagatggagtggaaggttctttaaaggattgagcacctccttgcccacctctcctgagtatttgccctgagtatttgtaggtctagctcatgctgagcagaccactcagatgggcagggggactctagactagggaggacaggcccagacacaggttttagacaacagttttgttaatttcaggctgaactcaagacmgstgaggctctc

SEQ ID NO: 400 - DNA, 600 bp, Bovine  MMBT03486
agtaagggaaagctgatttgctatatgatggttacatggttgtaaatttctctggatttaaggctcttgagtcctaaatgctgtagaaatcctgccactcaatcccagtctttttgtgtgagagaggtcagatgtagctggactgaagtgtgtctgtactgacttgggatgtgcatgtgtctgtcaagtccctttaaggtcaaggtccttcccacatacgatgccagcaaagtgaccgccagtggccctggcctcagtacctacggtgtgcctgccagcctgcctgtggagtttgccatygatgccagagatgctggggaaggcctgcttgctgttcagataacggtaattttgagtgatttttctggagccagactgcrttagtaagatctcatttctcagtcagggataagaatcagattttaacaaccaattcccgatctcacgaaaatgtttgtcagatttccccactggagagtcagtaattgtgcagggaacaaacatgctcgcctgagraatctaaggggkttaactccaggcaccactttttgctccctagtattttgtatttgtatttgtattttgctccctagtataact

SEQ ID NO: 401 - DNA, 600 bp, Bovine  MMBT03663
agccagatggctttgtcatcttcattgataaattgtttccctaaatatatgcatctgagaaacttatttgcaggagaaccaggaggctttcagaggctacagcgtcccatctgctcagaagccagtcaaccgggggaatctgtcctcctgctcactctctcaagacagaactttctggaaaacatgcccttgagttatcaacaaaaccagaacactgagtcaaaggcaatctgcatcattacattactaccctgggtcaccatcggcatgtcagaaattgaacaagctgtggctgtgggygctgatggagagggtctctgatacacatagtcatgtatgagtgtttgactcatctttcctaggctagtgaggaaaatctcctcttctgattcctcttggcacaaatcctctactctggcatgcttccctacctctcccttattaaaatcttcttcttgacccacagaggtagggactaccatattacgctgtgcaggtgcaataaaatcacacagttargagcctgatggttgagatgcttcataaagaatgacaactattatagtacctggaggagatgcaccatccatcatgagctga

SEQ ID NO: 402 - DNA, 600 bp, Bovine  MMBT03272
tgaccccatggactgcagcacgccaggcctccctgtccatcaccaactcctggaatttactcaaactcatgtccattgagtcagtgatgccatccaaccatctcatcctctgcyatccccttctcctcctgccttcaatctttcccagaatcagggtcttttcaaatgagtcagttctttgcatcaggtggccaaaggtggtgtctcttcaggcccccactatggctgctataggaggacctctccagtgtttatccccaacccgagaaacacaagggtctgtatgcacaacaagggctygaatggcagcgatgctcagctcarggatttaccttcatctggatttggctctgcaggcagaccctccactgagactcactgggcaggacttccggatcctccactagcttcctggtctctgtcacaaatctatcttggtctccaaccaagtttgtctgaactttccccaaggaccctctcaaacctctgtgaccctgctcttcaccttaacacccttcttctgcttctgcctgatgaagctccatgcccccctcaccccaggggaaaggcttcccttcctttaataaccctgtttagaag

SEQ ID NO: 403 - DNA, 422 bp, Bovine  MMBT03492
ggctttatgagtaatttggartattttaggagagcagaggcctgcccatttgaggaaccaccctccccctaaatgggggtatgttctgactcaaaggaaaattaactcctgttaactgtgggtctttaaaatttcctcttaacgcctcagcccatcaactcctgctccctgagcagwacacacagctcggcgggaggggaggacttggctttgggtggagcagtaragtttcattcattcaaaacaccaagtcatttcttagttttgccaagtatttctcatgtatgtsgggtatttaaygcttctaagtctctgtttccggatccttttttttttttttttttttgagtaataatagtctactttgtagagttaaaaaatgaaagaacaagaacagtgtgtttcctagtacataatctgta

SEQ ID NO: 404 - DNA, 600 bp, Bovine  MMBT03257
gagggaaactaagtaccgcctcatggaatcagatgttctgattgtgggcatgcaggtgtttgagggagggaatatcaggactcttcatacatacacttgtgtgaataagctattttactgaggcaaatacacttacagaaaagtgcacatatcattgttgtacagcttgatgaattatcacagagggaacacaccccatggaactaccacccaggtcaagaaagagaacattaccatctttacaaaaattgtctactcatggtttttaacatgcttagtttcttaaatgaatttgtatcyttttatgtatatatttaaagtcaaatgtggtcagttaaaatgtttcacatatcaaatgagaaaaaagggcttgtactaaaaatgagttcaggaaaacactttttttagatccataaaattccctaaatgtgagatattaaaatctgaataaaatcccgatttcaaaatcataattaagtcctgaaataagggaaawgtttttgtgcccccmaaactcattggaggtttagttgctaagttgtgtctgactcttgtgaccccatggactgtagcctgccaggatcctctgtctatgggact

SEQ ID NO: 405 - DNA, 600 bp, Bovine  MMBT03460
tacattttctttctttcttgtctaattgctgtgtgtcaactttcaatactattttgagcagaaatgatgtgaatgggcatccttgttctagatttagaaagaaggcaaagtgcttttcactgttaagtgyyayattggctgtgggtttgtcataaatagcttttagtatgctgagatatgttctctctgtagtcacttttgtaacagtttttatcaggaatggatgttgaattttattacacggtttttctgcgtctactgagctggtcatgtcactcttgtcttgtttgttgttgatgyggtgtatcacattgattgatttgcatgcactgaaacatctttatgagcctgagataaactcagcatggtcatggtgtatgacctcttctatgtgttgttgtatttggkttgccaacaactggttaagaatttttgcatctatattcatcaaaggtattggcctgtaattttctctactggtgacacctttttttggtggtggtatctttatctgattttggttatcagagtgatggtggctacatagcatgtcttggggaggtgtttcccttttcttcagtcttttggagaagcatcaga

SEQ ID NO: 406 - DNA, 600 bp, Bovine  MMBT03099
atactgggaacggtcaccttggcttggagacagatgtgaactggtggccctccaaccacctagggtgggcataaaattgctgttaccacatagcacaggcttggaggaagaatcgtggctttgaaatagctgggatcatcacagggtggtcagtaagcagtgctggaagctggggaggatgagctggacccagtggcgcgtcttaccttgatgggcagaatgacctctttgttgccaacagaaacattgcccccttgtgtgtcgaatcgcacttcaaatgtttccgtttcacagtaaggyagattcttcacacgatctagctcaatactaaagcctggaccaagacaaacaaaacttctttgtgggaaggaaaagtagcaatcaagagctgctctagagagagcccatctgaggcaggacaatccctcaaagaactgactaatagcccaacacttctttcagttgatcccagaagaaacataaccacctctccaggacagtacagctgggcaccttgtcagaaatgacagcatacaataggaagggtctccagcctggtcacctgtgtcatgaaggacacgcttctctgcatggaaggac

SEQ ID NO: 407 - DNA, 600 bp, Bovine  MMBT03171
gcagcttctgccttggacacttgggcccctgagcctcaggtraaaaatcctgactcttcttctgggaagaccacatgggtacatcctgaaactacttagagaggagtaggggctcagtcatcccattccagctccaagcttagaagcaaattcatcatagatcgtccagttcagcccagctcccacctgagcaccatcaagcgacccaggtcagagccacatggagcagaagaacagcccagtcaagtcctgtccaagtttctgactcctaaaaatcgataaaaaattggtatctgaggycataaaatttgggggagtcagttaaacagtgactaaccgaaaaagttataaaggtacaaatcttattatcctagaggtgataaagtttgaaatgagcagtaaacagagccacagacagaaaaaagaaacttatgattaccgaagggaaaagggagggggataggcgtaaattaagagtttgaggatctactgtataccacagggaagtatactcaatattttgtaataatctataagggaagagaactcgacaaagaatatatatacatatatatgtgtgtgtatatatatatatatata

SEQ ID NO: 408 - DNA, 600 bp, Bovine  MMBT03662
agagatctctagctgttggagttgctgattggaaaagtgggtttaaaatacttaatacatgcttgtcacatttattgttatataattttttttaagaagcttttctttatcttgatttgttttctttatgttccttttggatttgatagatgactcagaaagatatcacatttgttgctgaatttcttactgaacatttcaatgaggtaggaaattggcatttctatagtgctttttcaacaataattacaataaatctggacaatggtaagaagtaatcaaatttaatccagtttaagygaccttatagcaattatgtatgctttttcaactactgaactaattaatggcagtacttatttattaaatgtaaagcatataaattgaactttgtttttgtgtcttaccatccacagaagaaaagagtaactgctactaacagctttcttaaaaaatagagtttttggttaaaatgtaagatgatttttttctttaattaaactttatttattctttctaggctccagatctttataatcgaaaaggaaaatactttaacgttgaaaaagttggtcaggtatgggctctggattgaatgta

SEQ ID NO: 409 - DNA, 600 bp, Bovine  MMBT04249
ctgaaaacagtagcaaatgattccttatacttttaaaacttcattaagcagttataaaaggtaaagacccttttgacccaggtataagacagctactcccagaaatcagggacaaaattatgttcctggtctaaatgactcaaataaatgtcttcgcagtatgatgtacttttaaattagatatgtactttactaacagttacatttggttaagtatgtatgttccatagtctagagactaatttttaaaagggtgaagtataccctacactatcattttttttcaataaaagtggatayttattagttcacttaatcttacttagttaaatctttaaaatgagctttaatttcatttttaaactcaaacagataaaagcatgtgatataatcatgaaagtraaaaaaattcagtacttctgaggtaaaatgtcaaatcatttattatataacttcaagcagctttcttttgaaaaattaaataaacccgtctaaaatgcctcttacaattataggcacatgtggtattactatataagacttcctttttgattcttatccaattctaagtcttttagaaagaggaaaagggtatgcatt

SEQ ID NO: 410 - DNA, 600 bp, Bovine  MMBT04231
agattttacatgcattttaaagtatctgctgtctttgatacctgaaaataaattgttacaaaagttgtcaagatctatgtttcttatcactaagcaaaatcataaatacctttcagtcagtcatcatgcagtcttattatcttggtactaatcaatatgcatgcattcacaggccatgaatttacatttwtttttgtagaaacataactacagtgattgtcaggaggagctacattacttgactattagcaaagagttatattacttgactactctgttctagcaatcattgttcacatytaatgaatttacttatrtaagaccatattacattattgtcatttgaatgtatgtcaatattttctactctgattaaaaccagtaaagattaagaatcctttgtttgactcaaatgaacacatcatgcccagtggatcacttattgctactattttaaatagagaatttacttgaaaaatacctagaattctaaaaattgtttccactatggggtgtataggccacaaagttcttcagatattcattgagttatgagaaataatgtaggatgagctggtcatatcatgagaagtgctttta

SEQ ID NO: 411 - DNA, 600 bp, Bovine  MMBT04203
gatattcttctcgctgattggaagcataattgtacagggtgaaaataactgtatccataaatttagttgacttgttctgtggcatctggaaaatcagcttagccaggtatgaaggattggtctaaagagagaagacgaaacgccccccacaagactgtatgttaatatactattaaagcagagaggacccccagttctttattctttaatgaattcttatgtatgaggcacacagaagagtatctggctcatattaagacaggtagcagctaacaacactactatgctataggaagttayaatagaaagttatggtaggatttaaattttatatactctatcatgtcatattttatggactataattacattatgaatattttatactgttcaccatttgaaggcacatattaatatttatcgtagagacaaagaagagaggggggtggctgagctatctgaagagactggcaagaatggatcaagggttgagctatagagattgtcttagaaggactgatgaatgaatcaacacagtctatattctgagactagaaagcaaaagcaaagggtatgagacagacaatgggatggccgtaa

SEQ ID NO: 412 - DNA, 600 bp, Bovine  MMBT03896
catatgcctcccaggtttctgccacatcgggaaattaacagtaaaaaccatcatttctcaggatgtgtttggacttactttgttacagaggaaaagtaattctaatttggatttgctataaacaatctattgtctctttttcttcccaaactatcaacttcacatcctaacatttttaacaatgccgacctgagttaatttccagacttttacaccacctttggctggacacgtccctttcactttggtgccaacacacaatttggccttccataaaggtagcatattttcttttgaagytggagttagccggctatgtcagaaagcatgtgtatccattcttccaaatgagagacttgtatcctcagtgaagagggtcccagagtgagccagtcaagttgttactttgtgtgtgccgatggtgatggtattagtgtcagtatggaagatgacttacctttttccaggtatgtatcaataaattggattggggatggcygagtccctttgttgttcagactgaaactgtcacaacattgttaattggctatacccccaatacaaaataaaagttaaaaaaaataaaaataaaaggttaat

SEQ ID NO: 413 - DNA, 600 bp, Bovine  MMBT03998
tttaaaaaataatctgacaagaacttcctcatgaaaaagaagaattatatgatttttatcctagtttagatcctggttttgactgattcttgtatctgttattctatgtaaagtatttaaacatttataattttgattttagttcatttgtcttgaccttattctaaagcaggaggatctttttcttctccattcaaatttctatattgttttgtggtcagttactactgttgaatagtaaatcactctcaaatttagtatcttcaaaccatagaaagttattattttatgcacatctayattaatttgatggtttcactaactggcctgggcttgtcatgcatctgtggtcagatttctgggagctggctgctctggaaggccaggctggattgcaggcagattctttaccactgggccactggggaaacccaaaggtcaccatacatgtagcaaaaaatgttttggtctgccttctaatctgcctggaagatctggcagattctggacctgctcggagttgtatggtctcctgtgggcttcccagatggagctagtggtcaagaacccgcctgtcagtgcaagtagagacagacatgt

SEQ ID NO: 414 - DNA, 600 bp, Bovine  MMBT03886
tctttaagtggcagggttaccactgagccaccagggaaacccaaaacagtttagcgagagatattaaatctacccagcagattgtaaactattgggttagatttgtttgctggtggtttctctttaagaggttttagagattaaatgaaaaaaaggaaaactggtattttcacacttctgttgtagaagaaatgatggcattatagactatgaagaatgattttcatatggatgatttttatgatgatacttgataaaatccaagagcttaatgctgagttataacacagtaaattccayggaaaatgcattgaattgtaagggagactgtaaatggaccgtattcagctagcaaggcaatcaacatatccacattattttcatacggtgcatattccatcatgatttggaatccacatttgaaatgcaragcagaaatgagatataatatttggaaatggtacaaaaatcttcatatgatttagtcattagatttcttttactatttaaaggatcatgactatattctataacatgaattattacttctggtagaatttatagtaaatatatgcacctgttttgaactgaaatatcaat

SEQ ID NO: 415 - DNA, 600 bp, Bovine  MMBT03846
cttaatctgtgcccaacattgcgcttaaratgctttacacacataacacagtctttataacaatcccaggaggaaagcagtatttccacttaacacaaagaaattaagactctaaaattaagaacctcctcaaaataaaaaagtgacagtggtctaagagaaaagccatgtctgctgactaactccacagccacattcttagccattcctgggtttatcttccaatgtccggcacataataggtgctcaatagtcaataaatgagctgagaaagtatcttcatggaagttaagtgatctygtgttataagctaaatgaatggtttgagaggaagaactgagatccaaatattcagatgtaagaacatcaacagactcacctccaaacagctatcgactgcgccctgccaatcagacatcttcagtttgcaggcgccaatattcagcacgcagctcaaagcgacaggctgcagctttgctccatctgcgtcctcagcagcagccctggaaccttccacatacctagagaacacccccgtacaagcagcaagcaacaccccattaagacactctgcctgtgactcactcataactcgtcagt

SEQ ID NO: 416 - DNA, 600 bp, Bovine  MMBT03686
agctgaactcatgcagagaaccatatgtcaaaactaggcctttgtgaataatgcagtctgtccacagtaaagcctttgtcgtggacaaatattttaaagataattccagggttcaaaaggcatcttaactcttactggacatgaacaaaaggtagacaagaataaattttgagagtccaaaaatattgtttcatccaactgtcatgcaaactataattggaaacttcaggtttccacaaaataacatgacaaattttcctacatgacaggattgctttactgttcttcctactccactcyactccaagtgatatgtattttgatattaagaaagattcttaggataataaagggaccttacttttctctggagtccttgctaaatgttagcttatgcctagggtagaaaaaaataaacaagttgaaaaatttgttccaatgagatggaaacatttattgtaagagacttgaggctttaaaaatgtacttgaaagatgtttgaaaagctctagcaaccattaagacttttgtctgatttcaggggaaatattgtagattttcattcctgttttaaaataaacatacttcatttaactgatg

SEQ ID NO: 417 - DNA, 600 bp, Bovine  MMBT03568
aatgtcttagtatctatccatcagcaaagtctaaactaaattagacaaacacaatcttcaactggaccctagggcagggacagcacctgttcagaggtcatgaagcctggccctgcagcgctctgttctttttttcctggctgtggctggctgcaaccctgctgatgggagccactgccctcccagagacaggcagtcttgtgtgagactcatctagtgtcatgttacatgaccgtgtagccacacaggcgggtactcacttcctccaccagaggttctaagatgagaaaactcacaggytggtgactctttggggagacagtataaatggtgtccaagactgagattgttctcttaatagctgctttttggaaaaaaccatgagcycttgcttagaatacaaggcctgggagtggattccttccctctagagtctttcatattgaagaagattaacctgacccaccaggactggccttaaaccctcctacatctgccttcaggagggaccctgggtccttcctcagtgaaagagacttgagaagggacccctatccctcacttgcccctagaaaagccaactgggatatttcatttatt

SEQ ID NO: 418 - DNA, 600 bp, Bovine  MMBT03301
tgattttgaacaaataagtcacttgatgatcaattcctcagagaaactcaaagaaaactcagatgaaggcagagaaaatgataacattcctcgtggagtctggagtaasaaaagtgattyggagacaatacctccagctggcaatcacttgctggtccattctcaccataaacattcagtgagtattaccatgagtcaggctgtgtcttgggagagacaaagcccttgtccttactaagcatacattctctaagaagacagacaaggagactaaacaaataaacagggtaatgacagacyctgaccagtgcaacgaaggaagtccacacgaatatgtgccatgcctgagagtcgataaaggagtgaggaggacccagaagaatgcccaggaaagacctctgtgcagaagtgttagctgacacgcgtcacgggaggaagggcacatggaacgacattgtaggcagacagagacgaggtgcaaaggccctgaggcagggcgaaggggggggtgtttctaagaaaacaaaagacaatccgtgtgactggcgcataattagcagggtggaaagagtgggtggagctgggattggaaagtagagt

SEQ ID NO: 419 - DNA, 600 bp, Bovine  MMBT03534
tggtaaagaatctgcctgcaatgtgggagaccagggttcaattcttggtcaggaagatccctggagaatggaatggcaacccactccagtattcttgtctggagaatcccatggaccgaggagcctggcaggctatagtccgtggagtcacaaagagttggacacgactgagcgactaacactttcactcgcaaagttttctttttatgttcttctccttatggtgtcattatcttaaagagtgctgcttgctcagtgcaacctttgctgagatctcattacctttgtaattaagctccytctgtgtttgtagctctcctcactcctgaaagttgaaagaatacaagacatcctacagtctgtcagcagcttctcactgttttgacatcccctttccaaggtctctttacccagtgtactcttttctaaatatattactttaactcattttatctctactagctagccataaatacctttctgtcctctgaaagattcccgctctgagtcataccgcccactcaacatgtctttgttgagtttttatatgtctctctaaaacatgtatctcccaataaatattatccaatttgtgattta

SEQ ID NO: 420 - DNA, 594 bp, Bovine  MMBT03203
ttgaatcctaaacatgttaacagtgtttgttatttaaagaatctggttaatttatttttaaagaaatatatactttttaaaaatgaggaaaattgatattcattataattttttgcaaatttaaatttatttcactaagtagaaatagatttttaaaacaatcttggatgcctttcttttgattatttccttacatttttacaatagttattttaatcctcwtatttaaattataataagctatgtaagaactctggtatctggtatctacagacatacaaaggcttcatgtttgccacygtggaattctgcatttctaagcctcattacctccaagtggactctggctaaactkgaatctggggctttgaaagagtccgtagaagtgcaatgcagccctttttcttattcaggaaggagtcatctttactgttgtcagtcttattctcctcctcctcctcatcattcatcatcacttgctggaaaatcttgacagtcaaggagagaccacttgcttattatgccgcattctctatgtatacactgtcctttccaaaaaatgttgacttacaacggtcagatgagtaaacaagc

SEQ ID NO: 421 - DNA, 600 bp, Bovine  MMBT03266
gactagagacagacacaaacaattttcctgaaatgctgttctgggccatgtgagtaatagctgaaccaccaagggaagcatttttagaacatcacagaggggatagtcataggcccaagcctttaaaggactgcattttttagaaggtcaactgctttttccctggagggggtccttctaataagggagtgtagaaatggataattaataattgtgatactctgaaagtgacctaaaaaaggaaagagtttacacagaatgagcctcttatccaagctatggctcttgcctctctgcttygctctgatctagggaagaagtgatgcttagctcaagtttccagaccccagtttttacagtccttaccaacctacagttgcatttcattatcaatctaatttatagagctgagaatcacattttatcaggataccactacatgagtggaaatgtatcacaaattccttttcctccattttgtattttcaatattctgtattaattaccaaaatcttttcatcaggacaaacatgtgatgtatttgtgcatgtgccaatatcaagcacatacctggtgtgtaccagcttaattagaacaaaa

SEQ ID NO: 422 - DNA, 600 bp, Bovine  MMBT03459
cgcagcctaggcgcagacccacgtccactgtagacgcacccacacagaaaacctcattgccagggacaaagccccagactctgctgcctgatctaagagtctcactctgtttcctgatgtatgtactttgcaaagtagccccaagaaatacatttaaaaaagagagactctctggaaaacaacaacaacaacaacaacaacgaaagaaaagcttcatacattagcgagcacacaatggttctgagaagtcctgcagttaaaatcaaaaatctgtttggcgtgtaacccaggccttcccaygttcattcaccataggaccrtttctccaaaatatctataaatatactgaaaaaagaatattccagggaaggtatctttggaatgctccggtttaactcattcagatcctactcaggtagctgtttgtttggttgtgctgattgtcatcagaggaactttgtaaaggtagagcattttcctaagtccattgtgatcaattacatcatgtgctgaactgacaaccaaaattctgttttgccctttaacagagaaagcaacccagatgagaggcaacagtgtctctttaccctccaaaaagcc

SEQ ID NO: 423 - DNA, 600 bp, Bovine  MMBT04132
tattggcgagctctcagcgttggagagctgtgactttagcatcctagacgcaggtctgcataatggcttttcggtgagaggaaacttcctccgcttttaatccagtaccgtctcccctgcctcaaacctgaccatttaggtgcttgtagtcttgccgaagttttataaattctgttacctgttttttgaggaaaagtcttgctcatgaaacatctttattgtttaccaggacatttcctatatagccccacagtgaattttagaaattccgtttaggaaagggaaacacgattttggaayactatttttataaaaacacaagtgatcctttcagatgyccagacatattcataattacattaattatattcagatttattggcaatgaaaagtttaccttggtaaatatgttatattttaaaatgtatttaaatttatactcagtgtttgtggagctttgttaaatttcatttatgtttcagtgaggggagaggaaaatgttgtcagaagtgatttttaaaattctaatatattggatattatcctattattgccacatactgtactgtcagagttatatataaagttcccatttttcct

SEQ ID NO: 424 - DNA, 600 bp, Bovine  MMBT04152
gatgatattttgcactgcctcattgcttctagcaaaagaatgagaaacatctaaatcacaaagaagaatgaggaatgatacttctccactacaatgtcttcaaggaaaaaacacaaaggttacaggaagaactcttattcaggtgttagggttaacatcaacttttctgacattgagaaataaggtgattagaccaggtataatggcttgaagagggctgccttgggagacagttttggtaacattaacttctcaatgcaaattattaaacatttccattacccttacccttaggaaaaytcatttatccaacaagaatcttaagcttataactccaatgcctcattcttcacttcatacaaaaacaaaacctgtccatgcctttgaaatagttcaaggtaccctatcatattaaatagcatccacatttttaactcagtctcctttccaaaaagtttaatctgagtaagcactaaccctgggatacaaaaataatttgacaactgagttattctgtaagaaatgatatgaatatttatgtttgtttgtttgttttttacttaaaatggataaacaagcaaacatatctcctcagttgaa

SEQ ID NO: 425 - DNA, 600 bp, Bovine  MMBT03653
gaacccaaatcatcctctgtggagattggtgctattcaccaaaccttaacaagcgcgttatgtcctctgagagcctggcaccgtcagcccatcaggagggagagctctgtgtttgtcataactgcttctcgtattcagtatctcaccagacacagtcttcaatggcctcagcagcagtgggatgtcaatagaaggctttgtggatgatccaggagaatcaggaagacccttgtcctggagacaaagctcagcctaatacttctagaattgctctcctggctgccattttcaacatatcgyttcaatggttatagctccccagtggctcccctgtttcttcctacattcaatggggacctctgaacactgcygcagatttgatcctatcctcccgatcgtcagattataccctgtggccagccttgcagtctctccttctgcatatcccagccaaggggcctcacaagccaaggaaaaactatttcttcttctccctaagacaacactgatctctttctataaacctgtcctgagaaactaaaattaatccagtctgtgtaatctcatctgccatctcacaactgacttttaatagtgtga

SEQ ID NO: 426 - DNA, 598 bp, Bovine  MMBT08540
  misc_feature (1)..(13): n is a, c, g, or t
nnnnnnnnnnnnntccaatggttctgtagggagaggcctcacagaagggcacctgctggctcaaaacattaacccgagctgggaacatgggctgagcatttgccccagggctgctattaaagcactcttggccactctcagctcctcctcggaaaacaaatcgccgagggcactgcatctgagcttaatgaacagcagtgctcctcacttgactgagcgcttctcagctgaacaaaaacatcacacagctccccagtggtcggcttccaaaggctggaggctctagtcggcagtcccgcrcttttggcttagtaggttaatcttgtatgtacatacttttcttttaagaagtttaaaacatttgacaaaccttgctttgcttctagctcctcctgggtaagttgaggccgcttctcctcaacaactacacagggtggggcaactgccgggttagtgtttgtagcactactagaactttcttggccttctttgctttcttcatcatcatcactgtcatcatctagcttaacacgatttttttccaggggaagtagatcattttctttggccttgattgcaaagcttattggagcaaatg

SEQ ID NO: 427 - DNA, 600 bp, Bovine  MMBT08534
taaagcaagcagaggtgagaagacagggatgcagggttgatggacacctccatggaccacagtggatcctgttactcctggattcagtcaggatccctgagtgtgtgccccacaaaaccacactaggggttacaatgcctgatttgcctaaagagggtgctgttacccagcccctgccaaaagttattctaaaatgatgaaggtrcaaagtagcagaatattggatttttttcaagaaaaggaggaagtcaaaacatttactttacatttcctggttttttaagtatggcagtttaaatrattcaaacactgtrtaartcaamcacatatctgaggacaaatttggtccacatgccaccagcagataacctccacccaacatccatcatcttgatttaggacatttgtgtcctggaatgtctttctgctgcagctgaagtttttttgtttgtttgtttattttttgatatcgcattttgttttactatttcamgttctgattgacttctatatgtttcctactggttttactttaaagcaaaaatattttacatatggctaacatttrtgcttttaaaaaacattaaagacttccctggt

SEQ ID NO: 428 - DNA, 600 bp, Bovine  MMBT09539
tgtgagggcaatgaggtgttcacccctgtgctggtaaaggcaggaagagtttttggtgttagaatctcagtaggcaagagtgtttcatggctgagtaatattccatsatatatattactcagccrtaaaaaggaacacgattgggtaattcgtagagatgtggatggacctgagtctgtcatataaagtgaagtaagtcagaaagagaaaaacaaatattatatattgatgcctatttgtggaatccagaaaagtggtacagatgaacccatttgcagggcaagaatagagctatgcacrtgtagagaataaacttgtgaacacagtagggggaagaaaagtaagactgatatgtaaaccttaccatgagtaacatagctagctagtgagaacctgctgtacagcacagagagctcagcccggtgctctgtgatgacctagatgggtgggataggaggtgcggggagggagtttaagagggagggaaaatatgcatgcatatgactgagtcamttcattgtacagcagaaactaacatattataaagtaattatacttcagttttgttttgtttttttaataaggaaaaaaaaatttttt

SEQ ID NO: 429 - DNA, 600 bp, Bovine  MMBT07927
gctgtggtggctgaaactgtgaaattactaagagataaatctcttttgctctaagccactggaattctaagcttatttgttactgtaacataatcaatgtacccagactaacacagaatagcctctgttttccaggaccacatcaacttaaaatcagcaaatcttgagatcctagatagcttttctctgacctctagaaccttactaaacacatatgtatttgctgaattcatagttggagaatcctgtttcctcagcataatacccagactcctctgtctggactcagaaccctccacratcaatctttgcagctttatctcccactacccccagaacagctaaatttgctcactcatccccacatgcttttcattttttggacattcattcttccacagcggcacccactctttcctggggattgtgcaggtgcagaaatgtccaccagtcctggtctccctgccctggtggttcccagagtcccagactttggtcacaccacttctctctgcccaaagcatcatttccaccccctactgcttatttcagtgactaactatccttgcagacacaactcagaccctacttccttctgct

SEQ ID NO: 430 - DNA, 499 bp, Bovine  MMBT11117
  misc_feature (1)..(1): n is a, c, g, or t
nacatatgtccccttcctcttgaaactccccttctcatctccctcctcatcccacccctctaggttgatacagagcccctgtttgagttccctgagactaatacttttttttcccaacatcattgtgaggtaattctaacgtgtgtcatcttggcattgaagtctgtaaattttgttctcctatttattggggttctagaggttcattgtaatgctgaataactttgtattgaattctggacattcttaatattgtgttataagactctgggtcttatttacattttgtgtaaaatattgrtattttaacttatcaatccagagagttcaggttgcaagttctgaccaactcttctggtgttttgtggtttcaatgtcaatttcattttcaaagcctttgcattgctatcttggtctgttcccatgtgtttgcaaccaagtggccagtctgagatctaggtggtggtctataatttagctcggttctcaaatctttgtt

SEQ ID NO: 431 - DNA, 598 bp, Bovine  MMBT08467
  misc_feature (1)..(37): n is a, c, g, or t
nnnnnnnnnnnnnnnnnnnnnnnnnnnnnnnnnnnnnttgccagattatccgtttgaggaggagttaacctggaaagactcattttatggagcatcttcctatagtctgggcacatatgagaacctgttgaagaagttgggatttgctttaaaatagatccgagttcaattcttagccctgcccttagaggctgggtaatttcgggcaggtgtgtaccagcacccagcacctgcacccctagttaggtgagattgatggcctcatgcttactgagcggacaagaagcgcctggcacggcrggcactgggtcccgggctaagaagcatgggtgttgctggcccgcgcgggtgacggtttcttcccctctgtgcttgtaacgcagggccatccaggagagcctcctcagcagctccgaaggtctgggactctggcacctccagtgagaccagccgactttgacagcgacctgcagctggccatggagctctccgccaaagagctggaggagcgcgagctgcggctgcgcgaggaggaggcggagctgcagcaagtcctccagttgtcacttaccgagaaataggcccacctgcctcccgc

SEQ ID NO: 432 - DNA, 600 bp, Bovine  MMBT08009
gtgttgtttttgctttggctccatctcttcattctttctggagttatttcaagagactgacccagacttgcccatgagtgtccaggagtctccggcggaggcgtgggtcggcggtggcctgctgcagggtctggggcactgactgcagcagtgcctgcatgggaccttttgaaggaggaggtcattatcttcattacctctaccatagtttggcctcaggtccaacaaaagggagggaacacggcccagtcccctgagtaatatagcagcaacgtttaatccagaaaattggattaaagrtatrctgagcatggtctggagcatcaaaacaagacccagttccccctcagtcagtctctcccatcaggaagcttccataagcctcttatctttatccttcagagggcagacagaatgaaagccacagtcacagaaaactaaccaatctgatcacatggaccacagccttgtctaactcaatgaaactatgatccatgccatgtagggccacctaagacagatgggtcatggtggagagtccaccctctgtctgactcgtcccataaacaggaggtggaaataacaggaggtcaggcaatt

SEQ ID NO: 433 - DNA, 600 bp, Bovine  MMBT05547
aaatgagacatatacaaattattaagagagtcattggattacctatccaatatgctggctagtgaagtaaaaacaatatgaaaaactctgataaaattttggaaaatgaaagaaaaaccctaaagatgatgttttggtttttaatgcaatgacatggaggattacttaccaataacaatgccaccaatggctccagcattctgtatgttgcgtgccttttctgcaaacatgcactgccctctttgtatcaaagcaatttttcccatcactgcttcagggttagtaagttctgaacaaccrttgtatggtttactgcttgcaacaaatcctcttgtctgtcagaaataaaaagttacttgaataacttttatcttctcaaatcactaccatgtcattaaaattcaaaatctagagctttaaggagatctcatttcttttctaacaataacacatccaatacacatttagcataaatttttgctttcaacattttgcatatcatagtccccaaccaatatttctactgtactttgcagtttataaaagcatttttacataaatcactaaacctgatctttataatgactctgagttaaatac

SEQ ID NO: 434 - DNA, 600 bp, Bovine  MMBT09812
ttatgatgaaaaaaactttttttttttttttttggtgttagttctagaaggtcttatgggtcttcatagagccattcaacttccgcttcttcagcattagtgattggggcatgagctagcacatacactggtgctttgatctccagtgggaaccatttttgtacagtgcaacagccctggtctgacaaaggtacaaccaggagtttagtcatctcagggtgaagatctggttaccctaccaatcaaacaacctagactagcttagcagaagttctggttcaagataagagtaatctagarcaggtggtatttagataaacatgaygaatatyatcattaarcaggtttrcatgraatgctgccagtgtctaatccataattctttgcctttatcactttggtgtatggtagtagttacctgtattccytttcttaaagtttctttctttctttttttaatttaaattaccaaagcttggtttgctgtctctagtgtaactcataagtgctagggaattactgtcccttggaagaagtcttcaaccaatgactgatcctagtcagagtataaacaacacaactgtctcaaacagtaagtgg

SEQ ID NO: 435 - DNA, 600 bp, Bovine  MMBT06311
gaaccgcatcctgtggtcttttgagtttctttcaagtttggagactggctttgaagttagaagcaaaattcttttttatttaaggataccggaccagttgattcaaagagagtgtattatttggctcacgatactgttttccatgcctcatcacacttttctacatggcaatggagaaaggaaatgtagcgggaaacgatttgggccaaaactcctgggggcagcagcgggagggcctcagcacccagcgtgattggccgtctgacagaagcgggcaggcgtccccaggctgagtctgaygagggtctgtgagaatgggaccttgctgatctggaagtaatgggctactggtgccccgagaccatcttgttctctccgctcgctcacattctgaggggtggctgccttccgctcctccagcagccctckcagtggtcccgagctgcagagagtgccagagtgtttgctcagctgccgcgggtccacttgcccaagagatctagcccaacagagaaaccatgtctcagttttatccactgaaagacctcggccctccaaggcagtaaatgaacttgtgttctatcagtgtgaatagaataa

SEQ ID NO: 436 - DNA, 600 bp, Bovine  MMBT10862
tatgatttcttacctcatctacatttccagtgagaaaggactagtgcataaatgtcaaggagctacaggccttggagtttttccacactatttagtaaaattattagcttagcaattaattacctaataatgatttactaagaaaacactaaagcacacctttgccagactaatcttaaaggatttctccacccatgtcacgaagctggtcagaaacttccatggacttctaagattgctccaatgtataggaatcaaatacaaattcatcgacctggcatttgagaccctctccaatayggacacgactgaagcagcagcagcagcagccaatacagccatgtcctacgtttctaattgttccccactgctcattactccttcatgagatctactcttttcagacaatataaaccacatgatacacgggagactctytgctcatttatgtcctacttgcacttaattcctacctcaaatacaaatggcttcccaggtggctcagtggtaaagaatccacctaccaatgcaggaaatgcagaagacacaggttcgattcctggttcaggaagatcccccagagaagacacccactccaat

SEQ ID NO: 437 - DNA, 600 bp, Bovine  MMBT10894
aagaggagtccaaatgagagatcttcgctttataggacctgtgcaggtcattgtctcaaaaaacagcaaatcacctctacactgagctgctttcgggttttccttgccttcccttgcttccttgtcaagccctcatcttggatttgatccttaaaacttggattttgcatttcttttgattgacaagggttcctgatctaggtcagtcccagtcctacttttgctctgtaagtgaaaggctttggagacccacttacacccaacctgctatctgactttagccagtacagtattgttgtygttgtcttctcttcaccaggaaactgacagttggaagggactctaccctgctaaatagcttgagttaaggcaaggtcactggaatgcatcaatctgtagcatatatgcaaaatcacacttaaaactgaattacatagaaagactataatcctccaaatgtcacttggtaaggtaactttaaaaggactttgaacaaaccaaaatattatggcaagttgttttgcacctgtgagcctctgttttagtgagtgaaggggatggtctataatgtgccttccaacacaaaaattctatgatttt

SEQ ID NO: 438 - DNA, 600 bp, Bovine  MMBT07818
agcctcgaaggttaattttagttgaagtcacgctcctgctgtggtcagattttcttacacaggccacctcctgaatagtggccacttgtgttaccccaaagctctgggcggcccgctggccctcagccccatcctgcggccattttccccgcctccagttcccccatggcatgcactttgccctccaaagtaatcagactgtgtttctattttcatgacacactcgaggaaaagagatcacagttccttttgctgtcccagacacacgaacctggggactcgctcccctctcactcaggyctggcaaaggctgagggttgaacagacttcacttgaaccgggcggcacaagggaagaagcctgatgcttcagcttttgcagaggggttttgaaaacctttctctaaaccattagttgtgtggtaccctcgggtgtgttttcttcttcctgacattgtttttgtcaaagaaggcacaagcatgcctgcctttctatctcttctaaaaggctgatggacagaaatctgcatgtttctacccagagatcttgctcctgcaaaggaaaagtgtgagccttcattcaaatttgcagaggttttga

SEQ ID NO: 439 - DNA, 600 bp, Bovine  MMBT08335
ccctgcaggaagggacactcaccaatctgggactgcgcccacgagggtggaagtgcggtcacagagcggagaaaagggcaggcccagctcggcctccttgtcaccctggggagcagacagggtggggacttatttcagtctacccggttggggtgcagctgcgggtagaggggctgccgggggagaagagggagctctgtgcctttgacctggaaatgagcagcatgcaaatgccactgccagcaatgactgttaagcttttcggagatgacattctatcccatgggtctgggatcaggytggcagctgcagacagctaaacaaggagctggaggaggaacagggaacttggaaaacatggaggagagaaggccccgtgggcaagggcagacaaagatgccccctacctggcggaagaattcctccatgagggccttggtccagcggctgtgaaccgaccactgcttggtggggtggctgatgtcagcagcatgaagcagcagagagagggccttggacttgtcaatcctgtcggggcaggtggcaagggamgggagactgatygtttaggaaaaggaagcctggaccattcctaacttc

SEQ ID NO: 440 - DNA, 600 bp, Bovine  MMBT10614
tggcatgagactgccacctccctggggggcagtctgtccggggctggggagagtcgcctgcagaatcgaaccctttgcagccgctcctgccgctgatgaggacaaattacccagttttgaatgcaagtggcctgattctccagataattgtttgtgttccaaaccactttgtactkcactccattggacaaatgcttcttgcctctgccagtttgggtgaagggcttaattccctgaaaaatcagcttggcgggctggtgtatgtcaatgcccytcccagggaaagcagtcctggctccygttactcaagagctgctctgtctctcagcaccagaatatcatcctaattaaaaacctctctgctccaaatagctccctttacttaaggctgtttctttccctaatcacagcaaagctgttccaaagtcactttttttacataagacccatatgtctgcactctagcccattaatgggaccgacccaagaacaaaacagagagaaaacatttaatggcatgtaactgcaagttctcagagtgaagcaaaacaccatcaaagtctgtttaccaatatgtttatcagtgggtcaggtgcatta

SEQ ID NO: 441 - DNA, 600 bp, Bovine  MMBT10054
acgtgcagccacgtgcagtctacacctgtactgcagccgctctggaacacaggtgcgcccctctactctaggaccgtgggaacgtatctgcgactgaaaagttcagagaccaccaacagttatcttttttgtttcatcaaaattttattaagaaaaccagagttcggggaggcacgggagagcagactccacagtcccacccaggcacagagaacggagagacgtgaaattccgaggccctctggtaagggcagacaggcagtcagacggtggacggatgggcacagggactcggggacygtcggagaaacatgaatggcagaccagacaracaggggtccagggccaggcccgcccgcagcgcagggagatagacgtgtgggccrccagggctcagcgctcggcgtttgaccgcaggtcggtggtgagcgggtcatgctggatggtttggtgcagcatcagggccagtaagcccgcccggttggtcatggctgtgcgaacgttgcgctcctgctcaaacagctcgtccagcttgtaccactgcgtgggcagcagaagccttaagaagcggctctggagccccgctccaccctaccccgg

SEQ ID NO: 442 - DNA, 600 bp, Bovine  MMBT07858
ggtccctggcattcgccccctgcccgatcttcaggtttcccgcccggagggcggcctctggcgaggcaaagccatgcccggctcgtgaagaatgttcgcttgcttcgcggcttcggaaccaagagtctcccacccggtgctgtgacacctctgaactgcagcgttccaccgcctagcagaggagcggggctggcgtgctggtcagggcggaggagagcttttctttggaggaggaaagtctccgccaacacctgcgtcactttgcagagcctgaaacggctctccctctctctgcaggcyctgggaaagtgggttcccagcctcgtggagctgacgaaacgggtccaacgagcaccaaacgcaaaggcgaccatcctgccgcccagccaggggcgccttctcccctcgggcctctctcttttctccagcaacctgcgggtttccagctcactcggcagcctcgccgagcccagagcgccgggaagcggaggagagcagaagccggacgggtggcgcctccgggctgtggccacgctaggctggggaaagcccgcggtgccctcgcccttcctcgcctcctgccaaatggcaagtgtgtct

SEQ ID NO: 443 - DNA, 600 bp, Bovine  MMBT05604
ttaataatggtcagctccaggatataggaaggtagtcaagcgtggtaattgtattttgaactccagcagattatttcctagggagtaggaagacaaccactatgtgggatacagtttctctaaatacaatagagataattgcttccctagaggtgaggggacaagccaagggctcccttaataatttgtgtgatcaactttataaagaaacatagaggtcaaggttttgcaagatgaggctaatactgggaagaaagtctgaccattgctgaatgtcctcaatagttaattatctcattyccttgttcagattaacagttgagttttatgtgttgggggtagggggatcactaaataaatctggaggcaccagtgaggtcagatcattgactgattagtaaatttaacccagcttatattcatccataaaggccaaccataaatcttttactgtttaatgtaaattaaatgttcacaatatattaaaagctgtaaacaccacagaataactaaataggacaacattattatcttttttttttaatccctgtcaaagaatgaaggattttaaaatatcatttgggaaattatcataaaaat

SEQ ID NO: 444 - DNA, 584 bp, Bovine  MMBT06824
ggcattagtaccttttaagaatcacaagagagcttgcttcccctctctgccctcaatcaaggatacaagaactcagcagtctgcagctcaagagagagccttcaccagaactcatcagggctggcactctgatctcagacttccaacctctggaactctgagaagtttctgttgcttataagccacccagtcaatggtactttgttacagcagcctcaactgagtaacgtgcccagatttcacggactaaatggcagagtcgaaattgtaagtaatagagggcctgtaagaaagactgtyggcttggtcattttcttcccatttcattgtctcatgtgcaaatcaagggcaataattcaggctctttaatgaagtgtatctaaagtcagctgaaccaaccaagatcactcactgatgagttctggtgaaggctccacaaacaaaggattaatccctcatcaatgattgtcagcagaaatatttatggaaaactttttattcagatatagaaaaatattcatagtttttaaaaacagaagtttgaaatttctgttgactacataatccattcagttgattcaaag

SEQ ID NO: 445 - DNA, 600 bp, Bovine  MMBT06365
aatatcaggagaaaatatatgtaaaataattttcacagtgctgggaacataggaagttctaaaaactgctgtttattattatgaatatatttgatattatgttatacaatgattagaaatatcaatagaaaaatactcaattatgtatattggcaaacttggtgcccttgatggttaaaatatattttacattacacatttttatactgttcaggtaaaaacaatttatatgtctatgtgtgtatatagagataaatgtatctacccatcttctatgtctcacgttttctttagaaacayttttgattctmtttactttccaccaaaagagtgattatagatatattatttttcacatctctgtggtcctctggtgaggctaatttatgattattttactgccccaaaggtccaactctaacatctaagagttttattccatggggctttccttctcaacttcccaggcagcctgattctcatttgctccacagctatggggtagtacttttattaagaacatagacctacagctatcaaaatcagcaatatacccaaggaaattttaaagctctcatagactcccttagtgttttcccc

SEQ ID NO: 446 - DNA, 600 bp, Bovine  MMBT08544
ataaaaacttttcacttgggtgtcaaaatcaaagactctttgacatgtgaaacttaaatccaaagtcagtaatatcttagaggtatgtgcatatccagttaccgggtatgcactgtactacatgagaatgttcttacccaataaaactagattgctatagttctccaacatcacgtctctgtacaaggtcttctgagtaggattaagcagctgccactcctccaatgtgaaattcacagccacatcttcaaacgatatctaaaaaagtataatccctgttaaatctgaagtcattctctytgctgaatgtaggcttccttttctacagcaacaagtggcctgaaagctggacccatgatctccaactcctggaaatgtgcttttgtttaaccctcactgccccacgtcctgaatatgggctggatttatcaagtcacttccactgaatggaatagggtagaagtaagggatmtcccttccaagaccaggttataagaggacatgacttctaccttgggaaccctctcctgctctctttgggggaagtccaagggccacatggtgaggcagctctgtgtacaagcctacgtggcaaggacc

SEQ ID NO: 447 - DNA, 600 bp, Bovine  MMBT09019
ccaaaatgtctgtctgcatttaatgtcaaattaaaaactaaagcagttctgtgttaatcctgggagaataagtaatgctttttaaagattgctaaaggaatcatgaagatttcttgggtttttaatatgaaaatttcaggtgaccaagggcacagccatacacattggggtcaaagtatagtagaatggtcagcatctcaatttagacttacttattactttctactctgaatacactcgtagaagctacttgtggtgtaactccttatgtatttaatatttatctaactcttggttttygtggttgagttttgaaatgggtgaagaatctacttattctttgccctttacggaatgtgatatcttggtttttattccatttatcctccttaccctttacttaattttaccttattgttttgctttgtgtttctaaaataatggctttggcttgttttttcttgaatgtttctgcagtttgatttgagtatctggctttgggcacccctcctgaaccttggactccatctgtacttgtgacttatggaaggcagaagtcagtgttttctatggaatatgacctttttttttttaatatta

SEQ ID NO: 448 - DNA, 600 bp, Bovine  MMBT10797
gaggaaaatatgagtacttggtgggaatctttctggtttttatgaaacaactgtaccattaattataccccatcaaggtgctgtgaatttgaatatgcttattatttagaagtttaagtgaatcatcaatgttgtacagggaaaagaattggaggtaaatgaattaattttcctcattgacttgaattaaaaagtgtaaagatatctttccagtgggtaaaatatcattctgaagatcaaaataaaattttaaagaaaatcagattaagatagtagtcttaaatctatgctgcaatgagyaatgtcatgccagaacgttgtttcaacatgttcaaaactaaccaagatttcccccaccaactttgtagattactttcacttcttcagatcaagaaaaaactctcccatacacttgtgacttggaaatactttaaatcataacttcagattttgtaaaaagaataagtagccaagttacatttacttaagtactccacttactttgtacttatttaaaataatgactggaacccatattaagtaataaaatgttgataaagattggacaaatggctcaatatcactggccctgagtttctt

SEQ ID NO: 449 - DNA, 600 bp, Bovine  MMBT08282
atatgttctctatttggaatcctttttcttgtatgtctgtaagttgcctacaaatccatctacaaaatatctgagaatgcaggatctgctactgatattattttgtgtccacctagctctgaatactaccacatataagaaaagatttaaggctaaaactgtaaaacccttgatgatgccaatctattcacagttgggtcttctcttatgcataattaacaacaagtgatctattttaacatgtacagaattctctgaggaaaaaaaatgacagaacagagaatgcaaatggaaaaatgygacaacacaatgaacactacagcatgtgttttaaataatttacacaaatctgttccaatttgtgagccagaataaaaatagtaccatttggtaaataaaagttaaaactttgtgggaaattataagcctgatttatatatcatattgttagacttgccattattaagcataccataatggcagtagtctaagcataaacatgccctctttcacagctgcacgattgtcttaattgttaccaatttccttccaattgcagtattgtttgttttccttggtgtggaaaagcagagtgagttt

SEQ ID NO: 450 - DNA, 600 bp, Bovine  MMBT07096
caggcataattgacattccaactccctcccgactctccccctctttttcctgtgcctgtctgtccctctgtccttcattccaatctatcaggcttcattttcttgtcccacagcttggcctagcagagactacttcctttcaaagggttccctttcaagaacacatgcaggaatatgcatgagcatctggtgtgagccttttgttcaaattcagccccctagtgaaatacggagacagatagagaccctaaacaaaagagaaagaggcaagattaatgagaacaaacatcagagaaatgycttcatgtctagaaaatgttcagagcctgctttggccacatttgaacagttgtgtgtctggatttcagcctcttattttctggtgtacctggaayrgatygaacttccaagaggcttggtggcaggatgtatgggggtatagtgaaaaggagctgctggcttctgactctcagggaaaggagagaagtcagagcttctagtgagcatacgaacaccaacaatagtcatattggttgttaaaatatgggaatgctactctactaattggtaaacagcctctgcacacatcttccacctatt

SEQ ID NO: 451 - DNA, 598 bp, Bovine  MMBT09286
  misc_feature (1)..(72): n is a, c, g, or t
nnnnnnnnnnnnnnnnnnnnnnnnnnnnnnnnnnnnnnnnnnnnnnnnnnnnnnnnnnnnnnnnnnnnnnnntcttattggccgaactgggctgggaaatataacatttcagttttatttggttttagcaaagtttctttgctctgtcacatctttccctgcctccttctgttctcagtcccaggaaatgatctctaatgtacaaaggaggctcagctcatacatgtaccctgataagaaaggacaaatcaggtcctgctgatttgaagattccagctgatgatgaagattctagaaaayggatccaaaccccagaagtttcagacttgactttcagagtacaagctctgcttccatctgacccacttggctttctgtagttttatggctcctttgggagactcctagtccccagaacacacagagagggcaggaactgaccacagccatctgggagcaaattctgggtcagttaggatgctttcagctacaagtaacagaaaacctcaactcaaagtatctctgagagagtttatcatctcacattaccaggaaacccagagatgggaagaaagaattccatacaggatacttcagc

SEQ ID NO: 452 - DNA, 600 bp, Bovine  MMBT10755
gatttctagggagattactgcttaaaagtttcctagtccatctaagaaacagttttagatttagagggaaatccaaacacagaagcaagcggtctcttcaattaggtaatagtttctaggattcaggaggcaaggaagaggagtataaaatctcaagttgctgtcttcaccccaaaccttctagatcctcagaagacggactagtggtcaaaacatactgatatttggcatcagaactgtttttataaagtgagacactcataaataggggaagaagacttaaagtacaatgctgaaggyaaggaatagaatctacagattgggtagagcacttgggttgagcactttcagatttaacartatttgtttactataaatccttttctaatttcttgggcaaacctgatctatctgtacctttgctgtcacctgcatgtacaggactgggcaatcataccctcatactccttgtacaagatactcccatttgcctcaatcagaaggatgctaatgggaacatacttataagggacacaggaaggctgagggacactctgatccaccagctcattgacaaggttctggatgatggcatgattg

SEQ ID NO: 453 - DNA, 600 bp, Bovine  MMBT10040
ttagaccaaatagtaaaatattagttcatgtttgtggtttttcttttcaaaaaagaaaagaaagctgtatcatttatggagttctcgtcagagttcaaaatgattattatggaatcaagataatgtgggatgtccaaatatttggttgcagaagatatgaaggtcaagtacaatattgactatttgaccaaatattctattttttaaagggctttattaagtgttttgtgtttgggaaaaaataagagacttatttaaaaatttgtatcataaataccattcacaacctcttgccctcaygttcccccaccccacaacccacaaccaccaaattgaggcaacaggtcaacagtcaagtcaaaattgtacccactcctacatgtaaactcatgcaaaaagtataagtgcagatgtacatgcagagtaacatcacctacccatggaaataacttgtctgaaagtcttcatcagtaggayatacaagcataaacttgttatctggcttcattcttgtatcttccatatttccaaacagcacaccttatagcttagctcaaatttagtattcatcataaacaaagacagyaatattttcacatt

SEQ ID NO: 454 - DNA, 598 bp, Bovine  MMBT05639
  misc_feature (1)..(181): n is a, c, g, or t
nnnnnnnnnnnnnnnnnnnnnnnnnnnnnnnnnnnnnnnnnnnnnnnnnnnnnnnnnnnnnnnnnnnnnnnnnnnnnnnnnnnnnnnnnnnnnnnnnnnnnnnnnnnnnnnnnnnnnnnnnnnnnnnnnnnnnnnnnnnnnnnnnnnnnnnnnnnnnnnnnnnnnnnnnnnnnnnnnnnnnattaaattagatatagcagcttaaactgccttagtaaagtacctgactctggacatgaaacaaagagggtcagtcattcctgcatttaaaacagaaagcagctctatcacttacttggyttggaattccgtagagcatgcggtgggggttgctgtgtcactgaattaccaaaatgatcaggtggtatggcactgtggcaaagcatggcaaaagaaggatcaaggaaagaagaacaagagcagagcaagggtagatggagggggaagggagagaggacgtatcagacatcacaagagccaggtaggagaacattctctctgtgcttttgacaagctattcagagcccacacaaaggaaagcaatgccataaatagataattatttaggtagtatctatttaatcagtccaaaatggta

SEQ ID NO: 455 - DNA, 600 bp, Bovine  MMBT07014
gggatgtacagtatattacacaagtttaccctggcaggccacaggccctgatctgcaatcctgtgtcagcacttttcagtcctactaatatggatacagatgggtgtgtgagctgctccaggcttctcacggggccaaggaaaacatggaaaacaaaggcctttatgagctccatgctgaccacagtccctgcagtattgctaaaatcacatttttctctggacttgccatatacagaatacttctcacctgagagaaatcaaatttcattcacarcctaggacctaagtttgttgttcyagtaagagtaagtaattgctccctttggaaaagagaaaataaggcctttttcagcctttctctacaaacttgcaaaacagctcagtagctctgaacacacagaatgcaaaccatggacaactagttagactagagcaaaggcacacggttgggctgacactacatatatttagaaaaatgaaaaaaaatgaaaccattatctgcgaccattcaagcgagagaaagacgtgcttgcacagctcctccgtcacctccargagccccaccctagccaccaccaaggtcgtcatctcctgtcct

SEQ ID NO: 456 - DNA, 600 bp, Bovine  MMBT10692
aatatttagaccacttctaggtttccacaaacaaggaaagttgctaccaaacgagccatttgaaactcaagggtataacatactaaaatcaagagtcaaacacttttgttttccctgttacttttaaagactatacatgctattggtgataggaaatgttcatataaccctcccaaatccatgcacaggtgcactgaggtttcatttagatgatgcatggcatataaactagtgtcttttgcttttggtagatattctgattaaagacagaagctcaatactaaaatcttaccaaattaygtttaagatatcccaacatctttctttcaacaagataatcaagtttctagatgtttgaaatttcagttgcaatcctaaaagtttgagctcaaaacttttatcatcattccccaaaaatgtttgttcaacaagcttcaggaggtaatactgtactttttcttcaaagatgtttgctttatctttttacattaagatccacaaaaactctgcatttttagatatgaatgaatcaggttgccatttatagaaatgaaagtttcttgtattctgaatctgttttctcccattttatttattcta

SEQ ID NO: 457 - DNA, 598 bp, Bovine  MMBT06237
  misc_feature (1)..(61): n is a, c, g, or t
nnnnnnnnnnnnnnnnnnnnnnnnnnnnnnnnnnnnnnnnnnnnnnnnnnnnnnnnnnnnnataaaggctgtcttcctttctggagatttcctataaaaacatcatgaattcacagacaaataaggctgccaaagccactttcaattggcatcctatttgcaagctcattaaagcctgcaatgagataggacctagtcaccactgatctgtcagttgatatgtccaaagtaaagatgacacgtgaatgctttctcatccaataaaactcaaagcagcttaaggcttgtctcagcattagyaaagtgcttttagaaccacaagactccaaatgtaacmttaggctgtagagaaaatgatgatggaaaagaaatacagttgtatgggttttcttttgtttgcttcagtcrctgataaaagtcattgaattaaaaaaattgggcagatgtcaagcacagrtcaataaaccacatggcattttaaatcaagttaagggggctgattgaaacagacatttcttatcgtaattgtttggctttatttttcatttgtttaagtgagtattcattcaaaaatatacccatttctgcatattatttt

SEQ ID NO: 458 - DNA, 598 bp, Bovine  MMBT06897
  misc_feature (1)..(6): n is a, c, g, or t
nnnnnntggactggtttgatgtccacgctgcccaagggactctcgagtcttttccaactccacaattcagaagcatcaattctttggtgctcaccctccttgatggtccaactcacatctgtacatgacaattgaaaaaagcatagctttatgaaaaggcaaaaagagtaacattagaaaagagcacaaatcttaaaagtatacagctttgatgaattttcaaaaataaacactctctagcatctagtacccaaatcaagaaacagctaatgaccaaacctccagatgaccccctcatgytctttttccttcactacctccctgcgaggggaaccaccaccttgatttctaattgtgtttgttttgaactttatataaatggaatcatagaacacatactcttttgtctggtttattttgctcaacattctgttcatgagaattagttgtgtgtagccatggtctgtccttcctcgtcactgtatatgtattatttcattatatgaatataaaaattcttctgaggatattttttcccttgtttgcaattatgaatatgtcatgctacagacattcttgttcaccttctttaggatat

SEQ ID NO: 459 - DNA, 600 bp, Bovine  MMBT09854
agtgggttgccatttccttctccaatgtatgaaagtgaaaagtgaaagagaagtcgctcttgggtgtaccaatgggtctaaatttacaaaacagaaacaattcaaggtttcaaacagattcaaaggattgaaccgtaggtttttgtttttgagtttatatggtaataggtaaatgatctttctctggactttctttgaatcatgtgcaaatttctgcttagaattatgatgcttttctaaaagaaaaaaaattttctcctattgttgtcgttgtgtgtgtgtatgtgtgtgtgtgcttcytgctaggtcgtgggatgtgtgccctttatgtctggcctaatgagctcagtaggtgctcagtaaacttgtactgaatgagtaagatgcagtgaatgaatggtcagctaatgcagtttcatttaaataattactttcttcttttatttatatggcatgtacaacttgttgggtagtgttctacctgctttgcaaatattaagtgatactgtcctcctaacagctctgggaagccgaaattattcctgagcacagagaggctctgtaacttgctcaaggtcatgctgccagtgaatggtggag

SEQ ID NO: 460 - DNA, 600 bp, Bovine  MMBT08269
ctctttgtgcacgactgggccctgtgggtaacttctgtgcagtgtattcatgggacaaatacctgatattttcaattctcctcccttcctctgggaggttgctgcatactcaacacaaacccttgcttcttgtactttcaaggctggaaattttcctattaaggcagaagctgaaaaacaaagcacactctggtaaatagttgataacttggagcagttagtcattctctgagcttcttgctattgaaatgagagaatggcgtggcacaggaacctgaaatactcaaaactttgatttgyctcctgcctccagcagacttttttgcttagctctgctttttagtctatttatcctgaaactgaaagaacttttaaattctgttcaaggaatgtttctttagcacctgctgtgtgctaaggcagtgtactaatgtactatatcattgtatactgactaagacaaggttcctgtcctcaagaagttcacaaaatgattagtgaagtaacactggcaactttgaaggaatagtgcttctcttaaaggattgactcaggacacataataatataattcacagaagtaatattttcagcctttgg

SEQ ID NO: 461 - DNA, 600 bp, Bovine  MMBT07848
gggttgcaaagagtccgacatgactgagcgactgaactgaactgactgaaaaatatctttaaattgttctagtgcaaaatgttctaaatttattacctttatgtttaaaccttcatgaatattcttattttattatttaggatattcaggataaaattttataaatttttaagagctttgttacattttgacaaattgtgctccaaataatttttttaacattttatacccctggcaagtatgatgcctctttccctatgtctaacactagattttaaatatatgtacatattttgttcyttttaacaatttgtaagtttttatgttcacagatcttcattactcagattaaacatttatgtctatgtttttgagctaattaaagtttttaaaaattaattttgtccttgaacttttccattttctaatggaatttttattttattttttgatgtcagactgaattttactgattagttctttcttgttaatagaagaaaacacatttcaggtagagagcaagtataccaagcatccatatgtagggaataaaatttaaatttgctactaacagatgtattctaggtccatccttttccc

SEQ ID NO: 462 - DNA, 598 bp, Bovine  MMBT07849
  misc_feature (1)..(93): n is a, c, g, or t
nnnnnnnnnnnnnnnnnnnnnnnnnnnnnnnnnnnnnnnnnnnnnnnnnnnnnnnnnnnnnnnnnnnnnnnnnnnnnnnnnnnnnnnnnnnnntatgaattctagtgttacacaagtcagtccataggatataactgtaaacttgtaaccagtctattacttccaagttcccatgataagatttcctgccatagttaatgggctgcttgcttggagcaatactctacaaaggaaggatttttaaagaccataatatacatttttctgaaatcagctgagagggatttggccagtagtttyagtatgaggcactcagtcatttttcgccatctttacaggttaacacaattggagaagatatgattcacacaggacaagtttcctgtcttgctgtgttcctataaagatctgactcaagtgtgaggatccartttaaaaccagcctcttgcctggatcaagattgaagagggggtggaagtggtggccgtgtttaagctttcttaaatataaattacttttatggaacaaattgtaccttctttgaatatagctaagtggaagtcttatttggattgaagcttaaaacacaggtgtcaa

SEQ ID NO: 463 - DNA, 600 bp, Bovine  MMBT05823
atgtctcctgcattggcaagtggattctttatccctgcaccacttcggaactccaatataatgaatatattataatatgtaataaaatatattaattattatrattmraaataataattctaaattattttcatctaaaatttcagctaataatttccatcatgctttagaaaaaggttcactaaaccatctatgatatatatggacacattctaagttcactgggttggctaaaggaatgatcmtttaacagcatactgttcacattatctgtgcctttgtctatgtgcagacaaacaytctggaaagtcatacattaatgcatgtgggtgtgggcaatagttccttcacaggacagctggatgcatcccataaagacgttcagccaaatgtttattctaaagccttctggtgtgaagcacmgggaggccygcagcacagttagttggaagcagcccctaatgcagaaaggagagctcagtgtactgataacaggttctcactcctgctcgttctttgagcaagagggtaaaaggctacatacgtcatgtcatttgccaatctaccaattatcccttggaaaagggaggcaaaagcaca

SEQ ID NO: 464 - DNA, 600 bp, Bovine  MMBT09790
ctccccatggcctccagagcagagcagatctggcctcccgcctgctgaaaaaacatccatggctcccactgccaggaaaaatgaaacccaactccttagcctggcacccaaagcccctcctccacaatcyagcccctgcctgcctttccagcctcctctcctaccacccacatgccagactctccastcacactgggccaaccacctccaggtactgaacagcttttgtgcagccstgctgtggaaccctctttacaagcagcccttgccttaccctctgcctggaatgtcctttctccyttctctgatggctaaatcctagacaagtttcaaggaactatctcagacagctcaccctccctggagccctcccagactctattccccagcaggatggctcactcagggccatctccttctgcaactgcgtgtggaacatggttgaaggcctggggtcactctktgcagtgacccagaagacctgttggggaccactcctctcagggcagagaccactgctgagagatgctccaccctgcagcccccttggaatacagcagggtggggctgcagaaacctccacggagccttggcatggat

SEQ ID NO: 465 - DNA, 598 bp, Bovine  MMBT06540
  misc_feature (1)..(141): n is a, c, g, or t
nnnnnnnnnnnnnnnnnnnnnnnnnnnnnnnnnnnnnnnnnnnnnnnnnnnnnnnnnnnnnnnnnnnnnnnnnnnnnnnnnnnnnnnnnnnnnnnnnnnnnnnnnnnnnnnnnnnnnnnnnnnnnnnnnnnnnnnnnnnnnaatattgctagggtcatgtcacaaggattcagaggccagctttaaagggctcctagtggtcaaagatgggacaatctgagctcaaacatgaggataactacaatggattgaagctcataaaaatgtttacattgaaaagcttataatgattgtgtgtgygcatttgtgtatataccctttggaaaatgataaggaagcaactcattatcttgaaaattggtgaataaagagaakgagtccaacattaaaaaaagaagaagaaaatgcagtatataaacacaatggaatatccaaccattaaaaagaatgaaataatgccatttgcagcaacatgaatggacctagtgagtgtcatactgagtaaagtcagtcagaggaaaacaaatgctgtatgatatttcttatatgtgaaatctaaaaaacagtgatacaaatgaacttatttacaaaacagaca

SEQ ID NO: 466 - DNA, 600 bp, Bovine  MMBT10073
tcacaaatcagatcaatggtgggtgaaattgatttattaataatagacacacttattgtcatcttaaatcattaatcattaaccataaatagagatgatattacgcatttgctttggaattacatgttggctctcaaacttagcacgattttgttgtatgagtcagggacttactaaccctgagtctcagtttccccatctgtaaaacagagattataacatttattgtgaaatgtttaataagaaacaaaagagtaaatataccaagctggatggatgtgaaagaacacaccctataaytgcctcttcctcctgcctcaacacacataccatcctcctcaactcacagaaacagagaaattctaaagaccagctgcatagcacagtattttataatcagatcagagatcagtcgttcagtcatgtccgactctttgcgaccccatgaatcgcagcaagccaggcctccctgtccatcaccaactcctggagttcactcagactcgtgtccaacgagtcagtgatgccatccagccatctcatcttctgtcgtacccttctcctcttgcccccaatccctcccagcatcagagtcttttc

SEQ ID NO: 467 - DNA, 600 bp, Bovine  MMBT10074
tggtgtatctagctaggagccaaaaatgagtaaagaaatccttgaattatcttgatgattttcttagtttcacattaattattagaataagaaacctaacgacctaatcattcctcaagaagaaactggcatatcaatttccaatggaaggatgtagaacagaccatggttttgggaacatgtggctactggcccaggttacaaagctcagcaaatagtacggtggaggaaagaccttatctattacaaggttctcctggctatgctttgcagttcatttttgcattgagtgtccgatayctttagtgattcctctgaggtatcagctctctgtatcttcttttcctctgccacatcttctgaggagctcttcagctggccttctgtttgttatttctggcacttcccctaacatcgtgtgcttctctgaggataaactttgtctaaagcaggttagcccaagtgaccatattggttttctcaccttgaggatggtccttgttatctcagtggtggaagacaggtctatcctctgtggctagggctctcctaggactagaatgtgctcccgtggtcatggccaggcccgtgtcgtttctg

SEQ ID NO: 468 - DNA, 600 bp, Bovine  MMBT10092
ccagtggccaaaaatacagccctgaccctggagctgtcatttgcagccrtgtcctttgtgacaaaggagagctgagagcacgtctacataaaacatgcttatcaccactttaggaaaaagcagttcacttacggccatagragatattcaatagcattaacctcccaggtttatatgagctcatctgagtggtaaacattcttttttaawggagaatattttaataaaatgttgcaaaagttggcagtatttttttcctctctaaactttttattttgtattggggtatagccgattaayaaacaatgctgtgacagttttgggtgaacagagaaggagcacagccatacatgtatacgtacagtccacggaattctccaggcaagaatactggggtattcccgggtagccattcccttctccaggggattttctctacccagggactgaaaccaggccttctgcgttccaggcagattctttaccatctgagccaccaaggaaacccatatatgcatcttcttcccctagtctcccccgcatccaggctgccacacaacgttgagcagaattccctgtacagtaggggacacagaaggc

SEQ ID NO: 469 - DNA, 600 bp, Bovine  MMBT08253
aaagaacagtcagatgtttatgactctgctgggaaaaaaaaagaggtcattttcattttcccatctctgtatatccccacttgccctgtaatcaaagtaaatttcctgtgaaaagttgaattttagatactttgaacagggaaggacaagtcagtggaaacaatggggttataagaaagaagtcaggtaggacgtacgggcaaaatagggatggagagaaggttggaattcagaaaattagcactaagtccttgaaagcaatctatggcattgcaaatgttttgttgttaaactaaaaaytatatttatatcgcatttatataatttcactgtttcatgattcatgctactaaagattcttacagagtcaatcttaattcctaaatcatctctctttagtatttctattcaacttctagttttagaacatatctggaaaatattaggraaaaaaaaattgggagtcaagtttgcttacagtgttgcaataaatctgtgaactatgccctcctctgtttctttcagattcctgttagtaaaatggatctacagtgctgcctttctcccaaagcttgtatttattcaagaacaaacacaatt

SEQ ID NO: 470 - DNA, 600 bp, Bovine  MMBT10873
ctttgtttttagagaggggccatttttaccattaactgcatggtcatcctatggtcattctcttgccagtgtctagcaggcatctctaacatggggttgcagtacagacagcatttacagccaactggagtggcaaccacaattgtttgattatccttcatataactatatgcttaagtgaacaccatatttactcatgtatcttgtaatttatttaaaaacccttctttcctgcctgctccagtagatagctgtgaaaccaaaggtccagcttcaacagtttggaagcttggtcagagyagctaaagatctgtgaacagtgttttttttaactttttcacttttagtcacaaaacatcattagatctcctttagatgctctgtgcaaattctcagaagagtttctgtttcagcacacaagcaataaatcctaattggagttgaaaactatagtgggagaaatggtgttttcttctcaaaattggggaaggggagggaaatgtgagcagataggcaaacaaacgaagtaagtttgatctgaccgtcagtgacatttaatacttataagcaattaactagttatgaaatcttggacagatg

SEQ ID NO: 471 - DNA, 546 bp, Bovine  MMBT07881
gcttggagggattgggggcaagaggagaaggggcgacagaggatgagatggctggatggcatcactgactcgatggacgtgagtctcagtgaactccgggagttggtgatagacagggaggcctggtgtgctgggattcatggggtcgcaaagagtcggacacaactgagcgactgatctgacctgatctgatctgatctgatcttaagaagccactttataaattcagtttacacaccaggaaaaaaaaaaaaagtgattctttcaaaaagtaaaaggcaaatctataatggtttcttygaactgcagcatctaaatacattttttatcttccctacctctcttgcccaaaactctaggccaagttatacaattatcctgcaagtcattcccaccacaagtatctgtctttgggtagcatttaatgttaatcacattctcttactttccattagagtaattgtttgtctctctccctcctgtggaagattattatgtctacaatctatctacataagtgttatgggttgtaaatgtatgtcttct

SEQ ID NO: 472 - DNA, 600 bp, Bovine  MMBT08303
ccactccatgtggtggcttaattgttctctggaatcaatcttttttatgagactgcacagtttccagctcgacttttcagttttctcaacatttaaaattagatactgaaaaacacccgttgcagactcttacccagaaaaagacagcactggcacagagggttacacgtatacactttccccatgtggtaaagggaacacgctcttcttcctaattaaaaaagaaaaaaaagtcaatcaaggatttcaacaaaatcatttttctcctaattggtttgctgtatcctaggtttaattttytgtatgtaaatgttcacagaaatttattcataataacacaaactagaagaatcccaattgcccatcatcaatctattcaaaggataaacaaattgtagtatatgtatgtaatgataagttacttagtaaaaggagaactaagaatacaccaagcagtttgggtgaatytcacaaggaytgtgataattaaaagaaactagacacagaagactatatcctagtcattttcatttatataaaaattccacaaaaaaacaagactataggaaaaatcactttttcctatggctataggaaaaa

SEQ ID NO: 473 - DNA, 600 bp, Bovine  MMBT06416
aagtacacactgactgaataatgtctgctaattatttctatctttgccatttcttgatgaagttactaagatgaaatttttatgggaagtattaggaaatcataaatcttttaaaaccacacatgtgtatttcaggtatctgttgctttatacaagatgtatctattgctttatacaagaggtaaattaaaatcttgaacaaaaatggcaaaaataatttccaaattcaaaagatgattctcagagtgtcaatctctcatagtttgaaatgtttactatgcccaataattgatacaagaygcacagaagaataatatattaaaccttaaagcaaattttctaaaaactgctttttgatgaaactgacagactgacctattttggtagtgtagataaataacaaagtctatgatctctcactgcccccaaaatgaagctggcattcacagagcacattaaagttttgagaatagattgtaaacacccatgagaagtctatgttcttcagaaagaatatccaagggagctgagaagtgagtaccacttgattgatgaggtgcgactcagtgagctccgtcaggaccaatgaatgattcaatg

SEQ ID NO: 474 - DNA, 600 bp, Bovine  MMBT07508
aaccattgaaatacccaggcttcaatgctccttgggttcccatggcaaccaaacaaaagtaaaacaaacctatctgtcctaacaataaaaatrtgttttcattaaagtcaatttaacatattcttcctaatttaaaatattcaatgcattttgctcctggacaaaaatccccaacctgccactattgaagggaatgaagtcgctggcagaactatgcagataaaagcaattaggggaatgttggggacttcacagatgagacggaatacattcaagtatgaacaggattgcttttttctytcttctgcttagttatgctttttattatataaacattaactgtaatattacagtgggaagcaggtatttggcagccacatattattttagtaagtctgcacagagagaacagtttccagttttagcagctgtaacatgtttaaactcagtttgtaatgggatctgaagataactattccccatgggctgtgttgatcttcatggctggcccactgccagatgcagggctcgaaactattattcacgccttcttgcacataccttgtccgagcatgctcagtaaatgaattttctgtctac

SEQ ID NO: 475 - DNA, 600 bp, Bovine  MMBT07870
tctgcagaagcagatgcctgaggaawgctttagtgttagcctgggttcacagtctaactcctagcgaggttgtgcccatcagtcscagaatccaccagctatgtgaattcagcatctcccactgggcatcatgtggatgctgttgggttgggcactttctctgaatgagagcagcctcagctcaacccaagtggagcccagaccatcacagggagtacagtccttggcagggtcagaatggaaagctggcttcagagggagaggccccttctgccacttctgcatgtcytaaagctcacyrcacccagcttctttgttgtcgtttttcttaggaataaatgagtgtgataattcatttaataaatatttgctgagcacaccattctctgatgtcctagttcctccctggcacaaagataaatatgactgtctctgctctaagtcaacatctaagaaagaaggcatatgcaaattactcagagaaagatggcaaatatgggyactcctcagtatcgtgtccttgacaaacattgctaatcaagcatagaactcaccttgaatctgaattcagttcagaatccttctcaatacattattcta

SEQ ID NO: 476 - DNA, 598 bp, Bovine  MMBT10825
  misc_feature (1)..(58): n is a, c, g, or t
nnnnnnnnnnnnnnnnnnnnnnnnnnnnnnnnnnnnnnnnnnnnnnnnnnnnnnnnnncttggtgaaggaaacatcataaaatttaaatttatataaaattaaaggaataaatattccagagtaacagaacaattaacatctaccaaaagcataaaggttttaacatgagagcctatgtattaacagaaaatcactttagattacactactcttcaagtgtcattcaaaattaaactctagatcttattttggaattgctatattgagaggaatatcagtactaccagccataagttatygtttataataaatgaacacagtgggtggaaagcagatgtttcactgtaattttgctgcaatgaggtacaaatgcagactagaagtaacagtccacttggatgaaagttggattatgttaaaatataaactcttgagaacaagagggcggaggagtaggtggacgtggagtacatgtctctccatggatacatcaggaatacaccctcagacacagaagtgcatgcagaacaccagctgagagcggacaggagtacctgcccagtggaaaagaatatacagaaccatgcaaaactcggt

SEQ ID NO: 477 - DNA, 600 bp, Bovine  MMBT10861
ttttgtcaataggacaaatcacaggggccaacttgaagaggctcccacagacaaagatgaaataatttgagcttcaaaaagaataatgagtacaagtgattgaaaaacagaaattccatgtttctaatgataaattaaagaaaaccttctttgatcatcactcgaagttgccagtgtacaaactcattaccccactagaattcagctgataaatcagaattcaagttaatgaattagaattcaagctattcaatgaaggactgatagacttttaaaacttaacattttgcaactccaaaygaaaaaaataaaacaaaaaacaaaaacttggatctaaccaatgatcrtggatggatgctaaaccactatgtgaaagttgatagggaaattctggtggcagaatcaggctcatayatttgagaccattgaccaaatctagcatcaaaaaagtgggatagacagacgtttgtgccatgagatgtaattcaatagtaaatatacagcagtacctataaagtattgtttttcaattttctttcattttttaatcagtatagtttatatatagtaaaatgcacacatcttaaatgtacaggtttt

SEQ ID NO: 478 - DNA, 600 bp, Bovine  MMBT11278
acctgacagagtcagtcaataaggaaggcaaagaaatttgacacagatttagtaattattgctggaggtatcacctcacaattgcaggcgtccgatgtctttgtaaacaagcctcttaaagcttgctttaaaatcaatacaggaaatggttgtctgtggaagtcatgcacaaacaccaccaggacaaattaaacaacccaaacctgtcctgacacaatgcattactgtggcttgggatacaggtttctgtgaaagcaaaaatatagattcaaacgttaatgtatctcaaatgccttaaayggaaataaagataatgtggtgtggaaaacttaagatgattccccccaaaatggccctacagatgacaagaacactgatgtccgagatactggtgaagactttgaacaaaactgctccttaaaacatgagtggcaggacttccctggtggtccagtggttaagaatcggcctaccaatgcaggggatatgggtttgttccccacaggggagatctcacatgcctcagggcaactaagcctgtaagcttaatctactgaagcccatgtgctccagaccccatgctctgcaaccagagaaacc

SEQ ID NO: 479 - DNA, 600 bp, Bovine  MMBT10802
cccattaatctcgtagattctggatttaaatagcaaaaatgattaagcttgagaacctatattttgttattcccccattagagaggtataagataaaagaggattagaaactcatttctaaactacattaagaaactgagaacaaaagagatttttttttcactaatttcaaaagttaatgaaataagtttcaagcatgattatttctatcttctgaggaaatgtttcctgtaactgcctatgcagtgacacatgataattatttgaaaaccataataatgcggtttcattattctaacyatcttctttcttaaagggccagcactggcttgacagaagtgctcctaaagcctgtggtgccctcttctgacccttcactcaatagggtgagtcaaagcttttgtttctrtaaaaaatatgtaaaaattcgtatctgacacaggttctatgaaagaaatctgactacagctccatggtgtatacttaacaaattcttccaggtttcagttttgaaatttgagaattgttccagagaaaaaataatactgaaatttgaaatgtgatagcaatttcactcaagcaacatgcctgtgtaagaaa

SEQ ID NO: 480 - DNA, 600 bp, Bovine  MMBT08343
gggttctaaacaataaaaccagaaaagcaatccttccatgctgttcagttctcagtggttctgggagaacaaaggcgaggaaagaagggtgagcacctatctcccacccacccccagccttcacacattgcccattgcccaggttggggcattcattatttgttcacaaaacaccaaccaagtggcagacactatattccccaaaccagaccccattttggaaggttttctcagattggggctgagccaaatggctctcctgtgttccacatggtgcatccctaccctagactacatctygtggattaggttttgggttttttttcctgttcctcttaccaatgaacagcttgtgtgttgggattgtgtttttcatcttcatattctgcatgcctgactggcatacaaaactttcttataaaaaatgattcaagggaatggacaaagccattcactgagatgggaaggaatgagttaatcatagagcttgaatagtatcagttatctgttactcaaaagatctgagaattagagagtgactgtcaaagtagagtttaatggcagcttcccctgagacaaaaattttgaaacaggaggctg

SEQ ID NO: 481 - DNA, 598 bp, Bovine  MMBT06225
  misc_feature (1)..(158): n is a, c, g, or t
nnnnnnnnnnnnnnnnnnnnnnnnnnnnnnnnnnnnnnnnnnnnnnnnnnnnnnnnnnnnnnnnnnnnnnnnnnnnnnnnnnnnnnnnnnnnnnnnnnnnnnnnnnnnnnnnnnnnnnnnnnnnnnnnnnnnnnnnnnnnnnnnnnnnnnnnnnnnnnatcttctaaagtgaattaatctgtgaatgagagtttcttttttgaaaagggaaagatagagtttaggagatgagacgagttctgtacagtgattaaccgattattgtttcaacgccctcatacgagccttagacacatcatyagctctgacctaatcttcagaatgtccagcataatgagactctctgctgggcacgaagcttagattaggaaagaaacgactgctctctccttcctgcttttctcacctctctcattttaatgtctcctcttcaaacagcgtttgcagataggatatcatttcagctgatgctccttgaggctggcaaacccttgcttttaattctgaagcccacttaacactcttttgtcctctataatgctaatttaaccgcagccctcgtatacagttagcagttgaaagtgaattcctgagaata

SEQ ID NO: 482 - DNA, 600 bp, Bovine  MMBT08268
gccatccagccatctcatcctctgtcgtccccttccacgtttaaggtcgggaggggcggtggtgaggagatacccctcgtccaaggtaaggagcaaatcaactatacttcaatttwaaaaaaaaaagaaagttaaaaaaaggtcaacactgtgtttacagcataaaacctatttgatgtaggttttaaaggctctctcttgctgtaatattttttaatcatttctgacattattgcctagacctcatgtgactgcacattttgagaggagaaaagaaaaataacactttcaatatttgcytacttagcctcccattactggtcatcttcacactcatccaaagtgcttcctcagaaagctcctraagaaaaaaataaagacttcaataaagtataaaatgtatttaaataaactcttaattttaaaatagytttagatttacagaaawgttgcagacagtacagaggatttccttagattctgtgcctagttgccctgttgttgagatcttatatatgattcctttgtcacaactcatgaacagatgctttaaytggattttaagacatttttttaaaagaaatttttccactagaaata

SEQ ID NO: 483 - DNA, 600 bp, Bovine  MMBT06178
tcatgacttaggcagagatgacatgaaaactgtcattttgtaaaggagatgcaacagaagacagaactgagctgcctcagggcaatgaggggtgaacatcaagagcagtaaggacagcagagtggaactgcttgtttgaaagcttacctgagctgctttggttaggaaatcaagacgtgaaatctcaaggtaaaaaagctagcttgtgacaaagccagagtgtcttggctttagcgggaaagatcatagaagaagcttttcttgcaaacaacctggttctcttacacagtatgcaggtaygtgtaaaaaaagccaatggaacctctcaaagacgtcttaagtcttaaagarttaaaaaaaaaaaattacatggagggaagtgggttctagtgtttcacatgaaacyctttctagcagatccaagttatgccatgcaatactttaggacagaagtagagaaaaacaaaaaacaagcaacaacaacaaaagcaccccctccccaccaaaaaaaaaccctaaatgccaaatccagattttaagatatgagactaactggaatggaaattcttattgctatatttattaaatatgaaatttgag

SEQ ID NO: 484 - DNA, 600 bp, Bovine  MMBT10621
gttgtgaatcttgctcatagaaacgtttgaaccactttaagatgaccataaaaaggaacacaattgtgccatttgcagagacgtggttgaagctagagactgtgctacagagtgaagtcagttrgaaagagaaagtcaaatagcgtttattaatgcttatatgtggaatctagaaaaacggtacagatgaacctatttacagagcggaaatagacatagagggaaaawatatatagacataaagcmgaggaaggggtggtgggatgaactgggagactagaattgacatatataccctaytgatcctgtgcataaaccagatagctaataaaaatcctactgtatagcccagataactctactccatgctctatgatgacctaaatggaaagacagtccaaaaaagaggagatatatgtatacctatagctgattgactctgctgtacagcagaaaccaacayagyattataaagcaactgtattccaataaaaagtaattttaaaaatgatcattaggtgtgaaaagtcaagcttttacagactttctttaagataaaccatttaaatgaaaaaaactccagcacaatatgataaggtg

SEQ ID NO: 485 - DNA, 600 bp, Bovine  MMBT06342
ccccaaaatcagtcttcacaaaacagccagaacaatatttggcaaaactaatacaattatgtaaagtttaaaaataaaataaaattagagaaaaaaaaaaaaaaaaaaaaggcaaatgtaattttgttccttccatgcataagatccttctatgacttcctttagctattagaacaaaactcattcttcatctggcctttgcttcacttttcagctacatatactaacctcctccccatccatcctcaagctctccaaccacattggctctctttatctctcagacccaatattgctccytgtgcaatagggctttggatcttttgtctttaatttttaagtcacctgactcctcttcatccttctaatctaaattgtcatctcctgtcagaagttgttctacactttcctgcctgtatcaaattcttctattacatcaaattgggtatctcctctccttaccactggtaaagagttgaacttcttaatgtctaccactctttattatagcaaatattagagatattcacaagtagagagaataaaataatatagtctcatgtttccaatgtccaaatccagcaaatagttattcacggc

SEQ ID NO: 486 - DNA, 600 bp, Bovine  MMBT08365
ggatcctgggaaaaattaaagaggaaatcaaaaaattcctagagttgaatgaaaatgaaaataagctgattcaaaccctttgggatgcagtaaaagtagtttttttacatgctttaaaaattgcagtagagttgatttacagtgtttcagatgtatagcaaagtgattcagttttgtaactgcaaaagcagttataagggggcagtttatagcatcccygctggtcttgttgactgtgtctccaacctccataaatttcaattgataagaaagctcctggttccctttcttctgcatctywtctccccatggagggtggaggtgaagtcagacagaaattgttagatcttcttttgtcttgctgacttcttgcctcttgcagtggctttaaaggatgggagagggagagaggagctgaaatgtattctgtttgtgttttgtgcatgagaagccaagtccccatgtggtaaatgaaagagatcagcattgtctagctagagagaagcagagccacattctgtggtctctccatgcaggggtcctttcagaggtgcagcctgtggcttggcagattctccccagcctgaaatggcaacttgg

SEQ ID NO: 487 - DNA, 600 bp, Bovine  MMBT07102
atcaaatacctgtgtattttctttgttgtgcatgaaacagagtagcaakaaatgcagagtgaaatttttttattttactatttttaatttgaaaaatactttaagattayattgattgctaatttttttcctgtctttttttcatgcagatttgaaaccaaaatagattcatttcatgttactggcttaccagataactcaacaaaaccccgcctcctgtcttcattagatgatgctgcatcactcttgaaaattatgtttgagataaatcctttagatgaaactgttgctcagaggtgyatcatagaagctgaacctttagaaatgttatatgatgcagtaagcattttttgcaattcctaagttttaatatatttctatttgccttgagtttgtcctcatgttatttatacttattttaacagagaacagtgaatagtatagtagaattcttcagacctccaaaagaggtaaatctagcacagctgacttcagtaactttgacaaaacttgaagaatttcgtgataagacagcaacaggtaaatgccagtattattgttggtttatcatttayacagtttgagtcatgttatactgat

SEQ ID NO: 488 - DNA, 598 bp, Bovine  MMBT06847
  misc_feature (1)..(8): n is a, c, g, or t
nnnnnnnnaattggagctctgtgattaattccccttcattttgaagaggagaaatcagcctgaatcaccacatgaaatacaaacactaaaaggcaatgcattcagaagctgcaagtgctcagcaaaagatggagttaattaacttgaccagatactcaacgaagatagctaatgtgactaattcaggctctcaaaggaatatcaatttcttcagctagaaaactcactagctttcccatgagtgttgtagttatgccagaacgtaagagtatgtctacctccttattcttctcctttgcygttwctcactctcccatttgcttgccaacatttaaaactaatgtttataactgccttaattccccataaactaaaaatgcaataagatactgcaaaatatagttctttctttagtgatgtmttgggtggagcagggttagatattctcagtcagccgtttatagccaaaattatgcaagccctttttggcactggattgaaggcatgatgaatggggggcgatggacaagcaaaacagaaaagcacttgttcccatatgaaggctctgctgttttagtcataaatagcctaactaaaa

SEQ ID NO: 489 - DNA, 600 bp, Bovine  MMBT10875
aaaacctcagcctctcagagtaagataaatacccttcaattcttatttgagtttctcactgcctagagtgtaaggatagaaaatagaactgtctaagagaagcagagagcaagaccttttccattgtgtttggaaaatactgaaaaagggagcagaaagggggatgaggtgaccctgtttctgtccctcagcagtcagtcaacatttctggagtgctgtgacatttactgtcatttcatgtaatgtcattaaatagggcataaggtggttttagtacatgtgtcccctgtgtgcccagaygtttgctacctgttctggtgctccaaaagaaaaagatgatttgggctatgcccttgaggagctaatagggtttcttgggagcatagaacccatgtatgaaaaacacatgcagaagataaagacagccccaggaccaggccacaaaactggggacagggtgtttgggggctggagtagaagggatgtgacttgaggaagcaccaatgatggttatagagatgtgtgtgaaggatctttgtggaatggggttgggaaagaagttggaaatgcagttgcatagatgcagggagcgacttagca

SEQ ID NO: 490 - DNA, 600 bp, Bovine  MMBT06429
gatctgttggtaatttgagtattttaatagactttggtatggaatatttgttcagaactttttaatagttttgctttgtctacatgcaatttatttcctcaatgaattgacagtttggatttccctatgcacacttaaaaaaaaaacttgcttttatatctagaagtttgtgcaatataaaaaatgaaattcagtgccctagagtttccattgtttaattgaaatacttttagggatgagagattcataataatggtctttggttctctgacaaaataactattatgtataatgactggyttgtgttttggctaatatagattttatctgagctctagtatttttaaaaaacagatcctaaaccctagataacttgttaatgcatttcagtaaatcatttttctattgtaaattatattttatttcaatgtattttcatttagagtacaggtgttcaatccttttttgatctcataccatgttagctaaagaaaaaagcaaccaattcatgtttataaaataattgcaaatgattatcattgtgatatatatacacatttttttaagacaacagcaattaaaaagtgagataaagatgaa

SEQ ID NO: 491 - DNA, 600 bp, Bovine  MMBT06518
tggtagtgaacatcatttagggatcagcaagtgtcaggtactaagttcagaactttgtagaagagtttatttaaacctaaattggtactgatagatccactatgtgtgggggaaagcatggctaaaagatattaactaactwacttgtcacgtaccagtaagtggtgaagctagatgacacctagatgagagtctccataagcctgtatccttgagcattaaatggttgtattattatcacactggctactgatcatgtatgtgaattttatcctgcttcaagtcatttcttcttcccayctatatactatagtcctccagtgtgcccattttcctaagcaatttaaaagatgtttaaagactgagtcatttcaccctattctggatgagatgagaaaagtagcaaggcccatctgtcattcataccatttttctctaaaaccacttgtgattcacggtaataattcccagatggaagtcattaaagtttaatttgtatgcatatgtgacatcttgcttttcaaaatctttttgacttcactctttccattactgaaactaattgatatatatatatatatatatgagaaataactaatt

SEQ ID NO: 492 - DNA, 598 bp, Bovine  MMBT07660
  misc_feature (1)..(91): n is a, c, g, or t
nnnnnnnnnnnnnnnnnnnnnnnnnnnnnnnnnnnnnnnnnnnnnnnnnnnnnnnnnnnnnnnnnnnnnnnnnnnnnnnnnnnnnnnnnnntcctcatcattttccctgagtgcagactggccagctctattcttctgagactatcttgataaatatactatttcataggccctgtgcatttacttttaaaatttcttctcagttattttacataggtattttagtaaatgacattttcccaatgtgtatgtatacatttttaacaaataactaaaatgaggtatgaaaaccattatcayataggaatcaccttaaagcattctcattgactctaatatttttcttaattgctttttgattcttgtgatacatacatatttcaaagtatttctycctttggaatctaagtgcctcacttttctatttttgtttgcttttttttctttttatgttgcagattgctccatacactgtatcgcatgtttcctagtgataacktatcagtttgagtagaggtttaggagctcctttaatttgcacaaagtcaaggtttttttcttcttcccctttagttatcttattgtccaaatttgtttt

SEQ ID NO: 493 - DNA, 591 bp, Bovine  MMBT05643
ctaagcaactaacactttccatttcaataggtgttcaacattaaaggattcagtgttctctcaaatcccacgacttagtgactgaacaacaacacaacaacattcgtatttacatttaattgtgattactgatacatctagtttaaatcatgctcaaacttctgtgttccctatttcagtcaactgaatgttttcattgaaagaaaatcttaaagcatattatctattctgaaaacccagcagaagaagtaatactcttgtaattaacataggcaaaacggtcattattaacatacctaygcactcactataggtatagaggcactcactatacctatgcaaaactcactatgcagtcaaaaattatatttgcttcaagcatctgccagttttgtcatttcacacttgaacagtattagaaaggaatctcactggttacctgccatatcaatattaatgaatgataagcaagaaaatcccttcttgtggaagttttaaaaatttacccatcattcttaactctcaacatcaactaattaacctttcttgtcaagccaagatattaaagtcagaggatttttgaggggggag

SEQ ID NO: 494 - DNA, 600 bp, Bovine  MMBT10672
aataaaaactgggttctaaaatgttttagatgagttacattcattttcatgcttgtcaagagtataagattgatgaaccgggagcaacgaggaatataaatatataaatggaaaacctgaatccaattctagaacctctgaatcaatggattagcctacccagtggttggcaagctgtggtccaaagggcagaaaccagcctgctacctgttttatatgagctaagaatgattattacctttgtaaggtattgaaaaaaaatgaaaaagaatagtatctcatagtatgtaaaaataatayacaattcaaattttggtgttcataaatgcagttttattgggacacagccacacrcatttgtgtacatgttgtccatgrctgctttcatgctataacccatgtggaggtaagtaggtaagtagttataagaggtaagtagttggaacaaagaggatatagcctgaaaaccgtaaaatatttactgcctggctctttaggaaaaaatgtattgatctcttagcctgtgattaattccatctttgttggggacacaggtgggaggtgatatgatgagatcctaataactgaagctcatcatta

SEQ ID NO: 495 - DNA, 604 bp, Bovine  MMBT11282
  misc_feature (1)..(4): n is a, c, g, or t
nnnntctagagtcgggagctgcaattactgaggcccccggcttcaactactgaagccctagcctgtgctctgcaccaagagaagccgcacaccaccactagaggagccccgcttgccgaaactagagaaaagccctcacagcagtgaagacccagcacagccaaaaataaataaataaaataaaatttaaaaacattttaagtaatagaggtaattttatttagagaaatggcagaaaaattaaatggttatgtcaggtgagggagtaagcaggagactgatgcctttctggacttgcaggaaytttttttttataataatttcattactttgatttttttaaaatgttatctattctttaccagttattgccatgagcattttgcagggacttttggtaatctcaacatctacaaactgaagctgtttctccaggtgaagaatcctcaagtggccagagtgaatatctccacatgaaatgtaacaccaccaggatattgccgtttatctattatctgccatttgtgagagttttacatgtgttatttctaatcttcacaacatcgctacaaggcaggtattgacattaccattttacagataa

SEQ ID NO: 496 - DNA, 600 bp, Bovine  MMBT10977
ttgtagccagttcagctaggcaaaagccatactttttgtagtaaaaaaaccaattctgattagagtcaggtttctcatttccattgtgatacgaacgcctaaggatggtaaattgctttgaaatatggtattaaatttcagaatggatgtaactgaatctgaaatttggaggatttacttcagccaaaataaagcagtaaaatcatgaaaattatgggaacaaaccaccttagacctacctgcagcatccactacaagtgacccaatcatcatctcttccttggtttagcgtgacctagyttgggtggagtaactaagttgccagctttgtggttgtagaagacaaataaaagatagtaaattgggctaacacaaagtttcatcaactgctatacttaattatgtttagaagattctgaaagcaagattatccagtggatagatgagagttgactggattctgtcagttcaagaaaaaaaggatagaaacaaaactctctaccattttcttgacttaaatacatcatatgtatatttttctcattctttgcatttttaggcaggtttaaaaatactcatcatagattcagcagaagtggc

SEQ ID NO: 497 - DNA, 598 bp, Bovine  MMBT08243
  misc_feature (1)..(62): n is a, c, g, or t
nnnnnnnnnnnnnnnnnnnnnnnnnnnnnnnnnnnnnnnnnnnnnnnnnnnnnnnnnnnnnntctccattttacttttgtgagaagaaaggtgatggagaaagcaaaactgccagccagcctaaaaacatcagaattattaataatattcatatttttgaatggttttctagacacagatacattatatgataagaaatgggggaaaaaatagtggaagtgagtaggaacattgagaagatggagaaataccttgagtatttgaagtcatgaagcataaatataagttccattctgatayaggggacatgacttttcagctttagtcttacttttaaaaaaattattgaagtatagttgattttcagtgttctgttagttttttctgtacagcacagtgaaccaggtatacgtaattcagtcttttctaaattatttccccttataggtcattatagagtgttcagtagacttcccctgtgctacacagtaggttctcattagatatatattttatatatagtagtttgtatgttaatcccaatctaccaatttttctctcactactctgctgctgttgctgctggtaagtcacttca

SEQ ID NO: 498 - DNA, 600 bp, Bovine  MMBT05544
aagggatttttttccccgctaaagcctaagtcagatatttaggaagggcttgaaataagctgttttatttgataaattcagaaatctgatgacagaattcttgcaaatagattctgagccttgttctttttgtttctttagcatctaataccagggtgtgttattaatgaataaatggctgtggaagtagcaatgaagaaatggataggatttatgcttgacatcaggagaggaggatggatgctggaggaaagatggatcagaactagcctttgcttagtgaagaactcctataaggcygcaccccaaacctagagactaagttgatcttattactgaacatagcctttcctgctaggagaagggtggttttactggtagaaacttttttggtcaaaggctttacagtcatgaggttctaaaattcttcatagaagaattcctagtttaggaaaatgatcatataagaaatagagtctggctttctattagataattaggagctgaggtcatgctctgggtcacttaaaaggtaattcccatttgttactagttgtaaactccactcaagtgagttatatttatgatcaccatctgggt

SEQ ID NO: 499 - DNA, 600 bp, Bovine  MMBT06318
atcatgtgtttatcttagaacacagttctcaattagctgagaacacagcagtctataaacagacatattttctatcttgtatttcctgtacaaacaagattttaaattcccctgttcattagcactttgctgaccaaacatgtggtccacattcatgcttaaaaaaattcatctgccctaacaatttacatatccctgttgtgttcactttccttcaaaataccagctaactataaaagcttacccaagcttgttagtgatttctaaagagtaaaatcaacttgtatttgaggaaggcaygttatagcagtactgtttatgagttacattggtgccactgtttctaatctttgggaaacaatttacaatactttatatatacacacacaaagattttagggggccagatcagagtattaacttcacttattcataagaatcttcacagtatacacacacatatacatatattgagacattctcatgcacaaatttaagtgaagataggtaggcacatttaatatatgctttagttttttgttagcacttggtcactctggttctgctttcagaactagttttatttagaaaagattctac

SEQ ID NO: 500 - DNA, 600 bp, Bovine  MMBT06094
gctaacatccctcaaaaaaaagacgtaaccagagaaccaaaatggtttctagaaaagtgaaaggggagatcagaccccttggagaagttcttctcttcccttaatatcttctaaatatatttgaactttgtttcctgcttggactcacttaatctcccctgatctattccacagatgtgagttatacttggaaacacagcgcaggactgcgtggttccgacccacgtgctgggctcgtgagcacctcggattcccacggcactgacgtcattcactgtcagcactgcccacctccctccyggcaaagagacacgtgactcagccaacagtgacccctgactcagtcactgtgggaggagagcgtcatccacgtctgtgtgagagaaagatcccaaaaggcctgtgcgggctgctgggacttgccaaacagctcctctaacaggttaattccctcatcctcccttattgtgcttaaacatggcataatttgtaatgtgtcaaaaaaaccccacactggctgacttatagttacctgggctcagcactccacattccaaatcacaaatctaagtagacgtgtttacaagagagyaaggcgtg

SEQ ID NO: 501 - DNA, 600 bp, Bovine  MMBT07693
ctcggtggtgcctcatgttcctgtggagattgggagtgaatgcttgctccctctttttttccccccgctttcctgcatagtctcatctgccctcctggttgcaatcacccacctgtattctgatacctgccaactggcccaggccttcctcccaagctccagatcctcatttctgatgcttatccctcagccttctctgcctcatccgtgccccaagcccaggcctgtgcgcttcctgtgtttcctatcagaaacactgtgtcagccctgagcctggactcagcctatttcctcctgttyctcccctctccattcaccacgtggatattccttaggatccgggattcttccttctgggtcaattttgagtcctcctcgttggtcccattcctgtatctcctctcttagcccaggccctagttatgttgcctggactatcacacatgcctcttgatggccatgctctctctgtcctccgcactgccgctgtggtcaccgtcatcacacacagatatgcccctataattgtctagttcaagaaacctgggtgactccttattgctggaggaggagggttacgtttcttataagcctttgata

SEQ ID NO: 502 - DNA, 600 bp, Bovine  MMBT05730
tccccacctggtgggtttgggattttcattttattgtgatcgcccccctcctatcatcttgctatgacttcttctttgtctttggatgtggggtatctttcttttggtgggttccagcatcctcctgttgatggctgttcaacagctagttgcaattttggtgctcttgcaggaggagatgagcacacagccttctactccaccatcttgaatcgaaaccagaggatatttcgaaagctgcagtggtggttcaggcagtccccgtgtaagaaaggcatgagcacatgtacataatgaagyatgccatgcatgtggcgaggtgacaggggcactgtttccaatggctgctctaacaaattaccacatgcttaagccacagaaattcattctgtcacagctctggagacccaaagtctgaattcagtgtcactgggctgaaacctagctgctggcaagggccaccctcccaatgtaggctctaagggaaaaactctttcytagtctctcacggttcccgtggctgctggtattcctcacccgagcagcagtactccagttacctgtgcccctactacatgccttcccactgccaccatgtct

SEQ ID NO: 503 - DNA, 598 bp, Bovine  MMBT10165
  misc_feature (1)..(45): n is a, c, g, or t
nnnnnnnnnnnnnnnnnnnnnnnnnnnnnnnnnnnnnnnnnnnnnctcaacccagcacagaggggctggatcagaactcacttctcatcgggttttccaccatggggttcccctcgcccggacgctcgatcttgaaaacttcatccacgaagacaatccgacagtcattgagagaatcacccctacaagagaacaggcctgttaggatgaccagcrggccagtctcaccgatgaccccaaaagacccggccacttggacatgttctcagagcccatgaacagctctgattctaattataysgtagaagaggttttcgyggggccctatgaactcgcctagctactaccctcgmaaattcaagtcctaccacatcaggaacgaggtgaaaacaaataagccagagtttcagtatgtgatgcattttcgagaataatttttaacctttggcaggtgaggcccactaagaggcaaggcccactaaacaaggctcaataggcaaaaactatgaagaagttctgatcaaaatatgaaaattttttaaaaattacaaaaactcctctaggttaaaacaaccccagggatcatctcactgcttcc

SEQ ID NO: 504 - DNA, 525 bp, Bovine  MMBT06111
ccttccaatgaatattcaggactgattccctttaggatggactggtttgatcgccttgcagtccaagggactctcaagagtcttctccaacaccacagttgaaaagcatcaattcttcggtgctcagctttcgttatggtctaactctcacatccatacatgaccactgggaaaaccatagctctgatattaggttcagccagtttcacaaaagggatttggatggagagggagctgggagtggaggagacagagaagactcttcttagcttttaagtcctgtgcttatccaaaaaaatygtccagtgcttctggacaggcaggtaagacctgactctcgtgagctcacaaccctcaacaacatgctcagggctctgagagcacagacaggcctggcatcgcgctcctgccccctggacgaccccacccccaccctgccctacgtgtggggtggaggctgaggccctgaagggagtgagggctcactgtggggcatcctggggggagctgggcctgaaccccact

SEQ ID NO: 505 - DNA, 582 bp, Bovine  MMBT08409
actttaggtctgtgaccgaaaactttaaaattacatcgtctcgtacatktcagttttgctttttgttcagtttgcaccttcattcttcgtgtgtacttcaataaatgaccaggtttcctacagaaatgaattcttcagctcccccaggatgcagaygtagctgtaattaatttttaaagcaaaaacatttcttcccacatcatcagaaaccattaytccttttaaactcctcattgttcatgttttatytagaaagatccgaaactgaaaacacgaacctcaggtcacacagaagtttcyggctcctccgctcttgactcccaggaactcggctaccttggcttgtggtctgctgcttgtctggggggagctgccagaagcgctgtstgtggcgtggcccaggagtattgggatccacatcccagtggacccaattctgtggtcttttctagggtcccatctgcctcagcctcaggtaactgtcctgctgaattgcaataaaataaaaataaagttcctcttagtttgagataaagttggaatttttcaaaaggtattttcagtaagaaactaagataatta

SEQ ID NO: 506 - DNA, 600 bp, Bovine  MMBT07941
ggcagagcccctcctggcaggagccatacacatccctcacttgccaagcactttacagtttgcaaaggactttgcgatagtaatggcgcagggcccctgggttcttgctctctgcagggtctgtgctgagctgtttacctggatcacccggtttcctccataacaaccgtgtcagggtgctgtcaccgtctctcctctcagagggaaactcaggttcagagaggttaaggaatttacccaaggtcacgcagcagggatccaggctcacccctcatcattgggctgtatttccacctccayatttagaccacaagagttctagacaggaatacagtagggactgggttcccattttacaaatgaggagagtgaggctctgaagtgaagtgacacctagctgatgagtgctcccagccccgcctgctgctgctggccacrcagaggccaggctggggcgcccctgacctgctctccccaccttccctctccagcaagtgctctcagaagaggagattgatgagaacttcaagtccctcttcagacaactggcaggggaggtaggctgggcctggtggcgggtgtctggggcactgaggggtt

SEQ ID NO: 507 - DNA, 600 bp, Bovine  MMBT08328
ggagttggaccagtcaacatctgtaagtaactttgaacagacattaacaatgatgacaatacagggtatttggtgtgactcagagtcccactgtttctagctaccggacatgcccatctcccaaatggttgtttaatatacttagtgagaagcaggtcgtacagggacaaaaacacaggttgagacaggaagcaacagggctcatgtcttacctcctaaagggtgggccctgtatcttacccatcttggactctgtcccccagccttgccctgacccccattcccttgggggacttacaycgtcccttgcctactgtgttcactggttttctattagggagcttcactaaatgacttagttcttctgggcttcatctgcagctgtctaaaaggggtgacgtacagtgctaacagtagcaggatcaaataaattagatgcataggaccaatctgccagactggtctcaccaagtttttccctcctttctctgcagctgtcgtcacaaacaccgtttcctcaggctacggtggtggcagtggctttggcggtggcctgggcggtggcctgggcggtggcctgggcggcggcctcggcggcgg

SEQ ID NO: 508 - DNA, 600 bp, Bovine  MMBT07225
aaaaaacaagtttttctgtatatatacactagatagacaggaagaaagagacacaagaaacagagagcaaatgtggctaactgatatcaattagtatttctaagtttattatactactttagcaacttttctatacctatgaaatattttaaaaccaaaaataaagaattttttaagaaatcagatcagcttgatattgaggacagactgtattagaggaagatgatgaagataaaagagaaaaagatgaggagagggacttccctggtggtccagtggttaagatttcgagctcccaaygcagagggcccaggttcgatccctggtcagggaactagatcccacatgccacagccaagagtttgctggattccagctggacctttgagtccttcccagcactttcattctgtcatcttagctccatgagatgtggcctggatgtctggatctcagcattctttccctgaaccacaattgggaaatctcgctgcaactaagaccgggcgcagccaagtaaataaattaaagaaagaaaaaaaagagagagagactaggagaagtgtggaaaagatcataaggagacagtaagctaaattt

SEQ ID NO: 509 - DNA, 561 bp, Bovine  MMBT10156
ggggctctgactgtccttaactttgtagacacaccactccctttctgcctccatcttcacatggcccttttccctgcttggtgtccctgtgtctccccttataaggacaccagctattggatttagggcccaccctraatctagtacaggttcttctcaataaattaatgtcagcaaaggcttgtttccaaacaaaatcactttctgagattctgggtagtagtgaattaggggggaacgatgttcaacccattcccactagtgtccatgagaaatgggccttagttgtttatagatgcygagcttcggggtatttgtcactgcagcaccactgtgcgaagcctcgctggtccacgctgtaatgtaattatttgtttatacactcgtcttccccagacgctgacctcccgccgaagagagacggcgtgtcgtttgttattgtatcatagaggatggttaggaaagaaattaattttaccggctggcaccagaactcattttagagatgcaactgggcttgtttaggaaaataccttaattagtactcggggacggagaccg

SEQ ID NO: 510 - DNA, 600 bp, Bovine  MMBT06453
ccttggggtcaagtcaacaaatgggaccagaacccaggagaccagagctgccataagactaaaacactgatcctagaaaatcgagttaacttctctggaccacctcttactcctggatgagagaagcaaccataatatcagggcttgcttcgcaagtttgagagtgagagaagacttaggcagaaaacacttttgaaaagttaggccgatcattgttaacatccccatgcaactggaatcctcgtgacaataatttttgcgtgtcgggcccagacgagggatccagaggaggcacagtcyggtggcatctgtgcgctcctggagggagacagaagaccgctctgcatcatggcaggaagggagtttcctatttccaggagaaacaataaaaaagagctatctcttccctaagagcttgtctctgaargacatgattctcatcaacattgtcattcaggcataagtgtatgtggtaccaaacagtagcctcagttcccctgctgggggaggacgtttccctgcccacagtaaacataaacccagataatttcacagccagtcggcgtgagtcagcaagcactctgagctgcccctgtgtgc

SEQ ID NO: 511 - DNA, 593 bp, Bovine  MMBT08504
gcccttgtctgaatggggcctgtgaatctgaattgctaagccactcccaggtgacgctggtactgctgacgtggggaccaccctctcagtagggaggtactctcgtgctcagtcgtgtccgactctttttgaccccatggactgtggcccaccaggctcctctgtccgtgcgattttccaggcaagaatattggaacgggttgccacttcctactccaggagatcttctggatccagagatcgaatcctcatcttctgcgtctctgcattggcaggtggattctttaccactgcgccacyaagaagacccagggaggtactaggacatgcttaaattagggacttgctgagtacatcagccctgactcgggcattcaactttgctgccagcctaaggaaggcaaacagacatgaggacaggcgacctcaagaccactgacttaaacaaccaaaaaaaaaccatccccaagaggcygagactttgcaccattttgctgtttatttcaagtttacagagaagcttaaacatttgtggaaaaacactgaaggcttattttttaaattcatgtacttttcaggataaatacacagta

SEQ ID NO: 512 - DNA, 600 bp, Bovine  MMBT09695
atcgtaagtatatatccttttgtatttgggattctttataaactactaatgtgtgtttttaaaggccagttctttcaacatcaactctttttttttagaaaatattcttactaagctaggaacaatagtttattgatgtgattgttaaaaatctgtctcaagtgaataaccagcaccgtacttgacagtacaaggcactcccttattgtgctaagtgccactgtattttgacatcgttctaaaaggtgtagctcttacactagtaacacatggaaagagaaggacatttggcccttgaayaacaactcttacacatgcagtgcttgggggagcctgtttcctgagtgagaggctaagagtatttaagaaagargatgtwctaggtacatacactagaatattatccaaaaattaaattttaaaatatatatttgtgtatatacatatatgtacgtgagcacacacacacgtatatatgtgcatcattctcagaagcacactgaatgggaaaaaaagttgcccaaaaagcccagaatatactgttcatattttaaacttagaaaacatcaccatatgtatatatgtatgtgtgtgtgtgta

SEQ ID NO: 513 - DNA, 600 bp, Bovine  MMBT06584
tctgcttcgtaaatgaggaaactcatgctcaggcggttaaagatgaagtcctgtatccggaaaaatggtgagatgggcttgtccgatgacagttagcaagggtctttcggattccggatgttggccttcccagattcttattccttgaacgggatcatctggggctcccgtggccacccgcaagcagccagacgcagtggtgttgcagaacgggctgggagctctgggtacgacgggtttatttttttttttttgcttggctggagttggtgaccacatgataccagaagmtttcccccygccgtggggctgcttggcgccacctgttttccttctgcagtcatctgccccttcgccaccccgccctctgtcctgcagcccaaaaccggtgtgaccctggcgtctcatggttcctcagccttgctggtatgtggcagcctgggagcgcctatatatagaaagacacacaagcacagaagccacttcctctgcctgcgtctcagtttcctcctcagccaaaataggcctgtgactccccgctcctgacctgctgagctcatcggcccaactccccctcactccgtcttccctgaccccctg

SEQ ID NO: 514 - DNA, 600 bp, Bovine  MMBT07951
atgaggaatggccatcgagaggatgagcttgctttcccttggggcccaaggccttgtctggcctcacagggcctctgggagcagacagtctgaccagagaggatctggtctcggggatcagaagggccatactcaggctcctgatttgtatcagtgtcccctctagaccccactgttttttccaccttctctggcttccagcctccaatatcctttctctaccaggtgctggactatttcctgcagctgcaaggctgtgactaaatacctacgttgtgcctytgtccatcttttcagggyctctaggactgcttggttccactttagctcatcctagaccaccaccagcctagctcccaaaagcaagcaggatcttggtcctggagcgaacgcttctatacagttgggcacttgggattttcctaatagaaatatttttggtgcttaaaggtcagagctgggctaagaggagagcccaatacaggtgggttggactaagggcctcggggctgatgtctcccctgtgrtctctcctaggaccgagaggagcggaagctgctgctggaccctagcagcccacccaccaaagccctcaatgga

SEQ ID NO: 515 - DNA, 600 bp, Bovine  MMBT07705
ttttggaaagccacatatgatacacattttttgtgtatatatattagtgtgaataaaacagtaacatcagtgcatttttctaaagcagaaaacttctgtaattttcttgtcttccttaaaagtattcctttgagttcagtgttcatttacttttcattgtgagcatctgctctatggttaatgtctaactatagcatttgctcctaataatagaattaggacagtagagtttttgaactgcagctgaccccagacggcatatgttccaaccaccttattctgcatccaaggacacgacaytaaatgcctttctcaggctgctggtggcagatctgggctggagtatggttccacccactcccttttggccttcatttctcgacaccagtgctattacttttcacttaatttcctccyaacttccccaactgatgaaataaaaataagagttatttatgtatattttaataaaatcctgttcgatttttcaacttacagctggttttgtctgtattattcaacctatgttttctgaacattgagcagaggagaaacccttgaaccagtgtccatagtagaaacatacaccagagcagtttt

SEQ ID NO: 516 - DNA, 585 bp, Bovine  MMBT05738
gagattcttgtcagcgtttgacactgttgacttgggagtgtttttctccttcaggagagaaagagatgcagctagagagtttatgtcctaatttacagagaagtcccagttgtagctttaaggatctgttttagcccacaggagtcttttctggttggttagattgggcagaggttgccatcctactggagtaatgtgctggggattagagaccacatttagagggtgggaatgagaaaatctggaagagaacaccaaggaccattctagcagatgagtcagaaacctgaagtgggggcygccaaactctttaggaatgaatgtctcttcagccctgggatgcatacaaagcaagactgctttgtgtaaatgctcccctcctcgcccagcgactgccaaaggcagaagggggtgacactcagggcacagatttaggtcttcattctttgaacttgctccagcctttcctggctggggtgacctttttgttaattggcctcttgtggggtagtttccctgcctccccctataggcctggggccaaagggacatgaacatccagtacttcctttgtagccaatgtgt

SEQ ID NO: 517 - DNA, 600 bp, Bovine  MMBT10142
ggtgtaattttgggctggtgacctcaccgtgcggcacggtttactaattttacattttgccgggagaaggcaaaacctctcttagcaggcgagggaactctgcacacagcctgacttgactacatcagctatttatgttcaggcagacagagctaaaccggtgcaaagactgtagcttcaagaaaaactcttcaagaacgaactttaaatgcttctcaaaccgacaggggaggctggaggcttgagacctggaagttctctttcagcgttcctccttagtcgtgttacactgagacggcycaggtccctcgtggctggggaggcatagagaatgggaaggggccctgggacaggctgtacaccctgcccaggccctccttcgaggagtaaaccggatcgttaacaggcgaggatggatcagcctttccatttattccccccaagtgagagtttatgtcacacaaataactagtttgggtggatctcttattaagtggacgtggatctgctcctcatcacacacaggggacactgccagccttaatcctggtgtctctaatttcaggtaaatgaatacacttctgcaaaagtggggagcag

SEQ ID NO: 518 - DNA, 600 bp, Bovine  MMBT09038
cttcaggccatgtggctaagatcacacacagtgtgctctgccttccagcgactgaacttccaggtgagaccagattagacagagaaggtcggaggaaatttaattcttatcatctactgtggaagrctggcaacagcaatccctgcacgaaagaagaggctcctaattatgattaaaaggataattcaggcaaggtgactctagatcagcttcagttagtccttatttttgaatttcatatttaaatccattcccttgacagcaacygaagaagtgaaacacaggaagaaaattgtctayaaaggatarcatcaaacactaatctccatgtaacrgagactctacagaatttcaaaggcatgttggtacttgagtgactgctatgyaccaggcaatgtagggggtgatgggacacaggatacaatgatgctctattcggaggcagttcctgtggtatatgactcctcagtaagccctgcagtgcaggcttgctcatatccatttcacgctatttacgcctgcygaaggcggtgtgcaacatggatgccagtcatccccaktcctagtagccatgcccttatgtcaccattggtgcctgct

SEQ ID NO: 519 - DNA, 600 bp, Bovine  MMBT09350
ctgaccttcactactgtattcagaattcaaacagtcagaagcaactgccctttgtctcctcaaatgtttgcttaagaactctaagtcaaaatgttaccacagtgttttgagatttctcagactctttggcataaatgtacatgacagaatctgcatatattcttggttgattaatgttagtataataaaattgttatgcatctacttcagttaagataagtatttataaatcaactgtattccaataaaaatgcttaacaggcaaatatctctaaaggtttctttcatttttaaagaggyatgatattgggaatcattttatcctgtcactggagcttccttctgaaacatatgttctgtccattaagttgaatatcaactaaaagatgtttgagaaaaaattactttgatttctaatttataaagatgtgcagcacatttgtggatgtgtatctgtttgcaatcttgaatttttgcaggtagttcttttgcatccatgatatggatgatattttcctttctttcacttaaacaggggggaatgcttagcctttaagctatgcaactctctctagtccattgacggtaagcatcttgctc

SEQ ID NO: 520 - DNA, 600 bp, Bovine  MMBT06980
tagtgttattagaatggtattcatggactttgaggatgataactaaatctaggttccatatgccaaatataacctggcaccagctggttacaaatctgttctcatctctctgaggaagtcattttaaaattcatgacttaaaataattccttgtacactgtgaatgtgtattcatatacagttgtacttaacccacagtgtttattctactaatctaaattatattattttaaaaagaaataaaaattatcaagataatatatatgcagcaaaggatatctctagtctttcatccctgayttgtcattacattgcttgaactcagactcagttcccagaaggattagacaggtggtctatagaataatatatggcatkttttttccataattagtcctctgctctgagtccaagatgactggtctaagcttatttgagcttagcttatttgagcttcttcttttagctgagttttctgctaggagatttattgcattatgaacaaaatatgaaggcagcatcataataaaataaaaccyttgttggatattgagacataagcaacactactttgaaaacttccctaaagaacataaccca

SEQ ID NO: 521 - DNA, 600 bp, Bovine  MMBT08602
agytgcacgacayktgttcatatgctgtatcaggagcataaattggtggacttaggtattattttcaaggccaacctaagtctaacaccaggtcacctaaatatttctgaaaataagtttattgaatcagggtaatatgtcaaataattattgacatgctagaaatataagaataatatttatttwaaaaactattagtatgtactatgtactacttggaataccttaartttttgaatataaaatagaaatgatagtttgttctttatgcaaattataatttgtgcttatgaagatttyaaactattatgtttccatatatacatacagatctacatatacatcatatataataggattgcttcatttgttaataaagtataaattataaaaataaaatatgaactaaaatgatctttggccactctaaatagagatgaatacattattaaataataaattagagaagagtaaaactgtttcttcacataaccactattacacccatatctaatggtgtgtaaactatgcttaaaaattactaaaggaattgcactgtaaaactgtatgtgcctttaagaataagttagaacaacctca

SEQ ID NO: 522 - DNA, 600 bp, Bovine  MMBT06036
tgtttttacctcttagagtagttggtacttaaggactaacaattgcattttggcacatgttcaaacagtggactaccatggtataacttatcattattgaagctaaaacagaagtatttctgaggaattttaataacttctaatttgtttttaaataataggttaactgaaagagccaaaaagagacgtacgtcttcacaatctattggacaagttatatctaacaggcatgaggatacaggttccactcaagtaaggcaagaacctcatcattaaattacgtcctttttcagcattatyctctcaccctgtgtccttgtctttgtctttagggctctaacatttttttttaatgtgcttttattttccccttttaccctggagtgaaaataggtcatcatttccttaatgctttcacagttttagttaatttcttataacttgatttgtgtattcaatgagtgacttgggggaaaaaaggtaagattttcctttaaaaatcacaagactctttgatttttcacttcaaaaaatgattttaatatcttactttatagattaagagcaattgccaaataaatacatcttacttttcccaag

SEQ ID NO: 523 - DNA, 600 bp, Bovine  MMBT06399
ggccccaggacagctgcctgagctcttgggtgctctcagctccctgtcttaatggtggttcagttttctcgctcgcctgagagtgatcctagtgttgagatgcacttttcaaacaggtggctaaacatgaagccacctactttatttgggttcagctaaataagagatctactctgacagtggaggaaaaaactagccattttttacttactaaaatggcacacgagtctttgtttcatgtgaattctaacataaaaggttgtatactgtgtacttcatgggtgacttaaaggaatttcygagacaactttaagcaaaatttgatgtataatcaagaataasaggcaactctacttgggtttttgtttctcagtttcatcagctataaaatgagctgrtatcaggtgatcatttacagcttttccacccatatagagttgtgatatgagaagagaagaatcagatttaatgtatttgcaaaagacagcactaccaagcagagctgttaggtcctgtccagcagcagagcgattctagaagacaaggagttgtgagtcacagctgatgctygttagtcacatctggaatgagcaggctgct

SEQ ID NO: 524 - DNA, 600 bp, Bovine  MMBT07571
cttttaaatatatttttattactttaaaattaactgatttatatcaatttaaaccatattattgatcgagcaaatactcattaaatgctcagtatgatacttgctcttgaaaagtgtaagtatagagagatctaaaataaataactttttatagtgtgataaatgttttaatataaagatattcaaaatccctgctaaaaatgttcaaatttctctaagctgggtaaagaaaatacattaagaaaatgaaatgatataaatgtctgataatgattttaaacagcaaaagaaatgtactgytacttttttttttccttctaactasaacacagattgttttagatacttgatatttgtttaatcaatgaattagtggatggacaggtcttcatgcaattgcatgctctatttcaaatatattaatagttcaaaattgaaggtcagatataaaagacaattgactgaagagcaccctaagtgcttatataatagttttttcaagttggtttttttgtttttaaatctaacttatttagctgagttcttttgccattttgaaacattttcctctagactacttaattatagcactctccatta

SEQ ID NO: 525 - DNA, 600 bp, Bovine  MMBT05833
ttgccctatatcctaaaatcaactggaagccaaaggagaattttgagcaagggattggaatagggctacaggtctagtgtgttttgatgaattcactctggctacatggtggagaacaagtagactggaaagggagtcagtgattcctagaagcacagttggaagactattacagtagcccaggtaaaaaacagtgatggtgataattggagaaaagtcatcaggctatgactatgctatttcaggaggaaatagcagtagaacttggagatatattagatataaaggtggaagaaaatyagaaaataaaatttctagttgggcctttatctgctgacctatgaagtgacacatgaagactgggtcttgctgggttgacttatgggtatttgaagtatgaggtgcctttaccatatccttaaagaaaagatgctgaataacttatgtgggtctgggatggagatacactcttgtgagtcatctttaactataggtgcgctaccccagaggaagcacagggaatgacgggggctaagatcacgcctgaaagagcattaatgcttaaaatctagacacagtgaacatagggctgtttttgaa

SEQ ID NO: 526 - DNA, 600 bp, Bovine  MMBT10104
aaaatctaaagaaaaataaaatattaagatatagtgaataatacagggtgctttaattctgtttctctttttctatgataataaataagaaagaaaatttaatagaaaatctaaaatctatcatttataaattaagaayaagaattgctgaaaattgtcttatttcataagcattagggaaagactagtcataataatatatattctttaggaccaaaaaaaaaaaaaaaaaaagaaagatcagttaattttaaagattcactcaacaattaggagaaaaatctggattgcggtccaagyttttccygtatgtatgtgaccttgggctgtttccacttttagatcacctcttaaatcatttttaattgcaaatgttactattctccaagggctcaatataaaaattctaacaattctatgttcacmtccattcattctgagtagcttattcactattctctaatcatgtaattgactttcatatgctcttaaatagacatgaaataatggtttactacagcgattggtcacacacatttgctctgtctggagtcgtaatctgcagaaactcctttttccccttgtctatttgttaaagtg

SEQ ID NO: 527 - DNA, 605 bp, Bovine  MMBT09312
  misc_feature (1)..(5): n is a, c, g, or t
nnnnnagtatagaatccatttatatgaaattctacacaaaccatgacagagagcagagatatcaggaaaccagcttgggaagagggctgactatcggggccaawaaggggctttgggacataatggaaatgttctgcatcatgattgtgataatggttacacgactgtatgtctttgtcaagctcakcaaacggtacttcttagattgataaattttattctatacaaattatctcaataaaactgagtttaaataatcctcttctctccaagagcaaagaatgggtatatcaggcctccaaaayagaggaccatttgtctgttttttatagaasgaaggagaaaacatctaatttctccaacaggtcattctgccttgcttataaaacatctacttttaccttaataagtttacattaatttctcacttgcaagagatctaactagggtatttcttgatggaaagaaaattatttcttaagtagctcaggaagtctaaactacacagaagtataaatcataaaatcttctaatatcatattcagatggctttatcccttctggaatgctcattttcagctttctgtcttgccaatactactcca

SEQ ID NO: 528 - DNA, 600 bp, Bovine  MMBT06395
ttagattttcaaagtctaagcattagaatcccccagtctgtctttaggcagccagctttgttctgtctgtgaggtcatgactcaaacagaaaggctccctgtgggtgaaaaggaatgtgtctctgatctcagtggcattgtcctgggaagaaattgagatggtgtgtcagaagacctgcatttgaattccaactctggtatttactgtcagtaagaagtaactttttctgagctctggctttttcacctgcaaagtgagcataacaaagcctggctcagaggggtctgggaaagactttyaagaggacaatatatgtgaattgctcattgtaactcaatagcattttaagaatattagttgttggaawgtattcttttaygttgaaaggagtttgggttttggacttgagtacttagtttagttaatctcttgagcctaaggatcttcatgtactaaacaataaaaagattgcaacgtacttttgctgcttcttgtaaggattaaagaggataaagtatgaactgcctctagcaaaaaccatggcaatgcatgtgcttcctgcaaaagcataactctttcttaaattaataaaccatcat

SEQ ID NO: 529 - DNA, 600 bp, Bovine  MMBT06397
aaaaacaatacaaatgaatctatatacaaaatagaaacagattcatagacatagaaaacaaatttatggttatcgcaggggaaaggaagggggagggataaattaagagtatgggattaacaacctactatacatgaaatagataaaaacaaggctttactgaataacacaggcaattacattatcttctaataacctataatggaaaataatgtgaaaaactatctatattatatatatataactgagtcacttttctgtatacctgaaactaacagaatactgtaaatctcctatacygcaattaaaaaaaatgctcaaactccaaaatactcttattaaaaatacatctctccttaccaataacagaataataattcctgtgttattcactctgacttttctagctttctctcatttttcatytacttaaggtcttatcagaaagagaagggagaatatatgaataatttcaaacctgttagaagtgcacactgatggatgtcttcatttacaaacttcataaagttatcctcatcctaaaacaagagaatttaaaaatrtttctattttaaaaacagcttttcaatccagaaatat

SEQ ID NO: 530 - DNA, 601 bp, Bovine  MMBT08298
  misc_feature (1)..(1): n is a, c, g, or t
nctgaaaacttgagtaaagaagtgttcagagcagaatgttaggaaagtcctctggcgctagtggttttttggtaacattggaggaaaactgaggaggaaaggagcaaagtcgaaggacagaagagcgaagaacagttaaggggttctatcacttgaactacggagaagtcagaaggctacatagagtgatagcattaggaatatgtgttccagttcttagaataactctgttaatataatcctacgataaagggtttttagtgcacatttgttgaattaaagatgtgtttttgaaataatycccccagtttttcagtattccagtataagtggttgtctgccatctgtcatttaaactttattttaaattaattttttgacatttttagcattttaaacatgttaataatttttaacattagtttaaacacaaactattttttaaatgtaagagttaactgaatccaaatgataaatgatttatcattcataggttgaaaaatattgaaaaagaagttgaaaagaaaagaatgaatgtgtttaacattcgttctgtagaggattcccttagacttggtcagctcaaaggaaatcactttga

SEQ ID NO: 531 - DNA, 600 bp, Bovine  MMBT06964
aaggcaaaaggatgagcagatatagtatgtgaaagttatttattgctataaaaattcctctctgaccgttaccctgtcttccagaaaacctcagcaatagttcttggaatgcaaaatggaccaaaactgaagtgatgagtgttgtttttaactctgctgtccctaggattttaccttccccctccatttagtcagatcagtccaaccccatgaggttttcccattttgatttaaaggatcactgctccagcttgtgtttattcactagtgaaggaagaacattcctgattttttatttcytgacaattgatgggttgtagtaggcaatcacatctgaggaaataagtgaaactaaaaccctgaaatttattattacacatatgkctgctgctgctgcttctgctgctggtaagttgcttcacttgtgtccgaccctgtgggaaccatagacggcagcccmccaggctcctctgtccctggtattctccaggcaagaatactggagtgggttgccatttccttctccartgcatgaatgyatactaagttgcttcagtcgtgtccaactccgtgcgaccccacggacagcagcccaccagg

SEQ ID NO: 532 - DNA, 600 bp, Bovine  MMBT10484
acaatttactatcctaaagtagttgaattaatccactcactgagttaatttcatattttcagggcatgtatttcaactcaatartttataaatgttcttttaaaaaatagaaatatccrtaacacatgcatatcaggtttgaccatcatttctgtcatccaccagaaaatgaggcagaaaaacccattagcattttgttaatgatggtgcctacaatgtraaaaaccacaattctagattctttctaacaacacttaaatctaaaactgttttccatcccagtttcccccttgattattyattacttggcacacaagaagcrtctcttctctttcaagaacatctttgaacacagaacacagtgtatcatacaaatatcacattgactacaatctaactgaaaaccgtgtggtcctgacatttgctgctgtcccttcgtctctctgctagcaccatatcctaaatttacaatctgctagagaatattcagcttggcttcaggggcattctggtggcaagaaacctccttgggggatataattctcaagttcgcacaaaagcaaatttctcatctttgggaagcttgtcggcactctggct

SEQ ID NO: 533 - DNA, 600 bp, Bovine  MMBT08302
gctgctttaatcctcataataggccaattttttctacaatgattattccacttgctaactttttttggtctgaagtatcaattaaaaaccctgtgatcttgtgataaagaaaaattttgcccccaattctgtgaccttgtgaaagagaaaactattgccccaaatattccttacactagtttttccctgaataagaactaatgagggcttatgggataaccagttacatgtatcttcataataaatcagattggggtgttatatctgagcccataggaaattggtctttcccttcatctygttgtgtgtctgaaagatggtgacagttaaacagtaacacaggtttacagattatgaatgaaatttagctgtctgtgcttcattcctaaaaattggcaagtctttaagtatttagagttaaaaaaaaaaaaggaacactccatagctatatgttgtcaagtggtgtatatagagtagtttaaaaactttaaaaatcagagcacattctccaagatttgagaggggcatgtttactgtgatcacaggtagtgagtagattcacctccagacattgtatgtgaaaaagagaagcttgaatgt

SEQ ID NO: 534 - DNA, 600 bp, Bovine  MMBT06457
cagggaatcagtggctgkctgtgaagttgttcatgttatttgwttggaaaacaataaaatgcagatgtaatcagtgggtataaggttagaccagttcttggtccaagtttttscatgagagtgcccatcatgccacagggatcccaccttgagggtctgatgtaagttgttaacttacttaaagtcttactctctgtcttagcacagtcacgaattttatattctattccaccaccatatatttggatttaataatcataaaatatttttctttgaggctattaagtactcaaggaagayatttctcttatgaatttgaatagctcaatttggaaactcagaattcatttagatcgcaaccaaccatttacatctcatttagagttgagctgaggttgtgtatgttagaggtcttacagaggaataaaggaaggctagcacacagatatccatatagcctcrtcctgctctatgggtagcttctttcccatamgacagctcagaagcagagtcccttgaaagcatccatttattcatcctttctcatgaagactgaaaatgtcacgtgccgatgatgcaatctggatattgctgactcac

SEQ ID NO: 535 - DNA, 600 bp, Bovine  MMBT08647
tgcaaagttcatgccttggtgtggtggcagtcagaaagaaaggaagaaaccacaagcatatgacacttttatgttatcataaactttagtcttgtctcaaaagataataaattaccattcttacctgtaatgcactgaaactgtccatcttctcttcttattgtaaatgcttcccctgggttaacttgtaccagaataaccttaaaatgaggggaagaagtattaattataagaacagcagatcaaatctgcatatcaagatattaaacgttgcaagagagtagatgtatgctatttaayaggggaaggaaaatggggactacacatttgctgaaaaaattaattacttcacttttctggagatcagacttaagccaaaagtaagggaataaaaaaagacactgcactgctgaccttccaattcctaaacccctttaaaaaaccagagttcggatctgacagttacactactctctgtcaaattaccgaataggttcccttctccactcagcttcttccatttcttacatccccgtatccatgctgccattcttgagacttcactcagttcgcaggacagatcagccgggcagttttctt

SEQ ID NO: 536 - DNA, 600 bp, Bovine  MMBT09813
aactgctattcttgttggcccagaggatattggcttacaatgcaaggtttatacataagtgaccttgttttctcctttgaaattaaagatagggttgaaattgacaccactgagtatataatatattttttgaatggaagctaaaacagagcatttgtatctggggcaagagatttttattttttgatggaagaacacaaaggtattttataaaaacaagtatttgatttatgtttgtgtgcctcttaactataacacagaccaatgggtttaataaaaattatataaacctgtactaaytgagagtcttccgtgtacaatcactggtgagcaatgagttcccctcatgaagaaaatcacacagaaccaagggtactatasaagaggcacctaaggctagtggtaaacatccttctaccactgagtttaaatgattctcttattgccccgtatttctcatcagtgaaaacaagggaaatgccaatgacaatagaaaagttatcactacattgcaaaatagcgtatcattagtaatgggcaaatgtattttttttaagtaagccaaatgaatcattccctggaattgtcaataaaaaatta

SEQ ID NO: 537 - DNA, 600 bp, Bovine  MMBT10220
cttttctccagcccagtaatgaggggaaagagaagaatgagcaggggggatggactgagtccctttgagataatgaagaatgagctgtcactgcacaccatcagagatggcttttgggaggagacttgtcacggagatgtgagcctaccaggcggtggacacctcaactgcgaggtctccatcaagagaatgtgccagagtgggcctagctcagacagcatctacctgtgaatgtcaaaattggcttgaaggctagtatttgtttctctggaccactccctcattatttccattctgtaygttctgacccagcaggagaaatgcaggaggtggatacagaccatcctgagtatcctctgttttgagtagtatctcaggccctgccaaggtacacagcacgcacactgggccaaagagggcacctgcgaaaagagcttctctcacaaacactgctgctacagacacacacacacacacacacacacacacacacactgctggagagcctcccgcacaaactaccacctcatgcacacaggaagtcctggatttaatggctgggcttatcttgtgcaacattcccaaggctccatttttcat

SEQ ID NO: 538 - DNA, 600 bp, Bovine  MMBT07926
ttcaatgcagtctcatcatttcaaggtgatgtgtcagatcctttcactaaatggtggagtcaattcctctgactccttaaatctgagttggccatgtgacttgctatggccaatgtcatatcagaaactgcagcagaatactcacgacttggatatgcttggcactcagtgtaattagtttatgcccaagcaagaaggacttattccttattgattgtagagcttcttttgcttcctcatttcataggcagtagataaggaggtttaacatggggtcataatgccacaagataaggatayttttccstattcttcagagttgayagatttaggctgtaartacatgagagagggagctgcaaagaatgatgagagcggtcaggagcaagatgcctgtggcagaggactttttctttccccatagcaaaggacaagctcaggatggtgaaagatatgtgtatatgagaaaacaagtaccaacacagctcaaaatgaagttaatatatagaatagattaacatttcactaagtgtatttttaatgagtcattgaaatgattatagatttacttgcagctgtaaggagtaatacagtgagatc

SEQ ID NO: 539 - DNA, 598 bp, Bovine  MMBT06597
  misc_feature (1)..(209): n is a, c, g, or t
nnnnnnnnnnnnnnnnnnnnnnnnnnnnnnnnnnnnnnnnnnnnnnnnnnnnnnnnnnnnnnnnnnnnnnnnnnnnnnnnnnnnnnnnnnnnnnnnnnnnnnnnnnnnnnnnnnnnnnnnnnnnnnnnnnnnnnnnnnnnnnnnnnnnnnnnnnnnnnnnnnnnnnnnnnnnnnnnnnnnnnnnnnnnnnnnnnnnnnnnnnnnnnnnnccctcttatgtgcactgggtccttccttttgttcagccctgtgtacaggtgatttataaaggcaatgtagctaggttattactattattaytattgggatatcaatgtgttggaagaactactaaagtctgcatttctagaatactcacatagttaaatcctcgttacaaaggagggacccttatctctactcaccttcatcttaacttcatgaacataattagctagcaagcctaaagattttttttttcttcttttgctttttctggtgaaaccttttctaggctgacagtatatattattcctattatcttttactttcatcagtttcaaaaaaactatcccccaagccccatttctattgcattttcctccagatcttggagaag

SEQ ID NO: 540 - DNA, 600 bp, Bovine  MMBT06169
atcaaaagaaatgacaccagcagagatggacaaataatccatattaaaataccaacatgaactggagtttaggaattgtttataaccttgaaattcaacaggaattgcacatattagcacacatataagaatacacagatgatggaaactttactttgcactggtttaggaaaatggtaattcttaggtggaattgtgtatctctgtttaggaagattataataatttgcctggtcttggaaatagtatgaataaaaagagcacaattcataaatggagatcctctttttcccctttcaytttttcttaamatatattttttaaaaagtaactattttagaaagtaaaatggatacaatttgctgatggagtatgttgttagagaatctatatttttgagttaacagttcctatggaaagaaatgcaaaattctttcagctattgaaaagcattggagtgtgatggcaaagcttaaataatgtcctgggttttttggtcagggaggggcttcgagatgtctcttgtgtaccatggtaagaacaaatatatacaaatactttcatgacactggtctatctttctctaaatgtttttgttct

SEQ ID NO: 541 - DNA, 600 bp, Bovine  MMBT08702
attcaatgaagtcatgtctaacatttgcaactatatgcatataaacatttaagttcactgtagcacagcatatccaaccataaaacatcaaagtgtgaaaaggctcttcctgcccttccctaaattggtracacagaactttttcacttccaaatgtgaaatgtgatccacacccagaatgtgtcataattggcatggatatgctattaaaactagagcttcttttgcagacagctacataacatctcaggcatgttggtaagaaaggaatcataattgagactggtggtgacagtatcyggatcgttagagaaaattaatcctattttactaatggcaattcctattaacaatgcctgattttgccatcataatataaatagtctagagtctctactatgtgacacataactctgcacaaaacagccccacgcaaatgttttgggtacagagcataaccatgactacgccgtcatcaaacaaccatatacacccaagtctttgaaaacttttggattggggccggatggaaggaaaaatacataaagagaagaaaaaataaaaagcaaaaaatgaggattttggaatcctcccactgag

SEQ ID NO: 542 - DNA, 598 bp, Bovine  MMBT09256
  misc_feature (1)..(81): n is a, c, g, or t
nnnnnnnnnnnnnnnnnnnnnnnnnnnnnnnnnnnnnnnnnnnnnnnnnnnnnnnnnnnnnnnnnnnnnnnnnnnnnnnnncactggacagatcagaaaacatccaatatttaactaaaagataacttccaaaggaaccctataggttcaatatctaatcagctcaatgccyatgcttacgtgttttttactgcgtcatgaaaaacaacagtaatatttatgagtaccctcagaatcccataaaagtcaatatggaacaatgataaaggcattaccactttcaagtctttgaaaactgayaatctggacagagtatatagttctttactaaccatactgtagcctctaaatgtactagatgttttcatggttgctataataaatttcagtgataaagtaagaagtgtattaaagatgacattaagattagcaatgttttggctaatrttcaaatatatatcagaagttaacagtcatggataaactaacataaaaataaacatttccctcawccagttttagattttaaccagataatttggtctaaaaaaggaaaagtgtcattatacaacatcacagattttttaacaatacaaaa

SEQ ID NO: 543 - DNA, 600 bp, Bovine  MMBT07717
aaaatggagttaatgcaaaaaaaaagttgtgagttcatacactgtaatgtacccatctaacaatgatttatggagcacctactatgtgctgggcactgtgctagttgctggggttacagtgatggatagaattgtcaggatctttattgtaagggaaattacgtcctggcatcctttaaaatgttttattatgaaaaaattcagaccttcaggagagtgggcagaacagataatgagcttcatctacccatcactcagtctcaagcccaagaaagattttgctacgtttgctttgcctgyctcccgtgttttttactgaattattttaaagcaaatcatagacactgtgttccttgtccattgctatatgataaacagccacagattcagctgtttgaacaacacacatttgttatctcmcactttccaaggtttaggaatyggaacacaacttggctggatcttctgctctgtttcacaaagctgcaatccagatgtcagcctggcctgaggtggcctgggcctagtgtggttgttggcagaattcagttccttgtggttgtagggctgaggccctcagcaacgagaggcagtcccata

SEQ ID NO: 544 - DNA, 600 bp, Bovine  MMBT06974
tagatagtaaaggaactcagccatacatatacatgtatccattcttccccaaactcccctcccatccaggccaccacataccactaagcagagtttcctgttaaataaagaattttgaatattttactgcattgacactgaacattgaatttaaaaataatgacttctttggataaatggacaaactggcagatgagtatcaaaattttgtcataaaacaataacgtttaatgccatgcatgaacaagagtagatcttaactgttcctattacacatgaaaagtggtaactatgtgaggygatgtgtgtgttaattaacttgattgtggtaataattttgtaatgtgacacatgttaaatcatcatgctattattggttagtcactaagtcatgtctgactcatcctgtagaccttaaaaaatcttgttgtataacttaaatgtatactttaaaaataaacaacaaaaaaaagacacacataagaacaaagtatatcagtgaaagttgcattttaaaaaattgcatattatgtaaacaactactatggcaaactgatttcattgtagttrttttaataattttggctatgatgaactgca

SEQ ID NO: 545 - DNA, 600 bp, Bovine  MMBT06581
tgctgcagtccatggggttgcaaagagtcagacacaactgagcgactgaactgaactgtcacatctgttcacgctttattaaccatgtcatgtgttcaagyccaacacgaatattctattcttcccatgccaggagaagggagagagaatatttgctagacaagaatagagtctaccacagaggatgagatatgttttagagaatatttcctcttccaaaggagcccagtggaaataatctttcctaatatcagaagatcccagtgagtagctaaatgtccttcatgtaaattactctayaagcacaacagtaagttayacgtacctattggaaaaacataaagggcaagcacataacagtacataaatttcactttgtatagagggctgaataacatacagttcaacagagaattggaaatcagtttgaattaccaagaaaaaaaaaaaaaaaggcaacgagacagaatgaaacagatgaatttcacatagatctgggaaaatctgattaggtaacccataattcttcctctacctgtgttgccttaatggaaaaaagataattccagggaattggactgggtttatttgaggggccag

SEQ ID NO: 546 - DNA, 600 bp, Bovine  MMBT07204
ggaaactggctttgacgcacagaaagatggaaggaagagcttggtagattcatggcgccatgatgccttgttcctttgttgggtcgggacgccctgagaaactctccacaccgcaagtctgcccggggacatttagctagaccctccgaagtgaacttcaggccaaccggcaagagatttgcttccaccagggctgtaagatagttctcactccctgactcaatttcctcagctactctagcaataatttccaaagctgagaagaaaaaccagtgtcatggccaaagatgaaaatgtcaygygagatattaaatgtcatccgagagactgtacgcttaacggccccgaagtgctttcaggcttctgagaggatttcacttcctggccctggagaagctaagtgctgccttctattcctcctcggcattcraaaagtcataaatagttaactgtgtgagtcgttttttttaaacctccccagagcacctaaaaatagcctctgggggcttgatgcctatttcctcaggtgttcctcttaatctttcaatattggtggtgacgatttactgttactgtcatccacagactctcagagacaaa

SEQ ID NO: 547 - DNA, 600 bp, Bovine  MMBT10123
attgctattttggactgttttatgatgtccatttttctcagcctgacacttcggtgggtcctaacacacacacactcactggggaagtctaaacactagagaaatacagggctatcaatcaagcagaaaacaggtgctgagaacctaccaggggcaagttctctgccgggagagggtgatacagagagaagcaaaacatcgtccccagtataaaggagcctggggtcttgttaggaagccagaatacacatcatgtaaaccaaatcactagtaagcacaggaaaaacaccactacattcyaaagaaggatsagaggagaatattttaagatgaagttgatgcaaaaacttaaagttgcttaaatacacggtcagcacttttgacatatttcagcatttttcttcactccgtttgagataatgcaccatagctccagaatcacctaaggtcttttgttcaccaccaggaactgcaaacccgtcttytgaattcatttatctacatgggactggactttgagtttgcccatgagaagcatagtatgagtcttggaatgcttgggcatggggctattttctctagcaggagttgcagccagac

SEQ ID NO: 548 - DNA, 600 bp, Bovine  MMBT06053
gggaagcgggaatgtggaaaaagccagctaggctctccaggaggagcaggggaagctgtggcactgccacgtctctcagggcctgaaataggaaggactttctaaacccaaccaccaggttttcttaagatctcagcagcagaaatttctggatccctttattaagaagccttagcttttctccatgtagctctgtgtctgctcctctcattatctctgggactgcctttctatatatcaaggttgtataccaaagaaagagaatttgattgacctggtgaaccccaattggacacagayttcttgctaaaccatcaaccacagacaagtcaatggattagctgcccttgggtccaggctctgcttctgcctctaggcagtggatagtgtccagtgttagggagttaaatgtttttattttatttttaattggaggataattacttacaataatgtgttggtttctgcgatacatccacatgaatcaaccataggtatacatatgtcccctccctcctgaacytccctcccagcccttaccccataccacccctctaggctgtcatggagcacygagtttgggttccctgcatcctacag

SEQ ID NO: 549 - DNA, 600 bp, Bovine  MMBT09806
ggtttttcttaaaagaatgggggtttactttctgaataatgtctttttattgtgacctacagtcctctcttcaaccctactcactcttcyccatacatactgaaacccaactctattggtttcttgcccagataaactaaaatcacatggagatatttgctgctctagaratgtctccatgcctttgcaaaygaagtgggktttttgtttgcttttgctttgcttgaaaacccatcccctgctcctgccctagtgcctccaaccacaattccaacttttctgagtagattaaggcactcygctttctgctcgcctggacttttatatatgtactttcagcacagcacttaacggcagttatgggacactgtctgcattgccttgctcagtgcctatcacatagaagcactgaataaaatttttgcataatgattagaaagacagaatatattattcctaggatgcatttcaaattcttttagggtagcaatttaaataaaaaataaaaataaaaataaacaaaggcacaaagcaacacttgaaaaaaaaaaagaaagaaaagaaaagcctgtgatgtcagcaagctgttttttctcctaa

SEQ ID NO: 550 - DNA, 598 bp, Bovine  MMBT08293
  misc_feature (1)..(61): n is a, c, g, or t
nnnnnnnnnnnnnnnnnnnnnnnnnnnnnnnnnnnnnnnnnnnnnnnnnnnnnnnnnnnnntgctaagtttagcctgctgctaaacttaggacagtaagttcctgtttttcacttgcctcttctatgttgttgagctaacaatatgtaattgttcaaaatcctgggcaacagaactgataaaacttcctggcatataaataaatgagtcaaaccgtgaagagattaaatttccttttttttccccaataaaatcatccaccttcaccatctatcagtgattgtttagaaatatctaaggygtccttacttggttaactatggataaacaatctagtttggttttccactcttactcaaaggacactgtaaatttttggaaaaattccaaaactgcagttatttgatccatcacaaactctttaatctccctgttgagttccatatcaaaacacaccattcratgtactctacrccctctccttgcctgactcagcagctccactgctcataggattattctccatatccctcttccccttactcgaagcaaaaatgcctctcaaattccagttgagctatttcaaatcctaaaagatg

SEQ ID NO: 551 - DNA, 600 bp, Bovine  MMBT07701
tgctgtgattcatggggtcgcaaagagtyggacacgactgagcaattgatctgatctgatctaaatgtcctcatcacaaaaaagaaagggtaattatgtgacatggatggaggtgttaactaacactatagtggtaatcgttttgcaacatacaagtgtatcaaatcaactagatgtacaccttgaacttataagactatatgtcagttacatctcaatgaagctggaaaaaagattccatattaacagttatatttgggttgagaataaagcatattttcagtaatgatgttttctagyrgactaacatatactgctctatatttattagttattttataaaagctcaagattcaaattcagagaaattaaagtagaataaacatgttcccatatgccttcttggagaagtttctttgaggggccattcagcaaagggaaatttataagtctcaagatatgacccaattcagactcaccagcactgaatgggactctcttctgcttcatgaattgtaacagctcgttaactacagcatgagttcttacaacggccagatgagcatggaaaggaaatgtagcatttttcatggatattag

SEQ ID NO: 552 - DNA, 600 bp, Bovine  MMBT08292
tcctgggggattggacttgaacatttgaaatttaggaaagaatgattcaacccacaacagtatatatctttcaaataacacacattagtactgagtgtgaaatgctgatcaaaaatttagaawttctataaatatatgatctcatataaatgtatgatccatatatgaggaatgcattgagaatatcacatacaatatatggagataacctcaatgaatcccctatataagaagatttaatgaaaattaacttcagaatttattaggctgattacagaattttccaggtatctaacaggyaggctaatgatagctatatggtctgcctgcctaatcacagcccactggaaatttttaaacattgctcttacaggattagttggcaggtatatcatagatcaataaggcctaactgcccacccagctctactccctccctccaggkgtcacatcagcaggtgtgaatcarattagtaatttgtgatggaaactgaatgcaatcaattacacwattttgagctgttcacatttaattccattaaattatatcacaaaactagtccaatgaagtactgaaaataagatgggcgtaaacgtgca

SEQ ID NO: 553 - DNA, 600 bp, Bovine  MMBT07650
aaggagcccacaggacacttgggacgaaagagctctgcacaaataaccaaccacatgctctcaacctcctcttgagagaagcaggcctttaccatcaagagccatatttaatagcatgtaacttattatcctggccacaagtgatcagagcagggaaagatgcttgactcaagggcagctaatttctgggcgggttaagtggcttatgaggtggtatggtatgagatgattggagactaactaggccaatcagaaactgaatttgtggaattcctgtgtttgcatcatctgttcctggaygttctgccctggctctgtgtcatctaactcagaaagtgcccttcgaaggaccctgttcactgctgcacttttcaatgaattaaattttatttctgttctactgggggaaaaaaagaaaagagaatcagatttttggaggaagacttgtcagttgacagtgggcacaggagatgaagcacatggagggataaaagacagcatatcactgaaatggtagaaatctggaatcagcaaaagcctgagcattgcttttcagagagtaagaagtaggtggttttcagagagtaagaagtaagaagt

SEQ ID NO: 554 - DNA, 598 bp, Bovine  MMBT06023
  misc_feature (1)..(37): n is a, c, g, or t
nnnnnnnnnnnnnnnnnnnnnnnnnnnnnnnnnnnnncttcctgtgactcaccctgggccacatggtctattctgccagtggccggacagcaatgttagactctcacaccctcacccggttgggctgactctcagagtatgtgacgagaaggtggcytttctgaacaagttaagtgccttttcgtctcagggccaacacggacctactttctgaccttactttccattgatgtcttggtttttggtcaccagtggcaactgtctcaaaaacataggctttcacatgcctctggcagcagygttattcttctactttactccttcccttaagtgaaatatgcatactctatgtaagaattggattcctggggtgcgtttgatgaatcacccattttattcagccgtgggtgaatctgcctaccttttcctatatgtgaattcagcctttccctctttgagctttcggaaaattattagtcctcattaagatggatgtgaagtgagtggtatccctctccctttttaaatcactatgcatacatgctcaatcacttagttgtgcccaactctttgcaaccccatcgactatggcctacca

SEQ ID NO: 555 - DNA, 600 bp, Bovine  MMBT06170
cttctccatgcatgaaagtgaaaagtgaaagtgaagtcgctcagtcgtgtccgactcctagcctggaaactcctatggacggaggagcatggtacactacagtccatggggtcacaaagagtcggacacaactgagcaacttgactctcactttcactttctttcaagcactaaaggaaaaaaaaaatgataattactttggaagaagactgttttctcaatatcacaacagaagaatggtttatttttggcaactccaaacatgatttatttcctagactacatcccaaatattaggayattaagataggagtttcacttctaaaaactttatcagttggtgtatttttaaaattttgaatagtaatcaaaatatttactcccataacttctactttttatgagaatggaagaaataagtataggaacagtagacattaagtggattcatttcaaatttagtcaagaagaacacaaggtcgtagtccttagggctttatataatgatatttttttcagtactggatgatttgtatagaagcagtctactcctgttggtggttttttaatttttctttcatttaaccttaattaacctta

SEQ ID NO: 556 - DNA, 600 bp, Bovine  MMBT07983
tttcaaaaggagtttgaaatgcaggagaccttggagaagggaatggttggttacccaccctagtatgcttccctggagaattccatggataataatgtagtgtaagtgcatcagttaaccatgttcagaaaatgctgagtaacagatcactccaaaactcaggcttaagacaagaatcatttatcttcaaacatctgcagagtggctggtctcagcagctcgggcctgaacttttctgtagcaaatgccttccgaaagtctcttatcccccttctggaaggagcaggctagtataggcaygtctggtgatggtagaagcatatgcattagcaacttagttttaccagtgctttgcaccatatttctaatatcccattggtcgaagcaaatgcctctggtgagatattacatggcacacayagttgtaggcactgtaaaatcacttaccaaatggcagatatagagaaagatggagaatcagagtccaggaatgcaawttaccacaggaggggataaacacttttacatyaayagtccactgcaagaatgagtcaagaactcctggaaagcttgctaaaactacaaagtttgggctacctc

SEQ ID NO: 557 - DNA, 600 bp, Bovine  MMBT07208
agggaatgcatatggtttaatacatcatctcattttctgaaaactggttcatagattctaaggagcagcacatgatcagtgcataatcagtaatggtaataagagaggttgcatgagggagggaatctaaggtgaggcttctgggaatggagtcacatggtgggcttggaccagcgggtgaacactgctgggagggaagtttggggatataccagactgcctttggcaggcagaatccagactttgagtccctgcttgatttcgatggcatgggccaggctcctgcatgttacaggaacytttaattagtcggcattttccactaagactgtgttagtgcgtttagtaaaagtgtcttattactcctggacaggtgggtgagatggggtagtttgagaagtactgagtccatctactttccaacagcatcaactgagtaaattaaagaaattacatgagtaacaaagtatttcatttcttcataattacccatattttagcaccaatatgagtatggatatacaattataaagtataaaaacatttttattttgattttcattgtaatataggaaaaattwtagaaamattttaatatgt

SEQ ID NO: 558 - DNA, 600 bp, Bovine  MMBT10949
tatggaggagacagacacgtttcagataattacagcacaacatagcaattgctcagaaataaagcaagggacggcaagctaaaagatcccaggtcaaatctagcccaacacctacttttgtaaataaagttttattgaaacacagctatgcccatttacttgcctaacatttctgactactttaacactataatggcagaattgagaagatgcagtggagaccacatggccctcaaaacctaacatattcactacctggccctgataaaaaaaaatctgctaatccatgataaaagggcytatggggacagctctgctgaattggacttctgtttaacttacaataggcaatattcattcattctgtggcccttgacgggtatagcaagtctaggaggtgaaggtacatgcattcctgccctggaacccaggcatgtgtaggactttttaccacatacactacagaggtgtcaggcaatgtcttaccaaaaaagagattaattctggtcttttgtttgtttgtttgtttttggtatataactataaattatcaagaaggaaaagtttactaaatcacagaaattaaatataattataatt

SEQ ID NO: 559 - DNA, 600 bp, Bovine  MMBT09359
aaaaataataaagaggttgggaaaagcttttagaaggaatggatgtgtttatgacatagattttagtgatggtttcacaggtacatgtttacctccaaactcaacaagttgtttatattaaatacatccctaagaatactacacgtgttttcagttgccattagtaatcaattattttaaagataatttaacatcctggatttaacagaggaaatacaaagtaaaagaataatgaaatatagggctcctgatgcaagtatcacatctaagaatacagctgttatttctctggtctaacayaaaaaattaatatgtgatgaaatttttttccttgctaacaatttcctcctctaaaagagttttaccccatttcctagttctctttccatatacccttgtaattttccacttacaaatatgtgattgtttaaaaatttctatctcctttaagaaataaatttaattatatgaagttttatattagtgtatctgttcatatactggagaattagttcatctgtcaatcttctattagatcatctatacaaaaggaagaaaatgcatttctgggaatatattggattttccaagcagattttt

SEQ ID NO: 560 - DNA, 598 bp, Bovine  MMBT07977
  misc_feature (1)..(41): n is a, c, g, or t
nnnnnnnnnnnnnnnnnnnnnnnnnnnnnnnnnnnnnnnnntgtgactggttgaaaacttaatgtcagaatgtgcccagtctacagaggtagggaagagatgttcacaggcaggaaccagagaggaggatcaactataataatggatcaggataacaaaatagagaaaaggggctaatgacttggttattcctgggtaaggatttcctaggtccttagtgagaaggcattgtagtaatgccagagccacaatatatattatttatttgctctttgttatacatactttggtttctgcagytttaaaaataaactttatgcaattcatttcatatatgatggcaggaataatagctattatcgattgctgtcttgtttatacctgatgtgctactgggcactgcatagatccacatttccctgctcacatgacccctacctgggacaggtctctttcccacatccatccttcctagagtgggagacgggccctgctggtggatgctcctggggttggaggagtggtcatgggaatctyttcccatgaggtgtggctgagcttggacatgtgggtgaaggtgttcatatgcttgtgaact

SEQ ID NO: 561 - DNA, 598 bp, Bovine  MMBT10532
  misc_feature (1)..(112): n is a, c, g, or t
nnnnnnnnnnnnnnnnnnnnnnnnnnnnnnnnnnnnnnnnnnnnnnnnnnnnnnnnnnnnnnnnnnnnnnnnnnnnnnnnnnnnnnnnnnnnnnnnnnnnnnnnnnnnnnnncagaagagagaagctgggggtgggagcacactctgccagcctcagggggcctggaagagagcttgggagccccaggcttgagtggtgagttggctgggtcaggccaccctccagacaagcctctccaccaggtgatggatatgcccgtgactccgcatccctggaccagggaacagctctccctgaayatggctaggaagccyatggggtctctgtgkatgcccgttgggaccactgatgggatgttccacagacatcacttctctctkgcctccccacaaacccactagggcacctcagggcatcctgggaaagagtctggatcaggatatgggaaatcgattctctaaaagtcaattaacaaaatgaccttaattgaccagttttctgaaagtcaattctttaaatgagccatttaccaaaatttcagacagatattttaaacccggtctgggcagcyrgccaccgctgcccgccagcaggggt

SEQ ID NO: 562 - DNA, 600 bp, Bovine  MMBT07737
cccagagcagggctgggcatgcttgaaaactcaactggccaagtttccttgttctagctctgcctccctgatgaaatgggcttaatgcaagacarttggaatggcctctcctcctggctccgacctgattgggttctgtaatgctaagtgtgagacctcatctttgcaaagatacggcaaagaccagaagtaaccacacaaacagcaaatatgatagacggccctgctctgtgtgtggacagcaagctcagaagtggctcggggagtccgtggctgccctaggggcgggttgtggacatygcctggcagtttttctgtgcaggtggcatcagtggttaacgacagcccagcctgtcccrtctcctctggagcgctgccctgcacctttctaccccagagtcgggctgtcccttcagatcagcaatggcccccgaagcctcatctcctccaggcaagccagccccctgctccatcgtttatttccgagtcgcctgcgttggatcttcggtcagttcccctgcgggcctcctccaccccygccagcctggcctcgtggctccgcgtgtgtgtgcacaccttgcccacccatctctcctcatt

SEQ ID NO: 563 - DNA, 600 bp, Bovine  MMBT09625
gcacaggcaggtgctctgcacacccacaccctcttttacaactggtgacagagagaatccagggtggtcattgccctcacctgagagctgccccccaacacccatcccaagaagagggcttctgcactcagctggcctcacccccaaagaggaccctgacttcccagactgcctcttcagtaataagagcaaagagtggctggcggttcttgtctctgttttaggagagaatcagggagcggcagtgacatagaggggacaggagggaacagcaaaaggaggtataggaattgattgaayaggtccagggatgcccttcttgtggttgataagtgagagttagaactttgggttacttgtgaatttgttctagttgctggactcagcttctctgatgaccgcctggcctgagactggaccatgtaggtgacggctttgtagacagcrtgcccgtgggtcaacacgtagcacgggctcacgtctaaatycagtggtttaggtgaaaccgcagtggtcagcagggccctccagggtcatttacctcccgctgraatggcaggacccaagcctttgggagctcaaaaatctcagcagtaactt

SEQ ID NO: 564 - DNA, 600 bp, Bovine  MMBT09947
ttgaagaacagatcaagtagaattagctctgaaatatactctatgtaaaataaaagccaaatacacgtttcttatataactctttcaggtggttttactcctaaaacttaaacttgcttatgatgagaaagtttgccactatcacatccattcgctgtttattcagaacatcttggatttacttttcatcatgtaggcatttcattatctagaaaaacacaacaaaaccaagcactaaatatcttccttcttggagatttcccagagatactggggcctggcgagtctctgctttgaatyggtagcygggtagatgacttctaggttttgtcctaatgttcagagtccatgaattagtcaataagggggatgcacacttcctgatcgctgagcaagacccacctctcccayctctgatggatgccaggggccccgggtgctgggaggcctccacggttaatgtgaagtttgtaaatgcacttgcatttatgagcaggatggcagaatgcattattaatgcctgcctgagaaggataacaagaggcttttgtggtttatgcagtaaactgtgtttccactttagaagtggacgatagtaaa

SEQ ID NO: 565 - DNA, 600 bp, Bovine  MMBT10393
tggtgacctggaaactcacaaattggggagcttctggagacagtgtattgtcatgtgggaacatggtcatgaggtttctagatcatcctgttgctcaagagaggccataagtctagattttgggggtgaaatctcctgatttttaaacaaaaacaaccaatttcaggttttcctttaacatacacaggccaagaaggacaygtgggactgagwtasagctgaaatcatgctgtcttgattccgcagctcttctgcgggtgacaaggaagcatcctaattgtgtgtgcctggtgcttctcyttccccttccaaggcatcaagacagaagacagcttgaaccattcccccggccagagtggcttcctcagctatggctccagcttcagcaccccagcctctggacagagcccgtacacctaccagatgcatggtgagtgcagtcctgcgcccytccctgccgtctcgaaggtactgcctgagtcgggtgtccagtcgttcgttcatttattcaacagctttattgagtacctactatgtgccaggacctatctcaagtagcggagttgcagtggtgggcagaggagataacgacttctgccc

SEQ ID NO: 566 - DNA, 600 bp, Bovine  MMBT08791
atctcactctagtattcttgcctgggaagtcccatgtacagaggagcctggtgggctgcaacccatggggtcgcaaaagagtgggacacgactgagtgactggaccacccaccaccacacctactgacgggcaggtcttgtccttgtaggttgagcatcccatcacagaatgcatcactggcctggacctggtccaagaaatgatacgtgttgccaagggttaccctctcaggcacaaacaagccgatattcccatcaacggctgggcggtcgaatgtcgagtttatgccgaggtaaagygaacactgggaggagggatgaygggaggaagggtggtgtttgtgtcccgagtcatgggaccacgtataactaaacaacaaggtaaagtcagcgtcctgtaacttggggtcaagtatttgattatgtaattcagagctgaaccagaaaaagaaaggttagatcattttgacataactcaaaatagttttaaaggattgagtttaattaattttcatgtgttgtttctggatggaagaatagcttctaatcagtttaaggagcgagaaagaattagtttaatattcttgtgcttgaatggac

SEQ ID NO: 567 - DNA, 600 bp, Bovine  MMBT09938
gaaaagctgtctgatagatgttgtttgtatgctataatattggaatttctggggtattttaatgggttacagagacaagcaaaatgttagaaactgggatggtttcagaaacactagagcatatggtacccatcctagtaaaattygctgccaaggcaggaaccaaaaacaagtggaatttttggaggaggtaaatttggaggcgctgccaaacaatagaytcttcctgcccctgcccraaggcctgtcgtatctggccaaatgctgtctgtggaggagaaacagggtgtcctgggaggygtgcagtgggcgccaccccgatgcacactgcaaacgcgacgagccacagatggtgctccttcttgcaaatgtcaacccgtcacttcaaaacctaaaaatgaaatagggtgcrttttaaacatttaaacacagatcaatcgaggacagggctccgagaatgtgatggtgacgctgtttcaccgcgtgtcttgcgtattctcctgatgctcttccacgttccaactcgcagtgcagtgggcactgactcaccgctccagctctcacacaagtgaacctgcaggygggcagcctcccccaagg

SEQ ID NO: 568 - DNA, 417 bp, Bovine  MMBT10707
gttatcatcttgtgaaaatattgaatgagtttagattcctaaaggaaattaaaagttaggtaaaattcacattcacctagaaatctcttgcaccaaaagctcctgattagtgcagatgaatatgagaacttcattcaaagagatcagtacaggtgacaagcttaaaaatgaccttaactcacaaattggaaaatactttccactgctctctactgctgtcagtttcatggaatgtgcaaggtcatgtgttatctggacccagcttactactcctgcttcttttctcaccactctccttayttcctacttctagccctttagccagagggtcctaggtgggaacccccaaacctcctgctctcatattattaggtctacattttcttgaaatgcctccccatgcaccctcttcttgat

SEQ ID NO: 569 - DNA, 605 bp, Bovine  MMBT11067
  misc_feature (1)..(5): n is a, c, g, or t
nnnnnttcttcctagtacattgattgcagactaaaaaacaatatatatatttttaaatgtgcttaatttcatgggactaatttgaaggaatagttcttacttgcaaggcagagttaagcctgggtaaaaccagaataatcacccttaccagagaaattgggggaaaaaaaaaaaaaaaaaaacaaactcctgctaagcatttcttctcagctagaaactggttgagctgaagcacaaatgttggattcttttgccttgttctaaccgagggacaagaggtacgtggctgaatatgggagatgagyagtaaagggaagatactgctacctgcagggaaagccaagcaagcagggctggatgtgttatctaatccagaagaattcttcacrtaaaaggagaaactaatcttcagtaaaaacgctaacatgtatcttgaagccattttttctgaccttcagattacattttacatcaagattaagaaaagaggaagttgtcttttcccaggagatttctgccccttaacctggtactgttagtcttaaacatgattaaccatttgacatgacttcccaaactacagactgtttgtattaaacacatat

SEQ ID NO: 570 - DNA, 600 bp, Bovine  MMBT06676
agctggaggagctggagctggtggaggggccagggcccgaggaggagctggccgacatcctgcagggccccagtctgcgctccacggacgaggaggatggggacgaactgattctttgacctgcatttcctcacgaagactgtccaggaacccaggacagtgcacacagggtgcacgtgtgggaaagtgtgcttcctaaagctggtgggcatcacatcaatacatggcctctcctgggagtttttaaaaatgtgatccttggaggaagaactggaatttgggcagggggtagccttggtyagtcatttgggccttgccctcccaaccccagataggcagtggatctgtgtgaagggcccctgatattccatgggcttcctgagtttgcccgtgtgtgggtggggaatacctgcctctcccgtgcatcccccacaacacaccctcccccgcccccagtgttcttgtcccagtgccttcccsgccttgcccatcctcccatcagttccccagggggtgggttaagggagacccaggatgactgtggtcctgcctgtggcatgctggaggaggagatgggaccacctcatggcctcgtggact

SEQ ID NO: 571 - DNA, 600 bp, Bovine  MMBT07344
gcagaaaagcacattttcttctgaaaagaaatcagtttaagaatcaaagaaacgagtacaaacacaaagccaacacactggggtccacgttgggcactcattcaaaatgtcatgtcattcgaacatgtctcccatttttaatggtgcttcacttgggtctaatcacattcagaccctgctgggttgcatgccattagatgctttaaaaatgtatagccaagacacaactaaaataaaaaacccacacaagccagcagctgaagcacagaaagaagaggcctctgggattttatttcatcyagagcaaccgacttacaaggtcatctccgacttcttacccacctgtgctctgttcccccattgttaaaataacagtgatcattagaaatgattgagggcctcagggtgtcatatttattttctttacatttaggagccagttttaggaaacgagaccaatagttcttattgtcttcttcccttttctgttacaacaygaacatcactgggaagatattcccaaacatamgcttgcgtgtctgctaagtgtcttcagttgtgtccaactctgagaccctggactatatagtccaccaggct

SEQ ID NO: 572 - DNA, 600 bp, Bovine  MMBT06610
ttacatccaaaagtgaggtgctgcctgtagggggcgcccagtctctggrttcacatggacaaaccacagaccagggtcacctccagcccttcagayggggcccaatcctctgaacggctgcttctgaagagattttcatgaatgagagaagcgttatggggttatgactttaatyctcrggacagtttcagccgctgcagggctgcgatgactcagctgggtgggcgaggcagacctctgacctttggtgtgtcccttaccattattctgttcctgaccttgccccacgagtaataaccyaggtagagttttccagatggaaccccatgacttcggggtggggggtggcggggggtgctgcatgactgacttggtgcaaatacatcatctcccctgggagggagacatttacagcctaaacttacaaacggtgtgaacatcgaacagcgtgggcagatggcgggctggccaggcccccaggagccgcttcagggtcccctctccctatggggacgcccacctccctctaccaggggatggccggggaatgggctggaatacaattctaacaccaccaggggtcaggcgctggattccaag

SEQ ID NO: 573 - DNA, 600 bp, Bovine  MMBT08314
aagggagcaagccaggaggacaggggttaacctcactcctgctttggggaggaaatgtgtctcgttcctctttgtagccccagcacccagaacagtgcttggcacagaggaggagcaggagaattctccctggacctttaccatgctggcaacggcggaggtgaacacaagcaggacagaaaagatgccaactgcggtgctatgtgccctcgagcggacgatactgcgagatacacgttgcagggcctcagggaacagctgtcaggaggcaggagacagagacagaccacgtcacccaayggttaaggccacctagggccagcccagtggcagaggcctcaccttctcctccctccccactcccagtctggcctccccgaccagccctggaaggtcccccacgtacagarccacaggagtacacggcacaagtcagcacggtgaccagtaacagcaggaagatactggcgtggatcccaagcatcagagctgagctgggcgggagagggccagggaagatgttactctgggagatctgggggtcctttcccactccctgggcaggcagggggcaggccccaggactgtgtgcttgcaaag

SEQ ID NO: 574 - DNA, 598 bp, Bovine  MMBT09623
  misc_feature (1)..(123): n is a, c, g, or t
nnnnnnnnnnnnnnnnnnnnnnnnnnnnnnnnnnnnnnnnnnnnnnnnnnnnnnnnnnnnnnnnnnnnnnnnnnnnnnnnnnnnnnnnnnnnnnnnnnnnnnnnnnnnnnnnnnnnnnnnnnnccattagcagaagtcactggactgtgaacatgaaatcagatcagtacacaggcttagcagaaacctgggatgcagtgaaggttccctgaaggtagctgtcgctattaattcttatctgagagacatggaaaccgaattagaaaactcgggagacttaactgaggtcccacggctccygccaggtcggggtctggccrtgaagagctacctctctggatgtctaccacacttcttagaactctgaagtaaatagtttatgcaaatacggccaagccaccccacctgagatgaggtcctcggtctggccaacaaaggaagccaggcccagcacccagaggtatttttaacagggtggagatgtgcgctttgcatattttgccttcttggcagcttgtggttcaaggtcccaaccaaaactaaatgtgtttacttgtttgtttagacaggtaagatctcacagtctcacaccccacag

SEQ ID NO: 575 - DNA, 600 bp, Bovine  MMBT11092
agagcaatatacacaatatttcggcaatgatagtaacagttaacctaaatatttagtatcagtagtatcagtgtaactgcattttaagagaaacctccctttgaatgtaaatgttgtagttttccttttttttaattacttggtagtcttatataagatgttatttctgtatacagatttacttgcacttaatagacattctaatttaacattagatataaattttccacttgggactttgctggcagtccagtgggtaagactctgagctcccaatgcagggagcaggggtttgatccytgtccagggaactaagattcctacaagctgcatgatcccctccccccaaaaatagaatttcctgtttacttatctgttgatataatttgtagaaatccagagttrtcacagaaacaaagttaaaggtttaagtaattttccctaacacccctaaaagagagcaataaacaacatataccgtccccaaaacacggctttaaaaaggcatttttgtcatttgaaattattattcatctcctggcaacccagaaaacctagtggaacccactaagaaacctatacatgcaagcacaggtaaac

SEQ ID NO: 576 - DNA, 600 bp, Bovine  MMBT10360
gctaattaggctcctaattagggacctcccaggtgcggcaatgcccggtgggcagggggtgagggcggctgggattaattgtggaagacttcatgctgctttaggggaatgaaggactcccagaagtgtggacaacactacatgccaaggagatgtgcctgtgagataggggatgaagggagaggccaggcatggacccagcaaacactgctggcttgagtgtggtgccagccctgctctttaaatgcaggtagaagagcctcccgagattctaaaccagcgcgtgcgagggtggtggaytctgcccttaaaagcaagttccccacaggactctggtggaagtatcggggactgaaagcctgaaaaaggccctttggatggtggacagacatctgggaacacctgagttctcagaagaggcagagaggcctggcaggtgtgtgtgatgctttacgttctgtgtcaaccaaactggccacggggcactcacgtggagtggctgggactcacacccatcagctcccctggttctcaggctgtcagacccagaatgagcttgactgccagcctcctgggcctccagcctgtggtgggtatagg

SEQ ID NO: 577 - DNA, 600 bp, Bovine  MMBT06994
aatttaacattttatgttcagttgatgcaaacttcctttccccaaatcaaagttgggagaaagaaaagggagttaaggagaggtttgacacataagaaaatgcgaagacagttgtgtacgaaatgaggtttgagttttcagaactgaaggtttgcagtccaggccggctcactaatgaaggacctgctcctctaacctggtgcacaacacaaaacattaatcaggacattgtttgcattaaagggctgtgttttccagagggtaatcatcagggaaatccagtcaagggcgaacaaggayggcagccctgattaattaaacatctgcactggggctaaaagcaagacttaccctgttggttgttataagagctattgctattaatgccacccgtggaattgggagatgttgtttgctraaatctactctgtacagagggctcggtgttcaaggcatatcaagttatgtcctgatgttattttggcttctccctgtggcactgggtggaagggactgtgggcagggtaayggtgtacatagcttcttttcaaggagaaagcgtttgagctagccatgaagcacaggccgtagttggaaatg

SEQ ID NO: 578 - DNA, 600 bp, Bovine  MMBT05917
cctgaaggctcctaaactggcctcattctatcattagtagaaatgcctgagtccctttcaacctctgcatgatgttctccaggtatcagacaatcacaggtgaaatccttctttctctaacaactgacagccctcttcttggctgagggaggggaccctgtgcttgccttctcccctctcagggccctctgggcaaagcgcactgcccagcggtgggcagaagccccatgcartttggggatgagcctctgctcygtgtgtaacgtgggcagacacctaaccagcaccaccacrygcatycctctgccctatattttgacctcttcctctcatcgctgctraagtcctgtctggggagcacatttcagtttgcaaagtgccctggaaaacaaatatttgcttgggattgtgatcctgctggatgtcaccatgatggggcctagaaactggggagagaggcgggaaacctgggggcggccaggttccacttaccggcacctccactgactgcatggccaggtcgcatggaggcttcagggcccgtggccgcgtggcgtaccagaaggtggtgagcgccgcgaacgcgccgaagcccatgag

SEQ ID NO: 579 - DNA, 600 bp, Bovine  MMBT06601
ctgatcctgcctgcctcccggctcatctggctggcccccaccsctttctccaagctttgctgcctcaggtcccagagacttttaacagtctgtctttcccctgcatctctgggtcacggaccagcctttgcggcaatcccscccagccagactttgagcctcgacgtcttcttaggccctcccctcagtcaaagctttgcaattaggactccgacctcatcaactgcaactgcatccgaatccccagaaatcgcagctccaggtcctccatcccggggtgaatccaccgcgtttctgggyttcgaatgwtaggcgcctgacaacgcgtacatttcaattatctgtcttctccgtgcgaggctggcgtcagaacctgacagacctgccattggtagccgtgggacccagggcaagttacttaacgtctctgactctcggtttcctcatcgtggaggggattgatacccatagggtggccgcgtggatcgaacgagataaggcagaggctgcgccggcaccttgggttctcttcggtccctctctgcaataggacgtcatacctgcttgtcgatttcccattttttcccccagagcaccctc

SEQ ID NO: 580 - DNA, 600 bp, Bovine  MMBT11175
accatgggaaaatgatgcgaaatcaagttcacagaaatttgactttgatgttcaaattaatgaatctctctccttgaatgtttgcggagttgtgttgtgattgaaaatgattacacaatgactataaaattctgtgaagaggatggaggttaaaatggaaaggattttgctgtacgaccacacttacataaccttttggtgagtgatattcaaacttactacacgctccacactgcatggggtgcagaggtgcagaaaaggcgggcggagggatgtgtgctccttgtcatttaggggctyccagtcaagtgagtgatggctataatggagtcacgaaaagggccctacggggaaaggccytcttcccatgaggggcacttgacacttgtctgaagaatgaggaggagtttgctgattatggtacatggagggttaaaaggtattctagctacacgtttagctgtgagaaaagataccatgttcaaacacagtatgtacttagtatgttagagctcaaggcaaacatgagctggtggccagagatattacggaagggtaggcaggggttggctcttcaaagtcttcattgaatttgttaca

SEQ ID NO: 581 - DNA, 600 bp, Bovine  MMBT09816
cagatggtaagggccagagagatgggactcacactgactttctggcccactgtgcgcttctctctatgctacagagggcttcatcaaacaggtgcagatgttttcaaaggaccgcagaccgaaaagaccaagcctttttcttggttctgtggtttgtgggcggtgggggatgaagagcaaagtctcactgaaaagcttacgtgggaggagaaagaaggattttgaagtggggaccgaactgggcacttggagcatcgaaaaccaaacctctcccaccttgcaagcagcagtttgtgcccyggacctccatttctctacagtcctcctgtgcagactctcgtcgtctgtcccccggtgactgattggtggcatgtttttgatcctaagccatctggcgcacatctggtcacctctctgaacactgagcgtgtggtcagagggcatgaattcctctgagcaagtgtctaagcaaaatgagtcatggaagcaaatcctcatcaaaaatagttaagccccggtgacaaaggccaggcacccaagaaaagattaggcgcctctgccgggctgtgttctgagagcagttttatgcttcctttcctc

SEQ ID NO: 582 - DNA, 600 bp, Bovine  MMBT05982
atgggcacaaatggtggaaacaatgttttaaagcagaggaccagaagatcagatgtcctgacattctcatttcacagttcaaaaaggatgtatttaatagaaacacagcatgatcacaattggtttcttttggtccatggaaagcagaagtcaccacccacccccacccccaatttattaatcacttaactcccaaacaggctatgctttaatgtatatttaaaagatagttatgcaaagagtactaattagtaaataacaaatagctagcttgggggtgtaataaacactgaagacagyttgcgtcaaatacttgtatactaaatttaatgactgacatcagaacctttgaacttgcctcaaactaagatcacactgtggtaaagtgtttttcagaagagcwgtgaagtttctgatcatggtagtgatgacagcagcatttattaagtgctgtgtgcagtgggtgctaagtacctcacttgcattatttctcttgattctatgagtcagatcaattcacagaagaggaaaccgaggcccagagaagtggagaaacttgctcaaacacctacctggctagtgaatggctgagcgggaatt

SEQ ID NO: 583 - DNA, 600 bp, Bovine  MMBT08842
agataattcaattgaaatgtataactgatgctggagtgtagatgcattctctctttctsyctcccayatacacatatgcatgtacaarctttctctgaaccaaactgaattccatcctagctcagctataaagccaagaagtagagtttacccaacttgacaaaattaaggagagaaggctccaaaccagtacagagtattgaaagttaactgtactgccactgagatgattcagagaaatagtgaatgacagggggatattattatcattgcttctcttyaaagaaaatgtaygtttaygcatgcacacgagtgtgagtgccacctatgtagccatgggatctgcctgtgccaaaagaaaagatcctttggtttagctgttgccttcagtcaacggctccagccctatccaatctccattcctccatcttttcccctttctatttcacaagttgctacagagagaaaaaataaagctcctattgtaatttttactcaagcatagtttgatttccaggggccctgggagaggaatggcaagctatggagggataaaggaggtagaaagaagggaaatagcaagtctatgccaagtctatt

SEQ ID NO: 584 - DNA, 600 bp, Bovine  MMBT08858
ccagtttgagaagcatcagtgtaataatttaaagacaaatgaaatactatttaagaaatatcccccttttttaaagatatgtggtcattctcattatatattgacataaaaatgtaatggagtaatgaaatattagcaaatagaaagttcataataaagagacatattaaaaagaatgaagattttactgagatgtgtagttgtgatgcagtgacagaatgcataagagagaagaggatagtgtgatatgtaccttccaagattttaatgagattcatgaagtgttctatgtaataagaygtatatgttaaaaatctgcaatgaagtgaatatgtgagatggtttaatgagctgtctcaggaagtgtcccgtaagatgggcatccttcagggctgaaatgagatgggtgaaaggaaaagtgtaatgagctggtcacataaaggagaggccgtataattagatgtataaaagaaggaagggagagtatataaattttccaaatatgtaagatataatgggaactaggttttaatgtaataagatgcagaaatgaaatgacaatgaaatacaaaaacagaatggtgtaatgggatatgtaag

SEQ ID NO: 585 - DNA, 600 bp, Bovine  MMBT08821
gctttcctggcaaacgaacaagtctgtctttctaacaaaaataagcaagcagccaaatgcgcaggagacacagggttgaaaatagctcaagatagaggccagctcactcgtattagagacctggccttcgtctcagggcggacgtcatcatcattacgtgttggaatttagctagaaggtggattcttctctttcaactgtcagagctttgggaacagatggctctcttcctcaggggcacttggtggctgattggcagtgtgaggcagaaacaggcagaactgcagaaaaatcctatayattggaccctagcagccttttttatttggattattttcctctgagtgatgacagcagaaaccacgcaaatgcagaaacccatccagaggagattttrcaagatgtatgaaaagtctactagaaagccatcattatcttccacttgaayggggaggagccccacatatagctgtgtcttgttgaaatggccctgacctgtcacgtttagagtgacccaagtctatagtccggagaaggcaatggcaccccgctctagtactcttgcctggaaaatcccatgggacagggaagcctggtggg

SEQ ID NO: 586 - DNA, 600 bp, Bovine  MMBT08047
agtggttttttttgggggggaaggggcacggttaaagcccattccattgttatgattrtaaacatgattatgtttggtttctaagatattgatataattagaaatggtaagctttcacatgtgttgggtttttatcactccagttagactataagctctttgaaatagaaatcttataaatctatcacaccaagtattttgtaaatgctcagaaaatatttattgattgacagattaaagaaagcaaaacacatgaaactcttcttctgtaaacaaatatttattktgcttttgaaatgygccaggcatcattctgttattataattaaaatataatgagatataacattatatattttcaaggtatacattacattgatttaatatagttataaattgcaaaatgactatgaccattccaatagctaacatctccatcacttcacataattatcctttctttgtttaacatcattaaacaaacatttctttgtttaacttgttagtttctttgtttaaacaaacattaaacatttctttgttcaatatcatttctttggttaatatcgagttttttagcaactttcagtatgtttaata

SEQ ID NO: 587 - DNA, 600 bp, Bovine  MMBT08134
ttctaacctttaaaagagtttgtaatgtgttccttagtatctgcttgtcaatctgccaacttctattagtcaagtgtctaggcctaaaactggaaaaaaataaaaataagcccctaaatcagttcacgtgccaaaactgaaaattcacccatgtctgtaaaagaaaacaaaactatacttcaaaagggaatatgttttcaacaaaaatattgtggcaacagtgtttttctttaataaactattttctgttttgagcacattgttctaagccacaagatttccagctacaggaaagctagygtggcattgcagaggggtgattacacatctgaatggatcaacacggggttcaggttcacacgtggaaattgtcacatcaattaaaactgtctcacacatagcagaaattctttgtttgttgaacaaatacatacccgtctaggttggatttgttaggctttgaagctatcattcccaatccaatttatccttatttctgtatatgtgtacgtggtcttttttttaaagcttttagaaaaaaaawatataaaaagggttgagaaatcctgtagctaatgggctgatctactaagagaatta

SEQ ID NO: 588 - DNA, 600 bp, Bovine  MMBT08138
acccatggacagaggagcctggcaggctggagtccatggggtcccagagtgggacacgactgatgcgacttggcatgcacatacatgtggagctgattcactttgctgtacagcagaaactaacacagcattgtaaagcaactctactccaacaaaaattaattaaaaaaaagaatctgtggcttcactaaggagggaagtaaggccagtggaaccttcctgactaatacttgtagcttcaggaaattgaggggcatgggggagagggtcaccttattaaggagcttaaaaaataaacayacsaaatcgcaataattggcttttacatgggggattaggaatactgatttttgcattataaaactgtgtgtttgttcctatggtagctggctgaagcagtgtggggaagacgagaagacagagaagtgatgaagacagttcggtttggaacayagggacggacgggcaggacgagaggacragaagagatgaagcctggtgatgggcaagacacccacttgggaagcaagataaatgrgagcagagaaaaagagaaaacacagtgtcccttgtcacggggaaccgtaaagccaagtggca

SEQ ID NO: 589 - DNA, 600 bp, Bovine  MMBT08142
atcccacatgccatagagcagctaagcttgtgcaccccagagttcaagccccatagcaaaagaagccactgcaaaagtcagtgctctgcaacgaagagtagtccccactcaccgcaactagagaaagcttgcccaaaagcaacaaagattcagggcaacgaaaaatatgaataaataagaatgtgggagaggaaacagagcagaatatctcttgggaacatttgtgatctggcagttcaggcaggtcgattattaatatttattcaccctctaaccttgcccacttctgttcttctctcyccataatttccttatctgaaaaatgtacataataaagaccatccmccctattaggagtgtcttactagtacacacaaaacaatttgcaagttacaaagtggaatataaaattaaagttgtgttactctaattgtatttgatatgaatattatggcataagtttgtaaacataaaattcaactgtctttttcttgtatccattgtttcttgccagaaagcagaaaagccataggtaggagcttttcattcacccaggcagaccttgacactgcatgagctttccaggttatgatgaaggct

SEQ ID NO: 590 - DNA, 600 bp, Bovine  MMBT08776
ttatggttcaagagggagttgtaacatttcttattcatcttctttcctagaattggttttgtgttcattgttaatacagatgatgaggttgatggaaaaaatgatgttggagttgccctttggcgagctttcaattatattgcagaagagaatggtgtatcacaagcgtttatgttcatagtacatgtgagttaatgcactacatatagtttcttcagaatgtagagtgtttttgtgttatcattattactatttgttttaacattttagtttataaaaactgtcatgatagattagtgyacaagatgaatgattcttgcaactctcagcttaagtacacaatattgtccccactttataaacaaggcaactgaggctckgccaaaatctgaatttgtttacgtttacccaactgataaaggaacataaattctatacataaatttagaggaagcatattgatagaaaataattagagaattcttgaactgggttttgaataaaatcatgaatggagaagattatttcaaatttaaatgttctaagtgrcaaaatttataagacttcgtagagattttcaaaggagraaaacttcatggc

SEQ ID NO: 591 - DNA, 600 bp, Bovine  MMBT08788
caaggaagtgaatttctacatgtgtactcccctccctcccctcatgttactgtgtctaggtgcttgaggctccagttgtttttatactgccatgtagtgtgttagagaataattgagaacatcaccagtaatttatgatcataaagcttcatgtaaccattcattatcttccttgtgttcttaagtcttagcaaaaattgagcaattttaatagaaattacattgtccatctccaaaaaacacattgacaacagtttcagaaccatttcttacagtaaatatataactaaaaggagaagyttaactctacccttgtattaactgttattttctgagtcctatattgtttcctcctgtgtatttcttattttgtttaaagccgttagtcattggatccctgctggaaaccgtggtggcttgttccagtagacagacagactgttgtacctgatggtgtctggtgtggggcttctaaatacaagtttcgctctgatgacctaggtcggcttgtattgccattagtgtcagcatggaagctgagaaaaagctgacaaataatctagtgcagagaagaatttcttaaatagatayataattatt

SEQ ID NO: 592 - DNA, 600 bp, Bovine  MMBT06902
agtctttggatcccataaaaccaactggctaaagacttcaatcattgcttttcactttgatatttaattctgagctcaggtcaattttctgctcccgagaagagcaattataaaacacttttcatttacatttgaaaagcatgaaatatcataaccatcagagctcgcctgaaaaatacatgcaatactcattcattcattagttctcccttttattatttcaatagaaaaatataggcaggcactccctacaacataaggtgtaattcaattgtctttagttttcttaacttctcacaytccaaacatctcaatcagtttctccctatacttatttaaaatcaattcagtctctagtagactggggactttattttctgtggaatggattagttcaatgaataaagcacatgcctaagaaagagtagcaattatatcaacatccttactatgaacaatagatcttactgggcacttaggaagtgtcaagctctgtacatgaatcatttcgtttgatcctcacaactcacgaagtagaaacatttcttcctgccattacacagatgtgaaaattgaggcacagaaatgttacgtagttgt

SEQ ID NO: 593 - DNA, 598 bp, Bovine  MMBT06713
  misc_feature (1)..(157): n is a, c, g, or t
nnnnnnnnnnnnnnnnnnnnnnnnnnnnnnnnnnnnnnnnnnnnnnnnnnnnnnnnnnnnnnnnnnnnnnnnnnnnnnnnnnnnnnnnnnnnnnnnnnnnnnnnnnnnnnnnnnnnnnnnnnnnnnnnnnnnnnnnnnnnnnnnnnnnnnnnnnnnntttacatgttttgtttgggtgactctcttgatctaccattctacttgggagagggttaaagctgcaaaccaacccagagaatggaatttcccttctaaacaaggctgccaaatatttatgttttacatgattacattttagcytttgctgatgaagcatatccactgaatttcaccagaacttccagtaaaagtacatggattatggttagcaggatttgggtaagaygtttgggcacatttctcaggttgcagctctctgttgtgtrtgcttgagtaactcttagagactacctgatagaagaggcaggatgaactgactggtacagcctatgtttaaatatcaaccttgatggagctgctttttaattcaaattcaactgagatttaacaactcaacaccttaactaacgaggtgctgtgtataaggttttaagaccta

SEQ ID NO: 594 - DNA, 600 bp, Bovine  MMBT06722
cagcttacacttgttgttctgatgttccatctggcttaggaaaaatcttgtttatttgcttttttcatgtcttaataattcccaatatttgcagtaaattaagtaaggatgtgatatctgttttcctttcagaatcttccacagtcagtctagtgttgtgtgagatgcatatgaaatgaattgagttaagtagctttgcctaattcttcccagataccatgtaactgataacacatattaggraaatatatgtgaaaacacacaggggatttactaaaagtgtgctctgagaacagtagytaaaggctcttcacaacctctagagatgataagagaattatttgctgctgggtgcttttgcaagccatgtatataccagcctgcctcgtcatatcttctgatttgccctagaagatagatcacactatcagactgctagttggtgaactgtgctttgacctgaaagacgtgcagtgttgccagttgatgtggtccctgtgtgtttcgggaaactatagtgtgtatttgcaagatacagtagatatacaggcatgcatcccatacttggagtgcattgtcatttattgtatgatggcagta

SEQ ID NO: 595 - DNA, 601 bp, Bovine  MMBT07732
  misc_feature (1)..(1): n is a, c, g, or t
ncctcagwtaaaaaaaaaaaaagcctgattatatgcagattgaaaatggccaccatgttccagacagaattaattagmaaataattacatttctgaacaagataattaaaaggcagatcctagaaacacctgagatagatgaggtacagtgctcataaggacagaaaactcagtggatctcagacatctttgaaaaaccagagtccagaaaacggaatcgaggcttacatgctcctgggggagaagtttttcgaggtccgattttatacccagccaaattttgatcatgtgcaaaagtaaygcaatgatatctccaaccgtgcaaggactgagatacagtcttttaaagctcatgttgacatatacaccccagctaacagagaaacatgttctcattaaatgctccaggttggggtacttattaaagcacagcttgtgagaggtaagccaattaaatagacagctaaatgtgaatactcaccactagagttctagaaagactgtaaatataagtaaacctttttgaaaccagaggaccacacaccataagaaatgcataccatgaggaatgcatgctacatggctgaaatgagaataaatg

SEQ ID NO: 596 - DNA, 600 bp, Bovine  MMBT08322
tgatttaaggtatgtgggaggttatgtgtgggttatatgcagattctataccattttatgtaagggacttgagcttgtatagattttggtatctgtggtgggggtagggaatgactctcagggacaactgtatattattgcctctaaacactatctttaagtccatttcttcctgaggaacttcctctgttagaaaataaaactgaggtctccggtggtatcaccctaaacatggccatctcatctgatctcagaagctaagcagggttgggtctggttggtacttggatgggagaaaayaaaactggggattacagaccatcttttccccctagaagagtaaattcaaatgttaaaatactcatattttatgtatgttcagctttgtttagaattgttgttcagtttctcagtcatgtctgactctttgcaaccccatgaactgcagcacaccaagcttctatttaaaactagcttttaagtaaacaataaaggtaatatgtgaaaattacatacaggtataaagaatttcaaactgtacggagaggtataaaatgaaaagaaattctttcccctcatccagttcccttcccaattaac

SEQ ID NO: 597 - DNA, 600 bp, Bovine  MMBT06733
ttccctagctttgcttgtagtaatgctccccagggcccatttgacttcccactccaggacatctgggtcttggtgaatgaccacaccattgtggttctccaggtcattaagaccttctgtgtagttctttgtattctttccgccacttcctagtctgtctcttgataactgtatttctgaagacgtggccctagtattccaaagtcagttcttggcaattgccagaagtgtggcacgagatttccaagtagcctttctatctgggactcttttaatgtcatcccactttctcttatttcygtttctcagaatttgagactcaatgattggacgtttagcaaacattcaactgagggaacatcacactggaagcttccagctgagaatggaaaatgtagagcatgagctactgatattactggagcttccactttacctgcaaggcttactttcctccttctgtaggtaagcagaaatccatagcgacttttcaagatactctttctgccagaaccaaattcgtaattcttacatcagcagatttcattataattgcatctgcacttattagaaaaaagtctttacatctgtgctcaggag

SEQ ID NO: 598 - DNA, 600 bp, Bovine  MMBT09907
gggaaaaccagggcatctcccctctcctctgaggcacctggttctaccctgggggtccttgttgacccccagttcctgtgtcttgtagagagctttggctcatgtctgtgggcgtattgacttccttttgtccatgctgagcagtggcacacggtgcccaaggtgggagccactcaagtgctcacccayrgaggattggccagatacaggcacgccgcggggatactgtgggctccrggcagaccgctgaagaaagcragcattgcgttaaagtgagtcacatgaattttttggtttccyactgcatatgagaggtatcttaacacaaatctgtartctgttagggggtaatagttaggtgtctataaaaacaatgtacatgctttaatttaaaaatgctttattgccaaacactgctaaccatcatctgagctttcagcaagtcatartaacatgagccatcactgttcacagatcaccataacacatataataatattgaaaaaaaagtttgaaatgttgcaaagattaccaaaatgtcacacacaaagtgagcaaatgctgctggaaaatggtgctgatttgttcaatgcagggctg

SEQ ID NO: 599 - DNA, 600 bp, Bovine  MMBT10504
tcttcagtaactagaaaaaaaaatcttatgggtataatgaaagtgaatttacaaatcctcaatttttaaaaattgtgttttacttttgcattgagctttgggttggacggaaggagtggttggtggacccctctcacygggcccctgtgagtatagtaacccatctctctctcccacaaatgtgttggaatgagccggggtagctgactccctccaaaagcccctgaaccacgggggctctgtgttgttgcaaatccacccttttgtaggtgtgcatgggggcacataacagtcgcttcyggtgttatgttgagcaggtctaatttaatgttttagacgaaaagattctccagccccattatggtgagaagtgacacgcagtcatgttaagtaaaacgacagggcgtgatgtccttgtgacagcaaggtgactaactgatgctagtactggtgtcctctgagaccctgggagcatcctaaatattggattgaaaggctgcatttggaggccgccagaaccaggctgcactctcccacttcgttgttatttagtcactaagttgtgtctgattctttcacaaccccacggactgcagcctg

SEQ ID NO: 600 - DNA, 600 bp, Bovine  MMBT07734
gacatgaaggcagatccgaacacccactgtgatggtggtccatggagggctgggraggatgggaggcattacgcctccatgccccattcagcagtgaagctctctatggagaccctgatttgattccatttgggagggtgatttttgagaatgtggtcccctggcttccagtgaattaggtctgacttttaactcatttcacctaactcacagtggttttatgggaattaattaggtaaagggctccttagaggtaaagccaatgcaaaagcatgctctttgttttcttttaaataattygaagaagaacatatgatagactgactggtttctctcttcacatcktaaggccagagattagttgaggtaatttgctttatggaaaaataacaaaatgcatttcagkatcatccaggttcccagcaagtttgtcgtggaggtcctttatcacctctccactggggttgatgggtaaatgatgagcagggtagttaagcacatttcccaaactacaaacttcagaaaacagtttacaaggtaattaaytccggagccactgrtttcagccagaaagtccatatttcctgagcagactcatts

SEQ ID NO: 601 - DNA, 600 bp, Bovine  MMBT07352
tttaaccaactggagtgtgttgtttytctttaaaaaaaaaaaaattttgaaaatcaccatcctgaaaaggaatattttattcatgctggtctaagtaatgagggggaaaatattcagtactcaaatggaataaaaaaaaaaaaaaaagtcagcatgaatttccaaagacatctggaaaactggcagaagaattaaaaatacgaaagcaccggtaatcccagctgggctgaaattgccttcctgtggaaaccctgaatagaaaataagcttctaaaaaggcccgctcaatgcattttcttyatatgcgttaccagacctaagactgctttaggaattcccaaagacaatcctctggaaagttcatttacacagtgattccgatttaatcaggggaaggcaaacctacaacgtgtccccagggccccatacgggctttcagttcacgaacgtattcgattctgcattgagaacaagaatccaggcagagatctgacctagaacagaagtcaaatctcaccctcccccaacccctttacccacgacagtcaaagactgagcctcttagcacaccacacctgagaatagggcttcctcactcta

SEQ ID NO: 602 - DNA, 600 bp, Bovine  MMBT08494
aagattcctgtaattttgggatggttacttttcttagtaatttttccttaacccattctcaagtgactatccaacaaactgaagattccaagtgtaaatttcaacatctcttgtttctattaaaccttttctggttttccagtcctttcttcaatttacaacccctcattattgtcttgttaagagtctctggtcacttccttctaatcttccctagtttagtagaaagtcttaattacataattataactttaattttgttttacactatataattcagtcattccaatctactactayaagacacttctccccagcctaaccctcagactaagttttactggaaattttcaagctgctcttaattctctctactgttttcctttaatgggtcaaagtacattttgtacaaaggacagtttgtttctttgctctttttagaaggtgtccctgcattcttgactgagtccttactatcaagagagtgctgttctgtaactggatagcattatcaaagtacaccattaaacagaaggcgaactcttgaaatctttccagttgaatctaacactaggtttctcatattcatgtttcttttct

SEQ ID NO: 603 - DNA, 488 bp, Bovine  MMBT06621
gkgttctaataaaaattagtaagatttacatgctgcctttgaagaagagagttgatttatatatttaacgtgatgtcatttaaaatattaggtgactagacaygaaacacaaagacattaaattaacatacttcactggattatgcaaaacattgaacagtgacaaaagcgtttcagagcaggatttgattattgtggccaaatccagtaatgtatcctggaaaatttgattccaaagatatgcaaaacatgataaactttgcactctgttttatctccagaacaagatatagcagtaayagttgattgtaccttgaygatattggcaagtcacattctggaatgcagacagcagtgctgtccaaatagaaggaattaccaaaaggcaayggaaaaaaatctgaamatataatcttcctcttacataatcttttggataatatatgcaattctaaggtcatgaggaggacacaaggagctgcagaagt

SEQ ID NO: 604 - DNA, 600 bp, Bovine  MMBT11125
ctgcagaattccatggacagaagagcttggtgggctacagtccatggagtcgcaaagagtcggacacaacttgaagcaacttagcatgcacaaaaggagttagacagggctactatgatgtgactggcacagctggaattgaacaatggaagggccctgactttttttatgagcaccctggtttctaggatactctaactgcttctgcttttgaggtttatggagcagaaaaggaacaaaggggaaattagtggaaataatttttatttggaatccaagcacatgtaatgtgtataaaayaatctattcaggcatacctcattttattgcactttgctttattttacttcaaatttatcrtttttttytttttaaarcaattgaaagtttgtggcacccctgcatcaagcaagtcatttttccaatagcatttgctcacttcatgtttctgtatcacattttggcaatatttcaaaccttttcattattgttatgtttgttatggtgatctgtgatcagtaatctttgatgttagtattacaaaaagattatgactcatggaaggttcagataatggctagcattttttagcaataaagc

SEQ ID NO: 605 - DNA, 600 bp, Bovine  MMBT08321
tacttagctactattaaattaaaacactaattaaagcactcagcattagtttttaactgataaatcaggtgcaaatattaccaacctttaaattgtacgatttctccattctgagtttttggcaatccctttagacaaacctcactggtaagagctaaggcaataccacagcttcctagcaagaagccaatctgctgccccccagcatcctgtggagaaaagataatgaacatggtaggggagcgaacrtgagcatacccaagcccaaaatctgacacttagtaatgctctggcacttgygcaatacattcatgaaatccccctgatatctggcaactgtcaaaatctagtgacaatatgttcttccaaataactgctacagcacaatgatttcctgagtgcaaaccatgtttcattaatctgacgctgctaacgatgaattccaccagccaaatgtggccattttactcaaaggtcagcaatgctcctcttctaaattaatctcaggaaatgaaataaaagtgaacatggttaagttgtcctgacctagccataacctcaaatccaaaaagaaagcaattcaggtcagaacaaaataaa

SEQ ID NO: 606 - DNA, 600 bp, Bovine  MMBT08483
acccagtgatgctgggattatcacctgcctgtatgttacagacaggaacagtggaactttaagaaatgacagagtttcttgcctaatgtagagcaatcagaaagtgtcagagagtggatgtcatgctgcttgtgccaactcaagagttcgatcttcccaggagggaacatgaagaaacagccgagagaggtggctcaatccaatccagtaaaaacggtggcgcatgaaagtccaggatgaatttgtcaggtgtggctctgtgagtgtcttggtaaagagaatgcactggctgcccaaagyggtttcctttgctttccttgtcttttttttcaagattttwtttttttttgatgtgaaccattttaaaagtctttattgaatttgttacaatattgctttttctttcttttctttctttttaaaatgttttggtttagtggctgcgaggcacgtggaatcttagctcccagaacagggattgaaacagcaccccctgccctgggaggtgaagccttaatccctggaccgccaggcaagtcccttccttgtctttacagaccaacagagcacccagcagagataaaactcactatgtaccaa

SEQ ID NO: 607 - DNA, 600 bp, Bovine  MMBT11172
tttggaagtgttctctcatagtacatcttgtaacatctaatcaatytctttattttccaatcagagaaccctgagtccatattcaaatacatcttcactccctttaggtatggacaatgtaaagaactctgtgtgtgtggcggcaggcggggggagaaggaagrtgatcccaggatcagtctcaaaggggctaaatctaatacttcataaatttttayactgctgtcattcattctaagtactggaactgtgcctactaatgatttctattctactaatacctataagtctttctagtaygcatttggctcccaatactttgagtggataatttgctgtaaaatctggcctcatggtccaaaataaagamatttaacaagaagaaaggtagtgctgagggscagttaactttcctgtaggttctactgccccggctctaggacagaagccactttagctctggagctcagcattcgaaggtgccctcttgtggtgtgggtaggaactgaacaccctacaatcctcgagctggcttgaggtataaatccagattaagttactgtttaacagccaacaagagaaacatagctgaactccaag

SEQ ID NO: 608 - DNA, 600 bp, Bovine  MMBT07346
aaagacgtggtatatatatacaatggaatacaactcagccacagttaagccgactggcctccgtaaagccccacttccaaatctcatcaccctggagaccagagcttcaacatatgaactgggtgggggacacaaacattcagtctggagcagacagagaagttgttttcaggctttttccccttcacgcccctcaccaggcagtcgcttcttgagcctatgtgagggagtccacagtcatgaactgcagagcgaggtactccttagatgctacctaaaacgtggtggaattccctctcyggctccccctccaatctcaggctataatcaccattttctagatagttgaagaaactcgatagagataaatgaaatgcccttttcaatttacttgactggaagagacaggaataggaacctcttcttctgatggctcttctctgtctccccagctgacttgagaagatgaccckgagcacaaaaaagccaaaacaatcccttctccttctacccttcagggaatagactggaaaaaccctacgacatcatgggagccttcctgggagcagagaaaacagaattcttgccatagctcgcctt

SEQ ID NO: 609 - DNA, 600 bp, Bovine  MMBT10409
agtgaaatcagcattaaaagcacctatatcggttccaaatctctctctttggaaagcagaatcgccagcacagacctatacacagtctttgaatatttggaaagagccatcattaactgagtttttcccccatgagatggagtggttagtctgtgtccacccaatttcaaaacaacttgtcaacgtggtagggacaaaaaaaatcccagtactaaccatctagttgattgagggaaaaattatcagtcagccctttgtcatttaatccaaacaaatggttgactaagtaaatctactttytaattagttacacttatattgcatagtcactgtgtcaggcaagggttttagtagcaaaacaaaaggctgtgaagatttttaaggagatatttctattaaatcctctttggaacccacacaaaggtgaaaacacatggctgtgtatttatcttagttcacggttattggaaggagaaattaactaattatgggtgtaggaatctctctggggggaaaaaattactgaagcgttttcaacaacatatttagtcacaaccaaactggctccttataacaagtcacacaaatatattgcattta

SEQ ID NO: 610 - DNA, 598 bp, Bovine  MMBT08935
  misc_feature (1)..(155): n is a, c, g, or t
nnnnnnnnnnnnnnnnnnnnnnnnnnnnnnnnnnnnnnnnnnnnnnnnnnnnnnnnnnnnnnnnnnnnnnnnnnnnnnnnnnnnnnnnnnnnnnnnnnnnnnnnnnnnnnnnnnnnnnnnnnnnnnnnnnnnnnnnnnnnnnnnnnnnnnnnnnnttaagatcaaatatgctttttattgtgtttgacttcgcttgggctagtgactccagagaagggtatgtcgttgaacagagcagggacattcagaagcaagttcacaaccctgcaagactcctaacttttctctcttctaacaaaygtcaaaatacagctatttaccaagtgaaaggtaaaactccctttacgccagaccaataaacagtttccccaaatgtcagcttactacttattgtttctttacttatctttcccacatcccaaaggaaaagttttacttcacaggagacctcaactgaatgctttcccttgagcatgacatactcattcctctgtgtcctctaagaaaagaagagcaaaccaattttgctattctccaaagtaatttattttatacactgtaaatcatycatttattttaatatagacttgtttttttc

SEQ ID NO: 611 - DNA, 600 bp, Bovine  MMBT08759
gtttttttttttttttttccctgtgtctttcaaggcacatgttgtcctttcctttcttttttttaagatttttggtttcttgatgaggaccatttttaaagtcattatgaatttgctacaatattgcttctgttttatgttttgatttcttggctgtgagaaacatgtgggatcttaactccccagccagggggcaaaccctcaccctgtgcattggaaggcaaagccttaaccactggaccttcaaggaagtccctaggcacaccattgtcttaaaggactttccttggttacttctcyctgggtgatcataaacttatttcccagtaattcctgttcatttgctgaagactttagcatttgttctttttactctctatccctgctcttaacatcattcttgataataggaataaatatggtaaatccaccaaacaattamayctaacactttaataatgcttacaatatgatgggcacagttaagaagtctgttaataaagtcatttaatcattgcagtaatttatatagtagaaactatcattatctccattgataactccaatgataactatcattatctccayggatatggaaat

SEQ ID NO: 612 - DNA, 600 bp, Bovine  MMBT08946
attataagttatttactactctctagtaatattgaagaataatgtatrtgattgggaaaataccaagggaatgataaaagagarctatggactggcagagtgacttgcttcccattaagaagcagcacagggaagrgtgcaaactgtctggtgtatgttgttatatcaagaagaagtagaagatttggctagaatgtaggatctatgttggaataaaaatgtcccaaagtccattttcctaagctttaagaaataataatagtaataactggcatttattaagtgcttactatatattcygggtacttttcaagcatgatctccatcttcaactcttagatgytgtcattcccattcctacacacmaggatgctggagctcaaagaagtccctgagtttgcctaagtcacacagctgttgtggcatagccagcggtcctgccactgactactctataaaactgcctgatgaaagcatttttcagtttatataattcttctacatccattgataatagatatgcaattaggtgggtggtacaaaatttccaaggtatgtggcactgaaatctagtctatgccactagctgagcctgagcca

SEQ ID NO: 613 - DNA, 600 bp, Bovine  MMBT08053
attatgcttcttattactctgtgatcaaactgtaatatattttctaaagtgaataattgcccctctccataatgggctcaaaaacataatgcctttcagagggtttggtctttgacagactatttttggcagtccttagagtttcacatttcttaatttttgattaaatcctaatcaacctgatttccttcactatttcttcttccataactgtgtttctttctgccatctgtttttcatcctcatttagatcatcaaggcaaataatcaaattaaaaggacactgtcaatgtatttttytctcatatctaaaatctattttactgactcttatttagggtttgaagcatgattataaaatatattttccctttagtgatacagatataaatattacagcttagaaaaaawttttttgtaataatggaaaattaytcaggctatattaatacttttatttaaaatactgttttaaatacttaaaaattcaaaaacatccatgaaaattataccagatcaaatttcagtcctatgcaccttgacagagtccctgtttctgtttagagcttggttttcattcctcaagtctgstctttaaga

SEQ ID NO: 614 - DNA, 600 bp, Bovine  MMBT08063
tcatgtgttttcctagatactattatctgaaactgagatcagaatcatttctatgcataattttgggccacataattattttgaaaaggttaggtacatttcaaatacaatttttgcaaacaaagtgacactgtcattgtgtgtagaaattttatctttctaggcttgttttaattcatattttacttgggtgattaagtaaaaagattttgtgtttcaaagaacattgtcttgtggttttattttacaaactacatttttaaattaaagcacaacagatggaagcttcgttgcttaaayaagcatctatactytaatgcaaaaactcagaattaaagttttgacaaataacttaggaatcttccaaaaaatcttgattttcttcttagccacaatgtactcacattgacagatttttctttctacaataaaatgaagcaagagattcctaatatctgcatccaacctatctttacttccttctaatgtaagggcaaaaccatatgtctcttcagcttcaaatgattattcaacctatcagctatgtcacagattttaacagatgctggtggtagaatttttgttccagtttctcaatca

SEQ ID NO: 615 - DNA, 600 bp, Bovine  MMBT10433
ttgactatctttcatgtacataagactgtcttaagcaaatgcttcctggctatttttactaaagtattccaaatgtaaatattgcttttactttcataatatccacatgtttgtttaaataaaaaataataatattttaaattaacaacaggggagacatatagaatgtttcctgatcccatcactactgagagtggctaaaattgatccttcagttatacatagttttcttattctttggcttccagccactgcttcaatatctccaggcaatttatactctttaaatagcatgagatycccaatatttgcatgaagtgacagaaagaaagagacttcaatttgtatcaattcacctacaaatactagttctataactttgaggatatttccaaactatttccatttcctcttgtgaaatgagaaaagyaatatcttattattgcaagaaagaaataaaatgcatataacttgtctgatacacagtagaaaygcttaataaatgtaacgtccctttccaactctacgtagtgtgcctttcagtcttgcttaaaaggggttaatcaagaaaaataatcgagctgaaaaggaactctgaaa

SEQ ID NO: 616 - DNA, 600 bp, Bovine  MMBT08091
taagaacaacgcaagctcttacctcctgcaagttcagtgcagtatatgactagggaaggggaggtgagaggtgagggggaaaaaaatttagttcatgttagcacatatgtgccaaatgtaaaaaccgatttgaacaataccatctatcttatataattcattgttattacaacctcacacatattttgttcaacacttaacctcayttaataccccaaagtcacagaattctttatttcctcagtgaatcttycttttgattaggcatattatttctagrtaagtctatgtagyaaaatyagacaaagtgatgaacatttacacagacaatgagaagtgagcagccctggagatgactattcaccacccatcacttccatatatttgtgaaatataacagcacatcccagaacgtaaacactcatttctcccaaggccacacagagaccatagcatgcagtgtgtctgtgatacaaacaggctgkttttttttttaccactggtgcaagcagtcccattattcragccctaagcagctgccatggcaagaaaaggtgagaaggaaagcatttacccttctcagcatctccacgatgtttt

SEQ ID NO: 617 - DNA, 600 bp, Bovine  MMBT09506
ctcctccatattttgttttgtttgtttcctcctccatattgttcttcattcatgagacaatccaatayatgcaattgtaccctagcttttattatcatatattatatcctggtgctattttcctatatgtatgtaaatatrtatttttaaacaatcatttagtattccatcaacttatttaactagctcccaataagctaatttagattacataatttttttctaatgaaaaaattctgtgcaatgaatattcttaagcatatcttctgacatagttctgtgagtatatatccacagttytgtgattatatagcagtcagatatttttagtcaagaatcctatgcattgtttaaaattcctgcagatattgccaaatgtccttctaaagagcttgcatcaattcaccctctcgccaccagactgtgaccactgctttttactgtgtctgctaactttcacattcatgtcacccggtgatcccacsaawgttatgawgcaggttcaatatgggtgtcacccttgtttctagcatgaatcaaggctatgacccagatgttctgattctaagtacagaacgttttctcggacaaattaaagat

SEQ ID NO: 618 - DNA, 600 bp, Bovine  MMBT07416
tgttattgctgagataataggctatgtcaatatctactcatgttattgtaactgggaaataagatgggggagtgctgctgtgtgtctcagtatggaggaaaaccaaatgttaattttcatagtgtcatgtttggtttaaattatctattctaaaataaaggcatgtattcaccttcaatgtaatgaattcatttgctatccagccacagatgatttctatcaaatttctctccaaaccaattttatttgataggacacagaagaacaaaaacagtccacaacttaccagttgataaatayattgaaattcactaaaagagagtgttgatgaaatctttatattaaaaaaaaaaaaaaaaagagcatctctgtgacaacctagagaggtgggatggagtgggaggtgggagggaggttcaagaaagaggggacatatgtatacctatggctgattcatattgatatatggcagaaaagaatacaatactgtaaagcaattatcctacaattaaaaataaataattttttaaaaaagaaaaaagcatcataataaacttgggaaaattaatatcatgtgttagttgctcagtcatgttgact

SEQ ID NO: 619 - DNA, 600 bp, Bovine  MMBT07466
cagagagtcaaaaaatagaaagaggtcaccatactgttttctttaggtcagctagtaaagatctgctttctgattttatgcaaatatattgatatttgttctagctacagcagaagaaagggtcgaaattacagtcctcctgggggttataatcagtatagcagttagaatactgctttcaactgttctaacaacaaaatgtaacagtggaaaatgaggtggaaatttattttctcttcacttaaccatctgagaataagcagtcaaggaatgatttgattatcaggtactatcatggaytcaggcaaatagtggggtgataggttgcctgttcttctctgactagtgttaagccaataccccaagcttctagtttgcttattatcttaaaatacagccagaaatttaaaaaaagaaaaacagagactgggaattatgcatgccaatgtactgtgaaattcatgtgggtggatcagttttttcagtgcttataagtacttataagatacaggatatggctctggaagtccatccaaagagagagagtggtctttattggctacatttgacaactcagcaggtatgaaaaagcaaaaggaa

SEQ ID NO: 620 - DNA, 600 bp, Bovine  MMBT09832
agtatgttaccatattcagaattttttaagaatataaagaggttctgagaccaaaatgtctgagaaccyttgctgtctgggttatttgctgtcactactgttgcagtgtttccagctgactgctacatctttcttcctttgtatcttaccaagaccttagacttctttcmcaggagaaaagtgaactttttcttaaatatcagatgcgcacagttgagttaatcaaattcatcagtatagcgcagtatcaccattgttccatgaaaggacctttgtgttttattacagtaagttccctaygcatgaaygagttccattctgagagcgtgtttgtaagtccaatttgtttgtaagtcctacaaagttagcctaggtgcccagctaacacaattggctatatggtagtgtactgtaayaggtttataatacttttcacataaatartatatagaaaacaagcaaacacaaaaaataaagaaaacgtttttaatcttatatacactacctggaaaagtacagtacagtaccagctatatcacaattgcttttatgcttgcttccagacatgctggatttgaaataaagatgctatactactgt

SEQ ID NO: 621 - DNA, 600 bp, Bovine  MMBT07417
aaaagtgagagctaagtttgcctggtgtaaaacatctgtgaacaaattttcatttactgatgatcataaggcagaaactatgacgaattctgggaacttaactataaaacagaagtctgattaatgagtatttgaattttactttcctcttccatctctagttacaaacagtcagtcttatagctgagacccattgaccctcttttcagcaaaataatacttaaaactgcagctgaaaactacactctggaatcagtaaacaacaaaagccaagatgccacagcagctaaggcacatagycagctatttcctttcaaatgtgacagtttaacaagctgcttggctctctcatgcctggtttttattagagaaattcactaaaataaatcaaactagcatttgatcaatggattggggctgggagtggttttttttccttttttacctgatttccactgggctggatcaccttcaagggtgtttcctggaccgccgggctgactgcagtcgagtatgtgtaggcaacctgggggatcaggatggtctgcttgttggcagccagtgctcgcaagcacggaacactgttctggtcagcgatgg

SEQ ID NO: 622 - DNA, 600 bp, Bovine  MMBT09737
tttccttgccctggccctgaacccttgatgagatgtgggaatctgtttccataaaaccaatttatttttccatttatatgattaattgaaatcactaatactctagcctccaggtcataaacactgggtaataaaatcctctctacatctgtccagtgctttagtgttcgctaagcacttttaccaccattatctgatgtgaccctttagaacggtcctgtgagatacacaggaagggattacaatggtcagtttagagcccgagtgttgccaatggttacaggtagccgggagcagagygggaactgaagctagttcttatattcttaagtttagttctcttgtcaggtaaacagatgagcaggttgacccaggactcaggggcttcacaggatctgggacttttagctttaaaactgagaatgtccaggcaaagctgagaagaattggccaccccatttgaggaccccagggtgtctctcgtgatggaggcctgtcactcccaccaggttcaactgaggaaaatgtcctatcacctggcacargtgaggcaaacgctgtgcctggaccatgtaccatgatgtggctggagaagagcca

SEQ ID NO: 623 - DNA, 600 bp, Bovine  MMBT09680
taacaatgagataaagaatcaaggatcttttctcttctccttagttccaggcaccatgaagaattgacttcattttctaatcacaactcttttccagccccctcctcattctacacccacccacatgagcagctcaggggtgaacagaaattttcagatgtttgataatacatgtcctacttcatttcatgatgcagtcacgactgaagatatatatttagaaatatgtaatcaccccaccggaagggttagcaccccaggcatctgaaatatactatttctttcgaaatcaagaggctyatagccgaggactaaagtgaatgccaagccctaagaattctcgcaatcacacacacaaaaaaagagctgagaatgtgtgctttctgcagctttccttgttctgcccacctgtttcctggggtggaaaatgtacagttacactctatagattattataattaagtggtgtgcgaaattcgtttctttaaaaatagcttcatcgactcttcacggcgtatttctgtgagacaagtctacgtgaaaagcaagtgaggatggttattgttcagcacgtttaattaagtaagtatttctttcacc

SEQ ID NO: 624 - DNA, 600 bp, Bovine  MMBT07399
agggttgagcaacacggtgagtgagaaggagagaagttgaaagaagctgcaaaacttggcagagatgatacttgattggccttaaaagattaagtatcaataggatgtaactaactaaagccataggaggtgacattccaggaagaggaaatagcaccaggagacccaagatcatgagaakagaattttctgagaactaaacagactttggtgtgatgaaaagtggttcaggaaactgacaggactccagcctgggatctagtgtggggacaccatgagccataccccacagtttggaaytttggaggcaaaaggaagaggagagatctgtaagcagaactagaaaataactatgatacccggtggaggatgaaatggaaaccaagtatcargtaagacaatatatccagattaaaataataatagcagtttttattattaaaggactctgaatcaggattgtggtttaggagtttcaaacaacataaccccctgagctgagcatcgctgtgactggtgagagagtatcctgcttaccaagggtgttggaacaaataggctgaaagctgccatgggagccacagtgtatcttccctgcag

SEQ ID NO: 625 - DNA, 600 bp, Bovine  MMBT11042
gtttctgcaaaaacaactgagggatgtgcatcagacatgggtttccaggtccttcaggaaggaactataggtcctgcagctcggctatttggctgatctagcgtttaaattgttacgagctctcccgccggactgctgttctttgtctctgcgtggtctctctcctctgatcattaacccttgggccagactttctgaaattcagggaaggttcaggagactgaaggttttatttaagcgagaggtgaggaacaagctggggttggttactgagaaaagctggtctggtgattgatcggyttcaccatgtgtcgcgagctttcatagggtaagaaagtgaaagaaaatattttgattttggaagatggtgctttaaagtgagattctttgggggagaaaaatcctgaatctcatttgaagactgtcattagcctcartaacacaggcaaaaatgagtgttgcagggtgtactaaggggagtggtttttttttaaackgtggaatttcagtgagtaaatgctttcctacaaaattcataaatgccacttacaccccaaaccagcaacatttaacttatctgcagctggtyctgtgccatat

SEQ ID NO: 626 - DNA, 600 bp, Bovine  MMBT03112
gacgaggaggctgactggtgcaggcgggcggcctccgcggcggcgtccatgtccacgtcgctgcgagagcggggcacgttctccgccttccgggaccgcttcatctcctcccggcccttcaggctctcagaccggcccaggcgaatctctgagcgtgaactgggtggaaacagcaagagactttggggtctcacatctgaccagctctgacctgctactccatctcagggcctgcctyggcactgcaggcttccactccaaacaccagacccaacgtgcccaaactccccgtggcagacrctgctcagtgacaaaccgcttttactacagactccttcctctccccagctaggcttgatggacagagcctctcatcttcctctttcctttaaaaaaatttttatttatttatcttttgggtgtgctgggtctttgttgctatgtgggctcttctctagttgcggtgtgcatgggcttcttactgtggtggcttgtcttgttgaagagcacgggctctagggcatgcaagcttcagaagcttcagggttgggctcatcacctgtggttcccaggctcaasagtggtggccccgcgggctta

SEQ ID NO: 627 - DNA, 600 bp, Bovine  MMBT04326
ctctgagagccggactccagacctcatcttctacagacacagccaccctgtgtaagcccagggcagtatctccacaggtaaaagaaattgtttttgcaagtctttgtgtcagtgtgcattgaaagcaatttctcattaatagccttataaagtactttagcatttaaacattcagaaccaccatcattctaaaatatactatttatacagtacaaaaaagccaatctgaaaaattgttgatgaaactagggtagaggcagaaaacacctattaggaatattaaagccaatgcttctagaycagtaatgagctatttaggaatttgctggcaacctttgaatagtgtttcattttaacagcaaatgtcaagttagcacttctggctcaaaaagacagtttttaaataggctggctctgagaagttgagaatagcgcaccaggccctggtccayagggtcacaaagagaggggctaaagcaacctagcatgcacaaactcagaatacaccargcaaaacagaaatatatttgtcaagacactggcttgataactaggtccatggagatgcaggaggtgtttttccgtttgttttgtgttgtc

SEQ ID NO: 628 - DNA, 600 bp, Bovine  MMBT03172
aagaatctacctgccaatgcaggagacacaagagtcatgggtttgatccctgggtcagaaagatcccctgaagtaggaaatagcaacccagtctagtattcttgcttggaagtttccatgggcagaggaacctggcagactacagtccatgtggctgcaaagagttgaatacaactgaacaactgagcacrtaatccacatatcatctgctagtctgggaatctctgatttaggaaataccagttcaacattcamgtcttagtgaataatggaaataaaacctatgaagtctttctctcrtttttatgactctactactgtctaacagattttttaaagtactctgaatacttattttktttacatccctgcctttttctatgaaactgaaaaatgctttgaaacaaagagcatatcttatccttaagatatgcttaattcatatctatgaattatcagaatgcttctgataatatgaataataatgcatattattaagatatgcttaaatcatatctatgaattatcgtagttcaatgatgatgctcagatgaatagataagggccagaaaagggactagaaagatctaagagtccttg

SEQ ID NO: 629 - DNA, 600 bp, Bovine  MMBT03273
catcaggattcttaaaatagctctcttattcagaggccttcaggagccctgtgaagtcaacacaggagggggacacaaagagtgctggatccctagagatctcagaagctcttcctctggtcgctggctcaaaaacaagtcactgcaaatgcacgaaagctggttccttaccaagagagatgtattccctcaagatcctaaacttagagaggcctgtgtagacagggttctcttctctctggaaaagcaggaggctaaattttggagcaggcaaggctttctttggcattgtaatgaacrtgttctacatcttacattctcgtagtccaagactccatcccattcactcaaaacattgttgtctcggatgctgaccatacctcgaaaggcattgacatggatgctctgggtcccaacagatccatccagaggatggttgtcactgatgttctggagaagagaaggcagcaaggagaacagtcctaagtccagagttcctgcattgcccgtctctcgcaggtataaaggggtcctcacaaaaaatttgacggaggccaccccagattccctggtggctcagatggtaaagattccacctgc

SEQ ID NO: 630 - DNA, 600 bp, Bovine  MMBT03269
cgtattcagaccattcaatgggtcagactgaccgtgtcagcgggggctctttccttggcaggtcaaagcccgactcccatttttcttcccctcctaactccctctccacctccaggactaccagtaccccaaacctattctgagggaggcaaaaacaaaatgcccaaaagcgcctgatatttacatcacaagggctgggcacttcccgtggcagtgggccagcaggtagaaataaactgggttgtcagtcaagagggttctttatgtcatagaggcaaaactcctaattagggagatgarctttcaactgccagggcaaaagaacgcgtaaggttgtggaccctcttgttttgctagaaaccaagctggaaaccacccctgcttcaaaaccatatcactgacaactctgtattgagactccatcttttcaggccacattctctccttaacctttacttytctcctccttgagtgtttagagatagagtctttgtccccagaatgtacctagactcaaaaatcaaggtcaacgataaccactatctttcaatactgagtcaattctattgtgccttgaaagttgtgtgaatgatcaaagtt

SEQ ID NO: 631 - DNA, 600 bp, Bovine  MMBT03285
gctttttagaattcaaattgtatgcctcttataatatataattatatttctcttttcataatatattcagatcattctccagtaatcagggatgctcaacactgccttaagacacagtaaaatcgccatcactggaggtcaggtgtaaagtgtgcatgatccttaaaaagacagtatttcttgaatgtcttaggaggtagacttaatggtcttgaagacctgctctagtcataacatcctgattctatgggttttttggtaagaacttttaatggcttatacaaatagagttacagatgrtggaatctcaggatggcagggaatatatcttggagcatgaatgsctccaaccaactrcatctttttaarttttacttggawaaactatcaaaatatgacacctgcagccccagagatatgtttattttacagttaacaaaagagaaggcaactgtttctgaaagtgactgttttgcttcaagaatctcaatctaaatgtatgtgtctcatgggaaatggagaaagaatatatgctatggacatctgttttatttttattgcatttttgccttttttcaaaataaaacacatcattggagg

SEQ ID NO: 632 - DNA, 600 bp, Bovine  MMBT03064
tccttctacggctctgacccttctttcttagatttcttggctggctcacatccttcctctagcctgtcaatgttagtgttgcctacgtttctgttgtctcactctttttctttcttcttacgctaaactgtttctggaatctaatccaatcaggtggataccacctatatacatctttattctaattcatctgttgacccccaagaataaagtgtcaatatctactggatattgtcacaggctcttcaaatgacacatatgtttaaaatggagccatggggtcgcaaacatgactgagcractttcactttcactttaatgtctttcatccaaaatgtgattctcctcactttctccattgatgggtttttttgttttttttttttagagttagaaactgaggactttcctaaactctttctgccctggtgttctacgactcaagatactaagacccatcagttctacgctccaagtatccctcagacagcccacttctgtcctcagcacggctgcctgagttcaggctctcatcctctgctgtccagaccaatgccagaacctttccctggcttctttgacccattttgcagccagaga

SEQ ID NO: 633 - DNA, 598 bp, Bovine  MMBT04696
  misc_feature (1)..(30): n is a, c, g, or t
nnnnnnnnnnnnnnnnnnnnnnnnnnnnnnttactcctggctgatgagaattactccaggaatctggatcatagtggaacaggtctttactctcctcctgkgttacatttccatctctgggtgggtccytgggaaccccactcccctgagagttccctcttcagtctctgacccccaggcttgggatttgtttgttactgctcctggaatgttctccagcaagtcctttttccctggtcatcatctcagtcttcagagtggaatttgtcaatgactagcaaggctctcttgctcatatgycatatgtcgttaggctaaaaggccccatcaccattagcaatgagctaaggaggatcacaggattagcagggatagacatctacatcttactccagaaaataaatacaaattcatcaaaaggatgttttatggtggttccccyggcaaatgaccatgcctacaatagcctatctctgatgccagaattttcatcttttggggttaaagtactgtttcatgttaaactaaagactctttccacccatctcattaaattatgatcatatattattctcttaatgkgaatgagtttgtgtgg

SEQ ID NO: 634 - DNA, 600 bp, Bovine  MMBT05340
gcaaccttagctctccaccagacatttccacccggatgtcaaaccctcatttcaaacttaagatgtcgaaaaatgaattaattatcttcaaaaaaaaataggccacacttcctgatttctctatttctatcaaaggtacttttctctcatcataacacctgggacgattctcacaaatgttcagggccctgaaaagtaaaacagacacatggctgaggctggagccagccaccagcctccaatgcacccttaattctttccacggctaacatccctccatccatgggccgatcgcaagtracaggagggaatcacagagtatgcaagcctttaacaattggaaggggcacatctccagctaattataagtcagacttttcccctcccagccaaatctatccttatacgtaaacgggcaagaatctttctttgggtgacttccctggtggtccagtggctaagacaccgagctcccaatgcagggggtctgggttccatccctggtcagggaactagatcccacatgccacaacaaaagatcctgtgtgccacaatgaagacccagtgcaaccaaataaataaaataaaatttaaaaataa

SEQ ID NO: 635 - DNA, 600 bp, Bovine  MMBT04692
caggtacacagaagctggcagccaggctcccaggccttcagaagggggtgattcctccctgtgcccccccttcaacactccgctccaggggagagacgagagaccactcctcctcttcacctggggccatatgtcagcgcgccccagaaatcaacggtagtgctggagtaacgggtgggcaagcatgaaagagggctatgaaactccttccagaaaaaaaaccaagccagtgttctcagaggacgtctccccgcaaggtcggggtggctgcagtgatggcaggaagagtgcccccacacrctyggggatcctcaagtccccagggctgcctgcatttcctgtgtctcagacggtcgtcttmtctcccagggggtcttcctcccacttgcccagatkcccagaaagtggacaaatggcagaggccgggccatcctggccccgctagtgactgccccrgccaggaagactctgccacgagttcctgatggtcacaggccgtctcatccctcgagactggaatgggcccaggsttatattccaaggtctctcagctgaggcaatgtccacctctgggtaggatccttgcactgaaccccactc

SEQ ID NO: 636 - DNA, 600 bp, Bovine  MMBT04221
ttttaaaatattgtctaactgccagctaatttaaagctctaagagcttgttgttgtgtcatttcggaatagagtattaaataatttaaagtgaaatgaatcactaaatgctgaagaactgctgttaaatcttttgtgatataagggtttctttgctagagtcacacatgtaattgtacatttctgtgaaatgctctctgaacattagaggagatattcatgagctgaaattccaaaaacaaatctaatgatttgacagccctgctcaaaagacagcctctcagcatcttagaggtttcartgtactgaacgacagagtcagagggggcctaggaatatcctctgttctctgaccttctgcctcctcctctgtgtctggctgccatcgtcctgtgaccctgacagggtggcaccagcccaccaacggcctctcacctcagtgatctcagtggtgggggcgtgggggcgacactcaggaatccctgaacaagaatgtcagtagaagctcactgtagtggctaacccttgttcttgttctcatggcaattttttttaaggaaaaataatttccaggctctgcagaatggatttgaaatactat

SEQ ID NO: 637 - DNA, 600 bp, Bovine  MMBT04842
gagatgatgctgacgatgaggacacagccacaagactttgaacaatatataatataaactttaagtttaaataagaggtaacaacagaagttaatgagtgaggaacttaatgcaagttacagaagttgcctagtttctgttactttccgggttttaggacgatatacaacagctttgccaaaatcctttcatcgaagaccaattcctatttgccgccaaatcacctggtgaggactacagttcccagaaggcaacgctcggctctcgcgactcagcctcgttagccggccgggagttgtrgtttacaaaagaacgctgtggaacctaagttttactcccttgtcaacagaaactgggcggtatcggtctcttctccctccgggtccgcccttttctgcagcggtcgaattcgtgaacctagtccaggtgcttggctgggcgggaagccgcggccggttggccggcggggcgctctaggccccgcggttttagtctctatgactccgggaggcggtcccgggtgccctgacgcgagcggagggggtgcgggtcagttccgcgcggcgctgtcggggaaccatggcagccccaagaggtgag

SEQ ID NO: 638 - DNA, 600 bp, Bovine  MMBT04529
agcttgcacgctgtcccctcagccccaagtgctcctcattatccatccatccatcccatcgctgtatcccccatgtggtgcccaggaccttggacatcactcagtaggggtatactaaacatcaaatcaatagaagaaatggaaaatattcttaccagatttctttttcccaacatgttccctgtataggaaagaatgggggtgggggaagagtaatgagtcagtatctcttgtgtattgctacaagttattccattaggaaaaggagatttttccctcccacaacatctccagtgaatraaggtaagatccacgtcagccccagggacccagacctccttaaaagaaggaattccttttaattttctccttttgctctggtgccctggggacagcatctgcactctgtagaggagggtgctccagggagttgatgggcaggggtgggtatgcaatctgaaaacaggaggtagacccccacgctrcacggggcctgaggccacctcatcaggctcrggggcggcctcacctaccctgagcagtgccctgagctgaacaactggagcaggaaactcttggtggtgaggsgaatacattgca

SEQ ID NO: 639 - DNA, 600 bp, Bovine  MMBT04610
tctttgcaaacccacagactgtagcctgccaggctcttctgtccatgggattctccaggcaagaatactggagtagattgccattcccttctccaaaggatcttccagactcagggaagagaagaaaattttttaggcagaaaaagacagtcattgtgtttttgaaactcatctttccccattctttaggagaaaaaaacctctcagccagttgcaagttctagatcctgggggaaagcaggagcctagcatgaaagctggaggggacaggcagttttcttagaagggaggccctcatcrcagctgtggatatcggacccatccttgggcaacagtcctggaaaactgagatgcctcatcccttctccctaccctgccccaagccccacactcacgtaccccaggaagttgtgaatctttggctctagtgggctgtggctaagagatcagcagctaggagtgccatctatagagtatcctaatttcacgtactcatcttgtacacccatgtcacaggggaagtagatgccaccagagagccttacggcctattgccattgcaagaaaaacaactcaacctcaggcccttttgggcactgg

SEQ ID NO: 640 - DNA, 600 bp, Bovine  MMBT04588
atttttagaaaaataaataatagggatacattttcctaaatatgtgttcagtttaaaaaaatgctaatcttgaccttcctaatccattatcctcacttctaaaatacaatttgctttggttttatataggtttttccatatgccagataattaaggatcctgccttagcaatttcagagaaatgtgaattaagccttttatgagaccatgtgggtacagtttgaatctactaaagaaggaaattgaacattaagcattaacaccttccttttgctcaaccacaccttccaagggctcacrtacggagaacacttgtgatggggtgccagcttttggtgccgctccgcatagccagctcacatttagggctcctattaacttgaaagagagctccaggtgcattcaagttctgctgaagaaatggaaatttggaagctttattattagcttaggccattttcaactctcacgtgaataagagatggagaaaagttattagaatctatttttttttwaaactactgctcttaggagtgacgtcaaactaaacacaaaggtaggtactgagacaaaggtgtcggggctctttctttctgagtg

SEQ ID NO: 641 - DNA, 598 bp, Bovine  MMBT04327
  misc_feature (1)..(46): n is a, c, g, or t
nnnnnnnnnnnnnnnnnnnnnnnnnnnnnnnnnnnnnnnnnnnnnntgtaaagtccactgtaaagatgttcttattacccgccacggatctccccgtcgctgtagctgaaggctacattcagctgaatgttgatttagcttctcagagaacaacagtagccaatgagcaaatgctgcttgtatgaaactacttaaatataagaaagctgtgtaaaacaggamagcagcgctacctttggttttcctgctaatgactgactcggcgtctgctctggagcctggtactgtgacaagagtggrcagkgctcagagactcctcgtttgactcggagagccgaccacatcctgcaaaatygggtygtaaaaatatgcaaattaaggtcaaacagccccacatcggagatgtaatggctaatctgttcagacagctgcttcttggccattaaattacaaggtgactgagttcatgaagattttcacacacaactaactcctcaaattgtgtctcatactttggctttcatggacaaagctagycagatgagctatggttgtagcagaaagagccaatctgtcgccatttgttttccaatagaca

SEQ ID NO: 642 - DNA, 600 bp, Bovine  MMBT04460
gggagcctgccccttggggctgaaggagaggatgctccatgggctctgccactgacctgctgtggttctgagcatacagcactgccctactctgaccatcagtttcctcctccatcaaagggggaggagttgatcataatgtctaaagggcccttccaggtctgaggtctgaaagactctgcactttcactgctaagggcccagtttgatccctggtcaggaaactatgatcccataagatgtgtggctggaaaaataaaaggaagagggtgccgacttctggggagggagcgtgggaarggactggaattggcaggcagagggtgaatagaactttatcttttatgtactgtgtcccttgtgagagggaggccttctggtttctctccccatctcctgttcctgtcctcccagctggcctggactccagagcacatgtaggatttttttcccttgttccccagagccctccattagttgtcctcaaaacactcttccccaaggagccccaggccctcctatctggcccaactcgtggaagggattggttgaactgaagctcctcccccttctttgtatatcagtgaggaaatcgagccc

SEQ ID NO: 643 - DNA, 600 bp, Bovine  MMBT03482
tagggacctgagatcaattgctggttggagaactaggatcctgcaagtcacatggcaccgccaaaaatgaataaataaaactcaattaaaatttaaaatagtacatctcataagcagtgactcaatctgaacttgacccccaattgtggggagagagaatctttttaggtgaagtgggcaaggaagacttctctaaggagaccgccttcttaaaaaatactggaacaatgagatggtaccaaccatgtgaagggctgtgcatgaggggtgggatggagagtaacccaggcagtgggaacrgagtgtgcaagggtcctgaggtgggaagggccttggcatactttagggatggaaaggtacaggtgaactgcaacaagcaagacaggtgagtagtcctggtgagtttgtaggatgaccagagccagtttcagaggccaaagtatgtcttttgactttttcaaagtgcaataggaagccaggggaggcttttgagtagtggtgtgccatgatcagaagtcagtttcctccagctcctctagcactgactctgtgaataactaccatccgaatttccaagcagcagaggggttgaggagctgg

SEQ ID NO: 644 - DNA, 600 bp, Bovine  MMBT04248
ttcgtgttacactgattctgcaatttttgccccacatgttcatttaagaaactgacctacctataaaagaagctactgtccttaaacttactgcagccacctattatcacatggatactcataatctctcagtagtggcaagaaacattttacctcagtacaaagtagattacatttgcatatttatatctcacaaatccacaatgcattgcatactcataatgcaacttgatgtgaatatgtaaataccaagatatgtaagtatttaaatatcagaaaagatttcacatagaagtagargatatccataatgcaacttactatctgcctaatactacagcacaatccaaaaagttagtgctacctgtcagttggaaatgcccaagaaataagcctttccccaccacactgaagaagcctgagcaggtctagcctgagtagcctggtctctgtcaagagatttccacagcagaagacagaattcaatcagaattcttcctggaaaagcccagtttgcctctaggccatcttaattcrgatgaaactgaactatgatttaaaaagaaaaacacaaatatttatagagttccctactgttat

SEQ ID NO: 645 - DNA, 600 bp, Bovine  MMBT04077
atgagggccaagttgggctgtttcatgtgaatcctgcctataaaagaagcagcttcttccaaatttcgtaagagatcagtgacaagctggaatttttcatttctgggcgcagtgagaagttacatttaaagaaccatcctcatttatgtttcaaaaggaaataggttccggcttgccaccctggtgtgctttgaggctgctgaatgttcttggaactttcatattgacaataatttcatgactgaggaaaggtattttggtcgtttccataactttaatagtttccagccataacctcaraaaggaaggtaaaaaataacaattgggtgtggtggggatgtcgctcctgagtctttgttactgttgagggatgtaggagagggtctgtaaccagttgtcctctcaacccagartctstttgtgtaactgcttgtatatgtcagggcttgatacaatctgcagaggcagaaagaggtttcttytctttctttctctctctcttttttaaaataagatatccagggacttccctagtggtccagtggttaagaatctaccttgaaatgcagaggacgaggctttgatgccctgtcagggaac

SEQ ID NO: 646 - DNA, 600 bp, Bovine  MMBT05253
ctcgactcttcagagctagataaattgagcttcacctaatttgttgtacagagatttttgtgaagcatcaaccaccaccaagtggcagtacagtatctatgacccccctttttaaaaatcaactattattggagtatatttggtttacagtgttgtattagtttctgttgtacagcaaagtgaatcagctatgtgtatacacatatcctctcttatttcttggatttccctcccatttaggtcaccacagttgagttccctgtgctatacagtaggttttcattagttatctattttacrtaagtgtatatatgtctatgatccccctttaaaaaaaaaaaaagagagacaatgcctgctcctatccttgtacattctgttttcatctaactgtcaagtaaggcatatttgtggcttctgaaatggctggattcacttgattcttgaaaagagaatgtcatgacaataagggcttttgtcgataatctcacagccttcacacacagatgatgtgaggagttaggagaaacacgatttcaaatctggtggttcccaaacgacagcagaggattggaggcaggaattaaaaaaggatgggac

SEQ ID NO: 647 - DNA, 600 bp, Bovine  MMBT04836
tctcccartcatgcattttgtgggaggttttccagcattgtgattgaatcagatgttagaaatgaatggggggtttagcacaaaaaccggttgcacactcatgacggccattgttgtagcatcatgagaaattacyaatgactgcaagtctgatttaatgatttacactttcttcatgataaaataggaataacatacataggaatggattgatggggtgacctcgggtattcacttgtatgaatctatttgaaaagattaaatgagggtgaatatcatgctagatgggcaaaattgtcrcattcaggacagctgttttgactgctaagccaaaagtcactgttcagaaacataggaaaaaagaccaaacagagcatgacatatagtctatttaaggggagaaattacagagtaggacttctgcatttaggtgagggagctacccccctagagtaaatgattgctcaggttcctaaaacttaatacccaccatggtcattttctccccagtgatacataccataaacttttaatctgaccataggaattcaatggtgggttgaaaatgaatcaagaaataacaatacataaaatgaacag

SEQ ID NO: 648 - DNA, 600 bp, Bovine  MMBT04557
catcttatcttttcatggaatcttcagtccctgcatataaatggccaatgcttaatttaaatcatttaaagttcccaggtttgttcattttgtttactgtactgtaataacttattaaaaacgtacgtggaattgaacattgttgcacctggtcttaggcattaaatatgttataatgtgggactaaaggcattgtccaaatggccatagtgggttttcttaatttatttttttattgaaggataattgctttacagaaaaccatagtggttttaacatttgctttatttcctcctctaraggaaaggtttttcactgaaaaatccatggagattacttgggataattccccaaagctaccctaaatggttttgacagagtcataatttctctcatgcaaagaatatatgatgcttttacttagaaagtggaagaagaaatgtttgcagttgtactttgaatttttaaaaaattcctataacaattagctcttgattcagaaattataaataaagctattttatcatccagtgtcactgaaacattttgtcctgtgatgttttagtttttattgttcttagagatttaatttttatcttg

SEQ ID NO: 649 - DNA, 598 bp, Bovine  MMBT03577
  misc_feature (1)..(41): n is a, c, g, or t
nnnnnnnnnnnnnnnnnnnnnnnnnnnnnnnnnnnnnnnnntctgatttaccttgaatatgttttactacaatccttgcatataaatcattaataatataattatctgacggtgtatagaagctctactaatattagaacttcaaaatgtattaactctagatacaaattatgcagaaatataaagaatgagattattatcttgttttactttggtaagagacagggttaattttcatgataaatcaaggatttagatgcattaggtttkttggtcattgaaataacaaagggaactgtragttgatctraggcaaaaatagaatccttatttttctcttttaaaaaataaaacaactgcccagtgagaactggttgcaccaatccactatttgtccaattacactttttttttttccccaaaaaaggcaacttcagctctggattgccaaatgatccaaaagaaaggcactttttgaccatgggcatcaacttttagataaggcataaaaccagagtattggtactttccagaagaattgaggcactagatctggtgtcctggccagattgcaattctggtaattgcattctgcttt

SEQ ID NO: 650 - DNA, 600 bp, Bovine  MMBT05078
ggactctttgcgaccccatggaatgtagcccaccaggttcctctgtccatggaattttccaggcaagaatactggaataggctgtcatttcctgcattaggggatcttcctaatctagggattttcaaacctgcgtctctttcatctcttgcattggcaggtggattcttcaccactggcctcacctaggaagccctatctctgccttacttacagttcacatctttaaaatccatatgaacagaccattgaacagtactgaaattgattcagaaattttaaaactcccaacaaacaaaratgcaggactgctttaacacttgaaattctcttctygmaaractagagaggaaaaatgctggttcctcaactctccccattctttgatgtcccctgaccaaaagcatagacatttttttattttaaggattatattactatttaccataagaaacrgaagagaggtaaaacatctttaaaagttacagcgtccggggctctggagcctgtgtctattttgagatggcaacctcagaccctgtgggcatctgtctgtcctgattcctgaggacgcggttcacaaactcctccccttctttc

SEQ ID NO: 651 - DNA, 598 bp, Bovine  MMBT05305
  misc_feature (1)..(232): n is a, c, g, or t
nnnnnnnnnnnnnnnnnnnnnnnnnnnnnnnnnnnnnnnnnnnnnnnnnnnnnnnnnnnnnnnnnnnnnnnnnnnnnnnnnnnnnnnnnnnnnnnnnnnnnnnnnnnnnnnnnnnnnnnnnnnnnnnnnnnnnnnnnnnnnnnnnnnnnnnnnnnnnnnnnnnnnnnnnnnnnnnnnnnnnnnnnnnnnnnnnnnnnnnnnnnnnnnnnnnnnnnnnnnnnnnnnnnnnnnnaaatggattttcagaggtacattagatactaatagagtcatgtataaaaatgaaattttacaactcartattattgattaaaaaagaaaaagaaatgagacaatataagttttattcaaaatatcagttatctgtaagtgatatggcaaaaactaaggggctatttccaagtttttatgagatttataaatcagayttatgaaaatgttattacttccagcttatctttaatcttaatatatttttctccctgaatagtctgataagaaaaagtaatataagttcttgaaagagcaaatatttgaggggattattaatattaaataaaacacatttcccaagtatgtcatcaagatgaaatctaca

SEQ ID NO: 652 - DNA, 600 bp, Bovine  MMBT04864
cattagccktttccatcagtcttgattgctttaaacttatgcttttcatattactctgtttcctggtcaaattttgtccttacttcatgtatagacagatttatcacattttaagaaatttattcatgtggacaaattaactatataagtcagtaaaagtgtgattttttcactattttaattattatttactttgtcccatcatagtctttctacaatcttgaattgatttatttttgccttttactttatttcataatttaagaacaaataaggagataagccacaaagtaggtgacrataaaagatgaagaggaaaaggggcacaaaactcatgttaggagcacagctttggataaaagactctaaggggaattctttgggcactatgctctgacgaaaggagttatgtggtggtgaataattttcccacagatcttttgttccttgatgtatttgatgcacaaataaaaatatgggttgaaagtttgcagaatgtagtttgtgtgtttacaaagggggctgtaaagtgaatgtgctgatgtgtgtgaaaccagacgtgctatagataatgggcactattaggaagatatgttcaga

SEQ ID NO: 653 - DNA, 600 bp, Bovine  MMBT05216
gtttcttctttaacatttttcatcttctgattaaaaaaaagtaaaaatcagctcctttccattagtagtagttttgttccgtatttttaaaattagaaagactacttagatattaagcatgggttccctttggacgctgtgccgtgcgagcatctggactggccaccctctctctttctgagcccgggcactcaaatcgaaagcagcttcctctgcgaatttctgcgttttctggtcgcagatgtgcccttccatgttgcccgtttttgtaaaccaagcatatttttgtcatcgcctccragccctttaatcagctctaagtgttgtcacgggatgaaaggtccatctgtgggtctgtatgtgggtggcaaacggtaagtgaaagggtcagcagaaatattggcagattaggagctgggttaaaaatacttttacgcaaaacagtaacacttgtatattaatatatttattggaaaatcaaagcctttccaaatggtcccatgagaaagaaaagaagtgaaagtttcacggtaaacgtttgtttgggaagcggattaaagacgttttagaggacagtcgaggcaggatttttcagaagaa

SEQ ID NO: 654 - DNA, 600 bp, Bovine  MMBT03704
atgttatttctatgaaaacaaaaatattataaattattctgtatgacaactttttacagaatttgacaaaaatgattcaaattattttaccataaatctatactgaagttatgtatctacattttcagtatataagaatttcgtttaaaaatgatcaatttggtctttataaaagtatttaatttttcacctatagctctgagatagatagtatcaacatttgcaaatatatttttaagctaacagtatatcataggaaagtaccaatacttgcaatcacatagaaaagttacaactgcrtattagtgaagaatgaaagatgagacagaggaaaatcatagaaattttgttatatgtatacataataccttgaacccaagactgggaagaagcagcaagctgggttgatgatcaaggtgatggcagacttttgcttccaagctatttaaacctactgattagtaaaatgctaattttgtggtttcagtttaaccaacaggtttatttaaattctaagaattctctcacataggaaatcaatgttctgttcagttcctctcccaagaaattctaaggagagtttacaacaaagaagtgact

SEQ ID NO: 655 - DNA, 600 bp, Bovine  MMBT05178
aggaagaggagaagctgcgggtcaaacaaaagaaaccatgtctataaagcaaaggactaaagtaggaaaatagcaaacagtgcacatccacagctaggtggctcccaactgacggctcacgggtagcacacttactcactggagacacacacatatgtcccattataaactgggtgctatagaaagggactttatcaggccttgttcctttctcccaaatttccttacaatttagctacaggtaacattcatgggaaggaaaagaggcatttggagaacagtgtaaacaggtcacataartaactgcaatttgactgtatacgacaaagggtaaacattgccaagtgtcttctgaatacactgttgcctttcatttctttggtatgctcccctagtgcttgcgccccccaccacacccccaccccacccattttctttgcattataacaaaacagaagtcaataagctttgacatctagcatatacttttttgagcccacagcatacttttttaaaacaagactgggtaaaaaagggttttcaaggttcttgatgcctctttttaaaatggtgagcttcaaactaggtatttcttagatc

SEQ ID NO: 656 - DNA, 600 bp, Bovine  MMBT05169
atgactaaaggtgaagatttaatcaaatcaggtagtttagggtgtcagtttactcttaacttccccccacagtgtttagggcattaaaataacaacagtgttttgctgctttgagtttttgcagcatattagatcagctttcatcaccatgaactcatctgtgacaaattataagcagtttagtttctgcaagctgatttggctgtgtctttatgacatgttctttgatccataagtttcaaaattaaaaaaaattatttatcctaaattaaatatacatgattcaatttacagactgartttaaaattttttaaatgaaagtttaaatatagcaacaaaattgggggataatactgtaaaaaggaagcttaaaagaagtacctccaaatattttgaaaatataatggagcatctcacttaaaccttatacatcataaatttataatgaatttaaaatcaatattttaaatatcacaggttaatatatttatgaagaatattatgagtaagcatatgaataagcaatgtcagccatctcagtagataccttatataagaatagaaaattaagatacaaaaataattttgatacataatta

SEQ ID NO: 657 - DNA, 600 bp, Bovine  MMBT05075
cattggaaacttatagaaaatgactatttcaaattatatcataaacttccaattttatgacataccttatcctaatcaatcccttgttcttgcaaacttagggttttttttttcccccactatttgagataacagttgagggaacatccttatatataaactctgggtaaatgccccaggcctaatcaacttttattgaattctgtaaaatgtattgaatttagaaagcaagaacatctcatttggatttaaggcttgcctatgttctaaatctgaggtgaccttagattataatgttcratttagttaaagcaagttggagaaagaagaatttatagagtgatttttaaaatctccattcctttggaagcctgttggctccctgaaaaggaattggactgttcctggccagcccagcatttaatcccaacctgtcactagtttctatgaagtgaggtttctattacttcctggattgctctagtctatcagaggtcaccatctccaatttagcctagatgtggatgggaaaataccctgtacagccctagcatccaaagaacattggtgtcaaattcaattactggagaaggagacctt

SEQ ID NO: 658 - DNA, 605 bp, Bovine  MMBT03522
  misc_feature (1)..(5): n is a, c, g, or t
nnnnngtaggctctgggagttggtgatggacagggaggcctggcgtgcttcgattcatggggttgcaaagagtcggacacgactgagcgactgatctgatctgatctgatctgagtgactaatacacacacacacacacctgtgtgcatgtatatgcgtgtgtaggtgaatatgtacatatacacgcgcaaagttgattcttgtttttcgtggcagttatattctataaagtccctggaaacattgaactagcaaatactggaaccattgcttctaggagaaatacaagattaagttcctgtgarcctccagttcattttcatcaactgatcaatatataaccttattttatgtgtatttttgtttaaagacatacacacttttcatacacacagacacamacacacacacacttgataactcaccttgtgcttagaaacagcagacagcacctcaacactacacttggggggcattttaaacagtgaaatcacgaataaaaagcacacaaaaaagcaaaaatgtggcactaaatgtgttgcagaaagaaatgatcacacattaacttctccgtaccccctgccatttttttaaactttttattt

SEQ ID NO: 659 - DNA, 600 bp, Bovine  MMBT03874
tgtttgctttgtggaatgtgttctcagttgtgacagcctcatggacacacctcacctatcgtgagaggaacgtcaagtctaagagtgaagccagacattatgagaaagaggagacccccctgaactcgagatctgaccctgagatagaggaagtaagctctgtctgggaacagaggaattatccacgagacaaccaacgattccacatgtatgactgaagccccactcagccctccagcagatgtactaggacctgagagaattcagtcgtactacttctgtgagccctttatttttcaragagcattttaggctccctgactcaccacagattaaacccataaacaaaataaattgtatcaaaaggaatgtgcattgggggtgatttctcaactgtctgaaaatccctacacattgcagctaaagttctcctgactatgtaggcaggctgcttacttttacacatacacaaaacgtacaattcactgatttcaaggaaagacacacagaacagcttgccataaaaaaggactttgaaatatggggcgtattgggctgcatgtacctttaaggacactgacacagactgaacctggcgac

SEQ ID NO: 660 - DNA, 600 bp, Bovine  MMBT03870
acactatattatttcactgtttttctttactttcttcagctatattaaaaaataaacattctctacacctgcttgaaattttacagttgacttatacaatatcaagatgtactccatacaaggtacaagataatggaggtcataaaatattcttgaaatcttaccagatcagtcattgaaaccactaatctagagtattttccacagcactgagccctcagatcttcctcttcctttcatatatctctttagtctttctcaaatcaataaaakttatagttacatatctcttgtaatagrtaattgcaattactttgcatttagaatgatgtgatggaaactgtaaggttgtatataaaaaacaaaacacgtacatctcgttttactctgtctatgtctttgttgttactattctttatatccttgtactactgactagctgtctgactgtcaatcagcacccagaattgtgaacatttagtaaaaatttgtgctgtatgatctgtttgtaagctggaaaaccagacattctttagaaaaaggtttctttcactcttttgacatggaagttaggcattcttagaaaaatgtatttttcat

SEQ ID NO: 661 - DNA, 600 bp, Bovine  MMBT05361
atctttttcctttccttccccccctactctcaattatggttttgtatgtggtcttattcttcacacttaaatttactagatgtatataatgatagcaatatatttccaaatgtttcatattgatcttctttgctatgtctcttcaactttggtacaaggtaaaaactgcggtcaggtgaccatacacctctggtcaagaaacctaggtwctaaagcagatactctccatgacaaaccaacagctattagaaaagctacctactttcatgtgcccatttgctagcattttgtgtttgtgcrtgaaggagagccaaggcatttaaggaaggcaagtaacctgcagtggatgctgaaggaccagcaccttgtctgccatatgctcagcctaactgcacctctcatcacttgctgaataaccccatgtttgctcctttcagtctttagtcaatgcattcatttagcctagggaagaatctcttctaaataaatcctgccacctgttcagacatactgatgacaaatattacctcctctgggatacccttaaatagactgggctcttactccttggatttttaaaagtagttttatgaatagttc

SEQ ID NO: 662 - DNA, 598 bp, Bovine  MMBT04778
  misc_feature (1)..(110): n is a, c, g, or t
nnnnnnnnnnnnnnnnnnnnnnnnnnnnnnnnnnnnnnnnnnnnnnnnnnnnnnnnnnnnnnnnnnnnnnnnnnnnnnnnnnnnnnnnnnnnnnnnnnnnnnnnnnnnnntatatgaagttctgagaaacaaagactaatgagtactgatgaggaggaaatgatcaacaaaatgcaattctgctgatagatcacatgaaatgaagacataatattgacctttggatttagcaacattaagggcattrgtgacattttcttaatkttatggagagatgaatgtgaactaagyagagaatgrgagaagaattgaagacaayataaatagcaattcttgagggattttactstaaaggagaatagtgaaatgaggctgtatctcctagggggacatttatctttctatctgttaaaatatttagcttgtgtgtgtgtgtatgaaaatacagctattaatataataaataaagggcaatcagccagagaagagactttataagagtcaaaaatgggaatgccaaagacttctcttctaatgtgagacattttaatatggttttggaataactaggttacagtctaaacaagcctgtgtaatg

SEQ ID NO: 663 - DNA, 600 bp, Bovine  MMBT04996
cttaactatagtggaaaagtttgtcaaatgatatttttctattaccaaattttatttttgtttgtttaaaaactcttatatttttaagaaaaatataaaatgattgtacaagcaaccccataacaaccatgcatccaccctccatgtaaactgttgataaagacttttctatgaaaaacaaaacctcttccaaaagattgctttaattttccatgatgatttccatgttctaaggtaatattttatcatgtgttacttggttttaacgaccaatgctaagaaatcactgaaagggaagcrgtgggcagtgatgaacatcaatgcagagagcagataattggtttcagagcctgtccctaagctgccactgaccagctgcatggccaaaatgcatttcaaatttctgggtttcaatttccttatctataaaatttggaaataagaataaatcaactccaaggcttcttgtactctgtgacttattggtggaaatatggtaaattttaaaagattaatcagttgttaaaccgagggaagaagctttgaattttcaaaaggaaaattttctaactggaaaaggaatgcctgtcaagttttcat

SEQ ID NO: 664 - DNA, 600 bp, Bovine  MMBT04997
aatatagtttcaggtgtacaacaaaatgattcagttacatacacacatatgcacgtactgaactggccaaaagttcgttcagtttttctggaagctgttatgggaaaatctgcatgaactttctggccaacccaatgcacacagacacaygtgcacacacacacatacacagacataatctttttcagattcttttcattatgggttattacaagatactgagtatagctccctgtgatatatagtaggtccttgttattaaatatccctgagttccagttttcctcatatataaaatcragataaaaaacagcatctactttataaggttgtatgaagattatgaaaattaaataatacacattaacacattaacattttttaattgaaccatacttgatttacaataktgtgtgcatttcaggagaatatacagaatacttagcacagtgactcacatgagtaagatggctattattatcctatgtacggctattttcatttactttgtattaggatactacctttttctgaaattttttagaaataacctcaaaaggtattcagaaatccactaaaatcctgataatcataaaaggc

SEQ ID NO: 665 - DNA, 600 bp, Bovine  MMBT04628
ttaaatcagaataaaagccaataaaggataactccataaaaaaaagtgtacaaacactaacctaatcaggaagcaaggcataaaggggaaaacatgcagaatcagaaaggccaagaaagaaataatcatcaaaacaggcaaattttaaaagtaagaaactactttgcataaacttatgtaaatgatttgaaaactttaggtaaaacraattaacttctagkaaaatacaaattaggaaaactgatcccagaaaagatatgaagacaaaacacccaatatcagagcagacaatctaaagcrttccttccaccactgagtcttgagagggtagatgattcaaatgctacataaactactccgaaacccagaaaaacaaggaaactatcccatacttttcttcttaaatgaacatgacaataattcagaaattcgacaattaaaccaaaactgcmaccattcccaagaatatgggagcaaaaacgctaaaaaaaacactggcaaaaagactttagcatctgaccaagaagaagcaatagaaaatcatatttattatgtggttttgaatatataaaagagcaaaatagagaacaactgaataaa

SEQ ID NO: 666 - DNA, 600 bp, Bovine  MMBT04230
gatttaaaaaacttagaatactttctctactccaaattcccaaagaggaatttttaaaataacagtgaagagaaagaacaaatttcccttcatttcttcccttggtcagcattcatagtttataaaggcagcattttcacatctttgattattccaagtattcttttcayacaaactactacctaaatgtgataatcagttgtcaacccactttcaaaaggccttgccatatggtatgattttattggtcaattccagagtatatattaacttggaaaaaatgggctgctgctaatgggrtatggaatggaaatgctgtcttttgtcactaaggggactttatgtgtgaagttaatgtacacataaatcaacgctgtaaacamaaacaagagaatatcaaaaatttgttgctatcagttgtcacctatatacagatgacattgaagtttattatattttgagaatttgtttccatattcacctttatatcatcaacaaatatttccatttaggcttaaagaacaaactgtttaataaatcaaaatgaatttgatagatttgtacctgaatactgactctgaaattaaaggacgcttactt

SEQ ID NO: 667 - DNA, 600 bp, Bovine  MMBT04251
ttttgtggttcactgggcaaacataacttgggcactgactgtatctctgcatgtgtttgcaggctcgcttcttgccttttgacttttaaagcactagttgggggaacaggtttctttctgctaactgaatcttgacagatgaactcctccttgtttggaagtattttaatccttgccaaattaatttacctagttgattgactggagttaaaattcaactgcaaaatgagagcagattgttctcttccttgcgacagattcatgtccgttggagtacatcatcttcaacaaatatgaccracrcaggaggtgactctgaggattaacaaggtttggccatgtttatataactttttaagctcttattggaaaagtgctttggggaccataaaatgttgatcttaatctgtgtacgcttagaatcagaattgscttccataagttcaactttttctccaaaggcagtggggattagtaaatcgtgtttccagaaagttcaacctatatttgagaccagtttaaatgatagctgatgtgaattcagttgytccttagaacagagatcctccaactttaggatgtctcgaatcgcctggaggg

SEQ ID NO: 668 - DNA, 600 bp, Bovine  MMBT05081
taatgtatactaatacagggagacctggtgtgctgcagtccatggggtctcaaagagtcggacacgacttggcgactgaacaacaacatggtaatacattagtatctaaatgcagtgcttctcaggggctgttttgcagactaggaaatatttagaaatatctggagacattttcggttgttacaattggggggtgctactgtcatccagggagtagctgccactgtgtacagaacatcttccaacaacaaagaattatttgacccaaaatgtcagtagtgttgagattgagaaaaaccratctataacaatcttagtacaaaggaccaattgatggatgctgatatgctaagaagccaccctctggtaaaaagagactcccaactccacaaagaggaaaataatttaggagaaatagcacctcctgaggaatcaagaaaccttggaatggaagctacaattgcaggtttacagcctaactaacctgcttgtgagaagctgccaaaaaattgttttttgaattgttattttgcacccaaagtgaagatgatatattaaactttttttcactcagcagattatttttacttacttctttta

SEQ ID NO: 669 - DNA, 600 bp, Bovine  MMBT04563
ctgaagggtgtctgagctgcagacacccctttcttccgtcacaggtcatcctggggttcccaactggagatccgggctcaggttatcttggctgggtccaggtcagcagacagctcctgctgacgtcctacggaagcagaggcggaggctgccctcaaccttctcagatctggacagacaggctgcccgcctgagggcttgcttcagccaaaacccagaaagagccttgtcattttgcagtaaacaatgatgcaccttttattgcatttataaatgtccccagaggctattactcaaaargggttcagctaataaatacagaactaataattacctcagttcagagtgctgacgtgtgtaactgccgtcggggtcaagaatgtcccgtttgctcaacctccctggcaccacgacacctgcggttacggagccggggtgcaggctgaggtcaggggtcagggaacaggatgtccttcccgctgggtctgagtgtggtggacaggctgtggctctgtcactgggtccttggggtgtcctttccttgcaggggtgctgggtcctgctgtgggccctggacggatggcagcccccggagctgct

SEQ ID NO: 670 - DNA, 600 bp, Bovine  MMBT05264
tgatgattaggaaataggactggagagcagaaagctgactttaggaaaaagaatatttgttaattggctttaagtgacatctgtgcaattagccctcatgttgaactgatcttaatttcctctgggccacggatttcccatcagaaaaatgggactcatggctcggcccttaagacaaactcattaattaattgactcgtctataacctcaatgtgcaaagtcttgactcagttgtgaagcacttatatctatctgctcattcataaagcacttacaaaaggcatgagggctgtgtgatrtgtgtgcatatgtgagttaaaatgcagcatctacttagccagtggtccccaacgcaggcagtgtattggatactctacaaatcacagtttaaatgatgggggacactgaagaaaaggtatccctttagaagaaataatgaggtctttttgtctaattgctcatttatcacaggattttatctcagtctgccaacctgcaaaaaaggaaaaggcagccacagatttagccttgttcatctacaactttaaccagcatgtgcttctaatgaagccaagactttctgggctggagaatttact

SEQ ID NO: 671 - DNA, 600 bp, Bovine  MMBT04678
ttctagtcacccaactgaagaacctgttcatctgtaaaacactccaatcatagagcataaagattaaaatgaaacaataggagctctaaatagaaattccaacgcagaaggcactagcacctaacctgtcaatttgacagagctcacctgcttagcaaagaaccactacctggccttgttcccttaaaaataaccctcaaagcaaaaaaattaatttttcacatggctaagtttcaatttccagttggccaagcacagcagatgcttggtcatgactctaccccttcattttaaaatccraatagcagaaatacccctatgttctaccactcccaagagatctgcartcactgtaccccacctatttaccacaccaggcactcacccagcttcttgaccagtttcttattcttgttgagttttttcagcgcctcgatgtccatgtgggggatatccacagccttggcctcatcacaatgctgctggtcccccaagacacacacggagaacttggggcggggagtggacttaagcctgcattttgggggggacaggataggtcacatccagccctaagctaccaaggctgaaggtgaaagg

SEQ ID NO: 672 - DNA, 600 bp, Bovine  MMBT04363
ggaagagcttagtgtgcccactaaggttcacactgatgtatgcattttagcaaactgtactgggcactttatgccaggcagtgctcaggagaaaaagatctctgctttcatagaatcacactctagctagcttggactcagggtatctactttttgacttttttctgcccccattatttatttatatagactcttttagtacattgagagtctccccaaataattctatttcatgtttaaaatttctttaaattattccaaatttcactatgccatggatcattgtaaggattaagggcratggagtgagtaaagcaccttacacaaagtttgtgcttagtacatattagctctctttcattttcagaggaaaaagttgagtatcaactcagatcactcagtgattagggctgatgatgggctccacttactgtgcactgttaacctctctaaaacttacttttctcatctctaaaggaaaagtttgaaggaaggcaacccagaaagtcctttgcacaatgactcatcgtcgtatgcatcctaagatactgctcctcccacggggctgatccatcccagtgtgggctagtcccagatggg

SEQ ID NO: 673 - DNA, 543 bp, Bovine  MMBT04916
aagaatccacctgccaatgcaggagacataggtatgattcctgtgttgggaaaatcccctggagaagatatgtttaaaacaagactgatttgaattatgttcttttcacccttaacacactccagtatcccagtgacagaggagcctggcaggctatagtccatggagttgcaaaacttagcaactaaacaacgacaactaggcaaagttgcaaagaaatctcaatatgaacaaataacagggggttttgattgaagcaaaatattcctaattgtaggcagtctttccaaacaatctgcrcatataccactcagccagcttaacaatatataacagtagagtactgaaatggagctgttagtccagtctcctgattgttccagataaagctctccctgaccccatctttgggttgacttcaagtctcttgctcaaggaacactttggaagaacaaaacttacatagtggtaaagattcagcatatgatttgttctttctaaatttctgtcaccttttaatattattgatcaaaatgaataatt

SEQ ID NO: 674 - DNA, 600 bp, Bovine  MMBT04589
tatttaaaattaaatattcagcactttcccagggtttactagaagtaatcatttaactaggatttcatttgctgcttaagtacacacctccctcccccacacctataatttctgtgcacacaaatctacttatattttaacaacctaaatataaactttcctcaaaacactatacccactcagtgcttatttttccatgaatgattaatgacaacaatttacatagaatattctactaaaaatcaccttaaataacaacattgcctgtacaatcccatatctcattgcagtggagagctrtgcttagaataaatgctgctactttaactagttgcaaatcttccaagctgaatctctgaagaaataaaatagttgaaagaaagtatattaataggtatgggtgctgactattttatccctattcccagmagcagcgtcaagtaatcattataaattttccttctagagccagcggactgggttcagatcacaatttagctctatgctcttgggcaatctatttaacttttaagaccctggtttctctgtgttggcacaaggattttaaaaccatagtgcatatatttttaatgcactata

SEQ ID NO: 675 - DNA, 600 bp, Bovine  MMBT04567
tttctgctcgcctgcccaagaggacgtcggcagacacagtggggctcctcaccatcggccggcaacaccatgcctctgttccctgaagagcgcacactgtcttcctttagacacgctgggcattttggaagacgtagagtttcttattcttttaagcacttctaatatttgcagtctcctcagaggaatgactgagytccagtgtttttcctccttctttgcatcttcacctcctaagatagagcttgtccggcagccttgtccaggcagacagtggaaacactgttctcaggggtcccrtcgttataacacttctgttcgtaacactaatcatagtttcaagatctaggactccatttagtcataaagagatcctctaggctgcatagggtagaaatagtagatgtatcaggtgtggtaattattggtcagtcttaacgggcagaatacaactatttttaatgataattaaactagaatagcttcaatgttgctaatggtttacaatatgtagcacacctacatattgtaggtgaatatgaaccagttgttcacgctggtatatcagctacacacagatggggccaaagtggaaacagt

SEQ ID NO: 676 - DNA, 598 bp, Bovine  MMBT04415
  misc_feature (1)..(186): n is a, c, g, or t
nnnnnnnnnnnnnnnnnnnnnnnnnnnnnnnnnnnnnnnnnnnnnnnnnnnnnnnnnnnnnnnnnnnnnnnnnnnnnnnnnnnnnnnnnnnnnnnnnnnnnnnnnnnnnnnnnnnnnnnnnnnnnnnnnnnnnnnnnnnnnnnnnnnnnnnnnnnnnnnnnnnnnnnnnnnnnnnnnnnnnnnnnntgaattctcctctgagaggggtccccgaatgtgagtgtctacacgaggagggggcatggagagggtgatggatcttgagttgggacttacagccagggaaccttcccagcccarttcagacagagactgaaagaatgaatgatttccactatattttaaagaatgtataaagttaaaaaaaaaaaaaaaagaatgttaaggaggtggaaggaagaagtttctacaattcaaaggtttgaagtagtgaaggaaaagggatttggaattaggtaccaatggaggaaaggagaaagagcggtgctacttgcaccttgttttgcaaaaataagatctggagttccttttgagggttaggaaaagtcaattcttccttcccttccccagtgaatgacccatggaatcctgaacttgc

SEQ ID NO: 677 - DNA, 600 bp, Bovine  MMBT02996
ctggggacagggaggtatgggcagggccacttgtccactcccctctggtgggcagcaacatgccacctacaaagcacctccacctatatgacccactgcatcttcagtgaaccgggagaygtggattattacctccatgttacagaggaagcaggttcagagcagttgtataacttgcctgaagtcacatagctgctaagtggcaagatttctaattctgccaagtccaaagcctccttccactcctagctcttgcaatgctcctctggacactcctgaaagtgcttcttctagagctgyggtctaaattaaggctgggaggaaccttaaaatcacctaacccttgggctttctaaaccctgggcctggggagctgtgcaaccttccagatatgcagaccctagtccagggagtctgactcataaatctgaagggacatctgggaatctggtggttttttttttttttggaggcactgtgcagcctgtgggatcttggctccccaactagggatcgaacctgtgccctgtgtggtggaagcacggagtcttaaccactggaccaccctagagaaggggaaggctacccactccagtattc

SEQ ID NO: 678 - DNA, 600 bp, Bovine  MMBT03177
cctgtgtgtcctggcccgatccctggagggtcggagtgcaggcacggggccagggcaggacggccggggccggcaccaaccacggggctcaggaggggccagagagaaggggggccctccagagaaccagcatccctgaatccaggttgcaacccctgacccccatcggaaagtgtttcggttcacggtggttggggggctccgaccgtctctgcggccgcccctgtatatcattaactctccccagttgggggtgtgtgtaaaggggccaggagagaccccggtgacaccctgccgggyccggctcagaaaacaatatccccacgaagacgacaagattaagcacaagagaaaagtgaaaatgctgctggcgattcacacgccctcaggagtgctgtgttaaagcgtgtgaatagtgagctcccctcgtgccccaggcccctgggccgcgcatacctcccggttgctatgactggcttgctatggcctaatcgccgacgagggggaaattcatataaaatatcgagggccattgtgggcctaaygcggcgtgacagtggctcacaaagccagattcattagccccagcaggtaatcagg

SEQ ID NO: 679 - DNA, 600 bp, Bovine  MMBT08569
tctggaaagtgggggcaaaggactgtctaccctctgagaaggattagaaaaatactaygtatttttaaaaaattcagttattgaactatttcctaagaccctgcttcaawttatgttctgtgctatgtgtagctggtacaaaggtgaggcagacatgtccttgcccttaaagactctctctggttgaggacaagtttgggatggaagagtcctttggtaaatggattctgtctacaggagtcactgcagcttttccaaaggtggcaggtacttggctgggtcttgaagtatcagattccrtcatcaactcacaggggcagagggacagtaaaggcagaggaaagacttgcatgtaattttagcagatgtgaatttccaggtggctagaacaagggaaatgaagtgagaggagagggctggcttcagactctgaaggacattacacagctgttcttcaagaaggtgaacagygctgcacacattgccttagaggaatgccctagagaaatatrcatatacaagcctgcaactctctcaatatacacttatttatcttactgtggcaaaatacacgtaacataaaatttaccattttaacca

SEQ ID NO: 680 - DNA, 600 bp, Bovine  MMBT05720
cccgtgactcccttcagctgatgggatgcgggagggagggcaggacagtgccaaggcacggcagcctgagtcaccatataagaggtccagctgctttgcagacaccccatgcaaaggccgatgtcagcagagaagggaaagcgaacactccccctcagcccctgaccgccaagcccagcttgggcactcttgctaaggtgccagtcagacctggagtgaaggaccctggatgcccagcctcatcctaacccgtgcagcttcaagcagaacccagtgaggccagcagaagagcatctgacraggcccatttaaccagagaaacagccccacgtgtcaggtcagggctggacaggccgcagatggctccagtcattcaagggtcccgtctttggggtgccagctcccagagcacagagaataaggagatgcctgtcagtgtaagccactaaatgctggagtggtttccatgtaaccagaatgcagggtgaggcggaaatgggcggtgaagacaaggactcacccagtgacttcgttccagggctgggttctctattttgttcactgggtgtctctgagcagagcctctgccatcttgttaca

SEQ ID NO: 681 - DNA, 600 bp, Bovine  MMBT06465
agtccatggggttgcaaagagtcagagatgactgagcatgcacgcatgcaggcatgcaggtcactaactgcagcccacactcaaggggagccatcctatggggccgtgagctggaggctggggccactgaagatcacctttgacggtcgccacttgtcaaggcctgcctgtctctcaccctcggaggagagcaggacccctccaggctttcttgctgttcagctgtcttcacctggtcttggagatggaggagttgcatgtgcttgcattctaaccctcagctgagagcagagacacacrgggcttttcctgagaacatcttggagcccagaggtgggttgaaggcagtaggagaccaggaaggtctgaggccagccccaaggaaggcccaggaggctggtcacaagcagagacatactcccaaagccttgagacaagtgctgtcggcctgggcycayggttggggattttaagtcctgcagtaatccctataaaatcctatatctttaattatccaacccacagaaactcttaaaatagatgattaaatgggagataattaatgactttccgtgcaaacctgcacgtttgccagtggaa

SEQ ID NO: 682 - DNA, 600 bp, Bovine  MMBT09569
gtctttttggccatgatgcatggcctgtggaatcttaagttccctcacctgggactgaacttgtgcccccttgcaggggaaagtgcaagcasagtctgaaccactgaaccaacagggaagactctagagcttagttttcatatgggaacaaccaacactagagattgagagctgtggggctagatttgggtttaaaatccagctcacctctcagttgtgtggcctcaagtcactggtaaaatttggatatcctcgatttccatgtaaagaccctgcggaatcagaaatgtgtggaagtcrtctaagatgctgcacggcagataggtggcacatacrtgagtgttacaactgtgtcctcacgttttgcctgaaatccaaccctagtctctcctgaatgcttcatrtaagaattgttttctaaaatgttacgtttgtgattaagctgactggccctgaaaatgcagttccaggcttmgcgtggtttaacttatagtttctctattttatgacagtggaagtgatatgcattcagtaaaaatcatacttttgaattttgatctttacctgggccagcgatatccagtacgatattcactactg

SEQ ID NO: 683 - DNA, 600 bp, Bovine  MMBT08104
gggaatgggggcagaagtggctgacggagctgctcctggggtctgggggcagtggaatggagggaaattttattaagcagtttgagctccacactccatatgatctgatgagatraaaaaggagcatcccacccyatcccaggaagatatcccttcccttgcagccacgttcaactaggtcagtccttttgagccctgacagcttgtgctccctacrccccagggaagggttaacagatttgggggcagggcccccctggggaaagtcccctgggaggtgtcccttctttgcttcttcarttgcatcaggcctccaktcgcctttcttctcagagaacatcatggcaagcgtggctgcakttctgacctgggctctggccctcctctcacgtgagtctccaacactgacttctccatggaggtgtgggtggactgttcttcctggaggtgtgggtggactgaggggttcctgagggaggaaacccagcccctgttcacctcctcttcacagtgctttcacccacggaggcacggagaggcttctgggactacttcagccagagcagcggggacaaaggcaaggtggagcagcagcagaag

SEQ ID NO: 684 - DNA, 600 bp, Bovine  MMBT08116
agcagttccatgctgtttattattatttgaaataggctggaaagcaatcagaattggattttcttgaagggagggtggtgaaagagacaaattaagccttcacccctactccgagggttgggtttgtaggaaaaagrgaatgggctggacttgggggggggtccctyccaggggggatccytccctcttcttggacaccagcaactgagggaagacggtccttcctgctgctgagggaacaatgaggggctggtagccgaggtgggctgggacctagcaagactcacagccttctccacrgggagtcaccagagccgctggccctcctcacrgtgggatctagttcccaaggagggtgccaggcagaccttctgcccctgcaaaaacaaagctgcctaattgccttttaatctggggatgtcggtctgctggtgtcggtactgaattgtaaggggagatagtatctttccctttgagtgagaagttatttgatctctgcgtcagaggaaggcctgtgcccagggaagaggtgggacggaagggaaggtggaaggagagagaagagtgagggcctggctcccggccgacctgaggctttat

SEQ ID NO: 685 - DNA, 600 bp, Bovine  MMBT08823
tcctctctgcatctgggacctctcttgtgttaggtttgaatctctcatttgaattctgctggggctcctggtttcgtccggatccatccctgcttcatctgtgtatctgtcaccccttcccacatccattttaatgatcccatttctgccacattttttttttttttttggcactagggctctttgtaatggggcccggagaatattctatttctcctgattaaatatgttagatttttctttttttcagggccttgttgagttcttttaatttcctcctgtttattacttttcttctcratgacgttactatgcctcgagttcctctcctgtgcgtgtgtgtgcgagtgcgcacgcgcctgtgtgtgcgtgcctttaattacttgcaaatgagcacatagggggatgaaagagcccgcggagagaagcgtggctgacttgccagcccctgacttcagtctaagacctcacttcggtccgtgatgaaacatcgtgaatccactcgggtcgccctttcagagcagctttggaaaacagacattgggtttgggggcggggcggggggtggggagcttgtcaaaactgcctgattaagaagct

SEQ ID NO: 686 - DNA, 600 bp, Bovine  MMBT09610
ttgccacgataagtgaaagctgatagcacagttctgtgtttatttatgactttccttccagctatgagaagttttttattcctcttccctcaatcgctgggagctgctgtgaagcaagtgtcttctcarttttatagtagagcaaatggagatgtgaagacatgtaattggctgtctgagcacctagtgagaagactgttgtgtctgtgggtgtaagatgttagctgtgtgactggcaggagcattgtgctaggaggttacagatatgtgcgttctgcttccagttctagcatggagtcrctgagagagaccgggcaggagacattgcctctctcagggtcagttttgtcatccaccggccctcagtgcacaatgaaattctgaacctgcagagggagcagggaaggaaagaggattgagtagcaagagccggtagagcaaatctgagagtttcagctgtgcggatggggagctccagagtagagacggcccgttagaggagcaccttggacagggactgttgggcggtgttgcccccgtcgcatccagcccttggctgggacccacccagcctgaaccctggggtgcgtgctgaagaag

SEQ ID NO: 687 - DNA, 600 bp, Bovine  MMBT06468
gaggtcttagctgcagcacgtgggatctagttccctgactggggctcagactctgggggtgtggagtcttaaccactggaccaccagggaagtcccacaaagttttcttaaacagactaagtcagagaaatttatatacaaagataaatctatcaaagtagatctataatgaacaccaaaatgcttagatgacaaattctcattactagatattactagatatattttgggaatcagtgatgctatctaagcatctcacatgaacttgagcaaactctgggaggtagtggaggacagacrcctgctgcagtccatggggtcgcaaagagttgggcatgagttactgactgaacagcgagaacagcatcttgggaatcggaggaaaacacagacaaactcaaaaagctcaagttagatggcccactaacagtccgttctaggattctccgccctaacaattcacccctcgctgtttggaaaatgccagcctgcattatgacagaagaagaacattactctatttaattttactctagggaaatggatccttgttatctgagaactactgtgacttgtgcccccaacctcccaggacaccaa

SEQ ID NO: 688 - DNA, 600 bp, Bovine  MMBT06409
ctcaggggtgacacgtggctcacggctatgacactggactcacatgctatataacawttccgccaccacctactggacagagctgatctggaatataccatttgatataggccagcagctttcagggatcactcacaaagcttattactattattgaagaaaagtcctatgttttgagagccatcctasgtgacaacagattcagtatgaggatatgaactrggggcgtgttcatatgtgaaacttgactcgctgccttgacagaattaattgcttggctcacacaaccgggcaattccrtgcagaaaaaaaatcagcaagactggctgttcgccttcaytggctagtgagttatatcatagaggcggcctaggccagtctggcaataaaaggttccttctatcagcctggggtggggaactgaaggctgaccagggccgtggttaactctaagccccggcaaagcatccctgacaagcagaatcatcatgagcttagtgaatgccatccatctactaattaagaagccttctgcagcaacagcgagtcgagcatagcagacattccagccaaccttggagcaagcgccctgggagacag

SEQ ID NO: 689 - DNA, 600 bp, Bovine  MMBT10077
gaatggaaccagggtctcctgcattgcaggcgattctttaccaactgagctaccagggaagcccaattctatgtctacacatcagcaataggaaaggtagagatcatgggtgcaaggaaactcctctgtaagatctgtcttagctcttcaatggttaacattgtattgagattccttcacgcatgcctgaaattcatgtccttgtggggcttatttagcttgacggcagttttaggtcaatttcagaaatccccctgagctcctgagaaggctgtggaggtgaactcagctaccggggtrcagcctggttacactgcctttccctccctcgggcccgcctgactcgaggacacaaccacatagcagcttgctccgaatctaaaggtcatgcttcagaaaaaagtatcattgcttcagtattgctttggtgtcttctctgagatctgctcgagagagcatcaaacatcccccaagttagtgaaaggggggggagaagggacagagggatttggcaagtgcatcttatttcctcgttccagcggaagagaaaactgctgctgcttccacctcccactgctaacgggtcccaggggaccaatg

SEQ ID NO: 690 - DNA, 600 bp, Bovine  MMBT10041
tattaaatagtcacaactcctctatggggaaggcaccaaagccaccccttttgacatttgaggaaaccagatctcagagaattaagtaatttgcccaaggccacccagacaataaccaaggtctgtctgactctgtgcacttaaatcatctgcagtaagtctatgattatcaaaagacttcctacatgaggcaggacttacagggataaggagacttgaagaatgaggcaggaggggatggtgatgaccctgggaccaccttaaatttccgatcgacaccgcagtcagagccctaggacrgagcctgtatgtgaggtggctggtgaggggcgctggaatccagtcctccttctgtcatccagagaagagtctccagagaattggcacatgccccatcctgcaggggagcccctgtttcctcaatgcagggaacatgtgaaggtggctccctccctacgtggagaaacctgagggctgtgtcttagggccccaccgctttctcccgggtgatcttggataaggcccttaatttgtgggtgtgtctccttttctttagcaaagcaggaaataaaaatacgtatgtcaaagagttattgcaaa

SEQ ID NO: 691 - DNA, 601 bp, Bovine  MMBT06400
  misc_feature (1)..(1): n is a, c, g, or t
ngtgatcctctgagctgtaacctcatcaggctgaaataacttgacactcccatttgtctgacacagaagtcatttgtctcccaaamctcagggtcagggtggttgtgaattcctccccctggcctcctcttggagggttgtgaccacttcatcaaatgctcttgccttgcctctgagaggttccacgaccagcagggaaggagagatatcccgggtagagagtgagaaagctataggccaggtggggctggaaatcaatccaggactgttcttgctgagagctccttgccaccttcagggratccagactcacccaatctggctcaaaaggcaagacagagttctgcagcggtctgctaacccagaggggtcaggactggccagcaaggatcctggctcttgggtaaytggcttcatcatagcagcactgccattgtcatcaggtatgaccacactaccgcaacgctgtccacagagcagcaagtgaggcataaggaaaactggggccaagtccaaccctgcccctcagtagccctttgggcctcagtggcttgactccwtkatggggataatcatagctatttcagggggcaggtcagcc

SEQ ID NO: 692 - DNA, 600 bp, Bovine  MMBT09510
gtttcaacatatttgtcacagttggaatcccacacttatttgattagcatccttactaggctataaacaccatgaagaataaaatgatgtcttcttttgctcaccactggatcccaccatagggtccacaaagcctggaatatgtatacagatgtatgtatatctggaataagcacagaatatccatcaaatttaaaaaaaggaattaatgaaagaataatgaatgaaggggtagatcaatgaaccctccaaagcacagacgcccgcagtcactgtttgtgaagaactgcacaagttccrtcaaagtgtcccctcttgcaaatgtgagagttattcccaaagatcccttaaaaataaacccatatacaatgaaacctacttaagcagaactcatcagtggccttctctctctggcacaaatccatttcatggaaagaattttcagtgctttaatgatgcctttctgccttacagcatatgacaattcagagcaattagctctacaactataatatgaaaaggttggaatgcatttaaattggaattgatttttgtttaatctgtgttttcatgggtggaaatcgggtatttctgagccag

SEQ ID NO: 693 - DNA, 600 bp, Bovine  MMBT11051
ttgagtcccaatctgagttgtgcagttctgccaggacccagggtaggtgctagtaaaataaacacgatcatctctcaaggggctcatattctgttagaggaaacccacaggtaagccaatgagtgctaatacaatgtgatatatggtatataagagataaatacagaatgttgtaatgtacgcatataataaaagcataaagggacaggagccaatcctacaggagctggaaattggaaagttgggagaaagggaaactgaagctgggtcttgaaatacttgaagcagtagtttaccaarcaaagggaagagttctcccatttatgctttctcatttcaaaaacaagaatacattaaaactggaaaactttttttgtaagcaaaagataaaaggaatatgctcataacatctattctacactatgctagcccctcaatccctgtgtaagatgcaatttactccctaagtaaatactaccagtgtctcggatctattttccgttcagttctttatattcttcctcatttcctccattgtattttctctggaccctttcttgacaactactcttcaattatccagagacatctctccatttc

SEQ ID NO: 694 - DNA, 600 bp, Bovine  MMBT10042
tgtcctcctatgtttttggatagtctcacctcaccccttaacagcaagcagtgcgtctgtcaccacccaccagcccccatgagagcagtactcatgttagttcatccagcagcaggagtgagacaggggtcataaccagcagtggaagtaacattcctgacatcatctcactggactaaagaaggactctcgattctaggaatcattcatcagaactgctctttcttggatctctggtccgtggaagctattttttgctaatgattgctttgatatttattgaaatgtcagatggattcrtttgccttctgagagatgaacacagatgactgcaacaagaaccacatgacgtgcacggatttttcttactcttggtgtcctctggagcatcagctacattcagctgtaactgtatcctcctgagagatggatttcaagttcatgttactggatagattctacaaaaaagttaaattttttttgttgtaatacacagcaataaaattatgtaaatattcaagtatacttttttctaattaaaaaagatgtaatcagtgattctaaaatgacaactttttgtttaacctgatgtgaaggaaa

SEQ ID NO: 695 - DNA, 449 bp, Bovine  MMBT08508
caattgtatgatcaagtctccatcctacactcactgaattacaaagtgctaaatgttagattcccccacattaggatttgttagatccatcctatagctaaagcttacaatcctggacatttcagaatcacaattttaaagctagaaggaaactcagatcctcaattccccttactttatataagactaagacctcaagtcacaaagctacgtattaggagagttgaaaccagaccccatatttgatgcccagactacgagaggacagttagctcataggttccaaagtagaccttagcrtatttccaagattaacttttcttaaaaacaaaaaactcagtcaaacattttggaacatgcacgatgatacatttgaaaagggtcatagtaggtaattcattattttgcagaaaaatgagagacctggagacacagctaaagtttagttt

SEQ ID NO: 696 - DNA, 600 bp, Bovine  MMBT07839
atatgcgtttggggactgagtataggctaggaggaaagggagaatctagtcaggtgaacgatgaccttcagaagcacatgtaaaaattgtgatctctcttgtttttataggagtcacagctgaaagcaatgaaagagactgtgcaactctgcctctcaactgttttccgcgatcagcatcctctccatttgaatcccttcaggccgtatcgaactcagttatcagtcccaaccatgataactgacaccaggactgcatatgtaagcacaacggccaaggtactttcttgacttcaattcrtattatcatcaaagtgaatccaagtaagatagcaaattcattgaaaaatcaggatgtaaacgggagatagtaacccagtttgtaaagtcttcatagtcacttggagaatgttggaaaacaaattttctgtataagagaacaaggtgtttcttaggcagaattattatcatcataattattttacaatattataagaaaatatcttgtattatattccagttttcaccaggggtttattatggaaaatactttcttctagggtataaccaccatccttacaaaagtggatacatttttcag

SEQ ID NO: 697 - DNA, 598 bp, Bovine  MMBT10764
  misc_feature (1)..(30): n is a, c, g, or t
nnnnnnnnnnnnnnnnnnnnnnnnnnnnnntgtaaaactgaatattttgctgtatacctgaaacactgtaaatcaactatatgtcagtaaaatttttttaaaagaccaaaaaataaagaaccatgcaataggacagaaaaaaagtctcagaaacctgtgagactacagcaaaatgtgttatattcgtatcatcaaagacccagaagaaaagttaaagagtgtggggctgaaaaagtatttgaagaaataatatctaaaaacttcactaatatggcaaaagacataaacctacacattcargaagctcagtgaacatataacagtataaacccaaagaaatccacatattattgtcaaattgctgagaaactaaataaaaaagaaaaaatattgaaagtagcaagaaataacacatacaggagaaaaaataatttgaaggatagtcaaaatgtttttgtatagaatctagaaggaaacagcacaacattaaagtactgaaagaaaataactatcaacccaaaattctacatccagcaaaaatatctttcaggagtgaaagggaaatcaaggcatttacagatgaaggaaaactaagaga

SEQ ID NO: 698 - DNA, 600 bp, Bovine  MMBT05623
ctgctttaaacactttaatcacactgctatttagtaccctagagtttaaagctgtgtgtgtgtgtcagtggctcagtcgtgtctgactcttagtgactccacagactgtagcctgccaggatcctctgtccatggaattcttcagtcaagaatactggagtggattgccgttcccttctccggaggatcttcccgacccagggatcgaaccctggtatcctgcagcacaggcagattctttaccatttgaactacaaggaagtcctagagcataaataggatttgatgttagaggcttcrgttttattttttaggaaatttaggattgtctcagttatttggaagcatcttttgtccacaattatactaacacgagagttgacttatatgggaaaggtgattttagtaaagagctagtcctcatcacatacacagattcttctgttagaattcctttccatctctctgatcatcgcctttgtcctttctaatccatactgaagtggaatgttctttcaaacctaccagcttagctgataaggacatgggccagatgtttcacaaggttgactaattttatgatttcagcttgcttctata

SEQ ID NO: 699 - DNA, 600 bp, Bovine  MMBT05621
aagctgtgtgacctagttctgaggtcacaaggtggtaaggcctgaggatgtatcaattactaaaggaatgcggcaagtgttgcaaggtcagtggcactatcctcaggtgtgcatgatcacccagcacaaacctgtataactgcccaagagatataccagtgtgctgagacacaggagtgtaagacaagacttggggattctattagtatgccgctgtggctattatttgctgatttgtgacttgaggaggtcatataatatctggatgttgatttcaacactagtaaaacagaacaacargaattatcttcttgtggagtatactgagatctttccatggaaataatttttacccttgttctgaaatctggctgctctcttctaatatctaaaatagcctttgtaatgggaagaaggagaaataaagaggtgaaagagaattagatagcctaggcaggtgactccaggtaaggcagcattcctgcactgggctggggctgctaacatcctccccttactctaaggagcctgactgagcctttaggagccttgtcactgaaggttctaaaacttaagccttatttgcttgaagttaagtcc

SEQ ID NO: 700 - DNA, 600 bp, Bovine  MMBT07379
aagagaaggtgtccatggttatatattaagaaaatttgtttttcatgactgttcatttttgcttagttacatctggacatttaatggagtcttttagacataaatatgcataaagcataaaccatgtctttgagaaactctcaatcctttggggggtagctttggccaagggactgtcatctgggacgtgctggtagtgccataatagagagtcaagcagggtgctttgggcatgtgtaatttcaactgtggtggtaatgagatcatttaatatgttgctacatttaattcagaagttcrtctgaaatagttggcaaatatacttttcttatgatgtgaccggtacygtgcttttcactccttttgcatttttctgtttcagagacgcccaagcagatggccagcaatgaagttccgaagaggttctggccatcctgcctatgctgaagttgaaccagttggagagaaagaaggttttatcgtatcagagcagtgctaaaatttctaggacagaacagcaccagtgctggcttacaggtgttaagactaaaaatttgcctatacctttaagacaaacacacacccacacacacacacaca

SEQ ID NO: 701 - DNA, 600 bp, Bovine  MMBT07844
tcttcaaaagcttgaacataattaagtggcattttttgtaaaatctgttaccagttctcccttatgaagctgacatttcccccacgtcctcatgggagaattcatcaaagtttcgcttcatataatgaaaagtgcgtcaaaactttagtttggatatgggtaacttctcaagaatcttccgtgtgtgtaacccttctccactagagcgatgcttcttttccattggcctcctgtgttcagtgaatctgagtttacaccatgtttatcaagagaggcctactcagtgccgtttgttttctrttagtcgagtgttgcagtgcctggctgcaccattcctttaagcactaccagtttagacatctaaacatgataataattgccactaggtcacatgaaagtcattgtgatgcttttttccataggcatcttcataacaataaaattaaaagcctgggtcaacactgttttgatggacttgataacctggagaccttgtaagtttatttctgttttggataatcacatttgggatgttgatggtgcagttgggcatttcactgcagaaaaaaagtaatggtcttgagttcagctcattattaa

SEQ ID NO: 702 - DNA, 603 bp, Bovine  MMBT10783
  misc_feature (1)..(3): n is a, c, g, or t
nnnggattctcataggcaggcaggaaaaccaccgggtagtcatcgtaaggaatccggctgtccatctccagcaaggacctggaatggaagcatgaatcaaagctgatgaaaatggtttaaaagggaaaatagcccagcaagttttagaaaacaaccccaacccactccaagactgtcagtctatacgctgagcccacttctaggtaggtgatagattttgggagagaagaaagaagaaaactatcaacttggctgaatatctggatgctaacaacctgttagatacactatagaaatgatctrctttctcacaacaatcttgtgaaacatatgttaccgtcctcattctagagaggaggaaatcaggatcgaatctaaaactatctgactactttcaaaattcaacggaatgctgattccaactatccatagaaactcggggcaaggcactgccccacattccctaatgtgatcagtaatggtggaggtccgcagattggcctttcctttaccaccagccaccttccagatctctttcccgcatcgtgcctgagtcctgtgcccacagcgctgtaaaagttgtcttactacctctccaacccg

SEQ ID NO: 703 - DNA, 598 bp, Bovine  MMBT10772
  misc_feature (1)..(34): n is a, c, g, or t
nnnnnnnnnnnnnnnnnnnnnnnnnnnnnnnnnnttgccctcatacagaagtctcacctgggcagacagttcccacagatggcattagaggtagctgtacaattggcctgctggatacgattgatgacagcacaggtgatgcaagtctgacatctatggtgtccccagctgcttttgtatctgcggggagggcaggctgtgcagtatgcatctccaccctctccataaccacaatcctgtagagaaatgtaagttactaacattacagaaattttgagataggattagctatgggactartggacactgcatagagcaacattttacaaactgcaggttgcaacccactactgaatcatgacatcaatttaaaaggtttaaaccagttattattgaaagctgaaataagataaaataacataatgacactaaatatcagagtgaagagcatgtactaaagctaggtatttatatcaattatcataagctaggtcagttcagtacagttcacttgctcagtcatgtcctactctttgcgaccccatggactgcagcacgccaggtctccctgtccatcatcaactccctgagtttactc

SEQ ID NO: 704 - DNA, 600 bp, Bovine  MMBT07857
ttcttagagtttcaactccagcaatttactcaaatacaattttttaattccaggtgagctggaaattactcaaagcaagataggatcttaagaaaaagtgttctttattttcttaatgaaaattgaagagcaattatgtagtattgtttatcctagaaaatttaaccaatgtgatgaggtaggggccaaaaatgtaagaaggaagagatcaactttaataatgttactctcccaattcccctggaaaaaaaaaacataaggaggaatttcttgtgttacttatgtcttagaggtaaatarctaatgcttctagatagtaatgggtaagtgtctacaagtgccttgaaatccttagaagaaaactcctaataaaatgaaaaataattcttatacctaacatgaatgttaaaaaataaccaagaaaaatagatttaatttctaatacacactcatatataaatatatgacacttagcaaaaaaatttaagagttataaataagtatcaaactatcacagtgatcactcaataggattcattaaggatgataaagctaggaaagtttgcttttatacaataaaagcaaggataatggaaacaa

SEQ ID NO: 705 - DNA, 600 bp, Bovine  MMBT10071
ggttcctgggttgcccatatccatgtcacctccaaggagactctgctaaaaggttaaaaaggaaaaacaaacatataaggttaagttttgacattcgccacccccctcaccaactgcttgttagtacttaaaccaatgcaataaaacaaacagcatctgctaaagctgaaacaattaaaacccaacccggcagaaaggaaaagaaaagccgtctatgaagctgctccgaatctgtgaatttttagttctttaattttggagaagaaggtagaaggtgatgctcgttaaacatgattttcrtcttttaagacgactgatatgttcaccttgtaagtaaagggcatttatgtcaggtgagaattttcttgatctagagttaggttcatatctgggaacaagtcatgcccttccctgaacaagaaccagggagaatctgatttttcagacgcatacaacttccccccactgctcacactgggggaagagtatagacgttcatatccactgggaaccctgcctctctgcgagaccctccacgaattcacaccgcacccccagaagacagaatgccatctgaaccaggaggaaattcaaaatgct

SEQ ID NO: 706 - DNA, 600 bp, Bovine  MMBT10834
gaccagctgtcttctttccagaggaccctctcattttacttctttgcatattgcttctagttggttttttgaaattgtcttcttcggcagattggtgtccacgggtttgagaaccctgctttctggaactcattcaaccctgtttttattccaaccactgtaatatataaaacattttatttgattgttttctatggagaccttgaacacagtgtgcttcctaaaggcctattaaagcacaacacacactactctcttggaatctggatttcaaatcctgtttcagggccaaccaattarttgttagtgacctctttgcttgctctttgatcctcactacccctcacccactactctcagcctacccaatcactcatcagacctgcccataaattagttttttgatttcactcaaaagacaggaatataatttcagagaaagaatgaattaaactacaaaaggcagtggaggtgaaattcaggatttctgaacaggaaaaatgacaagacaaaagaaacaagaaagattaatttagctgcctggaagcaaaatgcataccagcaaaggtttttgtgtaagtccaggtaggcctgaactag

SEQ ID NO: 707 - DNA, 600 bp, Bovine  MMBT09508
ccggggactgtttgcatcttcctgcattttacttagtgaccgtcgtctttatagagtacagagctgtttatcacagctggatatgaccagtggaatgtcactttggacattaagatgtcataagctattatgaatctctggaattctgcatgtagtattaaaaaaacattatcttgaactatggcatcaggaaaaaatataccctggaagatgtgaaatttaataactcactgaatccaataggccctaaaaggggtctacttcggtttttaaagataactctgataagatgtttgatcrtctgaaagaaaaggatatattagaggtggaatttgagaaatgaatgtaagtcagttttttaggtgtttgtgattctttcttcctaaaaatgactacgatttacatgatgggccagaaaatgcaaatgatgtcaaatcaccatggggacgaggacaacggcccttaatgagatgttggaagacttcggcacttctgaaccagacataaagggaatgaacatccccaggcccttcctcttctcaaagatgctaaaagggacctcaagtcttgtgagacacagctattcccactccccgcacc

SEQ ID NO: 708 - DNA, 600 bp, Bovine  MMBT06347
aggctggaaggsgggccattctggaggatgctgggctttcagattctcctaactcaccccacatagaaactgatcacaccattttaaactgaggaagactcctgctcaccyccctagtagcagtgcytctaattagttcatccagtcaggaataagtttctaccttctccttccataccttcccctccacctaacactgtgatttgggacagtttcattctgacacaaaatttcacactatgaaaaagtcacaagtaaagtagacttccacagaagagaaagcttgattattctgaatgrgtctccagactcctcctctggttcctgaactagggggcaattacccaggtaaacacatgctctattggaaatcctaccggtcatttctctcagcagtttctcggaagcacccaggtgctgactagaggaggcatcttttctttatagcaccgaggaagcatttttaaggtcataacattggaacagctgcttcaatacagaaatgtggaaactgagtccccaagaatttaggcctcttggtcactgtcacacttatttgtgacagaatctgaggccagagctctgtttgaaatactgctg

SEQ ID NO: 709 - DNA, 600 bp, Bovine  MMBT06705
tttccaactctaggcgagcactggggaagtcagtgtgaaataaacccttaacttatgcctccatgttcaaaattatgggggccacaggatatgaaaacacccacaaaaaatctgtctgtactcacaaagtttctttattgtttttcaagagcagaaggtaagtttttaaaaacgcartgagtctagaaacatgcctttgctacaaatgtgtcacccctcaatgtccagagactccaaaacttattactgggaggctcatcagtagactgagaaggaagcagatgctgtcacgtggtcctrttgaatctacccaatggtaactcattcatgtcctttttaatgttttaaaacttggtcttaaacgatgaatcgaatctgccttaacattgtgggacacagtctgttactaagtcctatgcaaagtgtcttttaggcattaacatttattttccccaaagctctctgagcagagattattatgatcccctgtgatggttaattttatgtgtcagctagctcagccatggtacccagtttttggccaagcaccagttgagatgtcactgtgaaggtatgttttagttgagattaacacttaaa

SEQ ID NO: 710 - DNA, 600 bp, Bovine  MMBT06709
atgtcagacgtcaatctacttttaaaaacatgtttagttgaaataaatgagttttgttcacagcttttctctgttctttttttccctaaaggctgttacctctttttcctttactttatacttttgaatccaaatttctgatcatctctattgtccgctttctcccacccacttaaataacgcagtctcctctcttcttggagctcccttatacttagaagtaaagtttgaagggaaactaaaccaagatggcctccatctgtagccacttcagttgtaagaatcagcaatgccctgacrtttaaaatccactcaggatgacaaaagtagggatgtggcagtcaggcttctggttctgttatcaccaacaaaggatgacccctctactgcctaattttctcattattcatgctgaaggaaagggggctttaaaaaatagactaatttgggatcagcttcccttgtggcttagtggtaaagaatctgcttayaatgcaagaagacttgggttcgattcctgggtcaagaagactccccgggagaagaaaatggcaacccactccaatattcttatctgggaaattccatggacagaagagt

SEQ ID NO: 711 - DNA, 564 bp, Bovine  MMBT05744
acaacagtagacttttctcttccttgagtttggacaatgattgttctccttccagaaacagagagagaaaagggaacttggaaattcagccaggtgttagccaacctccttggggggttctcttctgccaggtcctgaaatcccaggcctggaacaggccccactgactttttccaaagtttggcctttattagagaggttgaggccagggatttttccatgcacaattctttagctccaaaattctggatctgaccttctagtccaagagaacttgcacatcccaaccttgaagacatrgtgtgactataaagtattgagttgtttttctttccattgccttttcttatttccagaaagagagtttgaaaaagacgagtatttgagatgttatttggcttagaagcaattttgtagagaagaatgtcaccctaggggttttccatcataggtaaatttttctcctttgctaagtgaataattaatgttgctttaatatggaactggcccttcatttagataatttatatgcatgaatgcccaccccttctttctcttaaagca

SEQ ID NO: 712 - DNA, 600 bp, Bovine  MMBT08137
aactaaaagttgaaaagggtaagtaatctaaggtcagtggctagttaggaggctccatagagtggaacccaggaatgcccatcctttcaactcctcggtaatgcctcaggagggcctgatggtcttgcatttctcactagggtttacttggcagattctcgaacctgtgtttatatagtgaaatatcagacctcattttggttgctaattttagtttgagtacataagtacctttaaaaaattgtttatgtgtgaggagaaagccacataacctgggatcttgtttcttaaactttattrtgcatrtaagtcacttgggcgttttgttaaaatgcagagtttgactcattatctgggttgggggggcctgagattcctttctagcaggttccccgggcataccgacatgttgctagtccctggaccacacttcagttttactgccctcaagagcatctgctgttaatccaataatctgcttttcccaagtcgaggtctttgatgggatctttccctggccactcagatctctggctctttccttctcaggtggccctggggtcaagctctgcatcagtgatgtactgccygtcctggcaa

SEQ ID NO: 713 - DNA, 600 bp, Bovine  MMBT09509
tgccaagggccacttgcaaattctctcctygtgtctggaacttggttataaggaagtttgctccagggacttgtggtttcttggaagatcccatttgaaagtatgtctttcaatgtgagcgctgcagcatcttaattcagagaaggtaaaatatttagctaggaaacatggaaagtaaatgctatgggtctgaaaatactatgagtctcaccccgagagctcttaaaataccaaggctttttctcttctggcagcaaatttcaaaaccatgacgataacaacagccactgtggttgtacrtgtgaggcacttcctgtgttccaggcactgtatcatagccctttccaagccataactcatctaatcatcacaataatcccccaaggcagttactagttgcatccccattttacagatggagaaactggctcaaagaggtccagtcccttgcccaaactaggaagtgattaagcaaggattcaaacccaagtcaggctacttctacagcccatggctttaaccagtcttaagtaaaaacataagacagtggtcacttacattctattccttccctttagaagtcttttttgctcttgctag

SEQ ID NO: 714 - DNA, 598 bp, Bovine  MMBT06428
  misc_feature (1)..(173): n is a, c, g, or t
nnnnnnnnnnnnnnnnnnnnnnnnnnnnnnnnnnnnnnnnnnnnnnnnnnnnnnnnnnnnnnnnnnnnnnnnnnnnnnnnnnnnnnnnnnnnnnnnnnnnnnnnnnnnnnnnnnnnnnnnnnnnnnnnnnnnnnnnnnnnnnnnnnnnnnnnnnnnnnnnnnnnnnnnnnnnnatgaaaactgaagtatgatttgtatcatattcaggaaccactagctatttggaaatagagtttgaaagtatcttacagtttgggtaaatgttatctattgaagttaattgactgcttggtagatgartgaaaaaattcacatctgctttcctgcccaccctactgaaaaagcaccagatatttcaccctggccaaaaattctataacatacacgatgtcctactaaagctgagcattgagagagygccaagcagtcattcttcccactcgttggaacgtggttatgaggcaccagaacgtggaacccacatcctctttctctcatccccttccattcccaccactgggcaagctgaaaacaattttcaaaacctctgctctgttcccagaagattagtatttctgtacttgtgattagttttaaa

SEQ ID NO: 715 - DNA, 600 bp, Bovine  MMBT09274
taattgcagctttacttgtgataataaagaattatgaataagcaaaatgtcccatagtaggggcgtggttgaaaatttatggcaaatcattaactgtactattcattagataagtcattaaatactactagtactgatactattactactattaaatttatgggacaattactactactattattacttctaaaattaaatttattgagcagttactactactgctactactactcttagtactatttctgctaccgctaactttactgagcaggtattaagttccagatcctgttctargtgctatacagatgctctctcatccaatcctcatgacaatcctatgaggtaggtacttagtatccatatttttcaratcaggaagtggaggaaaacagggtgctcaaggttctagagtgattttgggttagagtagaagattcaagtcaaacaaaatgactggagcttaagctatagacattaaaaattatgagccacagattctttaactcaagccttggtatataattaaagttgaaatcagaggccatgtgtttcagctgcaattaatgagaaaccttggaagaaattcgaggtagc

SEQ ID NO: 716 - DNA, 600 bp, Bovine  MMBT10770
gaaaaagtgaaatcttaaatgtttaagtgaccgtagttgggcttaaatacctagctaatatactttgacatcttatttcctttgacttatctctctttctatcccccaacgtggacctcttgttttrgaaagaccgatctaagcacatccttttgtgataattttcccagactttcatcttggtctgatgctgtatctgagctctgatgttgcagtgcacctgtgcccaagatttattttcatttccttaatctaacttaatttttcagtttgacacctgccttctatctttcttctggracacacttagagcttggagaaaggagtattgatactatttttagaatgggaaccaaattcccttctttttgacctttatstgttcatttatctgcragaagcttattaacttccattgtgtgctaggaactgtgccaagcacagtcctccaggggtttgtattctaataccctgaacaacattacaatcatttcttttgcttaaaaatttctaattattgacatatcatctagcgatcatcaactttctgtctgtctatccatctgtctattaagacactacatgtagtaaaagggaggt

SEQ ID NO: 717 - DNA, 600 bp, Bovine  MMBT10866
ccttaaatcagttatttacaaccataagacatctgggagcagggggagggagaaggcaagggagggaagagggaccacaaggaagaatatattcttttcagaggttaaaatgagttatttaagaaatgtgatgtacaataataccatgcatttactctccaaagctagtcactagcaagctaacgcctctaacactacaaccaccaattacagctgttttgctacagtaactgagttctaactacagctatagggtagaaagggtgggctgttccattttgaactttatccctttgaaartggccataaaagcattttctgtacaagtttaatggcacaaaaaggtgactgaaaacattgtaaagaacttaccacacatgagaaatgcaaaattcaatcaaaacatgcattagttgtgtacaagtcataagggatcattggcttcaagctgcaatatattgcaaggaccatacattggagacattttggtgtaacctcttacttgctcaaatccctttaagagaacttaaaaagaaatggcattggaaagggcattccgtaaggtcttgctaagcagtgacattcccaagggctatgcac

SEQ ID NO: 718 - DNA, 583 bp, Bovine  MMBT10869
tgcaaactttaggaagggaaagtggaagacaaaaacaaggaaaagaaattccagttcctcctcgtcaccctcccactccacttttggcttgtatccaggcaaccagctgaaaccagctgccggatatactcctagagcctcatccgaggtcccaatcagctgcaggaggcgggcagaggaaggatgtgtgacaatctggaagatcaccctccaactcttgtcccttcactcactgtccaccccaactgacatctgttttctgaaaagaaatacaggagggaaagaaggagaaaatttgcrtgttggcattcagcttttkcttttgtagactctggatgctgagtgggcttgattggacaagcagatgatgtttggatgatggacttctgagtctccatcacttgctgggcctattgtacaaccagatgcccactcacttgctacagaagattgtaccaagctcaatgccttcgttgtaggctgcagacctgtaaaggtgtttccattatttttctagagaatttgttgttgttgttcagtcgctcagtcatgtctgactctttggaccccaggactgccgcag

SEQ ID NO: 719 - DNA, 600 bp, Bovine  MMBT06345
acaaatagattcaagggwttagatctgatagagagagtacctgaataactatggacagaggttcctgacattgtacaggaggcagggatcaaaatcatcctyaagaaaaagaaatgyaaaaaggtaaaatggttgtctgaggaggccttacaaatagctgagaaaagggagaagctaaaggcaaaggagaaaaggaaagatatacccatttgaatgcacagtttcaaagamttgcaaggagagataagaaagccttccttagtgatcaatgcaaagaaatagtggaaaataatagaatgrgagaaactgtatacatgcagcaaaarcaagacctggaaatgaccgtggcccagaacaccagctccttattgcaaaattcttgcttaaattgaagaaagcagggaaaaccactaggctattcagatatcccttatacttatacattggaggtgatgaatagattcatggtgttagatctggtacacagaatgtctgaagaaccatggacagaggtttgtaacactgtaaccaaaaccatcccaaagaaaaagaaatgcaatatgtcaaggtagttttctgaggaggctttacaagtagctg

SEQ ID NO: 720 - DNA, 600 bp, Bovine  MMBT11088
atttttccatctcttttctagactggctatgatttttctttgacatgttaattctgtcaaaattataacttaaaaaaaaaaaatcttcccttacattttaacatcagttaaaattacataaaaacattcaaactaccagggaatttttccaaaatcaagacatcagagccaccaatactaatgaccatgctctttcttgagaacactgaaagatttttataatctaataaaatagggaaaagcagaaaaatctgccattgccaattacttaccacgttcatggttatataaagggctcartcagacctacaatcaaaccttttataagtgccaaaattcactggtgggtgaggatgagagcaaatgctttaattcaggctttttacaactattagttacgaactatgattgaaataagttccattgttacagtaactcaaaatcatgcaaaaataataattttagtccttttatgagaggaaggcagaatatattagcatttaatctgcctgaaaataacagtgactcaccagaactatctggatagcagtcagtcattcagtcaataacatttatgaaggcctgctgcatgaagatgac

SEQ ID NO: 721 - DNA, 600 bp, Bovine  MMBT05921
gcaatttgaggtgattcattatttatcttttttatgattttaatgaatacaagtgtctcttattcattaaaaatagaacaacaaaaatattcatctagtcattagcctcttgattaatcttccccattaagctaaagatccaagcagagcacctgaaagcaccttaattcttcttcagagatcatcatcacactaaaattatttgcttctggaaatcattaatttctttttatggatatgagatttttttttttctggattgcagtatattaacattcgttttcattcaccccattctarraattcttggtaataaagcagaactaaatggcacacattaaacattattcatttaatcttgggggaagttagttacaaggaaagtttgaagagtgagttgagaatagttcttcaatctcattgttggatatttcattttatttgccagtaaatacatagctatatatgttactaatacatatcaagaggttaaaaaatgatcacataattaattactcatcattattatatgctagaaactcttgagtttggcacatgagccccttgctcaccttctgaggcgtctcctggcttcaggag

SEQ ID NO: 722 - DNA, 600 bp, Bovine  MMBT06419
acctgaacaggttccactgaggaaatgattcttccttaacaagatgggagttatgagaggtgttataaaggagaatctatacaactcggtgcccaaatgaggtaagtgaggaaaagcgggtctaggctgactcaaggctggctagactgactgaagagattaggtgaggagcctgactgggtgaaatgaggagttctgaacacagttcatctgtagagttgctgagacttgacctgctctcctcagcagggagatggcgtgtggtgggggaggcagactgacaacaaaagaagcaggtgrtcagaaaacaaaccacgtaattaaaaaaaaaaaaaaaaagctgaaacaattctcatagactttagatcaataaggactttaaatgctaactgctctacacacaagtaacacgttttaaaaagttaactactctcatcatatatgtgagtaaactagaaacgttttgtttttgctttaatgaacactatttattcaagtggtaaagaatctgcatgccaatgcagaagatgccagagatgcggttcgatccccgggtcgggaagatcccctggagcaggaaatggccacccattccagtac

SEQ ID NO: 723 - DNA, 600 bp, Bovine  MMBT06307
ataaagcctataaattacctcatcacatattaaacttaatcacttctaagatcagacacttaaataaaattcagagtgattcctcctcaagggtgcagacaggacagttgagaatacttaatgatttccaggttcagctctcttctcctttttgaaagaacgtgaaacagactttmcagggtcattaaaaggagtagagcttcaccacatggcccagcaatcccactcctgggcatatacccagaaaaaaactgtaattcaaaaacatacatggggacttccttygtggtccaatgggtragaatccaggttcgatccctggtccaggaaaattccacctgcctcggggcaactaagcctgtgcagcacgactactgcgcccatgctctagagaccatgagctgmagctgttgagcccacatgccgcagttgctgaagcccagcaagtctagagcctgtgctctacaggaggagccaccacaatgagaagcccgcacattgcaacgagagagccgaccctgctccccacagccagagaaagcccaggcttgcaaagacccagtgcatccaaaaataaaccagtaacatttttaaaagcct

SEQ ID NO: 724 - DNA, 598 bp, Bovine  MMBT06753
  misc_feature (1)..(63): n is a, c, g, or t
nnnnnnnnnnnnnnnnnnnnnnnnnnnnnnnnnnnnnnnnnnnnnnnnnnnnnnnnnnnnnnnatttgaaagacaagaaaagatacggctgtcttcatttgcatttctttgggcattagtgaagctagacgtttttttaaagcgtctcatgatttatgttgtctgtgaattcttcccatcctttcctaccaccctgtgtaaatctcagttctcaattaccaatttgtatagaaacaaatacatgtacaataagacattaaatctgcaagaggatagaaaatactatttttcaatttgctrtttaacttttaattgtgcttaagatgttatacatatagatgttacactttaagtatgtacgatcgagctatcgatacttttccgtaagaggaaaaaaaaagccccttcatcattaaacatcaaataaatttggtcacttgctcaataagaagtaaatttcctgttttgtcaggcttcccacatgggggcattggcaaccttccttccctaaacaaaacaacraaaagttaacacattcctaagcactgggagttccaagtttaaacaatggataactattttacacaaactataaggt

SEQ ID NO: 725 - DNA, 598 bp, Bovine  MMBT06750
  misc_feature (1)..(2): n is a, c, g, or t
nncacatgcttttgtgacaagtataccatttcttcctaacttaatgcaatctgtacttgtggtgtccatgcagtcgtaacttagagatgtaatgggtctgaacctcagtctgtttttatacaaacacaaagaaaggaattgacatttgcaacagatttcaatttttttgaaaactcatcatttggcataatgattgacattaaaagaatgccatttaactcttggctgaatgaatgatctattattattatagatggctctataaaacattggaaatacacagaatatatgaacacagtrcaatatcagtataggtgagtgtgagtggttcagattctgatttattatcaacaattgttctgttgtttcccagcaacaactatagmctgaactcttgggaaagcrcttgttatacccagtttgacttccaggaaacttactcagtgaaatgatttgagtaactagggcaaaggatataattattggtatatagtaatttgattgacctctggcaccagagtatttgtattaaatattttcarctggagcctgggtttaaatttcttccagtttgtctgcactcttgcccattttgagt

SEQ ID NO: 726 - DNA, 600 bp, Bovine  MMBT08578
tagtgaatttttacacagatgcagggaggtacagtgatgagctaaccgaattttgcatttttgtgttttattcacacgatagtgatgagctaatctaactttgcatttttgcatcttactaacacgggagggcatgcttgtgtctctcagcagtcagtaacctaaactgtgaggtagcagaccaaacaggagaatttcttgaactttgaaaactttttattaggagtgtttccttcctccaatcccttccccaatgcaaacgaccagaggattaattcaagagacagaggcacagatgcrtagtttttgtactatataatagcacaaataatgtattttatattactttctcttaaaacatacaaatatgatacaatacaatttattttaataaaatgccaaccaatatagtacaacaaaatgaatttaatacattaggaggcaatacatcacgacactaaaatcccacacagaaacagcagtaccccaaggccccatgagtacagcgtctctattttaatggagtcagtcctgctgatgtgtatacattctagttggacaggtgctggattggtaagtcaagcttgcaagatagaagga

SEQ ID NO: 727 - DNA, 600 bp, Bovine  MMBT07447
tcttttcttgagaaccgccttcctccttctggtctgagtagcctgggctcagaggctcccagccgtgcccctcacgccctgtcccttttctttggctcatcgtgtcatgstccttaacatatttaaatttcatcctgcttgcccgctcctgtattcttggctggaaaactccatggacagagaaacctggtaggctacagtccgtggggtcgcaaagagtcagtcacarctgagcacccacgcaaggaggaacatcagaktcgtrattttataagacgtaagagcagaggttaccaagcrttcagatttcacacacatcctcagcacattttaatttgcacactgataacattttccttctgccaagtgaggacaatgaccatctattgttgccacaagtttatgaaagagggggcattgtgggaagcacatcatcttgaaatcaaaggctttccgatgcagtggatttagcctcaggaaaacaccactgcattagccttctttttctgcttcagaccttggcccataggaagtgggctatagtgatggcctgaagagccatctgccttctcccatgataaccggctccacaaccccaaa

SEQ ID NO: 728 - DNA, 600 bp, Bovine  MMBT08527
gtatactggttaatgctattgagacataaaaytgtgtgactactggtcttcrataaagcactaagaagaactaggataccccttataattaatatttggtaagtattcactatgtttgaggcactatatgtccctacttaatcccaatagcagcccagtgtgagagaaattcttcttcttttataggaacttctctgaaactcagagaagtaaaagtacttgtttaggatcacagaattagggacagcagagatgaaattaaaactagagcactgctgttaaccaacttacatgccctcrgttttttagctaacaccaagaaacaggctaaagaggactaaagagtctgataattccacagaattatgaatttaggaagctgaaaattttctaattggttgcctaaaacagcccaagattaatttttagtgtatcacgcaacagtctgaatactttaccgaagataagaggttaaaacttgagttttgaatcatagttttatcacactcaagctgtgcgaccttgagcaaatctcttatcctctctgaggctgcttacttatgggtcaaatgagaataatatttcaatttaccaattcta

SEQ ID NO: 729 - DNA, 600 bp, Bovine  MMBT10871
ccttgtgttactgtcctagatacggcataagtttttttaaaaagcaccaattaacctctctatggaaacttctgtgacattcccagtatattttgatattgcaagtcagagttggacaaaatattasttttgtatttttcatactctgagaaaagtccttagaactcyatcacttgatgaagcttgccaggagcagaagaatcactragatgtggatccaaagcctgacatgctgagcttggagctgctggtattattcaggataggcaagatgctgctgctctacctaacaacccccaratgttagagcaacagaagtttatctctcatgggacagacccatctcttcatcctcytcctctgaaaaatctggctttaccatctagaaagtcagtcaccactgccaaagaaagggagaagatggagcaccgcatactggatcttcaacacccttgacattccttctcacgtttcattggtcagagtcagtcccatgggcacatctcacttcaagggagtggagaagtacagtcctgctggtggtctggaggagccgagctgagtacttggtgagcagaaatcatatccacactcatcttc

SEQ ID NO: 730 - DNA, 600 bp, Bovine  MMBT07065
taaatctttccttatgcttaaattrtgactctgttaaagagacacattttctaagttcttcatgaatagttgatcagtttattattgtctcagaaaaagaactgttgaagacaaaaaatatttttaataataactataagacagcaatgattttaacaaattaaactaccaagctaagtaaatggcaatccttaaagtggatgtgagtttatagcttttgtttaaaaatgcatatatacacacatatatatacacacacaaacatatacatacacatatgcatacgtaaaatcaagagcragttatatcttttttaaacctttataatctttgaaacaattctttacttaatttgtcattcctctttatttttcagggtagtgataaaagtaacaaagatgattcatacaatctaaaatattacgggcatggtaataactcagaaaataacttttgaatggcaaaatctctgattataccattattaatgataaaagtacgtatgttccaaccatgctaaaaattttatccattatatatcttaagcttaactatccaatggaattttctaaagaaaggtgtgcaaattagactacttag

SEQ ID NO: 731 - DNA, 600 bp, Bovine  MMBT07175
aagctgtgtacccttaagacaattcattttcttaatttcacgttaatggaaagaatggaagaggtttatttctggatcagaaacaacatgctgtggtaaagttgcacaggccttaaaatcaaactcaggtttgaatccagcaggctcactggcaatgaccttggcataacctccttcaatctcagtttcttgatctgtaaaattagaatcatccccctttccactcaagtgtgtcataaacgctcattgatatgacctgtgtcagtttccttgcacggttgcagaattttaggtggaccrtaaayagacaaagagagaccacaccctctctmaatttatgttcctggcttatttagcccagcatatggaagccgggtatcagccagcaaagcagatgcagcagatgactcttgtctttagctcctggggtccctaatgaggggtgmtcagctgcctgtgacactagtcaggtctcactggctcaagaagcttaattttgtgctgccccatagcccagttataattggggctgacatcaccactcgcgaagaacttacagaaacattctctgtccttaataagaaatacaggcctcgaccc

SEQ ID NO: 732 - DNA, 598 bp, Bovine  MMBT05930
  misc_feature (1)..(128): n is a, c, g, or t
nnnnnnnnnnnnnnnnnnnnnnnnnnnnnnnnnnnnnnnnnnnnnnnnnnnnnnnnnnnnnnnnnnnnnnnnnnnnnnnnnnnnnnnnnnnnnnnnnnnnnnnnnnnnnnnnnnnnnnnnnnnnnnnnaatgatgtacgatgcagatggaaagaaaagaaaatgatggattacaggacttaatccatcaaaagcctgcctctagaacatacgaattatgctaccatctctggaaactaattgatatggagatctggactagttcacaaaagtgttttcgttacagtgttggaagaggctrttgcccagatttctttggctttacagaaaattggggttgtttctgcctrtaacaattcaaatagagtgattgcaacattaattgaaaaagaaacactttgctgaagattttctgttgtaaaaatgactttagtgacacatacacacacacacaggctctttctttacaggttgctaatacattccatgataaagattttccaatacctgattttaaaatacctgaaattaacttatggaaacagaaacagtattctcagccataacaattgccactcaatgaccatgagtttaaaaat

SEQ ID NO: 733 - DNA, 600 bp, Bovine  MMBT11082
ttttctggaggcaattccttagtttaattctagatttctccccataagtttctagcactcagtttcaactagactttctattggttggtttccttagcctctcatatgagaagctcttctgtgggtaagatgggaaagtggcaagagagagggggaagtgctaaaatggatcaaacattgttcagaggatgatgttttgtcaccttccatgtaatttcatcagatggcatctcaaaccagagctaacatgctcttttctacctcgcagcaaacaaatcttgggagaaattcttctggctragcgcttctccaaggcatccttctttaaggggagaatgtgtaaacaatttgatgttgattttcagtctggctgccatttggtaactgyctgggtcaccaagcgaagaaacataatgtgtcacctgttccgaatataaatatcacctgattgtaactgctcagtgagctccgaggtcaaaggagaggttagcaccagtggaaaagtatcactttcaacacaggatgtgctgtgcatattagcaacatgtaccgcattaagcaatttgtgcaggtttccatgaacttgccagcctggtctat

SEQ ID NO: 734 - DNA, 600 bp, Bovine  MMBT08896
ttgcttaacttaggagcagttagggcccaagggaaattcactgcttatgccagtgtggaaattcctctgcctgggtgcacttttatgacctgactttttcaccactaatgtgaactgatcttttttttctgattggaaataatctaactagttctgattatctaattcaaaattttggtcttgctcacggaagtctgtaacctattcctgtgcgtgtacttagactttagggcttgttttctcacatctgaaccactgtcatgccctgatttctcttgctttgattttctcaggggaccrgtcaataaaggtcttttaagagatgatctgttcttctctctcctgatccaggcaggtttccaagttcttaactcagtcatttgggcaatgcatcctcctaagaatcagaagtcactaattagtgtcacagcaacatggcaaaaccagccaagctgaagcagcacagaaaacattcctggacaggtctgggagcatgagacagccaagaaagggacagcatgcatccaggcacactgtgataccgctaaagatccatggcagaggtacagcgttagagacacaatcattcggatttgtgtc

SEQ ID NO: 735 - DNA, 600 bp, Bovine  MMBT11040
tgtggaagcgcagtattgagctgcctctgcaaggaatctctttcgtgaccaacctcgtgcagtttcccctgggttaatgccagcgtttcttgggtctctctcagcgtgtcgagaagacggtccctctcttccagcatagagaccatcaactgttcaaaatgtgaatccgcatctggctgcgaaggggagctggacccttggctcccacttcctcccggggggccttctgcttcactgatggtcggcatcacctcgcacatcatcttgaaaaaaagagacccggaccaccgtcatcaggcrcttctaaataaaggcttctacaaagctgcaactttctagctatctggagctgataaatgagaggccttsctatttccagatctgactgttaggctctgtagagagaagtagtcagggaaaatacacacaggcctatccgaagtgcaaggcacacccaacaggagaacatgactactgaccataatcagtgaaggggtaaagaccacacagactacccctcacacaaaggacaaaccctgtggcattttgtttgcaaagccgtactttctgattgttgaaaaacaagtgtgcttctgtaac

SEQ ID NO: 736 - DNA, 600 bp, Bovine  MMBT10777
gtgagagtccttagtctcttccagtttcattgtggtcagcatgatacaccacactgtgcaggcccaggctggtgaacttttgtcttggtcaagatccagattttctttttagttccaagttccagtccaagttttttgcaggtgatttcttcaggattggtgcttacattttttttaaattgctgactgttaaaactctgaaatgtccctcaacaatcaattttcacttcagccacagaaccactggtccaatggggtattaaacagtgaaaagaaatacattctatgccaggcttaagrgatctaaaaactgtagcaaggataaaatggactgaagagaatggaacttggttctaaaagaggtgatccagggtagccatgccacttgcagtttactttctatatacccattgccatggaaatattattggcaatagacaatttgaaggctctactggtttgtggatggttgtgtgttttccccttagttctacttcacataaacatgaacccaagggatgtacaaaagtctctaaaaaagcatctttcccaggtaaattgtctatgtagaagttcaggacaataagaaaatattctaaa

SEQ ID NO: 737 - DNA, 600 bp, Bovine  MMBT09255
tcaatatctaatcagctcaatgccyatgcttacgtgttttttactgcgtcatgaaaaacaacagtaatatttatgagtaccctcagaatcccataaaagtcaatatggaacaatgataaaggcattaccactttcaagtctttgaaaactgayaatctggacagagtatatagttctttactaaccatactgtagcctctaaatgtactagatgttttcatggttgctataataaatttcagtgataaagtaagaagtgtattaaagatgacattaagattagcaatgttttggctaatrttcaaatatatatcagaagttaacagtcatggataaactaacataaaaataaacatttccctcawccagttttagattttaaccagataatttggtctaaaaaaggaaaagtgtcattatacaacatcacagattttttaacaatacaaaaactggaaaaataacttaaatggtatggtgtaataatggccaataagatatataactcaaatatgctactgataaactatatttcctagttgaaagaatattcaatttaagactcccctatagacaagagatctaaattactaaaaaaaa

SEQ ID NO: 738 - DNA, 598 bp, Bovine  MMBT09606
  misc_feature (1)..(11): n is a, c, g, or t
nnnnnnnnnnnacacgactgagcatgcacacatgcattggtaaaatattcagtatgacttgaataaagcaatcaaggctcctgaagagggagttatcattccaaaacaatgcttaggtttcacttactacgatttcaatcaatatcccaaatgggtgagttttgamcttgacaaattcatgataatcactagtattctttagaacttactgtatgccacatatatctatgtgccatatgagttttaattccgttaatcctcaccacggtcccatgcagaaggtgatactattgtccttaragaagatactactattgttctcatgggagatattgccattattctcaaatgcggaagctgaggcaacctgcccaaggttagaaggctggcagatgccaatacaggatttgaatttgaacggaaatccacctgaagttcctatgttctaaatgccattgcaactgtcttttaaaataaaaactggggaaataaatagataaggctaccaaagaaaaacacgaatggaggcagactagccccgacagctatctctggggtggggtgtaatacacagtgtgatattatatgaaaacagata

SEQ ID NO: 739 - DNA, 535 bp, Bovine  MMBT09271
ttttggtaaggtttacatgttgttttttaaatgtaggtgaaagaaaagggactgacccaggagtcagggctcccagtcagggttgtaggtgatttggggcaagtcagtgtcgttgggctttggttctctcatctgtaagaagactggttggaccaggtgacctgagcccccttgcagcacgaaggttccactttccaggggacaaaggggctgcccatcaaactggtgttccagggagaggggagatgaggccagggtggctcgtggctctcctcactcactaggactcagcctcatctrgcctaatagggctccccggtggggcaaatcacctcccgccatcctgctcagagtcgctgtggctactgtaaccctaagtgggctyagtaggagcatacatctgaaaaggtccagtgtatacatgagctttgcagatgtatacatgatagtctcaaatttttaataactacaaaataaaaccttttacaagttataaaagtagtatgtcatggttatataacaagtgagttcatac

SEQ ID NO: 740 - DNA, 600 bp, Bovine  MMBT10405
aagccctatgaatgcaaaactgcctctaataaatattaaattaaatatttatatattaaacatttataaaattaaatatatattaattaaatttatgtataattaaatatatattaagtgcttaatatatattaaattatatattacatgacatttccaaagcaaatagatcattactcaatccaaaagccatttttaacgcttattatcttcatctctttatagtgtttgctttaatttgcccggtccttctatgtgaaatactggtttctatgacactagaacccttctgctttctcrtcactgtccatcgctccctcttttgggaaagactgtacacagctcagttcctttattcctctgacagctctgcccattctgtccccattaccttagtagtttctttccgtcttyttctctgacctgtcggtatgcacctaagggtgcaagcttcaccctcttccctttcatacaactcactattccttaataacttcatcactcatgttaccagcctaaacymgtaactgccaactcatcttttatctcgagtacagatgcaaattttttctgtaaaggcccagatagtagataatctag

SEQ ID NO: 741 - DNA, 598 bp, Bovine  MMBT10531
  misc_feature (1)..(154): n is a, c, g, or t
nnnnnnnnnnnnnnnnnnnnnnnnnnnnnnnnnnnnnnnnnnnnnnnnnnnnnnnnnnnnnnnnnnnnnnnnnnnnnnnnnnnnnnnnnnnnnnnnnnnnnnnnnnnnnnnnnnnnnnnnnnnnnnnnnnnnnnnnnnnnnnnnnnnnnnnnnntgacgaaactgttgccaggggaaaggcaggtgacatgctctcccatttacactgagccccagcctttcagagactcgagcaagtgcaccgtcttaaaaaactcaccaagttaaaactgtggcccaggtgccttaccttacacaaarcccccaacactctccagggctggagaaacaacactgtttggaagcagaatggccctgtggccaggagcacaaactctgtagttagaccagaacagggcccagctgagctgagtgactgttggccagggagcgtgggtgagaacaatgcccctgccccactcaccggcctgccatgagacttaaaccagctaataccagcccagcactcagaacagcgcctgccacagcgcctgccacagctggtgcagcgtgctaactaccgacactacggctgctatcacgcctgttaccggcatgc

SEQ ID NO: 742 - DNA, 600 bp, Bovine  MMBT11111
tgctgcctgggaagccctgatattgcttcttacttgggggcatctcagcttccctgatcacctgtcttactgacaggaggcaacaaggaggagaactgcagacctcccagggagcagcttttgggcatttgattgaggcaccaagacatccagaggacaactgagtattgacgatggatagctttgaatggcttttcttttttaaagatttatgtgtttttatttatttttggctgcactagatctccgttgctgtgcrggattttcactagttgcagtgcatggacttctcattgggtrgcttctcttgttgccaagygtgggctctaagtgcacaggctgcagtagttgtgtgctgtagagcgctagatcagttgctstgctgcatgtgggatcttcctggaccagggctcgaacccrtgtcctctgcattggcaggcagattcttaaccactagaccaccagagaagcacctgaatggcttttattaccatgttgtgaactgactttggttcttaagagtggctccatgtcggttcactcttaatctcagtactgagacatcactccaagctttcctaaatggtaggacttgcaaga

SEQ ID NO: 743 - DNA, 600 bp, Bovine  MMBT06043
tcttataccactatgacaaatccatccatttgggtaatcttaactgaacatctattactatgatccaggtatgatactatctgctaaggcacagacatgaatagaatacatccccctgttgttaggacattcacagaccaaaagcaagatgctcacacaaatagagcactacaaaacaaattagatcggaggtccactttattctaggtgcagtccgaggagatgagaactgtatgcaacaaattcacgttcaaggtcagtggggatgcaaaagattctgtgatcagttctgctcccacrgggaaagggtcaaagatggctgcacagaggaggagatgcctgagatgggtcttgaggratgaataggagtttgctaggcagacaaggagaaagggcattctgggaagaagggctgacgtgtgcaaaggctgcagtcaggtagctgcagcacacagagggaactgcaggtgggtgaacaacatgaatactttaagggtgagacgcagcctcgagttgtgcrgcatgggccggsggrggggkggggmaggcaggtacgtgtgttcttcctttaagaggtcagtgtgtttccacttcatctgt

SEQ ID NO: 744 - DNA, 598 bp, Bovine  MMBT10538
  misc_feature (1)..(51): n is a, c, g, or t
nnnnnnnnnnnnnnnnnnnnnnnnnnnnnnnnnnnnnnnnnnnnnnnnnnntctgtttgggagccggtgattattttcctgtccgagccttgctttgcagtgggatttgcagccacgaaaagttcttggccaggacatttgtgtcttaggaaatgttgggttgcacttttatttttagctttaggaatgcgacacttgatattatttgggttgtttaagatgggccaactttaggatgagaactatgtcccctaacccacgccaatcctggaaccttctcgtcagaaagggagggtctcrgctccacactggagacagcaggctgcatgtgccctgtttctggggaggcttctgtccaaggttcccccamcccgtgtgtgctgagttcacgccatcagctgggaacaactggtgaatcagaaagcaaacctgttgtccaggaagtgcaggagtgggttcccagtccaggggacaggtttccccaggaggggcctctctgagtcatgacccctcaccccyaccccatgggttgcagacccaggaaaccgcctcacttgtgctgtcagctgagtacacagccatgtacacagagccctgg

SEQ ID NO: 745 - DNA, 545 bp, Bovine  MMBT09773
  misc_feature (1)..(19): n is a, c, g, or t
nnnnnnnnnnnnnnnnnnnttggttccctctccttccttctgagggagcagctcaggttcccagctggcgatggatggccaggcctgagggggggatgctgtggccgattgctccttctcgctctctctgcggagacagatgcagctgccggggccctgtccccctgcaccgtcccagcaccaccccagcctcctctcctgcctcttcccaccaggtcagtgacccctgcagcccagagggagctttggggtggcagggagggactagttcctttggaaacttgccagcggtggggtgcrtaggactgggggccggagcttgatttctccctaaagccccaatttggattgaagccgtgggtccttgaagtgtgggtggggctgtgaagaattagggggacaccaggttggattctggcggaggtggttttgggttcagtatctggtgtccaggcaacatagagggtgagggtgaacgggggtctgtggaggcagctcagacatctttggattgggggttttctagatggagagaggggtggggt

SEQ ID NO: 746 - DNA, 600 bp, Bovine  MMBT09036
gacccacaattaaaatgagaagccggtagtgaaagaagtgtagatacagtttaactcatgtagatctggtggttatgggaartataaggcacaacatatcacataaattattatcagtgggcggccagcagggagatgcaacacaattgcttcaggccagggccccwcagtcatctcattctctcttggcrgcgtctccaggattcctctttacctctctaggccttagtccatccactggacctgytgatgcaatgcactcacgagctgaagctctcctctgcaggttctccatccccrtgccccaggaatatgactcataaggctcctgcctgcagcttgagcctcatgcacctgctactctacccacactgaatttctcaccatcccctgggcaccccatgcttttctaatgatcctaccagtgaatgcattgtttcttttaagtagaacgtcatcccttcttttgtatggtgaactcttactcatacgtcaagacccgtatcacctcttaaacgtttacgacacttgtaatcacttttttatatgtgcattatcaacaacaacagcgatagctaatgtatctagtgtgggacctgg

SEQ ID NO: 747 - DNA, 600 bp, Bovine  MMBT09068
ccgagagttgccatttttaaggccagtttactagctacctcttacactccgccgccgagagctccctttgctcctgcagtccctctgctcctgcggttactgcctttgcacacaactgcatgggaaccgcgagggaccacccccgtccctttaaaacctaagggggatgtaggaagcacagacatgagatgcagtactggctttaaaaaaaattttttttaagagagtctctgcaggttggtttgctttcaaggtttggacaccatggtactcattggaatgatctacattcttacccartacagtgggcgaaaacctgccctacccaaattccggccacattctcactaaccccsgaaactaagcgtccaaatataggagcagcatcgactcagccaagaagcaccatctcagagggagggaaggggtggtttgctaacatctagtccaactaggactttcaacatggaaccatccccacagaacccaaagcagccattgcctctgtatgtgttctgtgtgtgggtgtagggatctgagtaagaaataacctgtttatagtgtaagaattcataacgtaatcaaatgaaacctttactg

SEQ ID NO: 748 - DNA, 598 bp, Bovine  MMBT11262
  misc_feature (1)..(2): n is a, c, g, or t
nnggttggaatctgactgcagattcctcccgcaaagtcagcatccccaggacctctcatcctagatggggactgggagtgcttcctcattaatcacagctctttaattaacagctctgaggctggaaccaaaggtgcttaccgggagaacgccagcgggccctgaactctggccgcctgttctgatttggaagagttggcgcctgggggagggggcctggcatggctgggcactgagcccggcagggggtggggtttggagggcaagcagctggcaggccagccgcctgtctctgcctcrgacctcaccttgcagagctgactcgactcagtgcaagttgcaggcagctctgtcctcccagggcccatggaggggagatggccagagaaagacactctcggacagcratctcaagacttgactgcaccctagaatcactgaaggagcttcagaaacattggtgcagggtcccctgcggtcctgatgtgataggtctgggatgggatggggaaatgggagttttcagagcttcacaggttatcctgatacacagcaccatttgagaagcacggttcagcgggaggccctcaggctgtac

SEQ ID NO: 749 - DNA, 600 bp, Bovine  MMBT09777
ggacctcccttgcgaggtgtccatatgcctgtgtggatgagtgtgggcacttagagggggacccttgggggccatggtgaggtttgacagaagtgctcctacctggggaggtgggaggcacccaggggtcctgggatggggtgctctgtcctcctcagggatcctcacacagccctgcaggaactcctgctggctggcaccctggcaatgagagaggaggagtaggagtggatgaattgctgttgccccaactgcttgaatgtgtgcacagagcgggctgaggtgagagtgtggaggccrccgcatgggtcacaacctgccacaactccagggcatgccatctaccaaggagacagatgtccggagggaggggcttggccctgtgtgacctgctcggccacgtgtggtgcccagcgtgtagggatcctgggccctggttttgattatctagcactgctataggatacagtaccccaaagacctggcacagtgttccatctccactgcttagctgtgaggccttggatgcatttcttacctctctcagccttcctttctttacgctcaagttgggatagggtctgtcctaaaaaccttgtt

SEQ ID NO: 750 - DNA, 600 bp, Bovine  MMBT07218
ccttgccagcggtagacgacgaagccttgcaagtggagttccttaaagatgatgatttccggggatgggcctgtgaagaggagggcacgtttgagcagcaggatgcagggaggtggccgtgatgaaaacgtgcayggtacaaggcatgtcagcattcccctagtgctctccctcctgtgtcctccactcttcccgacccacagggctgccccaaaatcaatatgcactctgtgcaggcagagtaactgccccaagacgtccatgtcctagatcccagagccttaactatgtgaccttacrtggcaaaagggactctgcagataggaccaagttaasaagctttagatggcaaaattattctgcattacataggtgggctcacatgagagtccttgtaaggaagaaagggatacaggaaaattagaattgagaaaaaaatatgtgatgatggaagcagagatcatagagatggagggagatttgaagaatcagtgctgctggctttgaagacggaagaagggaccatgagctaagagatgcacgtggcctcgagaacttaaaaaggcaaggaatctgagccttcggaagraaagtagccct

SEQ ID NO: 751 - DNA, 600 bp, Bovine  MMBT10404
tttttttttttaattctacctagttttaatggtttttctttctctgaaaaatagtgacttgttctttctgaaatctgaatgatcagatgcagctgcatttttgttgctatttgagtttagggagagggaggtygagcactctgaagggacacagagattagagtaactgttaggctgacagaaggagaagaatcacctattctttgcctagtttaagatttagagacagtagagtgggtataggtgaaaattgtagaaggaaaataaaccagatggattaagatttttttttttttattraagtgttactacatactgaagaagatgacracgttctaccattagaagcaataaaggaaatcgcagaggaaaaggtcaataggctttgactacttaaaaatttagaactactttaaaactttttattgcttagataatgcatatgtgcttagaaaaccatcggaaaacaatagaaaataaaaattccctcaatcattctcccaattggcagctctattgctataatgacattttacgatcatcctcccacacttaaaaaaatttttatgtaagggaaattaaatgtgcaaacaaataaat

SEQ ID NO: 752 - DNA, 600 bp, Bovine  MMBT06041
gcagcccactttaagacaaattttaactgatagaatctgccacctctggagtcggttccactctctttcctgatctgaagctcccctactcctgttcttttttaatcattaatgtttttcttattaaagaaatgtttccttgctcatattgtaggtgactgagctcaggtattatttctctaaggaggaagagattgatttttctggtctgctcttgcaggagtaatcatgacctttctgcatcatccttgacttaaggatgcttctacaaaaggaaaatggcaacagcaaggtttatcrttctcactgacacatctaaataaaggcttatcagaactactaatgcaggcatccatgatattagtaaagactggacagagctgagatggagatgggagaagaggagggattgagtcaagtcccaacaaatgaccagcacaggaacttcaggatagagtatgcaatgggttggagccaagcttctatggctttcaatggtctaaatagatagcatatcaagatattcatttcagtttagttcagttcagtcgctcagtcatgtccaactctttgtgaccccatgaactgctgcatgccagg

SEQ ID NO: 753 - DNA, 598 bp, Bovine  MMBT10943
  misc_feature (1)..(172): n is a, c, g, or t
nnnnnnnnnnnnnnnnnnnnnnnnnnnnnnnnnnnnnnnnnnnnnnnnnnnnnnnnnnnnnnnnnnnnnnnnnnnnnnnnnnnnnnnnnnnnnnnnnnnnnnnnnnnnnnnnnnnnnnnnnnnnnnnnnnnnnnnnnnnnnnnnnnnnnnnnnnnnnnnnnnnnnnnnnnnncttccttttctctactttctgaaacttttcttcactgcgtatttcctgagactcagaaggacggaaggttcattgtgtatgtgtgtgtgttccccaaccattgactgaagttcatgaaatgtggttartaagagccttcccttacgttgacttacagttctgccaatctttttggcccagatgagacgctatatttttgttcccaagaaaagaaatcatggccaccatcgtcatcaccttggctgcttcttattgtgtgcttacgcactggacactgttaggtgatactgggtgcctgatctcgtgggatccttaccattcatatagtcctcactttaggcttgagaaaactgaggctctgagtctggagtcaggatttgaattttgtgctattaagctcctgctctttttaccacttaatgcccc

SEQ ID NO: 754 - DNA, 550 bp, Bovine  MMBT07203
  misc_feature (1)..(172): n is a, c, g, or t
nnnnnnnnnnnnnnnnnnnnnnnnnnnnnnnnnnnnnnnnnnnnnnnnnnnnnnnnnnnnnnnnnnnnnnnnnnnnnnnnnnnnnnnnnnnnnnnnnnnnnnnnnnnnnnnnnnnnnnnnnnnnnnnnnnnnnnnnnnnnnnnnnnnnnnnnnnnnnnnnnnnnnnnnnnnncttccttttctctactttctgaaacttttcttcactgcgtatttcctgagactcagaaggacggaaggttcattgtgtatgtgtgtgtgttccccaaccattgactgaagttcatgaaatgtggttargattttcatccaactagaagcaaatgttctattttgaaatgtggatgaaaagttgctggtatgaaagtgtacggaaaggaagaatgacatcagcctccttgatgagcagtgcaagccttctgaatgtgtttaaggtggcagagaccaggacaggcatggagatggcttcagagcactgtagaataatgatgcctttctttctattgtatgcattaggagcaactctataataaaacaacaacaggaatga

SEQ ID NO: 755 - DNA, 600 bp, Bovine  MMBT08245
agtggtgttttcaccaaggaaacaatatatcctcagggttggcttagattgataaccagaaagacattctatcagcatgcaggaaatgatattggtgacatatttagtatacctggtcttttactgaacagggagcgaccacaagcatcaaggtaaccaattcctacttttcctaccattaacttcatggctgtccatacaattctccttttccgtaagagggctggacgttccttcatttgtaagacctgagtttatctaatggcacctataattaggctcatataaaaatgtagtaarttgcaacaaatacartggcaccacaggaagtaagctttggagctggaagggaacactgtaatattkytgtcgccaaggacagggagaccatcactagcagaaagtatcttttcatgtccctcggcatcctttgggatgtaggtaggggtcgtatgaaagttacacacttgatgaatctccattcctttttttgaactgacttttagctttaacacatgggcaatttatcttggaagatcaaatggttaatctgcctggactaatgagcacagttctggaatgaagaggttctcactgctt

SEQ ID NO: 756 - DNA, 600 bp, Bovine  MMBT07518
gaatagatgattgtacttaagaaactgatgtgaagattcatttgttattttctttgtttttaatacctaagataaattaatttacaacatagacatctgtccacaatattattggtggcatcattaaggatataataaatgcatgtttttgaggaaaccaaaagagcaaattttgtgaaatatatgagaaacatatcatttctttacacaagaaccaaaataatgttaaaacatgtctctgatttggtttcttcttttgatgattttaagtttattttagaattactacatgctagatgrtttaaaaattattgattttaccataggtaatatttgcaaaatgctgactactttcctcagtgattgaattagcaatattctgcattctcttcctgcttcttcactgtggttttactgggattacataaaactgaaagtacagcgttttgggcagaatactggagtgcatagcctttcccttctccagggggtcttcccaacccagggatcaaacccaggtctcccacatgacaggcagattctttaccagctgagctaccagggaacagcacaggagcggtgcaggagcacagaacagct

SEQ ID NO: 757 - DNA, 600 bp, Bovine  MMBT11163
caaaatgaagaaatctcaaatgcatgccaattaattgataattatttaattagatrtatatccttgcaaaatttattgatgccatgcggtagctgtcaacttaattcaccttgctagtagttaatttttatgttaagacatattttcctttaaacctactcaagtctcaacccactattaaaacttatagtttttatttggactcatgaataatgtgattccaagtgtgacatacaaaatatataaatgaaggctttcatatatttttcagagttaagcataattctctaaattcaaatragacttgccattctaaatacgttatctattatgcagctttttttggggaaaaaaagctttttggtatgtatgacttaatggatctcygtagctactacttcttatatattcagttttaaaaacttttgttaygatacacatactgaatgaatctggcttccacagtgaggcaacaactatttgaaatggaaatcctaggacacaagtaatagtagatgaggcctggaatgcttgaagtcggaaaaaagaataaatatcttcagaaatttctctactctgtaacttgttgtcaggtctact

SEQ ID NO: 758 - DNA, 600 bp, Bovine  MMBT11162
ctggacactctgtctctgcctgtgtataggtagccaccttgcagcagactgttactttgctgcaaaaggataaagaatatctcaaccgccaaaacatggagcttagtgttcgctgtgcccacgaagaggatcgtcttgaaagacttcaagctcaacttgaagaaaccaaaaaggctagagaagagatgtatgagaaatacgtaacatccaggcaagatttacgttattttccatataaatagatataaaccaaaccatcttctttagggaactctggctttggggacaaatagtgatttrttggtaaggtttataggataatgttaagataattggtttttgtttctccacaagatactcatattctaactgatttttttcttaagacattttgtttttttccaaaagcctgtttcttttaggtagggatatatacactgttactgtttttattaatttttttttatgatataatctttttagctcccaatgactaagatctctgtttaagtgttttaagaaagtatttgtatacttttatatatttagtgttagttgctcagtcatgtccaactctttgtagccccatggactatagac

SEQ ID NO: 759 - DNA, 600 bp, Bovine  MMBT11161
ccttgtttatctattttatatatagtagtgtgtgtgtgtgtgtgtatgtgtgtgtatagcatgcagcttaattttgatacttaggtatttcctaacttgctcctgaataaaccctttcaaattcatgagtatagcatataatttacttgaaattttaaaacatgtgaaactttgtatttatttcaaaaaacatatacattttgtaaaagtataaaagtacacaaaatactgatacaaacctacttcaacatggtggctcctctagattaaggaaaaatagattagagaatggtgcaaaarggggcttccttgtacctgaaatagaccatttttttttcattcttataaatcctgaagtaaatagaaataatattaaaatctgttagagctcataatgagggagacagttactttctttccccttatttttctctatgtttgaaatatttcaaaataataaaattggaatatctcaatattataaaatcgggggaaaattgaggcaagagatgacaagaaacttcctcaaagtcaggaactttctatactctcctggcaggaaggtgtttactcacccagcccctaccccctcatccctgc

SEQ ID NO: 760 - DNA, 598 bp, Bovine  MMBT10191
  misc_feature (1)..(163): n is a, c, g, or t
nnnnnnnnnnnnnnnnnnnnnnnnnnnnnnnnnnnnnnnnnnnnnnnnnnnnnnnnnnnnnnnnnnnnnnnnnnnnnnnnnnnnnnnnnnnnnnnnnnnnnnnnnnnnnnnnnnnnnnnnnnnnnnnnnnnnnnnnnnnnnnnnnnnnnnnnnnnnnnnnnnngaagccccagttgtcccctttttaaagtgctgttacttcaagaggttacaacaaaaaaatagacaaaacaaaacccaagaaggaaagcaaaacaggatgaaagtacaagagaaggaagcaaaataacttgcaacatraaatatattaaagggaatgcagtactgaaccagaagacccatagtatgtttgtatgcattgcacataaccactttgtcattaggaacaagtttcagaagtggaggggacagggactgtggggccagtaaggtcactccactgtattcacaattggggctctgaagttgtgcaggagggaaaagtccccctctcccctttcttacccacttgggtccagttaaccccatgaggtctgatgccctggacccttccagctgcttttctaggatctcaacttagcttggaggggaagcttat

SEQ ID NO: 761 - DNA, 600 bp, Bovine  MMBT07967
gttccacccaaatgtagattacagcaacctgaagatagaaggtccaaattcctaaatgaaatgtttcactataaagctgcttagaatgaaggtcttccagaagccatctgcacaatttatcacttagccaggaaatatatccccttaaatgtacaaaatcatgttggtgtattgtgttggggtttacactgattaataaataatctgaaaaatttttaaaaaggttattgagaatctgctagctgttcgacatactaaagacttggtagaaaagaaatcaaagtcccttctctccaagarcatcccttctctccaagagcagcttcccttctagtgagagagccaggggggtcaatgtgagcccgcaaaatggcaggtggtgatgagtttcttaaaacaattagagcaggataggaggatcaatggacttcccaggtggcactagtggtaaagagcctgcctgcaaatkcggagacagaggttcgattcctgggttgggaagatcccctggaggagggcatgacaacacactccaatattcttgcctggagaatcccatggacagagaagcctggcgggctgcagtctatagggtctcaa

SEQ ID NO: 762 - DNA, 600 bp, Bovine  MMBT08694
aatgaattattttcttaaaggagacagctaaaaaatatatttattttatctctaaaaataaaaaaaaaagaatcttaactttaaaatttagattattaaatattctctggaaagaagttaaggtggagagatttaacttttgcggtatattctacttttgtctgagaagagtaaatgacaacatagatgttcttataatattgttacatatcttttaaaattcaagcatttctcattgtactgtaagtaatttatcataataatcatgattataattggaatgatcttgcttgcaactcrcactattattttataactttgtactgaattcatctcttaagtctagtaaagtaataaggatgttgaaatgaagtgaaagtcactcagtcatgtccgatgctttgctaccccacagactatatagtccatggaattctccatactggagatgggtagcctttcccttctccaggggatcttcccaacccrgagatcaaacccaggtctcttgcattgcaggtgtattatttaccagctgggccaacagggaagcctataaggrtgttatgaatgtataattccttcycctatattctttgc

SEQ ID NO: 763 - DNA, 600 bp, Bovine  MMBT08275
gtagcacaggcaacatgctccctaagaagctgacccagcacctggcagggcagatgggggatcagggttgccaagtgatctgaggaatgcctgcacccagacctggttccagactggcccctggagacaggaggggctcctcatggaggtaaactggctctcctttccattcctgcaatacaactgtggcatctgcacagaattaaaactaaagaatataaaaaattatctgtgatcttgcaatttctgtctctcaggcaataaattttgtcaacaaattacaagacaaaagcatacacrtgtacattgcaataaagcatatgaagtactcgctagactcttcagagcctagaatctctaattgaaaactgccacaccattgcaaagcacatatccacagtattagaaatggaaattaaaatgtaagattattgtacacaacagaaagacaatttttcatatgaatgaaattttatttgcatacatttttatttcacattttaattatttacaaatcaaaaagtcacttttaatatgcatggctgagtcccttttgctgtccacctgaaactatcacaaaattgttgattaactctgtgt

SEQ ID NO: 764 - DNA, 600 bp, Bovine  MMBT06819
tcctagagatagagacgatagcttgtgttccagatggccattaacccagctgtgtatctaacctagcatgcctaccctaccataatctctattaaattgcttccctataactttattaactccctccattagttgaatttaatatctttgacatgtgttcattttgtaattatatgagagtcacgctcttatctttcagaatattatattgaatagctgataaaacctaatcaggtgaccaggaacaagtccatggtctgataaaataagatttattgatttgcagccagggagtacacrccagaggaattctgctggcccagagggaggagggaagtgtgttttataaggtttggcttttcactgaaggactctaaggaggtggctcagtggaaaagaatccgcctgccagtgtaggagactcagcagatgtgggttcaatccctgggtcaagaagatcccctggaggaggaaatggcaacccactttattaatctttcctggaaaatctcatgggtagaggagtctggtgggttacagtccatacgattgcagagtcaggcacaactgagcacacacaygccttcagttcaggacggc

SEQ ID NO: 765 - DNA, 600 bp, Bovine  MMBT07934
gtttgatctccttgcagtccaagggactcacaagagtcttctccagcaccatagtgttggcttaaggagcgtgcagaagaatggaagaatcagagtgaggtgaagtcaatccagaaatattccaagcactactgagttcaaaatttggtcctgagaagaggtaacaaatgagtgagtaataggtcctttcttgccattcctagccatgtgtggttgcccttaaactgactgcccaaacacatcagtgatcagcttgagaagagtgatatcttgagacytcaatcaaaaatataatagagrcagtgcacaggggcagcctgttggtatttctatctttctctctgccacatccgatggagagttgctgtagttcagtggctaagtcatgtccgactctttgcgaccctgtggactgcagcacaccaaactccctcgtccttcactatttccctgagcttgctcagactcatgtccatccagtcagcgatgccatccaaccatctcatcctctgtcgtccccttctcctcccaccttcaatctttcccagcatcggggtcttttccaatgagtcagctctttgcatcagatggtcaaagtgt

SEQ ID NO: 766 - DNA, 600 bp, Bovine  MMBT09703
ggctgctccctgaactgaaaattcatgtrctttggtggccagaaagtataggtttcactgcacagtcatgatcttgattttcataaacaaagggccacaagattgaccaaagyaagtttggtaagagaatcaaaacaraattctgagcagaaatctatcccttccactgccatgaaattcatgacactacatcagacccagaggctgggaatccagcctccagcaaccctggaaaagttataaattgcaagctgtacaaatctatatccagaacctactaagggtttttaaattctactrtgctttacattgagagacatcttaaaattcaaaataacttctaataaccaagaacctcaatgttaaggacatctattcctgacaggggaaagacagcaatgcatgagctgaagcctaaaatactgtgacaatcttgcccggaaaccatttaaactttaaacaataagcaactctgagctcactttgggaacagcttcctctgaaagctcactgttaggacaggcttgttgggaaaatgcggcctgtgatgtcctccccgattgtccccccgaaagaaggsaatctytcatattggcccaa

SEQ ID NO: 767 - DNA, 600 bp, Bovine  MMBT07677
ttgtcccatgctctttcctccaaagcagaattatttggagttctcttgggtcttttctacctgtcactatgactgtgataccaatgatgagaaaactttggtatgtaccatgactacagtgtcagacaggttcatgtaagtgatctcactgactccttatagccagctctgaaaggcacacaaggcagctattgatactcttctattgcagctgagctcagagaggtgaaatcacagccatatcaactagtttaagacagggtttgcaagatcagatgccatccccagatttttttactrctataccagtcaacaccttggtttgaaaacagcgtgttgtttcgtagcagcccacagtgtgtgtgcctcaagccaatattcatagaaggcctccagctaattcttcgtgtttagattaggttagaaacctaggccaatttaaatgaacaaatatctaagtgccttatgtgtgtctagcctggctatatggtggcattcagggttcagagagtagaatgcatatcacctatggatttagattctggatggacctgactcaaatcacagctcttctggggactttgaacaagctacttaaac

SEQ ID NO: 768 - DNA, 598 bp, Bovine  MMBT08905
  misc_feature (1)..(55): n is a, c, g, or t
nnnnnnnnnnnnnnnnnnnnnnnnnnnnnnnnnnnnnnnnnnnnnnnnnnnnnnncatgtcacttaggaactaaacacttggtgtttggcaaggggagatattttaaggcttgagagttaataggtgaactgtgaatatatatattttttcatacactgggatatttttgtcttkgaagcaaattaaagccttgtcttccaaggcagggagttatgtgcaacatactaggattatcttggtatatttttcaaaatctttttctgtctagatattttgatagatgatgagagatattcatrttactttaaatatgttcatcgattggaagatagttgasagggcagagaatgttcatataagtcagagaattaagaagcataggcatgcaagatgtttattactttataataataaccccccttgtataacccycctttatacaattgcktattatctctccctcatatttattattacacttatttagctaatgcttcaacttttgttggtttcaccagatttaaattttcatacagtcagggactatttatatttttcaccattacattcctggcccataacagatacttgaactat

SEQ ID NO: 769 - DNA, 598 bp, Bovine  MMBT09781
  misc_feature (1)..(55): n is a, c, g, or t
nnnnnnnnnnnnnnnnnnnnnnnnnnnnnnnnnnnnnnnnnnnnnnnnnnnnnnnaccgggatttcggggagctttgtgggtcgcatcaagggtgccaagtgccctttcgacctcccccacacagcctagtacgtggtagctgcatctcactgactccctgaggtaggtctttgacttctgaccgttaaatggaagaagatggcctctgtgaacagccagaccctagccttgtagttaggatgggtgttctttattgatggacctttctgttgcataatttctccatcatctgtacaacrgggtagtaatagtaacaccttatctacatcgtgaggatgatattcgttaatacgagagcttagaacagagtctggattgttgcagctccaaagaagcattagctgctgctgctattattattatcatcattgctgttgttgtaagactctgtcctccagattcctgggcagcccctcttgcaccatgtcagtcatccccgccagtctccctccctgaggcctgcctgtggctgctctctgtctttgtcctccattcttcctcctcctctctccccttccctccttgctgtcctggctc

SEQ ID NO: 770 - DNA, 598 bp, Bovine  MMBT06176
  misc_feature (1)..(19): n is a, c, g, or t
nnnnnnnnnnnnnnnnnnntctttgttatcccatggactgcagcccgccaggctcctctgtccatgggattttccagacaagaaaactggagtgggttgccatttccttctccaggggttctccctgacccagggatcgaacctgggtctcctgcattgcaggcagactctttccatctgagccagcagggaagtgggtctttgacctctatactgacaagtttttctratggtaaagggccagttcatcaggtgtactctgtggaagggcttatctgtctactactcaaataactccartcttctgactgattcgatcatagaggaaatctcctggcttagttcttcccataatgtttggcaaaaagattcagaaacttggaaagcactactttctgtggyttgagatatggtgayaggtatcacagctgtaaaactactgatagtttcttttagagtacttatggatagcttggaatttggataccaaawcctgattagggtttaaaccaatcttatcaggttttccttgttcttgatttaacttaaacatacagaactattgtcttggagaatacccaaccttggagctaggaaa

SEQ ID NO: 771 - DNA, 600 bp, Bovine  MMBT06159
ttggtatgcttgcttagagaccaatttggtaatagctgtaaattttattttaattcagctatacattgatttagcaaaattgtgtactaatgtattaacataagtgcccaaacatatatgtagaagaatgttctttgtagtatactttgcaggaacagcaacaaaaaaggaaacaaccaaagtgtccatcaggaggggacatgttatgttattgatgcaaaggaatatcaaacgatcatttaaaagaattaaggaaatctgtatgtgccgatctgggaagagctcaaagaacatgtaagraaagcaagactccgaaacgtactctataatagtttggtcccactggggcttgagtgagtgagtggatttttatttgcatgtaaaatatctcagaaggaaagagacagaaacaactgttaatagtgatcacctctggggagtggcagctataggggaaacgggatgagagactttgtttattctatgtcctgttcagtggtctgaattatttttcatttatacaggttttacttatgtacttgttaaaaagcagtgaaaatttttgttgattgcaggtagttagcttagaaattctatcct

SEQ ID NO: 772 - DNA, 600 bp, Bovine  MMBT08349
aattagtggatttaaaattgtttgcctcttgagcagttaccaacttcctggagatcctgagaaggctaactgtaatcacctcaccaatctgatcactgtttcttctaatccctctaagaagcacatatggatgaaatgactgattttaatcaaactgatctgggaaagattaagacacttcttctgaggctgtacacatttccttcacaacaaaggaaatctgcttggagaaaagtaggtatgcttaggaaccaatcagcttcatgcacagagagcaaaatgtgtaacttgcaaaatgtrtaacttacaaagtcttcaagctggaaagcccccggaaggcacaatcagcaatgtagttgactctgttattcccaatgtgcaatgtatttagcaagcttaggcccaggaagcttgaatcatccaacctcgataagtgattgtaygttaggtccctgtaaagagaaaacgaacaacaacaacaaaaaatcaacaatagcttttattttctaattcaaagcagtgatttgtagaaaaaaacaaaacaggtaatatatattaccacaataatccttattttaaaactcctccttcttaataata

SEQ ID NO: 773 - DNA, 600 bp, Bovine  MMBT09348
cccaccaagctcctctgtccatgggatttcccaggcaagaatattggagtgggttgccatttccttctccaggggatctttccaacccagggactgaacctgcatctcctgaattggcaggtggatagtttaccactgagccacctgggaagccctctgcccagcagtttcaagttgtggatttaacggacttcaagtgaaggggtggtgagattcagagggtgggcgaagctatttaagaggggatttacaactctacaaggaaaagagagctgaagacaatgtgtactttacctgagratattaaacagcttaattcacatgcaggaggaacagttatattagcagggtggggggtggggaggaaggccccacagatatctttacacatcagcatgagattgaaatagatggaagtcaagccttacaggtgccactcaagatgctgttacctgtctcttctgctgtctgtcactcaggagctgcttgaggtaccagtcactattctgctgctgcagccctcgcaggcccagtgcaggtgactgcaggatcttgaacaaggctggtgcagatccctgctccaaagccaggtctatattt

SEQ ID NO: 774 - DNA, 580 bp, Bovine  MMBT08319
atgctcagagtaacyagcattattctgacacaaaatgtgaaggtctctgatggggagggaaaaggcattttaaaagattccaatctgagggaaaaaatatttgtcatgagatttctataattaaaagcttatccctcttcccttcctagattttcttgtcctccagtctcctcttcacatacagaatttaatcttgcaactgcttattaatgctcagctgtgaggcaggcagctgatggaggatgctaaaattatctggggagtaataactgtctcaaacttttctaaggccagagaacrgagttcctgagccatgactcttgcttgtatgccctcaaatagagggaaggtctcactgagccaaaaaaaaaaaaaaaggaaaatggaaattcccaagttttaggcaatgcattttcttctggaacaatttcaccactaaaatagtacagagaagcaatgaagtagagatctgagggtcaaagtttttcttaatgatggaaggacagtcacagaaaactaaatataaacctgctctttcttgggtctatggaatggggtaaagttataacaagagtgggag

SEQ ID NO: 775 - DNA, 601 bp, Bovine  MMBT05494
  misc_feature (1)..(1): n is a, c, g, or t
ncccttgccccaccctggtccagactccagagcccagagcgaggcagcagctgtccttggtactgaaaagagaagctccgtttgatcaaaggcaagaacagccaaagatggccctgtgtggacccagctgaaggccaggccaraacccacctgtgtcctgggaacccaaaactctgaccccactttcctctctgctcccacaacctaaagaatgttagatctagaaggaagctgggagacagacttttaaccaccattttacagaagaaacagaggcccagagggaaagtgaatttctcarggtccctcaagtgagagccaggactagtcctctaaagtttcagggtgagtttttggaggcctttctaggacaacatgaggaaaataaaatggaaggaacaggcaaaaagcaagggaactagaggggaggctggtgcaatcatccaggctttgaaatgaagaggagggaaygggcaaggctcaagtcaatgagaggtatggaagatcctgtgatgggcagacccagaacccagaagactgggtcccagagaggggtctgtccccactttacacagccctgcccttcagggaactgggccat

SEQ ID NO: 776 - DNA, 600 bp, Bovine  MMBT07500
taaagctgtcaattcaccaagggaaaataggagtcctgaatatttgtgcacctgaaagcaagtttcaaaataatgaagcaaaaatgaatagaactgcagagagaaataggcaaatccataattataatggaagatttaaatatcactctcacagtaattgatggaataaatagacagaaagtaaataagagtataaaagatttttacagcactatcaaacaatttgatctaactgacatttataaaactctctactcaataatggaaggatacatattattttcaactacatacagaacrtttaccaagatggattaataaagtctcaaaaatttwaaaggattctaattatacaaagtatattatctgttcataatattaaaaaagtagaactctatagtagaaagatatctggaaaatctcccaaatatttggaaactaaataatgcacctccaaacaactcacatgttaaagaatgaatcaatagggaaatagaaaatattttgaactgaattaaaatgaaaacttatattaaaatgtattacatgccattatagcagcatttagggaagaatttatagcactagacgcctacatta

SEQ ID NO: 777 - DNA, 598 bp, Bovine  MMBT06031
  misc_feature (1)..(97): n is a, c, g, or t
nnnnnnnnnnnnnnnnnnnnnnnnnnnnnnnnnnnnnnnnnnnnnnnnnnnnnnnnnnnnnnnnnnnnnnnnnnnnnnnnnnnnnnnnnnnnnnnnntcttgtgattttaaaaatgatgaaaacgttcatctaaataataaacagcacctagaacctcccagattttctcaaacgtatctcttttaggaacagaaaaccccaggcaccgggaaaggaaaacattccaaaataacctgaagggcttgatgcttattaaatagcaagatggttcagtcgaaaaagctaatgatgccaaggarcgtcagattttctccagagcttcaaggtgaagacaaatagagytctcagcagcattacasataatgaaaaccatcaacaatttcctgcttcttctgtcttgcgctgatacttctgtcgtgcagatyacccraatttgattgcaggatttttctcccttgttgttgccaagaactataaacaccatgggatgtaataaagtggtgctctgggtcttttattgtcattattattctaactcagttttagaaattagatgtgactttactggctaagagcagagctcgccatcttttcaca

SEQ ID NO: 778 - DNA, 600 bp, Bovine  MMBT09663
ttatctctactccttgtagctctgtcccactgtatgtcactgmaaaactgaataaaaggcatgaaaccagaaatgacagcagataagaaccagcaggaaaattttggaagccatgaagcggttagacaaatgggcagtgacttaccagaccagagagagccaagaaccgatgagggtagagccaggaatcaagctaatttgtgcagaagaatcttggtaagactcaggaaggagaagcactggggatgcatgcgtgcaagggagtcagagcataggaggcttaactgattctcattcttraatagagcagatcactaaaagatcccaacatttgctgaaaaccatgaaagctacggaggctagagtaacagaaaacattggaatatcaggatttacagaatgtgagaagaggggaaaaggaggaatggaaaacgaacaaggaaatactataagaatctccagaaggtcattagtctctagattgaaaggattcactagttgttcactgcgagtgtgtgggtgaataaatgcatgaataaatgaaactgaacacctcatgacatgttgttgtgcacaggagatgcgagcatcctcgtgtaa

SEQ ID NO: 779 - DNA, 600 bp, Bovine  MMBT09730
agaccacaggtaagctcctgactcaaggacaacccatccgctggctggccaaaaacctataatgatccctggcatgaaaagatgaactgaactaacttaactctccctttttggactctggattaagaagtaaaaagagaagtacatgatgggaacatatgagttaaaaaccaaagagaccctatggattagagataagagcttgaagtgtagaaaggcaaaaagtagtcaggaagcagaaactaggtaagtagaaattatgaaatatagaaaattatacagggtaaaagtggatggggraaggaacatgtgcctaagtgcctaagagagcatggagtcactgaatcacattaataagagtgccctggagtaaagaccatagactcctgcaactgaagtcccactttatgccgctctgaatctctgtgccctttctcgctctctgtgtcacttgtaagaatgcccatttgcttgaggtgccttaagaggttgtctctgtaactgacaaagcccaacctaaccaaaataccattcttggttcatacagttgctgtcacctgtcaaagactgagggtattatgttttcacattttttaccaa

SEQ ID NO: 780 - DNA, 600 bp, Bovine  MMBT08393
agttcatctcctgccatgaggctgagaacaaagacaatttttttttaaaggtatgtagaggaccatatggggcccttatggggctctgggcatatggaattagagatgtggaaatagtcctgaggattatagaaaggaagatttggcagaataataaaggaaggaaaattacatcttgaacaccctttcaatctttatcaaattataacaatttaaaaaatcatttaaccataaaagagtataacttaattagatccactaacttctggaaaatgacaaagtatgaattttaaaaatctrtgaaaggaaagcaggtcaatttaggactggccacacaaakaactttaatttggactaaccaaagaaaagaatctgtctcagtgatataccttatttatggcaaactttgacaagaaagataagtttaagaaggtcaagagttaaagagtaagatcttaatgtatcttgctttaatgaaaaagtccatcatttgtaatcaacacattgattgtatgcaaatgtatgtggttgcaaatgttcagaaacaaaaggtttccttaattaaacattctacctccttatattttgattacattattc

SEQ ID NO: 781 - DNA, 600 bp, Bovine  MMBT08656
tggtggagaattgacattgatgtgtgtgttactactgttcagtaagacaaggaagagaggacaggagaatatttgcattctggtgaccgcaggagagcaaggaacaaagagccctgttagaagacaggccaggtggagtcctgtttcagtttcaatccttaggggctctgtctctgattgtcacactattgctccttttagagcccacagaagaggagccaagagcccaccccgtcgccaagattatccataaagtttttattttgtttcccagattcatcatgttattctcgctaagcrtggaaaaacttatatgaaatgtgttamwctataagataaatttgaaaaagtcaattgattgaatctgttcaacttaagctggtaataaattcactggctttatgatagcttgcctacgacggagtattaggtaggttctgttttcagttcagaagctacaggcactctgattctagctttctccctgcaaacaatttgcaataaagggtgtcactggcagattcaaagacaaacatgacacaaagcctcattatttctcagcaccaatcaagagtcagccattcttctaggcatcgtgga

SEQ ID NO: 782 - DNA, 600 bp, Bovine  MMBT05483
acccaactctttcgtaagtggcaggctgatttacagagtagatccctgctctcaaaagattcatgctgatgcacatgtccaacctccttctacccggactttccccatttattcgtaaattagagattgaaaatcaaaatgtgtggcctacctgaagctacaatcagcccagattagactagaaaggtgcctacctgaagccacaatcagcccagattagattagaaaggtcaattgttttcttttgtcttcattgccaaagatggattgcttttagacaaagtatttgctcatcctacrctccttgagtaagcaaaaaacaatgccctactgcataagcaaagttaggaaaactaaaacttttgtcagatgtctacaatgctgcttttagttttacttttagaggaacattatagtaagagcacattttgaatctccttttctttgtaagccacatcgatctttatgaacggtaaaattgctggtctatgttgcttttgaggaatttaagtggggatagaggggaacatgattatttaaacataatggttcatttaatgaattctcttcattttggaagtaatcaatctgatgagcctt

SEQ ID NO: 783 - DNA, 600 bp, Bovine  MMBT08301
cttgtgtacaaacacacaaagctctttttgctctggaatagtcttttgcccaaataagtgaagtcctccaccacatatgtctctcactcttctatggcatttaatttgtgcttctcacaatacacagctactgtctcctaaaaacgcctatttctattcataacattaataataaaaataacatttattcctatatctggttgctctgaccatgccatttcatttttcctctcagtatcacatattatcacaactgattccaaacataattctagatcactgaatcaaagtcagaatctrtgcaattcttaggtatctctagctatattgatttctgccattaaccatgctcaaactcccatttcctatctccaagctttttttcacttgctgctcatggataaccttattttatattggggttccttttgaaactcatgaatatataatgagaggaagagatttgtaagaggagagttaatagttgtgtctcatttcaaacaaacatttgttaattggcttcaacacttttaacaaatataactaaaacatatgacttagatttcttgaaaggcaagatagagctgatatttataattc

SEQ ID NO: 784 - DNA, 600 bp, Bovine  MMBT06079
agggatgaaagggagactgtatacctgagtttaattcgccattggatctcttgtaccagaaaaaacacatatcaaatatccaagaagtaaaattgatcactagcttaatctggggactcactataaggaagggtcactttgactagaacacagatacctacaaatacaatgtgagctgatttcttggcaacctttaaaatgttctgggcagcacaacttctaggtctgtacagttgatgtaagtataattaagtagtgaaattgtatggtatatacctatatgccaatagtgtatacctrtatgtgcaggatttgctaatataaccatttcaataaaaacttattgaaaaagatgcattggccacatggagtgctgttggtggaaacctgtatcagtgaggactctcttggttgcaaacgactgaaaccccaacccaaactggcataagtaaaaaaatagtgtggtgttgcccaaatgctaagtcmaaaaaaagtgtagtgtctcccaaaagctaaaatgccatgagtgtgcgtatatcacttacggaatgttttggccctcaaatactgaaaccaagacacatctgctagttatagcct

SEQ ID NO: 785 - DNA, 600 bp, Bovine  MMBT06050
tagttgagcagaaataaataagcgctaaccactgagcagaagtttgctgagatgtagtatttaatgctctgaccctgtatctattcaggaagatctgctaccctggaaggaaaagaagggaaagcttccctttcccctgcaagaccaagcatgctcccacacccacacccacaccccctccacatacatagaagctttaatgctgtaaaaaacaaatggagggtgggacagaatgaccacctcctttctggagaatgtggatacatgtctatactcaagtcaagcagcattgaggacctrtggtccagatatgcgccccaaccatttactggcttttaatttcatctctctcagacctaaaaccaatgtccttcccttctggtattgagagataagaatagttctcacttaggaaatgcaagtckagagaaattatcaatgccttgagacccaaattggcttctctctccattgacagactaaaacatatcacctgcagaaccagcgagtacagtgttcttttgcaaagggccagatgtttttgtcaataatttactctgacagtgtagaaatagctgggctctaggaaaagagatccag

SEQ ID NO: 786 - DNA, 600 bp, Bovine  MMBT08318
gcccttttatgagcagcgacagctgggcgtgcacgtgtgtgcacgcgcacacatgcgtgcgtgcaattgacttgctaaaggtcacccagctcagtaccacagaccccccccccaaggtctccccagctcccagcttagaattttccaaaatagagctccaggggggcttatacaagcagcggccagagaaaagaaggaagcaggaactagaaggttgaagaggacaggggggtggagctcctgcagcaagctcttaagctccgagacaaattatctccgcatccctgagaaccaagcacrcagtgggtgctcaataaaagtttgatgaatgaatgactgaggctgggcggctggggagggaggggaggtggtaattgatcaagaaaactcgggagtcactgctcccaaataagccaagaagacagcagctgagaagcctaggctcgaaggctgggggagctggggagaggctgcacagccactcgagctcctgcgcctgccctagagcagaccgtggaacctctgtcccagctggccaagagcatgagggtgactgcctgaagagaaagcagggggctattttcccaaatagttctttaa

SEQ ID NO: 787 - DNA, 600 bp, Bovine  MMBT07572
caggaagccagggccctctccaaccagaactgctacggtggtctgacatcatcagtgggaaacccaaactcctcttgagaggcgcttggatgcctggacaaggagaggaaacggccagagacagttcccattttggtctgcagttcacaccaggctggggacaagggcagaattctcaggctacacaactaacatggcagctggtttctaggttcaaatcaaaagcttaacagaataatggtctagtcaatcaaacacaagacaagtaccgagtcacatgaaatcccacatccatcactratctaccaactgttaatattatcccacatggtccctcctacagggcaggagactgaagactatggaggtggggtgacccgctcaaggtcacacagttgataagcagcagagcctgtgaaactcagagagtctggaatccactcctaatctttgctgtttccacccctcataacacacggaagtgggaaacgcccctgctcaggaagccagggaagcggccatcacactcacctgcacatctctctggacaagggtcatgtccacgtttgtgctttcatcccggtttccctgaaaggaagc

SEQ ID NO: 788 - DNA, 600 bp, Bovine  MMBT06849
tcttttcacctcttcaataaatgttctttaaaaccttgaagctgcaaatttagtttatttagtttacttaaatggcttgccatataatctaattggaaaggctaattttattgtcaaattcattagtcccatatgatatactttctgccagaaaatggctaacttgttatttctattcagataagcatatattttctcttgacaatgacccactgctgatgaactaattctaaaatagataaggcagaggccctcaccaagaatttgtcatttagattatttgggtcacatagcacggarcatttcttaccaaagttttctttgcgttscttttactgtgttctcaaccaggagcaatgcattttctgacagtagtcaaggaatggaacagaccgagctttgaatcaattcaaaatcmtcactcttattgtctcaccctgtgctatcttaatccggaacatcctgataacagaccaaagtacacgatttctcatatcactcttcatccttgaaatctaggacatcctgctatgggtttggttgttttgtaaaacggaggttttgttgatatccaagtgtccatttgtttggagacctcta

SEQ ID NO: 789 - DNA, 600 bp, Bovine  MMBT06826
ctggtgtccctgaaaactctrtttacctgtttgggttttaggctgaaaattctgcctgtctccctatagaatcttaatatttacttcgacattgttggctatatcaaaagtaacttgacttgcatgctctgctagcttaattccctcactggcggtagattctagtgttggcttgagatatacataacaaagtactggggaaaatatttttaaaacttactttcttaaagagaccatatttttcatgtcagatttttcaaataagatgtctggccagataattgaagctggctgttatcrcacaagagaatgtgttcaagtgataattgtcatgattagaagcctgtactgcatttcagtattaccatttcctgtcagtaatcatgctagtctggaaagcaggcagtgaacgtttatttggactgcaggaatttttaaagacagataacacaggcacagaatactctatgaaagacacacagagttaaaagtatttgaacagatacataggtatttgaattatgtcctggagtggctagtggtttatattagcttgtcaactcttagattcatcacaactctttcagattcctctgagat

SEQ ID NO: 790 - DNA, 598 bp, Bovine  MMBT10418
  misc_feature (1)..(140): n is a, c, g, or t
nnnnnnnnnnnnnnnnnnnnnnnnnnnnnnnnnnnnnnnnnnnnnnnnnnnnnnnnnnnnnnnnnnnnnnnnnnnnnnnnnnnnnnnnnnnnnnnnnnnnnnnnnnnnnnnnnnnnnnnnnnnnnnnnnnnnnnnnnnnnatttaatctctaggtcagcaaatacccaaagattatcccagaataattgctctaataatcgtgattttataaactggtgatcagtttaactgagtataatgatttatgaataactatttgaagaggtaaaaacaaggcaatgtaggatttcattttgcarcatatccaaayatgctttttccttattaaccatgcagcaccaaatgttcacygttaacatatttcattcaacatcttagtgtatamattattgatggaatcattttaatagttccttagttaaaattcaagtatgaktttcatttttagggcataaagtgcttgttctggataaaagcatctaggttgtcaatttctcctgtaactactggctttttgtgtagttttacgcagttttagccaacttggctcagttctatattctctgtgttgcgttcagtggctcagtcatttttgac

SEQ ID NO: 791 - DNA, 600 bp, Bovine  MMBT08633
agaagcagtgcagccaaataaattwaaaaaaaaaawwwttttttttaaataaatctgactaagctaggaggaaaagtctaaatatacagacaacaagagctccctgtgccagacaaggatctccagggaagcagagaatcaacaggatataggtatatttgcatgaagacatttatattaagggattggctcatgcaattatggggaccagaaaatccaacatctatagggcaggtcaacaggccagaaagtgagtcaggatttctttgttacagtcttgaggaagaatcacttttcttrggaaacctgtttttttgctcttaagggcttcaactgattagatgaggtccatccacatgattgagagtaatctcctttaaagtcaactgactgtaggtgttactcacacctacaaaataccttcacatcatgtctagaatagtgcttgatgaaacaactgggcactataggctaggcaagtgaaagtgaaagtgaagtccctcagttgtgtctgactctttgcgaccccatggacggtagcctaccaggctctgcggtccatgggattttccaggcaagagtactggagtgggctgccat

SEQ ID NO: 792 - DNA, 600 bp, Bovine  MMBT10561
gagaatgtgctcgagcatctctcagctcacgcatgcaccccggcccagctgggagagagaatgcaggaggagtgggcagcttcccttgagagggcccagcagctcagtgggggcgggggcagacgcccaggggccaccattctagatgcctgcactctggaccccaaggcctggcacgagaatgttcccagcctgctctgtgcctcctcctctgcggccctctcactgccccccaacccagaggcatcccctgaggagtgggaacaccctgttacagctccccaggaggtggggcrcccrgcacaccgtgttccagaggccagggagagcgtgttcggcctcagggcggtggaccgtgtgtgcacacctgctccaaggcccagtggcttggcaagtccctgtcggggacagccacactcagccggacatccagctcagcaaacctkgagatggccagagataacaggaactcctgggagactccagcctgccccccttaccagaggccctgcaaatggtccaggagaccctgacagcccacctctctctctctctctctctctctcaccggggaaagagcaatagcagaagcagtgggct

SEQ ID NO: 793 - DNA, 598 bp, Bovine  MMBT09844
  misc_feature (1)..(76): n is a, c, g, or t
nnnnnnnnnnnnnnnnnnnnnnnnnnnnnnnnnnnnnnnnnnnnnnnnnnnnnnnnnnnnnnnnnnnnnnnnnnnntgatgacccctcctgggtctcagcctgcagatggaaaaacctctgtcctagagggtgggcattctcagaagagctgctcttgatcagaaaggcagtttgatagctgacctcttccttgagaggcacagtgagctgctgaggtcagccctggtggcttttcacagcccggggacgcctccatttcatccaatttcaaaccaacacttcttgtcaaggggctactrcactggcctctgctgaccactctggcacgacgccagatgggaacaatgcacccccttctctctgcagtccctcrggtcagctcygagaggaccaaggctccgagtgagggtggggagagcaattagggaggaggaggaagagacgtgaattttcaaaggtcagttgsagtatgatcagccaacgcttggaggtttattccaaaggcctttcctgattagaaaaacaacaataaaagaaaaaaaaaaagcccccaacccacaagtggggtaggaagtcgaagaacactttaattcataa

SEQ ID NO: 794 - DNA, 600 bp, Bovine  MMBT09465
tgcagaagtgctgtgaggccccgccccctttggcctcagtttcactagccagagaaatgggaggaacagtcttgtctgccctttgcaagaaagtgtgaatcagatctaaagtccagccacagcagaaacaccggggatgagcttaaagtagggagaaacaacaaaaaactgtaggacaagcttgaatagatcaaaggttcaatcagagtgtccacctcagacttgaatgtgcgtgaggttatttggggatcttaaatgcagatttaaggtctgggtggggcctgagactctgcgtttctracaagcttcccaggcgatgttgaagctgcttggctggtgactgtgcttggaatagagaggaaataaaagaactcaaatctggttctrctagtgtcatgtcccttccccaggctctgccctcagagattctcaagttattggtctggggtttggcctgggtatggtaggtcttcaaagctactcagatgattccgatgtagccaggggggttactgaattcctagaccaagattttgggcaaattgggacatggggactatctcatttccctcctgactccatctctttctctcctttctt

SEQ ID NO: 795 - DNA, 600 bp, Bovine  MMBT10218
tccagccttgtttagatccaccagaagtgttgaatatatggactttcatgacgttacctaaacacttggccttcctctcaacatcctaaacatttgcttgtgaattttcttgatttgggatttatatttctgaagcatacacccaagggaagggattcaggactgtcctcacccacctctgtccatggctcttttccacaaaaacrcctattccttctaggtcatccttttgttcactgccttccctgctggtctacccagctcctatggcaaggcctccttcacgccagacttcctccragaaatcactmtggacccctcagcccatcttctcctgcccatctctgaatacatctgggacctgatttcatctggactgctgctctggttgtgtcattgataagttagctgacaaagacaaaatgaagtctaatacaaaatgaaccatccgttgattcataaccatacagcaarggagtctctctggtcactttcctggacaggggttcaaggaaacattagaaagaagcatatacattatgaagcgaaaaggggagctactgagacagtctctgattcgcaaaggctgatcaaggtggg

SEQ ID NO: 796 - DNA, 600 bp, Bovine  MMBT06276
aactcagagaaggtggtggggccagagttctgtctgcaagggacaggggacaaaacggcctccctgccctggagtcccgcagggcctgtcagcgtcaatgccccacaaacgcccttcctccccgctccgaaaacaaccgtgggttcccagcttgttcctgaggaagcctgcctgggctactgaatcctggaggctgccctcgatattcaaattacggagcaactttcacttccacttgaggaccgaggcttccactctgccagcagggagatagcatttgcccgaggccatgtgccttcrataaagcaggttcactagcccttcaaggtgtctctggggtgggactgctcttccctgatgctccccgcacctcccagactttcaccgcacttcccctgggtctgtgccccaggcccgctgctcccttgaccgccagtcccctccaagcagcggtgacctgcaggaactgctgagaagcctcggagggtgggatttccagcaaatagggaaggagtctgacaccctgctggtagattcttgcaggatcactctcctcccaggagaaaaagaggaaaaaaggcaaatcactttcctcttgct

SEQ ID NO: 797 - DNA, 600 bp, Bovine  MMBT08083
cagaatcctactccgggttgtctcggaaaagctaacctgtgtgtgctgagggtggggtcacatccaccctcctgcctccagccagggacccaagacctcattctccacggcagataacgcctgtcttgcaaacgggagaaaaccgggcacccaaaaagaaacctgcaacgtgcgctctgcggttggcttggagggaatcgctcgcaggccgctggttctgcagccctcgccccactctcctgggacccgctcctgcagcgatccgggcgcttcccaaacaccgcagttttatttaaccarctcaaaaagacgtgaacttctcctgaagagtttaacataattggaaacatgcattctggcaaggagggacggagaaattcttggtaacactccagcgaaaaggccgatctatcaaccgctgggtctgacagaggctggctcactgaagcccagtgagctcccgagcgagatggagattgggccgtcgcggggtggagccgcagagctgcccaggaagactgcaccgagaggtttacgaagaaagaagactgcaatcggtttccctaaaccgacagtaaactcttttccagtgagaaacgg

SEQ ID NO: 798 - DNA, 540 bp, Bovine  MMBT07791
atcagaatcagtcaaacgggaccctgtaggtacctagaaacacattttcagtcccacttacaacaaaagaacaacagtctttaaagtgctgcaaaaaataataagttatgttccttgtgaacaatcccagaagaaatgccattggagacataaactgctttactgtgactatgtgaatgtcctaggaagactgccttcctattccttaaagccctcttgcttcttgctttgaacaaaatggattagattgtttaagaagcaggagcttggggtctggcagggaagacaggtcgggctctrctggtgatgcatagcgagaggcagctttacatttggggaaactcagtatcctcagttttatcacccaagtcctctctgagagcttgggagagctctgagtggcgccagtcactggcctcttgtaggatgtggaagcacaaaacaggtagactctggggtcgatggagggcttaaaaagccagagccagatttttcactcagatgattccatcaggagtggatagactagagcaagggaca

SEQ ID NO: 799 - DNA, 600 bp, Bovine  MMBT10744
acatttaaggtttttatggcctcttgatgaatttgccctcatgtgatactaatatagccactccagctttcttttggttagtgtgaacatggtatccttttccatcttcttacttttaacttattcatgtctttatacttaaaagtgtttcttgtgggcagtatagagttgcattctttaatcctcaaactctgctcagatccctgggaccttcaagaactctcttaattctccaggctacccatctccttataggaggctgtgataattagagcatcattcctcataatgagagccccrcctgccttctatcacttccctgccctgcgycccccaggaatagcagtgaattgtttccacttccccaggacagtttttcagaaaacatggacatccaaacctatggcaaatccttaggcagtgccagatccagccacactggatcaagcaggcccatggaagattacccaaggctacttaagaagtaccaaaggctaccttggaaaaagtaagtgtgggggagaaggaaatagaaaactaatttctaagaggaaggattttattgactgaaaaaaaaaaaaaaactcacatgtatttttt

SEQ ID NO: 800 - DNA, 600 bp, Bovine  MMBT10219
tctgactccccccaccccccgcattccttttctctttttcccccccttttagtagtcaagggaaaaaaaaaaagagcaagcagagctgacaggtatcattcagccgccctggcttgtgaggggtggtataaatgaatctcagggctcctggcttcacatgattcaaacatgcgttattgaagatggatgttccttaaaaaaagattgatggtggatgccgggcttagggtgccatttatcattttgaatattatttagacttgccrtgtaaacctgtaacttgagagttggacgagccgrggctgggtaggggcctgtgtgtgtgtgtgtttccatcgattggccttgggttatcattgctgctgaccagatgcagtccctcccatttacagtatagaagacacccccctcccgtaaaggagggacggtttaattttgaataatttccaaggacactggggaaaatgaagtatctgtgatttacactaacaggcaacttctttctctctccttctctccctctctcttccccgacagaggcagtcatgtacgaaacattaaaatataaacagagccgtagttgccgaagccaggaccctt

SEQ ID NO: 801 - DNA, 600 bp, Bovine  MMBT06305
cagatagagaggctgccactccatcatggggaattggaatctgttccagtcatccatgattactgtctttgattcctcaggagtgcagcagacaaagagctaactaagctgccctgggtgagarccccgcaatttaacatggaatataagtctttatcaaccaaacaggtcttctgagccagaagccaggcaggcctccagcctgcgttttctgctctcgggcttttacttgggcttgttgtccagtcctttgactcactggacccctttcactgctgtgatcccttaagaattgcatcrcagactgtctgttattgctgccggacacaacagcaccatcacccggtccttatctccagccctgctctggccccctgccagtctggtgcatcctcgctctcacaggtcatcagcaccagtctccagctcacctgactctgtattttccattgtttttcccagataccatagtcattattggcaagactgggaactacagtcttttataatgtataccacctgaccatctgtagccatgtctcctccctttagaagcttatatttacacagacaaaatatcacacaaaataaggaccttac

SEQ ID NO: 802 - DNA, 600 bp, Bovine  MMBT08466
cttagagaatctggttgtattttaaaggctctgacaagtcctgcagtaagcaaccggtctcacttggagcccaggactccaaatttacttgcccacgaactgttttaacacctacaaacagttcttkccttaaacacatcaagtgacctttccccctgtcccatggcggtcctgaatatcacccttgttgggattctaacrtctctcttcttgttttgtccccagattgcctcggctccccagtgtttactcctatcaaggcggayataagtggcaacatcaccgtatgtacttggcctrgcagccccagtacccagatcaggattctaatcccaccctggttaccactgccctgctacccactgcaagctccccaggctaaggaacagaaggagacgtggaaaacaggcctggcccccagctcctctgactcaaggctccaggttcttggttctccttgcagtcatgccatccagtcacagccaaactgtgattcacagtctggagggctgacctgagaaggaactggctggtacttggattcactccaccaaacaaaaaataaactccggggtccacagttgcactgacccagccctt

SEQ ID NO: 803 - DNA, 600 bp, Bovine  MMBT09910
ggactgaacctgggtcttccacatcgcaggcagattctttaccatctgagccaccagggaagtcttagctgattactaagcctcagtcctgggctggggtggatattcctgcttttgatgtgggtggtttcctctgacaccgcaagggaggtggctccttatcactggatagtggtgacagtcctgactctccagtggtcatgttgtgacaccaccccagtgaggtgttgggggacctcactgggtagaagtctaggctccccaccagggctttgctggcatgggtagatatgggggccrccagtgtttttgagcatggtgtttggctggggcacagcttttattatttaaatgtctgctgtcttgctaggctacccctgtccttgggagagyaggctcttgttgggggcacctttttcatctatgccctttgatgttgccaggttgcttgcttcaacactaagcatggaatggctgaaacaaacagaaataagaacaactctccaccatgtttttctgtgggtcctgagtttcctagctggtctgtcttctgttctccacctttcagggtcttcttaagtttgttttaaatctaacgtc

SEQ ID NO: 804 - DNA, 600 bp, Bovine  MMBT09876
gaagttgctgattgtttagtcgctcagtcgtgtccgactcttttgtgactccatagactgtagcccgccaggctcctctgttcatgggatttcccaggcaagaatactggagtttgaaatggcaaaaaaaaaaaaaagaatactggagtgagttgccctttcctcctccaggggaccttcctgacccagggatcaaacccatctcttctgcattgcaggcagattctttaccactgggccacctgggaagccccggtttagtagaggtgggtctaaaagaaggaccttttctgrctttcrtgagtaattaaaagctgtgtatggtctcccaaggcactgcggtgaaagagctgtcacaaaattagcttcaaaggtggtggctttccccagatgtttgcttcagatgcttggcttctagcatttaaattcccattaaggagctgccgtggctgcgggcaggccaagcccactctttacttgaaagggatcaaatccttggccagaaatttgacttgaattgtgattgttcttattcatcttgaaattcattgaaggccataaatccactcatcctgcctcattctcttaactctatgaaga

SEQ ID NO: 805 - DNA, 600 bp, Bovine  MMBT10697
gctaccctctgatatgattccccttctgttctgggggtttgtatgtatgtgtaagatatatttgtttattgtgtaatagttttttaatgcaaaacttggggggaatggcagggagagcagtatattcattgttggatacatccaaaattggccacagagtagaaaatccataaaatattaaactaattttttccaattacacggtttctattatattagataaaaggaactgtgccactttgacattatgagcaaaactgggttatttgagtaaccagagagtctttattagaatttgtrtaagtataaggccagagtctatgtagacagagccttaatttctaaatggttcatttatatgtattactttttgaaaatcagcaccaatttcccacagaaataatgtcccatatggscttcagattcccaggccagcccaacatatctgaatttgaggactgatagtactataaaaacgaacctgtatgtttaacaatgtctcaacaagaatacgcactgcattcatcgggtacagagagattatgagcacaatcttgaagatggtgtgttggggtcatatttgttcacaattctagcaag

SEQ ID NO: 806 - DNA, 601 bp, Bovine  MMBT06566
  misc_feature (1)..(1): n is a, c, g, or t
nctcccaaccttgccttcctgccgtggcaaaggcaatttcctctgcctggaaatcttatcaggttttcttcatctagctcacctttaggtctcagctcgaatgccaattcttcaacgaggtcttactgaccttcaaatacaagttgcttcacttaaattttttttttggsggggkggaattctgtattattgctttcttaacatcatcacactgaagattcatctgatgcctgcctttacctccagaccacaatctcctttaataatgaagtatacttaaaagtgacttttaaaagtgacrtagatcattatctgggctgcaaaacctagtgtttcctgtgtggccctctgcagagaaagtatgccgacccctgggtatgactgtgttgctctcaggccagcgggcaccgttcctaacccagaagacacacacagtccatttgtcacctggatgctgagcagtacagctaattcatctcttttgacacagtcatttcctgcattgtatcacctcagctggcttatttctttacttgggatgaagcaaggagacatcaagccttctcctttctatgattttgcactgcaaatctgctcttat

SEQ ID NO: 807 - DNA, 600 bp, Bovine  MMBT10667
ttactgtactttcctcacttctttagctcctctcatttctgttcacaaatcggaatgcactgtaattcaagggagaatttaatccacaagaggatagttgcaaatatgctctctctggactttgctaccaacattattacttatgtaaattgaaaggtgagcttggactacatcagctgacaggtggatatatgaaaatttgaacacaccatgtgatttgaataaactgtctgyatagaatacacagaattttgtattgggctgtactgtatgttcacctacttggtaagaagagcaacrttatttttagagtctaaataagtcaataaataagttgggtggaataaatctaggaaatgcatgaaaacaacactagagtcctctctcccatcctcttccctataaaacattaaaataacaaaatcaaagactgtgataatgattattttgtatcccttagattgagataatgagcacacccaccacctgcaaaacatcctcctgcccatttatagtctttctcaccaaactttccccacacaagactccaagtcaccccagttccgtccccaggcatcactgatctgtattctgttgtta

SEQ ID NO: 808 - DNA, 598 bp, Bovine  MMBT05505
  misc_feature (1)..(114): n is a, c, g, or t
nnnnnnnnnnnnnnnnnnnnnnnnnnnnnnnnnnnnnnnnnnnnnnnnnnnnnnnnnnnnnnnnnnnnnnnnnnnnnnnnnnnnnnnnnnnnnnnnnnnnnnnnnnnnnnnnnnctttgatttatttgatatctggtgaattaatggcccctaattatgatttgactccctattttgatttacaatagtgataaaaatgggcttgtcatgtcttagtttagttagcttgagactatatctcaggacctgacgattcctggacactagcttgaaatgggaaatctctggacatttaaagtrgagatcagatcctagaaagtgtcaacsgaattggcttatgacccartaacttctgcccagctctaagtagtattccctagacaaaatgccaccactttttaatttatccttctttccaagaatgtactattaaattaactaaagtaaggtttgtgaaaagtgmttcaccagctaaaaaacatattagttggattaaaatattatttatcatttgggggttatatttatacttttaatgtgaaagataatktatttcarttaatttcttagtgacaaggtcatctgtcagctttargta

SEQ ID NO: 809 - DNA, 600 bp, Bovine  MMBT08401
tgttgactgcttattttcatttaaaaaatttcatttatatgagagattatgaccaatgtaaaagagaggaaactttctaccttttaccaaataagttaatcagattttactcttctccatagaacattttttgatagcaattagcatctgatggaaaataaatataaattcataagacattttatcaaaatttgtatataaaaagtttataaaaatccttgtgggaaatcaataaggtatcattatattaactttcatttagagtaaagcattaaactatgattattgagaacacataartattttatttccaaagaaagaaatgaaaaggggcaytcacaaaaacagttaagaaaaaagaaagaaagaaacaaacaattttagaagtaaatattcagttttagcagaagataaaaattacaaatcctaaacaagtgtagattctgaataaaagttgtgaattacagatagagatttctgtattgtawaccactactaaatttaacttctaagttatatgatacttcatataactaaagtcagtttcaatggtaaatgcatttgtttctgtcattaatgttcaaataaactgcctttcag

SEQ ID NO: 810 - DNA, 600 bp, Bovine  MMBT09853
agtgagtttaatctgtctgtaaaatctgcttagtctacacacaaactaaggaaggacaactgcgaataccttcaaacaaatcgccatgatgcctcaagtggcttcaaaacttagtcaaaccttcaagtttcaaagatacttaaacttcctatgtccattcttcccatcttagttctcccaaaatacgggtagttttcaccggtaagtactggctgtttatacacaacagagttccaaactgtaagtcatgtgatacgttttggycaatgcagtgctgcttccaactcgaagcgacartgrcttctgtgtctcgtttacagcaagctaacacaaccaaacactacgtctaakgcacagcrcaatcattcaagctactggacatgctgcttttacttaayaactttacctgtttctgaatgatttcactttgattagaagcttggagggtgtgttcccgcttaatttctatctgttgctgcttcttcttttgctgctgatccctgagttgctgaaccctctgcaactgctcttgcacactggctgcctgcactgcgaccacattctgaatgtggtgagtctgcacagggctgctctgctgaa

SEQ ID NO: 811 - DNA, 600 bp, Bovine  MMBT05571
cttcttgtcctgcctacaggtttctcaggaggcaggtaaggtggtcaagtattcccatctctttaaaaattttccacagtttgttgtggtccacactcacaaatagtaacatgacaaattaatcatattatttggatttatattctcctcctaaatttatttgtcgtcctttgcatcttaattttttccttttaagttcacctactgctacaaatcgaaagctaaagacaaattggtaaaatgatgagttcattaaaaagagatacatacagtttagtccttaactgcaaagcactatcrttatgactatacataaaaacacaattatatttcaatgaccactgttgttgctgttgtcgtttcttcctgaaccagatgtctatatttcaggcagtctgcttgaaatcattattaggtttggaatgaaaatctctcgttgccctgatggctgtgaagtctatatcttcatatgtaatcttccagaatgctcttggagtctggccacaagttagggctactgttgcatcagctggttgaagctaagggattgtaaagcctagtgctggggaggaatttgctaagcttgtcctgtggtgtcag

SEQ ID NO: 812 - DNA, 598 bp, Bovine  MMBT06249
  misc_feature (1)..(12): n is a, c, g, or t
nnnnnnnnnnnntccctctaaggtttttattctttctcctcctatctcccccacaccccaagtcccagaggaacagaggaaaagaaagcagcaaaaagctctgagaagaaaaagraactgatggtaggggccagccagagagtcggctttcagagctggtgttccaggaggtcagaagcatttctctgtacggtttccctcacctttgtttgtgtgggtgacttagtggcggggaagcagagagattaacttgttatccccatgcagtttggtcagtagctctataggaaggccaataargmggagacagtcccaatcatctgctgagctctatttgcagcataaaggagtaatgagtagaactcttgctattgcacttattccagcaattatgtgtataagaaggatgaggagctgtgggcctaagagagaagggagggggccatggaaatcacacagtgtctcyggggctccccagctgtgtcaggactgaaatatgaatgtcatgcaggttggtgacttccttgtggcatgtacacattatcccacccrtgccacaattaagtcacattcagtagcacttcattattttaattaa

SEQ ID NO: 813 - DNA, 600 bp, Bovine  MMBT05578
ataatttgacacagttggcccctccttcttggacatacatttttctcttagcttccaggaccctgtacgttcttgattttcctactgcttcacattggtcactcctccatctccttggctggatattcccttttctctgccctgttaaggatggagcacttgcgactcactccccttcacctcgcctgatggtctcatccaatttcagtaatatctgtatgctgatgattctaaagtagttcacccttcctgatctctcccctgacataccggctgatttttccagctgatgacacaacrtctttgggtgtctaatagtcatctcaaaatgaatatataaaacaaaattaacatctttattttcactccacagtttgttcctctccctggcattcctacctccattctgctcttcaggttgttcagaacaaaaactttagagtcattcttaactttttttttctttccttgtcccctcctacatcctatcttagaaaatctgttgactgtacctacagaacatacctgaaaccagatcaattttaccactgtctctgctactagcctggtctgagttattgaagtagactcctaactagt

SEQ ID NO: 814 - DNA, 600 bp, Bovine  MMBT06645
ttagattaggcttctgttaaacatcatacatacatcatcttatttaatcttcacaagtttttaacattggtccattatacccagtattatacagacaaggaatccaaggcatgactggctaaataagaggcccaaggtcacacatctggtaaatgatgatcaaaaatacaaacacaagttgatctgacccagaagccaagctctgccaactctgtgcactgcctcttttgccagactcactgggcgattcacagaaattctgacgtcagagacacytaagatatcttttagttcaacacrtgagttttacaaatggagtctaaatgaactgccccagatttcatagcagagccractctacagacttctaagccagtatccatctccactaatggagatttggtttattttttttatttttatttttttttaggttttaaaaaaawtttttaataaaataaacagcaatcattttaattctactgtagaagaattaccaagaattattcaagatttaattgcatcaggataaattaagcttccatgtggtttaratacaacagatctttgcaaagctaaaaaagcttactgactgctaaa

SEQ ID NO: 815 - DNA, 600 bp, Bovine  MMBT06644
gcatggatctagtcaaacagccccagaaggcttgggagcgctgcatgtattgctgccttagaaggatggatgggtaccgcaaacttgtgtcctggctctggagcaaacagcatctagttagcatcagatgtgacaggcgcacaaacagagaaaaaccaagaaaacaaggtgttttcctccacttcactgtgggactgaggtgcacacagtcaacccaagacattaggaagtccaattgcaaggtgactttgcatgagatgccattgtctaaaatccaaacactgatacatacttgagaargattttatagggtaaagttgattaataactggaaattgagcattcccaaamcagcaagatcaatcagctgtaataatcattgaaataactccagtgaaatatcactgccgggtaatggagcatattgctcgcttttcacaaatgactccccacacaaatagctagaatgaaatcagctgggttctatgaatttgtaacttcggaacactaccttgagcactcagtcacatcagacttggctgtgaacagctgctgcagaagcccattcagtcgtactgtgaactcactcacgccgtgcag

SEQ ID NO: 816 - DNA, 600 bp, Bovine  MMBT10275
actcaccaccagcaatgtacagacctcaggaactggaatcaacccaaatgtattcccagatacacattgttggtgtttagtcgctaagtcgtgtctgaatcttttgtgaccccatggactgtagcccgccagtttcctctgtccatgagatctcccaggcaagagtactggagtgggttgctatttcattctccaggggatattcccaacccagggatggaacctgtgtttcctgcattggcaggaggattatttaccactgagtcacctggaaagccccccagatacatagtctttaarttaaatcctcccttgctcaagaaccttcaaggaccgcccattaccttgcttggcacatctcaractggaacccaagaccttttaataccagtcctaagtgtttccccagctctctggaaagaagtgcatggatgagatttttctcggtgttgagtttttcccttatccattcttctaacattattggcatagactcccacttagccggaaaaatccttgagataaaaggggacagctcacaaacaatgagttcactggttgtggtttctaatgctctactgaagctggtcccatctcagc

SEQ ID NO: 817 - DNA, 600 bp, Bovine  MMBT09168
acagaatagaaggcaggaatcagttattttaccatctggaagtaacttctggtctagagcagggatcagtaccctgargtccctgggccaaatccagcttcccacctgcttttgtaaataaagttttattggaactcagccacactcattcatttaggtactatctctggctgcttttgtgctatgatgagttragtagttacaacagagaccataggcttcaaaaagtcaaaatatttactgtctggtcctttgcagaaaagattttctgaccttagtctaaaggagtgtgaaggcttrtatctatttcaaatattacataaacaattatacaatattttaaacccttgcctcaaagagtatctgtacctttacctaaaagaagaagaacaatgtaaaatttagtccaataaacagttctttcttaaactttttaattgtctattcatgtcagctgtagtaaaaactggtaactccttttctaatacactccccaaactcctccaaacccttaaaaagcatggttagccttcccataccactctagaatttgaagagcttgatccactactttatatacatgttttggtcaaagtggtt

SEQ ID NO: 818 - DNA, 600 bp, Bovine  MMBT06504
ctgtgcttggggtagtgacctgcctgagaattcagtcttccgattccctccaggtaaatccctttgatgaagagccaagcatccagcttcctctacattccaatcagacagctgcctcttctcgctcagattccaggctgccttggctgtcttcagataatttgacttcccacgtagatttcaccacagggagagaatgtgcttgaaacagagtgtgtctgatctcctggccgattctacttgtcgttgtaaattaataaaatggcgttttgatttacacatctgtctcttgtgaactcrgttagtatgactgaggggcccgataaactgatcttgccccagcacgctgacaaaaccaattttctcagggtttgaacctggaaaacaaaagggccagaccctggacggtgtggttaaatcaccaaggtaaattcccctttgaaatgtctggcaacgggacagccagacttccctctgctatcaaacacattttttctcctggactttaatctttcaaggtgaatgctccctgttcaaggcccactcagatgattgattccatggtgataaatgtaggaaatgggaagtttgcccctactc

SEQ ID NO: 819 - DNA, 600 bp, Bovine  MMBT08766
cagctgggagagggtggaccaggcaggcatgttagatcatcagagcagccagggctccggtgatgagaatatgaattatgagcagcagagggaagacagtgggaagggtgccgaaggactcccactggtcagtttcgggaactggtaaataacagaaatgaaggagtggctaggggaaaatgggggaaatattttgttttataaaataaggtaaatcaagcaagaggaacaataaaaacatccttcttccacccagaaaatttaagtgaaattagtattgtgcaaagaaaacagttcaargataaaactgaattacataaattttgcaaaggagcacagaacagattagaggacaaaatgacataaatggaaatccaaacaatatataacagccaccagaggaaagggaattaatgaaccctcaaaaattaggctcgtgaagtgtggagtaaagtagatgaaaattataaattttcttaaagcaaagccattcatcatgatggactcctaggcaagttttaaattctacatggtatcaataatcagtaaaatatgcaaaacctacagttcatttttaatttacattttagatcagccatt

SEQ ID NO: 820 - DNA, 600 bp, Bovine  MMBT11317
tgattgatctatccaaattcatagcaggagcacaaataaggatttgttgagataaattactgtttggcagggagattacataaggcaatgaatttgcctttgggtgacagagtatgtcgggggaaaaaaataaaaacaataacaatgttttaaaatactatttatgttacatattaagtccaacttcttgtgaagtgttaaacacacaaggtaagcttcagagcctacacactcactgttctctgtttcctgggaaaacaaagtgtgtgtaacctgacctcatttatactgtgtgggtgrcttgggtttgtttttgtttttttccattttcyctttcactagtgagtgctatctattattcactaaggctccagacttttctgcaagatactctttattcctgattaactattcatatagtagaagatggtttgcttggccttttacaactttttccagtccattatcaatatcaaatcatgttccaatagccacatcactctagcaaataatactacatatgaaggaaacagtatagtgaggagatagtatcgaactattttaaaactacagtgatgatacatatatatacattaaata

SEQ ID NO: 821 - DNA, 600 bp, Bovine  MMBT10743
atgcgaagtgtctggttgtgtcattagtgttcattctggttgttgactttggctactttccagacacaaatttcatgactcaagaaattgcttcaaaaatacaaaactgtaatttttccagatattgtttcattgcctgccaaatcccagacatgaattgcaagggaaaaaggcattaccttcataatttagggatccttccctatgtgtataatctgtcaatattatttgtagtcaaatcatagtttttgatttttattatctcattttttggcaaacacttgttgagtgacaaacacrttccagactttgtgagacggccagagtttatttagccattaccgtttggaggaggcacggaggccttttataataatgtgttgttatccattccatgatgtagattggaataagtgagcagcagggtgaagaggtgcatctgtcacagggtgcagagatgactattgaaaatactgtattcaaatcytagtccagattgtgttaacaaacaaaaaaawgtcaggtgtatgtggtaaagaacctaaatagaatttcaagaaattaaaaatagtaattgaaacaacaaatccaatggagagg

SEQ ID NO: 822 - DNA, 600 bp, Bovine  MMBT11422
atattttttttctctcaaaatagatttccccaacattacatgtagtgttagttgcccagtcatgtccgactctttgtgatcccatggactgtagcccgccaggctcctctgtcygtggagctctctcggcaagaatactggagtggactgccatttccttctccaggcaatctttctgacccaggggattagacccaggtctcctgcactgtaactcgattctttactgtctgagctacagagaagccacaacattacatggtcaataaaaaacataagtaaataaacaaatggctaatragctatgtgcatttgaggtcaatacytgtatattaatgtctgagaaatactgttgaattgtttcccccagatctaaaaaaatttcaataaaattcataaacgtatacataaacacttacacacatagacattaccaaaaccacaagaaaaacttttattaatctaatcttaggtttacttttaaaaaacctactataattattttaccttttacccattgtaggaataaagtgctatatatgcaaataragagatgtgttgcattgctaagttcttgtaaaagaaactaagaatgtcatt

SEQ ID NO: 823 - DNA, 600 bp, Bovine  MMBT08771
taagatgcccacatgctgatttaccaagcagaaaatgaggaataataaagaaaacatctgccatcacctgggcagttgatgttggcatagtgtcttgaatttctaccagggatcatgcctcttgatgaagtcataggacagagcttctgggtgatatatggtgaagccttagcaacaaacattaggaacattcacatttgcaagggtgaacaggaaccgtgggggcgcttactattcatgcatggactgtggttgtttctctgtctagtaggaaagaaagaaacaactacaggatcaaarggaccaaagggagagaggatggattcagagtcacctaccagactgtgatttggaggaagacccgctggcctctctaagcctcacttcctttatactaaggggctctgataacaagtcataatgaaatgagctaagcatgcacgctgcctatcagaggtctgggcgacacagtgggtaaatgatgcgtgtttgttcctgtctaatgacaggctcccgggaagcagagcttgagacacagattggatacacatgatgtatggaggaaaggcttttaggacrtgcagagaggaagatgctcag

SEQ ID NO: 824 - DNA, 600 bp, Bovine  MMBT07330
cgagcttatcctcccaacaaagcttactgcggtgccattctgtgggatacagccatgtccctcacccctggtaaccaggcccagtataaccccagcacctgccacaccccagagcctacactgtccaacttctgccagcttctccatcatgcgccttcgctagtaatactcagagcagtgcacaggcatcagggctggtcaaagtcctggaaaaactgactgaggctgcagttttaaagtaaatatcttcatccccaggctgactcccttcagagggagtatgtgtgtttgatgtttccraagaatcagcctttgatatggacataaaagattcattataaagtgctcatctagtagtaaagacaaactgccatttatgtgccttattaggacataatttagtaaatgtgctttcttatatatcttctgtcagcagttttataacagttctgtgcaactatcctttcttaaataatagctctctgtaaatctttcagaatatcctgaggaaaggaggccacacagaaatcgaacctcagcatttctgtcaagtatttcagagagagaaaggtgcactcttagtcatcatcagaaatgaag

SEQ ID NO: 825 - DNA, 600 bp, Bovine  MMBT10280
cctactcccaaaccaaggatggcccccatgctcaccgtcctccatctctgccccctacagccttgccgctttggcggcaagaagatcattctgtattgaagggagaacatgaatcaaagagccaaaaacagcttctttgtcccccaaattttgctagaaacaaacatcttaagttctcaattgctttctccctggcgcaccctgagtggcttcctgaagaatgaatgacaaagctgattgctgcttcacagagaggaggcagaaaaggaaaacaggacgcacactctaaggcttttcatrtgtcagtgacttagcagagagagctgcaaactaagagcctactgggattctgcttccggagcttctgggtcttcatcttgctcatttaaattctgcatttcagcccactctgcctctattgattggcttcagtctgacttttctaatctgagtagtactaattggcccagaaggactgctgcaagttaggtactcttcagggctgctacccttcggggacttcaaccaaagatggtgcagaaaaaccacagttttggagacagacaggcatgggtccctctctgcatgaccttgggcaat

SEQ ID NO: 826 - DNA, 600 bp, Bovine  MMBT07342
tactatttttctcactctgggctgacatttattgcttattataagagactacccaatgtgctaattttttatgcaaaataaaagaggtataggatattmtttctttttaattaaaattaacaggccaatgtctccatcctaggtgtgaggggtgagtggtgctaattctaagagaccattttatcaaaggaayggatagcttcttatattttcatgaacaaaagtgagttatattttgtaattttgactatggagagagattctctaagtgagaatacattcaatatttcttacccttcrccacaatttcaaagacataataaattccaataaaggtgawgtgaaacaaataatttaacattgaatgaagattgaaaaaaatgtacataattgttctagcagtgccacatttcacttactttaagtcacatcaatttgactgactttattgttcaagttttccaacctcaataaatatgtgagaattaagttcccataattaacacaaattcraaataaattattggatcgtaccraaatgaattgttcacaaacaaaatgaactttaacaaaagatgaataacaaacatccagttataa

SEQ ID NO: 827 - DNA, 600 bp, Bovine  MMBT09456
aggtattgatatttattcagtgcctagtaaaaagaagtcaggattcagcattgctgattttaaattatgtaatactgttatctaaattgtcacgatgactgttagaagggaaaacatggagaaaaagttctgtccgagcagctgctgtgaatcacagaatgagccaggaaagggtaaaaaacatcatcccttaagttatggatgaaacgtcttcgaaccaaagacatctcaaagctgaaagggaccttaaatccccacttattgtgtaaatggagaaaccaaggctccagaaaagaatgrtctacctggttttaaagaaaaacctgaaacagcttctaggtctcagggaggagaaaaaagaggtatttgcaggctgttggttccaggctcacttccaatcccaaactctgtggttgctcaggccccttataccaaatggtgggtacgctcagcctccacgtccacaaacgcaagagaccaactaaagtttgaggaggttttgcagaagttgaatgcgtaccacatttgtggggtgtcagtgctgacccgtggggagggggaaggagaggaagcagggacatgtagactgctttgggttcc

SEQ ID NO: 828 - DNA, 600 bp, Bovine  MMBT09150
tgttagataatcctgggtagaatctgaggcaaatgaatccacatcctcrttctccgagtcgtcactgctgtcatctgcagccggctcccctgtgagggctatgcgagcrtaatcatctgtgtctatcgacttgcaaaagtggatggcgtatttcagtttctcctccagcacctgcttacaggaatacctgggcaacttcaacaagaagaagcatgtgtaggattcaggaaggaaatggtcaggtgggttgtatttatccaatacctgttaatgaaaaatgttaaataatcagagaccatrtacaggacaggtaaaactgcaatctgttttattacgttcattagagttgacttctcatttcacatacagcatgatgtttttggctaagaataacaaaatatcagaaaaaatatcatctagtcaatttcagaaataaaaaggaacaactcattaattcttaggactttcagtaaaaaatagcaattggttgctgtgatttcacccccaggggctggcaggtaaacagagcctgattctgaccagtaagaactcaaggcagaactcttatcctcaatcgaatgggcactctgatttttctca

SEQ ID NO: 829 - DNA, 600 bp, Bovine  MMBT08493
agcggtctcaccctcccctsaactgcattcctccatgatcccccctgtagtgctgtcacccatgctaagagccttccacgtttccttccatgtttttctctatacttacataatctattcagacactcacgtttccatttatggatttgggggtcattgtctcacaaaaatggaatctcattttttacatttttttgcatcttgcctttttttttttttttaaattaaacactccatagaaaatctagttccttaatttcatgtgacttaacagatggaatactaccctttgtccatccrttcctctgttgatgggcatttgattttttcccaaaatggagacctggagagatgaaatgagtgtcccagcataatgcactgagtagacagtggagccagggttcaagcccaagtttgcctgcctcagagcacgtggccctaatgaccctgcaccactactcatccattcattctggcgaggtgtggagagtgggatcctgtaaccgggggaagccattacagagcatgartgacagaattgaaggtctcaaatttgggaggatgcttcagagtaatccaggtggttggaggacctgaaaa

SEQ ID NO: 830 - DNA, 598 bp, Bovine  MMBT05528
  misc_feature (1)..(142): n is a, c, g, or t
nnnnnnnnnnnnnnnnnnnnnnnnnnnnnnnnnnnnnnnnnnnnnnnnnnnnnnnnnnnnnnnnnnnnnnnnnnnnnnnnnnnnnnnnnnnnnnnnnnnnnnnnnnnnnnnnnnnnnnnnnnnnnnnnnnnnnnnnnnnnnnaaactgattgatctggttagggtataaaaagaaataaagacatgtagatttcttttgagagaatagtgaagaatgatgtatttggtctttaaaattcaggaaaccagctactgacaaattattaacataagcaggataagattaactgaggacagacratgtgtttcacatagttcagtctgggttctttaaatgaaacaaggggcattgtatactggacccaaatgataatacatctgacrttgcttgagttggttagaaacttaycacaaaagccamagaattttcataactaagtttcatgttccttcaaattatatgggtagtgatttttcttacaaacctgtacttttcttggtcttcctcttcctgggtagcaaatatcttccactggaaatgggcaatgatgctactgtggttgtgaatagttacagttcgctgattggccagagatat

SEQ ID NO: 831 - DNA, 600 bp, Bovine  MMBT11401
gaaacaagggtaggattactgttttcaggaaagtaaatttaaaatattgcatgttgcatgaatttttctttgagtccactgctggcacaattagtagataaatagtaaggctaagaatctccatggggattaaccatggcactagagaaactagaatgagagccttggagttggggttcagcccagtggaatacctgaagtggatgtcttgaagatgagtgagaagaggttgggaatggggagccatggcaaaggcagacaaacaccatagttttctacaatatgttttattctggtggrtagcttaccaaactgaaagaaaccatttaggaaacttttggctattagtttatccatgtcatgtgggaaataaattattgatattccagaaagtattttatggagattataactaaatcataatgggcatacttgtaaattagtattcttaattgcctttataaatttctgtttttcttaagagaaataccagccatgagactgttttatatgtgtatatagccttttttaaaacattgaagtagttgatttacaatgttgtattaatttctgctatagaagaaagtgattgagttatac

SEQ ID NO: 832 - DNA, 600 bp, Bovine  MMBT06224
atatatatttctgtgctttagctttagctactatcccgcagaaaatctgatagagtacaagtggccacctgatgaaacaggagagtactatatgcttcaagaacaagtcagtgaatatttgggtgtgacctcctttaaacggaaatatccaggtattaagtctcagtttatataacaaattaaatctaacttttaactaatagtaattgtttttgatgggttgtcaagttctgagtatttgagtatagattatatcatattttatattctgctgctggctgattttatttacagctctcrttcaacttccctctttactatcaattcattcttatgcctgataaacatatttacaagcaaaacgaggaaggtgaatttcctggaaaaaaattgcaaggaaaaatcaatttgtaaccacattaatgaatgaggggttttgattcttgactgttgctccttgtccttaggaatggagtagctacttaagctgtacctgaacttgagaaaggcgatatttcatcaactattttagtatagttatttgtcttaccttcttgctttggattattctgttctcagttttattttaactttcatttt

SEQ ID NO: 833 - DNA, 600 bp, Bovine  MMBT10657
tgataaccttgttgttatccttcaagtccctttaaggtatcttcacctttttttaattcttgtttctttttgttgctctgattggataagtcccattgctgtatttgagttcactaatcttttcttctgcttcatgtatcagatgttgagccccgctattgtatttttcagtttcattactaaatttttcaggtctgtagtttctgtttggtactttcttacattttctacctctgttgaaattctcaatttgttgatccattgttctcctgagtttagtgagcatctttacgatcattrttttgaactctttatagagtaartcacttatgtcagtttcattaaggtctttttctgaggcttcatcttgttcttttatttggaacatatccctatttcttcattttccttgattctctgtgttggtttctatgcattaggtaaaatctacgcctttccaagacttgaaggagcagtcctgccctgctcttggttgtgtcttgaacatatgattgtccaagcagcctactttattcttagtgcctccaaggaggtgagcgtgtgccagacctgtcactgtccccaagagggcagatctta

SEQ ID NO: 834 - DNA, 600 bp, Bovine  MMBT10626
agttgaacatgtaaaaataagtgcatttaattagtatgcagaatcaccaacattacaaaaatagtacatgcatatgtattttattcttatcagaacagtggaaattctgcacaaaactaaagcagctggtttcattttcacttttttatatgtacacattctaataacattctggtttcagctcagtggtgaataaggaaggactcaaagggaaggaactctggatttgcacaatcttttcttgtcctctgacatctccatatgtgattggctcatagggaattaacatgtgtaataaaraatactataagaattcctgggtcactagagacaaccatcaccttctttctgcatttgaagcaatcgctggttcacatgagggatccttgggatggttggcatcgccactcagtcaaagccatcaccgctggccatcctcccatggagtctcacacacctcccaccgatcgtgaatccgctgaratyctgtgctctgggggccctgagtgctctatgtcagcagcaggcatgcctgtcatagcgtgtgtcccctgctcatgcccatgctgtattatcccatcggacctcacaaaacrcaag

SEQ ID NO: 835 - DNA, 600 bp, Bovine  MMBT08075
tttttgtgtgtatagaggtcaacttatctttgctccttgtatatcgttgtgccttgcataggaaattgatgctcgatatttatctgaaacataatttttaaaggatgttcatataaaaaagttaagatttttgaattatttgttcaataaaatgtctttgacatatctcactcaagatgagaatttctttcatatcactttttttataagactttatttcaaattatagaataaaattaagttatattaagtcctttataactttgacatctttaaatattgctctaagtaactgccatrtataaacataataaaaaagtaaaaaggaattttagaaaaattccatatgatttcagttaacaaacaaaactyatgctttggaaagacacaattcattacttgactggagtggcaaacagaattgatgcttttatataaaggcataattttcagttatgaaatccattcataactagaaataggtggtaagacttaggaaagataaagtattttaaagtaacgtagaatactgataaacttgaaagaacattttcagtctagtgaaatatgagtatatattcattcttgagtgtttagaat

SEQ ID NO: 836 - DNA, 600 bp, Bovine  MMBT06611
ataagagaatatgagaataagagaagctatccagcaatttgtacatataacacaaactactgaggtaacattaagagaagaatctttgaaatgcttcaaaaatgtaattttttcttccttgtttttcaggtaaaagagaaaatttaaggtaacagctaagagccagactttggtgccagcctactggggttttaatctcagttcaacacttactataaactatgcaagttactgctctatgctatagcttcctcctttgaaaaatcagagtaccaacagttcctacttccctgggctgtrgaaagaattaaatgatttaatacatgtraagtacttagaacagggggtgccttggccctctgttaagggctcagtaagcattagccattattatcattacataaaagtcaatctccttttccaaacgccaacaagtgaagcctgcgctacggagaaggccctgtctcttccccctcacctggccacaagtacaacttacaccgtgttttgtttctttaacctgttttttgggcgtcctattgggttagcatagcgccgttttatctgtgctgccttcttctgtagaagctttcttccttt

SEQ ID NO: 837 - DNA, 604 bp, Bovine  MMBT06582
  misc_feature (1)..(4): n is a, c, g, or t
nnnngttcaatgtagcttggctgcagtgtcaccaaatgcttaaacttgcctggagtggcgtaaaaaatagcactactaatcagaagaaatggtaacagagttaatttgttccagaaaggtaatgaggaaaaaaagagaaagggaatggctgctgaagaaacattttccctaatgtttttcctcttattttttcagatttccaaggtgggtagtcgtttkttttgtttggtttggtttkgttttcctcactgatacagaagactggggaagtgttcaggaccaagctgcgtgtgatatagcactraagaaatgctgaaaatggggctagaatgttggaaaagagattgtctatataatcttctttcctccttcacttaggacatctagatggaaatactcagaactgggraaaatttagcctgaagataaggtgtctgtggacactataaaactcccagaggaaaacacaggcagaacactcttggacataaatcatagtgacaccttttttgatccatctccaagaataatggaaataaaaacagaaataaacaaatggaacctacgtaaactcaaaagctttgcacagcaaaggaaatgataa

SEQ ID NO: 838 - DNA, 600 bp, Bovine  MMBT05913
gatattgcaaatgccttaatattcagagaaggaggaatcatttttttaaacacggaaataatgttcttaattgttgggtcttttctttaacaatagtttccagcccaagggcaagtgcaagacagagcagacataaagaattgcagagccactattttaatttctggcattcatagcatttagtagccggaagtctcaaaggaaaacagctactttcatttgtgcctcctgcagccaccctgtcaggggagaggtctgggctcagaaaatgcagctcattaaaatgaagaatattccccractttgatattcacagttcactggggacttactacctgttcactgagctattttgtctggaagggggctgcaacgcagcagactctaccttaattaaactgctttaatcaaattcattaggtctctaacatttataaaacatattgaattatgatactgatattcttagtatatatttttttaaattgtcaagttttctccttcctttatttaattggtgcattgagcaaaattcagaacaatactttcatctgtctcataaacgtcttactggcaagcaaggtacatgctctttgtatt

SEQ ID NO: 839 - DNA, 600 bp, Bovine  MMBT07243
tctgttctcagcacacactccgggtaggctaaaacaactagagttggcatatcatttagaatatatctgtcacttttggttgaaataatctctaacatccattttggatctcatatttcaggaatatattgctgctgtggaaagaatcatgaactcaggatcagaagaccaggtttaaatcctggttctgacatttattacttctgtgaccttaagcaaatcaattcatatctttgatctgtgtgtgttttttttttttaatctgcaaaatgggaagaaaatatcaatgtcctatggtcraagtgaagatcaaacaagatatatgagaaggcacccaaagcacacagcatatcctgggatattgtagacattcaatcagccattaaaattaatattttaaaggtggcatctggtgagacaaatgcatatgtgataaaattgctaagcatgctggaagccaagaggaaagtgaaggaggaagggagggtcrttcctatttggttatctcagcttttccctttttccatcactgctggtgatggatcctatagtcgtagccaaaatgctggcagcccacccaaatgtcatgtcctcgatcct

SEQ ID NO: 840 - DNA, 498 bp, Bovine  MMBT10740
ttttcactttcatgcattgggagaaggaaatggcaacccactccagtgttcttgcctggagaatcccagggacgggggagcctggtggctgccatctatggggttacagagtcagacatgactgaagtgacttagcatagcatagcatatcatcctaggtctttaaaaatcttgcagcttctgttctcacacacttagaactctgtggctaccacgtgtagaacccagcctactgaatgatgagagagacaagatatgtgaatgagactgtcttaggtcatccagcctttagtcaacctrtaagcagaaattagtggaacctgcccagaccagaataactgctcaaccaacccatagaatcatgagtgaaaggactggttgctttaaggcactaaatttggggacttttttttttacactgccaaatgaatgtctacactaatgaatttaacactaattaatgaatgcctacatttctttattgggctgataacccgt

SEQ ID NO: 841 - DNA, 600 bp, Bovine  MMBT11366
ctttttgcagcagtctgtctggaagggatgagaaggataatgatttcacaagaacttgagttgaacccgtacagaggaagagggagttagggggagggtctgccctgaaatcaacctgcttatttaagtagatttgaagaaaaacagagcatgaaaacaacaaatcagcctgacttatctaggaggagtggataaaatagtccctgctggaggaaacgtgtaacccaatccagtactttatcacatcttcctgaaaccttgaaataggtctatgaatttatattgtttccgaaagccctrtgagccgtgctatcttaccctgccccactgtgaaccctgaaatcaatccattgctctctcaaactttgggaaaatgatatgcctctaatgtcaatgaactagctgcgttcacagaatggcttttcactccctgagtttactgaagtggaagacagaaagggtatgactttctgaaaataaccacatgtgctcaaagacctagattttctaggcatgagtgcatttctgataaaaaatacctccttagtgtgaagaaacctggttattcctcctctccacaaatcgtttgcatcctttata

SEQ ID NO: 842 - DNA, 601 bp, Bovine  MMBT06204
  misc_feature (1)..(1): n is a, c, g, or t
ntgcataattcacctgggttgaaatctctgtgatgcccttggtatgactttggggcatgatagttactgtaaatgtctttcttctgttaagtggggactctaacagtgcctactttacaggcttcattcctagtatttgaaaggaaagcattcaaattgatgcaggggagtttctctggctgaagtttcattagttattaacattatttaattcttaactaatcaccacttctgttttcttcaacatgttgagttagaaagcttttagcgtgtttctcttgtctggctttttaatacctcrtgaataatgtgaaattattgagaaacaaaagaaaggtgattatgcaaatgcttgaaatatttaataatacattaaagtagtcttgggaaattggagaaatagctttactgaagttatagtagctttttgtagaggcagaaggtattaaggagaaaaaagatcatttcaggaaaagaaaatttaaaaagcagaatgcattagaagcaaatgacctaataaattcaattaagtaatgaatattcagatagcattcattttcctgagatataatggccaagccaaagagtttaaagaatgaaa

SEQ ID NO: 843 - DNA, 600 bp, Bovine  MMBT09194
agggtgttctaacacctgagccttattaacattttcatcatgagcttccactttgctctggtatggacactcctggttggaccatggatgcccatgggtgagtatagactagagaagcgtggctaggagcagaggaacccaggattctccaggatcctccaaggacagaagctgtgtcattttcaagctgtgtcactttgtatccctagtccctagctaacacagcaccctgcacatggtgagtgctcatttcaagcctcttgattagatgaatggtaatgaaatgaaaaatttccccaratacacagaactagagagccttcaattgtgtcagtacttcctgttgtattccttacaatctgggggccctttctctctcctctatcttctcttgtttttcataaagtcacctcatagaggaaatgactgattagacacacaaaacaaaaaagaatcttggattcagattggacccaaagctgaggcgaagtcaccagtgtcttaaaacaatatgataaaaacaaaacccattaagatctgggagttccttggtggcctagtggttaggattcctggctttcactgccatggcctggattc

SEQ ID NO: 844 - DNA, 600 bp, Bovine  MMBT06996
ctaagtgtatacatgacacaattattaagaactcagtaccaccagcgatacagagatgctaactaaacactgcataaggcttgcaaattaacatcaggaaccacaaaagaagaaattgctaatagccaacagcgccatcctcctctctgtgccggacactttacaggcatcgattctaaccctcattttagtaatgaagtaactgagcttccaaagtcacataaagaagagacaaattcaagtgcaaacacatatggctagaaaacctagtctctgccacccatgctgataaaatggaartttaattttctaatgaaggactgtacaaaatcccaatataaatttagcagatgaaaaaccytgaaatttctggtctataaagatactacaaaattaccatgttgactaatttttataagcaatttatttaaaatagtatgtttttcaacatttctgagttaaatctacccatwttctccatccttacacttacttgtatatgcacatgatgtgtataccttttatagatatgctatacattacacagagcacaactttttaatattgtcaaactggaatctgtatacattggtagacaca

SEQ ID NO: 845 - DNA, 600 bp, Bovine  MMBT09860
gcgagagagacagtttccatccctggagagggaagaagggaatggcaacccgctccagtgctcctgcctggggaatcctgtggacagaggagactggcgggccacagcaacgtcaccaaaagtcggacaggacggagcgacttagcaggcacagcacacgaaccttctctgtaaattcaagtcaaggtcgtacacgaattctccaggaacatcactgattctgtaacatgttacactcgctcccctttctagggtgtgattttaaggtcttgattgtccccactgctcaaggcaaacgcractgtgtttaatgttacactgaaagtttgaaaaagaactgtttgtgtaaatacttactayatagaagcaaaatgaccaaaggccgctatttttcctcctcttacgaaaaataaatgctaycacgtacatcagggagacaagtgaagccgcataaccaagcgtcaggacaacctgaaaacaatacaaagacacaccaaagtcaagaaaatgaaacattaactgagggagaggttacaagcgttgctgaagcttctcgtcacacatgctctctgcgtggtttctgtttgggtgtgtgacaga

SEQ ID NO: 846 - DNA, 550 bp, Bovine  MMBT10201
ccgtgccccgcccgcgtgcacggtcacttacctccaggggtgcaggcccagcgaggggctgcaggggctgcaggggctgctgggactcagcaaggacgggctctggctgcttggagacagactgcaaagaaagaggccggggacggtgaacctgccaacagcccctgcgtgtggctggagacggaccagggcgtggttcccttagggagaaggggcctgaggctggggatactgggtctaccgtaggccacgagggcagggccagatcgatgagccgggagggctccccggaggcggtgrtgcgattcggggcgacttgaacagagacgcggaggaagagtggttgtcaccctgtccctcttcccctccctctccccttccagggtcaagcactcactcgagggtcagcgcccgggatgtgcagcttgtccctgcgggacttcatgccgaggccgcgtctatgcgaccgcgaccgagtactgacgcccccttcgtggccgccctgatcgtgtcgcaatcggacggacagacacaggacgccaggacagca

SEQ ID NO: 847 - DNA, 600 bp, Bovine  MMBT09902
ggtgggccaggcagggtggccggtgggagygcagccctggaccacagagtcytcgtctgtgaaacgggatcccygactcytgccarctgaggagatcgggggaggttggtggggaggtagcgagggatgtctggacccacaggtgggccagggtcttttccatgggccacacgccactgcccaggtaggaagggactgaccgacagagccctgggctgagctcctcacgctgcccagcatgccgctgcctctacaccctccccactggaagtgaaagggctccgaatgtggggacacgcrcaggcccgagctggacacggtggagctggattccacgcccgtctgcctcaggggcctgcctctcccctgcctggagatgcctcaggacctaggaagccgccccagcttctccactcaggggcccccagcctgcccartggctcggctgggaactgatgaggcttccctctgggtacactgggggtgctacctgcccttccccaacaaatattcacggggcacctaggtgtcaagtatgtatccccctgctgccccaggcgggtccccaaagccacacctccctccctccacactagcctg

SEQ ID NO: 848 - DNA, 600 bp, Bovine  MMBT09021
ccttgttttaatcccaagaaagaaatgaagactctgactagtacttcaccacagttgaatcccagtgaagacaagaaactaattgcacatgctgtcccaccaacatcagcctttgtttcttctaggaatctccacagccacccrccacacgcctgtcgaggagtcgttctctgaatggccttgcttccctctctgccaacaccctccccgtacatatcacagaygccaccaggaagcgggaatctgcggtccggtgagtggtcaggctacacgaggctcttggtgctcggatcttggccyaaatgctggaacgcacccatctgctgagcctcctctcctgttatcagagagacggagaaaggggtgaaaggggagcctctgatcaggacaggaattcatgtgaccctcacacactgagtgctgcagaatgccaagccatcactcagccagtatccttgggggagtgactttgtgctgggcacagtgttaaagytggagataccttatggaacctatagtttaatatctagtctgaaatacagaaaagcaaagaagcaactattataycttgtgagtmgtataatgatgggggaatatggg

SEQ ID NO: 849 - DNA, 600 bp, Bovine  MMBT07517
caaatcaagtttattttacagcactaaatyatcaaaaatgctattatttattcaacaaacaatttgaaaattaacaaaagtttggtggcttcctctaataattcaaattgyctataatacatatatagcaatcaaaagaagaatcctgaggtctattatgacacaccactaattctttattaatataataagatgttaaaaaattacagctttaggttatggtctggctgaaaagaaacagaaaccaatcaacataagtagctttctgccttatgctgagtatagctttttaaaatttcytcagtgtacctttaaatggcaagaaggattaagttttacttattcaatatctctctgtgtctatattttcttgaaaaagaagctagcggtttaaggaactgcacaatcttcccataatctccataaactagatatgtcaaagttgcttgaaatgaattactcagatagacttcacctgagcatctttaaaaaataaattattaccatcctatttctcttgattattggatattctccactaattcatatcttaaggtccaaaattaggttgtgtttattgagtaatatttgtagaaatta

SEQ ID NO: 850 - DNA, 600 bp, Bovine  MMBT08239
caccagcccaacccttgtctgtattgcccaataaaggccagattttccgaatattatgttttagctgagcttgcagcaatcacaaatcagtcattaggaatcacrtgcatataacaacgtttgtcttcatagtattttgaactaaatataagcaagcatatttaaaatggtaatatccaaagaatcatatctcaagacttccctggtcatccagtggttaagactcggycttacaatgcaggaggtstgggttcaatccctggttggagaaataaggtcccacatgccatagagtgtggygaaaaataaaaaagtgaatcagacctcagcaacttggttttatttgcacactccatagtgtctaktattagcaattaacttgcattgtccccccacagtccatctgggggtgaataagtcattctctaagaaaaagtttgtgggcaaaaaagaaaaaccttaattaccctctatgggaaattttttcttctgcttcaaattggacaaaagtggctcttagatataattttacataacctcagtggcatgttgaagtatgggaggcaaaagacatttatgcaattaccaagtctattgttt

SEQ ID NO: 851 - DNA, 600 bp, Bovine  MMBT05625
aaggaaaaaaaaaaaacattctgaaaggtccatccttggaatgattttgtttatggcgctgcgatagttccgggcaattaatccagaattgcgtcactgaaaagattttatattcttaagtgttcactcatgtagttaaagtaaattatgtccttttccaaacatgtttcaaagaactgtactgggttttaaaaatcctggtccctaaatcctacttgtttgtttaattaatctgaaaataactgctccttctttgtttcttaatcacagatcacatacactgtatttgttagcagctgygaatgcgagcatgtcccagtgtgtttttcttgattgtttaataagagttgaataatactctatttaatccatcaaataggacattacaataacattgatcttttgtttgacagcaaatttgtttgataacaggatagaatataatgtaaccaaatcagtgtcagaagtgcatttcagagaatccaattaaaaacacccatgcacactccagacayggagcagtaggccaaagggaccagtaacagcaagacacactgggcaggagggtactcakggacaagctggccttgccaaacgtcc

SEQ ID NO: 852 - DNA, 600 bp, Bovine  MMBT08323
cacctgcccctcaatctgaagatgagcacaagccttcaggaataccccttctgttaaacacccccatccatccctctccccctgccaggtgatggatggtaagactcagttcaagcttttttttccccctgccccccaccccggctttttctcaaacccaacctaattgtcaccagggttcctaagtaattagggaatcccagcccttgcccacctagtgttcttcttcatccctaggttctgaggacgctcaaggctcagtttgaaacagttacatatctctgcccgacctggcgggayctggagatcctctagtaacraaaacctgtgagctggtgaaattcctgcttggtcacgtattatttttatttttcagtaacttgacaaacttggactagatcaagaaaccttctatgggccaagcctattctaggtacacagcgtgagtcaagttcagttgggttttttccaacagaaaaaatctgtgtttggacaactagagcttaaaatgttatgcaaacaaaagatgaacctacatcagcccaggagaaaacttgatagacttgctactgaaataactttcagtgactctttggggga

SEQ ID NO: 853 - DNA, 600 bp, Bovine  MMBT08388
gtcagtttaaaaagaaatcacagtacttcttagtataatctgcaaaagagggaaaaagtcttggacccgctgcttggaaataaatatcaagtaaccgtaaaaatattcagccattttccaggtcttcagggaggttcatggatggtcccaggcagaacattagagttcctctttgaaatagcccagctttgccaatgacatctcttttctcaactgcataacttcccaaaacatttggtcaactacacaaacagaaaagagggacacataaatcataaaatatcatcttaattatttttygtttcaatgaaaatttaggattagttgaaatgccaactggacacttctaatgatgtacctagtgcttaacatcctatcactgtttcacactaacttttccatgtacttctgagcattccagttttattaatgaatatatttactgctttttccatcacaatttgttagatattatcaatgactaccatggtagacatttcagtgtcctgtgtaactggcaatgttgctgccttcttgagtaactattctcaatgctcaattgtgcaagagttatcatctcacttatggatcttcttgctt

SEQ ID NO: 854 - DNA, 600 bp, Bovine  MMBT08377
tcaggaagtggtgatacactgaataaaagtaaacctgatgaaataagattagaagatcttgtggatattttggacacgcaagacagcagtgaccatatttgggatgatggtgaaaaggaagtgaatgcagaaatgagtgagggtcaactggatcaggaccagatgactgctctggacatgatttgctccaatgctgtgacagtcataagtgggaaaggtggttgtgggaagaccacaattgttagccagctttttaagcacatagagttgttggaagaaaaagaagtgaaaaaagcttgygaagattttgaacaagactggaatgtaccagaagaatggatcaccttcgccgagcaaagtcagcaggaactggacaaggctatagaagttttacttacggcacctacagggaaagcagctggcttactgagacagaaaactggttttaatgcttatacactatgtcaggtaaaacctcttacattttttctacacataaaacagttaaagatggacttaatgrttttatttttcatttcttcccgacaacaattagtgggcatttattgaatgttttctagacccttaccttgtggtagc

SEQ ID NO: 855 - DNA, 600 bp, Bovine  MMBT09178
ttattcttagaaattagaaacaaaaaaaggaccatgcaactttaatgtgtccctattttctctttcacttcttttaattgcctgcgttatggttatttattactctttggtgccttcaatgaatggggaaaggagaataaaattaaaggatcacttatacttattagcaactstggtaaagttttggtaaggaaagctaataaaattaagaattataatcattatttatctgtgtgtggtatgctaaataatggcccctgaagatatctacatcctaatttctagacctgtgaatattaycataaatggcaaaatggaytttgcatctgttattagttaaggatactgagatagggagatgaatttgaattatctgggtgggccctaaacataatcacaaatgttcttcttataagatgagacagagggagattttattacaggcagaggagaaggtgacgtgatgacgaaagaggagatttgagtgatatacttggaagatggaaggagtcacaaaccaaagtacaggcgaaagctgaaaaggcaaggaaacagattgttctctcagagcctccagaagaaaccagccctgaggacacc

SEQ ID NO: 856 - DNA, 600 bp, Bovine  MMBT06038
agttgggagaactgcccttccatgctaatcctccaacaaggctgctgtaactcttcccccatgacaaagggtcagaaacctatagcctggaagasagacataggaaaatatagggtttgttccacaggtgaagtccagaatagtcccctttattttctcttaccactccctctgaaccctctctcccctggtactgsaacaactcatttctcatgattgccagagtcattttatccataataatctccttgcaatttaatctgagatctgataataaccactgatgtaattataattaayaagaatgcttagaacatgtagagtgttttttctcctatgtttcccagaaagcagtgagaaaaaacaggcttccaggtcttgcaatcttgagcttaagtaatggctccactacccactagctgtgtgaccttgtacaagcgacttaacctccttaaaaatgagaagatgaggcagacttattgtcaattcaaccctccttccttggagagcctgggaagttccccaggctcccttgcagctaaagttatggatgggaagtaagtcccactagttggtggttctcatgggaggtttggagct

SEQ ID NO: 857 - DNA, 600 bp, Bovine  MMBT11010
tctccctgctgtattcttacggggtccttccctgccccagggcgatgacgtgactcagaagtctgggaacggggctgaagtctagcgctggtccccttggaaggtctgtacatccagtaggcgtttaatggatgcaccagtgactcgcactccagcactgtgcagcagtgattaagtgctggctggtggggatgggcccccattgggaatctcggctccaaaccctccaccatcccagtgttgggcatcgggtgctgtgggcccttctgaaaaagagtctccaaaaaaaatcactgcacygctcagggcaggcttcaggacaaacacccaactttgctagaacaaggtcttttttcaggcccatgggaccccaccttcaacccatgagccaagctcaagccaaacatgccaatccctttctggaaatttctgctaatgggctgagaaaacaggggtctccttctaaaccagaggaaccaagacataacgtgctttatttaccaaggggagcaaaggcagccaagaaaatgggtgagcagagaggaatccttggggtgtatctgggagagggtggaagagaaacataacagcatgaaagtg

SEQ ID NO: 858 - DNA, 575 bp, Bovine  MMBT07733
  misc_feature (1)..(1): n is a, c, g, or t
nggtttcctaggaacctccttgtcagtataaccacaaattaatattgccaaactagttaattatgagatcatctagtatcttaatatgtgtctgagattctctggcatttaacagagaaaggaatcctaaacacatattatcttcctcggtgggcttgcccaggaccacctctgtcacttgggaagacggatcacccccatgtggtggaggtctggygctgggctcagaggatatggattcttttttttttttttgactgcgctgggtcttcactgctgtgcctgagccttctctggctgyggagagcgggggctcctctctagttgagatgtgtgggcctctcattgtgggggcttctcttgttgcagggcacagctccagggcgcagggctcaggagttggcacacatgtttagctgccctgcagcatgtggaatcctcccggaccagggatcaaacctgcgtcccctgcactggcaagcgttcttatcctctgtaccgccagggacgtccccagagggaatggatcctattttccccctccagtcctcctcccctcctggctgggccaagtt

SEQ ID NO: 859 - DNA, 601 bp, Bovine  MMBT07415
  misc_feature (1)..(1): n is a, c, g, or t
ngctgaaacaaatgttgatagtgaagctaaatactgttcagcaaaatgattttgtacatatatatgcattctttttatattcttttccattatggcttatcacaggatattgaatataatttcctgtgctatacggaaggaccttgttgtttatccatcctatatatattagcttacgtctgctaacccccacctcccactctatccctcctccacccccaccgccttggcacacagaatcacaacgtctgtgattctgtttctgagtcatagatgagttcatttgcgtcatattttaaaycctacatataagtgacatcacacggtatttgtctttctgattgacgtcccttagtatgatcatctctaggtccatccatgttgctgcacayggcattattttattcgttctattccatttatacatttatacaattccattgtatatataccacatcttctttacccattcatctactgatggayatttaggttgcttccgtgtaaataaattataaataaaatacttactaaaataggctattataaatagaacaggcacaatattttgaatacagctggtggctccaggactttagga

SEQ ID NO: 860 - DNA, 476 bp, Bovine  MMBT06784
ggcagaaaagatagggtgctacatttaaaatccttgaarttgcaatktctgcctcaaacctgtcaaataagttgcaattcaaatgatgctgttttcaacacagattgttgtctgacagtgaacaacwgtttctatccaaataaaaatgtttttaagcactcctggatgtgaatccaatatggaaatggatttgaaataaacattaaacaktttgccatctgttgccctgctgagtcactgaagaatatctttctcaaatgttcatatttttagattaactggtccatggctgccaggcaygaagaagaaagaaaatctgaaactcagtaattccactaagttgtaaaaagatgcactacagagatactgctatttggggatgaggttgtggattaatgctggagtcaatccaggggaaacattcctaggttgtcagaacattttatccaacaattaatcataatcagcacattcta

SEQ ID NO: 861 - DNA, 598 bp, Bovine  MMBT10443
  misc_feature (1)..(53): n is a, c, g, or t
nnnnnnnnnnnnnnnnnnnnnnnnnnnnnnnnnnnnnnnnnnnnnnnnnnnnnccaccttccccattcctggtttttcaataacttttattatttcttctggactcttattggcaatattgctttctttgcagaaacatccgagcattttttagaaaaataaaataatgcagttttggcatgcatacagtgtattttaaatggattaattttaatgtgatcagcactatcccttgtatgaggtgacctctatgatttatattagttgaaatatagttccatgatttaataaaggatcccytgaaagaaatctgaattgaattattgaatttgtttatacgtcggcagtagaaaagagtataaacgaatcttacaaaaattaacagcctttttctgttgatttttcaccgtccctgacaattcctcagaaaactcaatttttatatcttagggatctttatcttctgaagttggctttcattacattttaaatgattgcctatttacaacactctttcaaatattatcttctgttaagggcgaaaagtcagtcttattatcttcttttatgcatataatgaaattgaaactcagcaagg

SEQ ID NO: 862 - DNA, 600 bp, Bovine  MMBT09624
tgaaaaaagtcaccaaattctatttctttgtctataaaatactaaacaaatttcattataaggcactctaatgtaatgtttacagtatactggtttcatcgcattatgaggcagtaaaaaaatactgctaaattactaaagcctttattacytcagcacttggtgagacaatttccaattgaacatattttggaaattctaccctgtttctggtggtatcagagaaaatgctctaggacactgaacagcatcaaaagctaactctagagggcgccagagtaccagaaaattggcttttcyttttctctttcttaccaggaatttactatttgtcaccttggtgcaaaagaaaaaccaagtgcctggcagcttttctgctgggttcctgtaacgacaagattgctgaacaccccacaccactctttatttgrttttactaaacacagacttcaaccctgtggcrgagtcacactgttctaactcaccagagggcatggctgagagtggttcttccctgcggctggtgctgcttccaaactcacctgagaggtggcacattttctcaagatgtctttagttgccccagggggtggagtaatc

SEQ ID NO: 863 - DNA, 600 bp, Bovine  MMBT08193
taatttgttgttctttcggaaatatgttcacttttaataacttgtctgtgttctgtcttgtcattagtatgttagggtccttgcctgaggcatacacgtttcttctaattttcttctaatctgctgttggtttgaaactcaaataaccaacttatgctctgtatcagacattaacattttgctttgtatgcttggaatattttctagtaatttaaaagggagagaatgtgctttctatgaggggccacctgagcctttctatgagtaaaattttgaactctagtgagaaaaaaattttcycttactttgcctttctaatctatattcaaaataagtgagttttccaaatarttgatttcaagatgggtaaggtatttcagtcctttacaaaaggatctggttagagattttctcagtctagggcactggttctcaaccagcagtgattttgctctccaggaacatttggcaatttctgcagacttgtttggtggctgtggcttgtagcaaagagaacacgacctgcatctagttggggagggcccaggggtgtgtgaaacatcccacagtgcacagggcaagccccagtaacagttacct

SEQ ID NO: 864 - DNA, 600 bp, Bovine  MMBT06650
aggagaaggggacgacagaggatgagatggttggatggcatcacgaactccatggacctgagtttgagcaaacttcaggagatggtgaaggactgggaagcctggggtgttgcagtccatggggttgcaagagtcggacaccattgagcaaccgaacaacaatgtatttatgaagtacaccactttccttactcatgcaaatgcattatctatgtctttaatatacaagctgttttacagattgggttttaaaaggagccacagaatatgtttgatcacaaccatttttcttattaagayaaaagggcaggttcctgatgcccacagaggccaaggcactttactgtgcagagtttctattttcaagacacgatttagccagccgaaatttaacccctgagagcccttcattgtcgcagtctgttagaaagagcgtcactgatgttactgctctgctaagaatagtccgcagatgtgcttttaagtaaagagggatttaaaaataaatgtatttgacaagttgctgatcagaagcctatatttaccacaaccaaattagaatggtgttgcatagaagttgaagtgtatcctggaaaattc

SEQ ID NO: 865 - DNA, 600 bp, Bovine  MMBT07382
taatgaaaaaatttagaacaagatcctgagctttctaaagaatgtcagttatattactcgtagtatgctcacttctgagactgggtccaagtgacactgatgaatggtttgagaaaaatttttttttttcaaatcagttgttaaaggagtcctggtgcaggacagaagccgaacagtctttgaagccaacggagttttgagatccaaaaatgaagagctattgccagcagcagtgtcaaaacaaaggcaatgaaacatactctttttttttttttttcggaccagggatcaaacctgcaycccctgaagtgaaatctcagagtcttaaccactggacttccagggaaatccccaggcaaactctttagaaggtttgtataggtataatttcaattgattacttaaaatttggctgtatgacacaaaatatagcccttgtgaaagaaattttaacatccgtaccagaatcgttatacttgttatcaaatagcaccaattttcattttgttatagcatattttggtaatattgatttacttagtgctaatagaataataacatgtttattttaactccaaggatagtgggagggaggtgtgt

SEQ ID NO: 866 - DNA, 600 bp, Bovine  MMBT06785
ttgagaaaggagaaaagtgattcagaaactacctcgatagcttctattgctcacttctaacccctccgcattttagcttcagttcacatctcatgttttcccctgaggggctcgcaccactgaggtcagctccacgctttccaagtctttgaaacaagccgcatcacatccttagtccgagagtgtatactgttctttaacagaatccagaggcctttggggtccaaatacatttgctttattgcccgttttctgccactcctgttgccttctgccctcttttactaaagaaaatatttyatccatgtattcctaaggaaaaaaattagaaagatacagacaacagctctgaggtcgacttcagtgactcgctgctacattcactgtgttctgtccaagaactggatgtaaatacaaaagatggctcatgccttcaataagatcaaagtctacaattaaaatatcctctagatattttagaaatattgtagaaataaggtctacaaggaaaaatcctccttcaataagatcaaggaaaatcaattaaaatatcctctagaaagtgacatgcggataaacataggagctttaagaacacat

SEQ ID NO: 867 - DNA, 600 bp, Bovine  MMBT09831
ttgctaaataataaataaaagtcagcagtatctctatataacagcaagaaacagaaaatataaaattttaaacaattccatttacaacaatgaaccaaatgcaaggtactgaaaagtttaacaaaaggcatgcaaatctatcatggacaaaattatacaattagattccagtatctaaatacacagagaaakaaattataagcaaagataggaagatcatgaagatgttaagtcttccaaaaataacctataacgtcagtgtaattccatctaaaatcccaaaaggattcttgtagaatytgacgaactgattcaaaaatgtataggaaggaactactgtatagcacagggaactctactccatattctgtaatgatctgtatgagaaagaagcactactctgtaatgatctatatgagawaagactctaaaaaggagtggatatatgtactaatatatgtataactgattcattttgctgtacagcagaaactaacatgacattgcaaatcaactatatttcaataacattttaaaaatacattgaaaagtagaagaaaaaataaataaaatgtatagggaagagcaaaggccaagatt

SEQ ID NO: 868 - DNA, 600 bp, Bovine  MMBT07408
tcctgggtcgggaagatcctctggagaaggaaatggcaacccactctagtattcttgcctggagaatcccctggacagaagagcctggcgggctacagtctatggggttgcagagagtcagacacgattgagcaactaactcactagtgtaaaactgtctcagccaaacacaacaccctcaacatatagtcatgggcctctaagaacaccttcccacggggtgctgggggcctccccttgcactgtggcaggagccctttgtacagggtagggagggggctgccccaatggagggtggcrctggccctgcagggaccctgtcccagaatcacgtgctcctggtcccagctcagcatacctccccatggagccctcaatccagcccagctgcccttgactgcttaatcacctgcttcctttcaccttccttcccaccccagcctcacggactttggtaaaaagcacatctgtagtgtacactggtcccctttcagagccccaaattcatcgatgtccattagataagttcagtcaatcgaaagataatttcttggccctcagagatgaataggataattttatgtcattaaaccctacaag

SEQ ID NO: 869 - DNA, 600 bp, Bovine  MMBT03274
tgcggacccctgaagtacaggtgccccgaagtcaccatgctgtggagaccacacagcagacracatgtacgcagagaatgtcagaggaaccccagctgtttcagccccagcartttgaacattcccagactcaatggcaaacgtgctaatgaggaaaacagatgacccctgcatcatccctgcctcacggcaaccaggtgagagaccctgagtgagaaccacctagcggggcccagcccatctccagattcctgagagacgacaatagtatatgattatcattgcttcatatcatcaackttggggtgttatttcatgtcacaatagattaccagaacacttctagatagaagtgtggggggcgtctagcccagacttctgaatatccctccccagtactcactgaaatggcccacagcacatagaggggaaatttttaccctgagtggcaagcgcctctctgatagccagtctggctgctggcccagaaggaggtgaagacaaaggcaagataaccttcagccctttggggcagtggctttgcaaaacattaagaagaaaccttgcaggagtgacattccttgccagatggctctcttc

SEQ ID NO: 870 - DNA, 600 bp, Bovine  MMBT03366
aaagcattggagaagttttttcttttgttttattgtactgtgtgatgataggctgcagcatggacctggcatacataccaggatttcttccatcaagagcacagtttgtacagtacagtaaacacaagcaatgtgctcataaccagtctatgtcagctcccactccaagcatggtgccatactggaaagtgtacgcttctcatacagtctaccaaaggaaagaacttagggrcagtccagagaactaaaatcatatcaaaatgatcaaataataaaggagttgcctcaggagaatagackaaaacttaaatttttaggtgaagacataataaccaagaagtttatgatcaagatttctaaagtgcaaaatctatccactgattattagaatacgaaataactccttaaagtttaaaatgcagtataccagaaggaatgccaggagaaaagacataaaaactcaaggaagctctggaaaactatatgaaatggtagacttataagggctttgagagaaaatgggtatgtctgaggctaaagacagagttagatgaaccagaggaaggacacaacagaataattagtatattctcgtattct

SEQ ID NO: 871 - DNA, 600 bp, Bovine  MMBT04834
ygtatttgatttacataaggatcctttcttttttcttcattttggttaaatataccagttgcagaaagcattccccataatattggttttgcttctccaaaagaaaagtagaagaattatgtactcttattgttataataatcagtgataataataaatattattaaaatagtaaatattaatgacaaatattatttaaataataacaaatattattattaagtatrgtaataatatgaaggtttggttcttagtaaacaagatttgattatcaagactcttttccaaaaaccttgattktgatgagtgaataaggaagatggctgaacatcctgtctttctgtctttcatgtagactgctctactgtggctgtgggtttcccaggtgtctcagtggaagagaatctgcctgccaatgcaggagacacaggttcaatccctgaaggaggaaatggcaacccactccagtatgcttgccagaaaaatcccaggaacagagaagcattgtgggctacagttcagagggttgcagagtcggacatgcctgagagactaagtgcacacacacgcaactgtagctgtacaatgaagaaaagacac

SEQ ID NO: 872 - DNA, 600 bp, Bovine  MMBT05165
tactttgagacttactcttaaaattaagtgtacccactgggaatcttttgatcatgattaaattaggaaacccagcagatctcttaggaaacaggctataatttatcaacggctcaaattttacatggttactcaaatggctttttagcagactatagttccatttagaacttgtgaaggaaattacaaggatttctaaatgaaattgtttacaagagtgagatgtcatacagggtcatttcctagtacattaaattgaaccaaaggatgatttcaattttccaaatgatgctcctttakcgatttactaactttagtctttgaattgaatgtgactgtcctgtgacagattactggctgctaatcttgttgatagggcacttaattacatrgttcacatcttttaaggttcagtttccataatcatctcaatgaatactttyctcagtgtattttgcatgtaaaaagtgtgtaagaattctattttatttttcatcgtgtttagatgcttttgacaacaaatagttacgtgcaaatgaaattagaaatattgctactttattaaaatgattgacttgagaacaagtttggcagagttat

SEQ ID NO: 873 - DNA, 600 bp, Bovine  MMBT05267
accccagtctattttctcatgggtgaaatgatgatatcgataccttattggttgctgtgaatgttaaatcacataaaatagaataggtgatgtgtagatattactcaacgactgatagctattattttctaactttcttgtagctccaaacatttatcaatttcttagatttgtagatttttactggttaatttgtctaggcaaggaataagcaaataacactgaaaaataaaaatctgccagttacttgttacaagacagaagcactagtgatgggctcctcaccatcacaataaagakataattgatatggccaaaactcattaaatctgagtattaatctgccaacagccacttgttaaaaaaaaaaaaaaaaaaagtatagccctggcatgaaagaaaacactttctggctgctggtgtggtaatccctcctgtttaactgaaggcttcaagtaggtggaagttgtaacctgtgccacatattccaagagtcatagagctgtcaggtcctgaggccccacgagaagcagccaggacacaaggggttaaactgccttgcccatggggcagagctttcaagggtcactagagggcagc

SEQ ID NO: 874 - DNA, 600 bp, Bovine  MMBT04184
tggggtcgctaagagtcggacacgactgagtgacttcactttccttttcactttcatgcattgaagaaggaaatggcagcccactccagtgttcttgcctagagaatcccagggacgggggagcctggtgggctgccgtctatggggtcgcacagagttggaaacgactgaagtgacttagcatagtggcatcctgaaagatactcctgcatgatgctgggcagctgcagagagttgtagctccagctagtcatacaatcacaagagtaaacagccattcacaacttacaaccattctakacccatacagcaattttatttttcactttcagtacactagttaataaattatatgagatatttaacactttattataaaatgggttttgcatgagatgattttcccaactgcaggcatatttaagtgttcaatacatttaagttaaggtaggctaagatatggtatcaggtagagggtcattatatagcttccctggtggctcatcagatggtaaagaatctgcatgcaatgcaggagacccaggttcaatcgatgggttgggaagatcccctggagaagggaatggcaacccactccag

SEQ ID NO: 875 - DNA, 535 bp, Bovine  MMBT03240
aggccagcagctgacccctattctcacttggtttttggcctgggtcagcttagttttcttccagtagttggtaaaccgtctttgcaycaggagagagatagtaaactggactgaggagagagggatggcggggaaaggggaaggaagggactcgaaggattaatgagctgatttccattaaggctttgacatcttggaatgaaaagcggactgtaagagcagaagcccagtcctctactccggccatgctgccagctggccattcatcaccaaaaattccccaacaaatccayggctgtkgcttaatcacctcatataaatctctattaatcttgcaaagtcaaaacacwaatatatgacaaaagtctttatgtaccctcgattttgtggtcaaaatgttaaaaaatggaactgatcatccaatggttccaatcaactttttttttaaacctccttttggggaataaataaatgacctccttactaatgttttagtatctactagactgaataaactcaagctaaatgatcaaat

SEQ ID NO: 876 - DNA, 600 bp, Bovine  MMBT03032
ttggaaatattgttagaatggaaatcaacatttgttgctacacagggttgggcattccaggcagactccggtcgtttttaacggtgttgctctcatgtccacttacgtcacatctgccgtgacagtgacaggtttcagtaacacagctgccatcagagtgataagcttgtgagcgaagcctttgggaaagtaataaagtcatttctggtcccatctcaaaggacattattgaaaatgtctttaaaagtgatcaagataacacccatgaggctgtgtaacgtttgggtgtttaaagttackaacaatctgcagttgagtccatttcaagctgaaaggtggctcttgcacaaactcccttttaaacaccatagctggttcaaagttttaggaaaatataaacatcagaaattaatagtcaatttcaatagtcagtagtcaatagaaagttctagggcagaagatacttctaagtttgtagctgccccgatcagatttaaaacttgaacatggcagtgctttgcattttgtaatatcttatgagggcctcgtgatttattttgtkaatagtatctattagctgtagtacaggtccagttttaa

SEQ ID NO: 877 - DNA, 603 bp, Bovine  MMBT05170
  misc_feature (1)..(3): n is a, c, g, or t
nnntagagggaggaacagatcaaggagggaaacctgaactagtctgctattcatctgttcttgatttattctcattgtgtaaattgagcaacaccctgcccatctatcttgatgtgggaactccatattctatttatttactctatcttcttttttaaaagtaataccyagttttgccacgcctgtgttcctgcttattgcaatgattgcacctgcctttcttctggtcattaagtgccacttcttggtatttattatttagagattctgtcattcacatttttatcaggaatcctaggtctktaatgtcatttccaaccttccctacagaagacagctaccactgagcttctcagtgatactgatgtacctccccatagcacattctttagtatttggtaaatggagcatctgatgggctcgcccctagattatagttagctggtggggtttctgaccttacatatttattttttctcaggcatgcccaattcactgagtctttgatctcttcatccttcatctcccatgggagttctggaatttctacccacttagcataggtcataaattttctcaaatttctaagaaccatcctggcag

SEQ ID NO: 878 - DNA, 600 bp, Bovine  MMBT04773
gcaatctgacagtttgctttggtgaatctgcatatgctgctggtacagttcaggtatcctgccggctggcagctatgatgcgttataacacttgagtctaaaattagttgaactattctattttaaggataggctgacattagtagttcatgtcctgcaaaacatgtgaaagttaaactcttagggtattgagttacttcttttaaaatgtagtcagaaatagggctaaatagatagtagtttatataattgactcaagaatttttgtgatggtgatttgattgtagcctgagtatcatkctrtgcatatagataatgtctaagagcacaaagttttactgttactacttagaattaagcagcaggtaaatkatcgtgtttgagttttaaaaccatgagttatgagrttaaacaagattacctgatttttctttcagcgtagttttggaagagctaccgcctataaatatttatgaatgctggaaaccactggctgccttcgctaggaaaaaagtatttggttgtacgttttgtgatctttgtaataactttatttacatgacagaaactagagaatattgataatacttggtagataaa

SEQ ID NO: 879 - DNA, 600 bp, Bovine  MMBT03805
ttaagacaaccttgaagaacatgttgtctctggatttcaagttatgtgaaaatataaatgccttcattgttaaacytaattgaattacatattctgttacttgcaggtaatctattttaactgatataagcccacacatatatttttaaaattgaaagttaaatcatgttaaacatactgtgaaagaatattaaatttattttttgtrgtgactttttaatatgtcaatcattacatgaaataagtgcttcattggctggggctaaatataatagagacttttcataaaatcacattttktttttactaattaattccttaatgttttaaatattttaacactctgtgaagctctggggaacaayggtataaaaccaaaataacacataaatttgtgtctctaagcacttatgtatatgtacgcctagttgttgttctgtcactcagtcttgtcctattctttgccaccccacggactgcagcactccaggcttccctgtctttcaccatctcctggagtttgctcaaactcatgtccagtgagttggtgatgccatccaaccatttcatcctctgtcgcctcttctcctcctgccctta

SEQ ID NO: 880 - DNA, 600 bp, Bovine  MMBT08941
tttatcatctatttaaggtctagagcactattgaagttcgcctccccttaaaaccaaacaaacaaaaatttttttcagagcttccatgaacttccgtatttatagatggaaagatatatgggactacacactttcaagcctcattgcaggaccctagttttagtgggatcatgtaaaaccttgtattgttgaaaacccaaccttgtattgtcttccatcttgaagcagcattgagtattttatcaaactgatagcaargaagtgtttcacctgcttgactttttcttactgtttcatctkagtttcagtgcagtgtgtctacaccctgctgggtgtggaggccgtgactcacctagagagaggatgtagttctctggccacatccagggtgttgcaggatgactgaggcacttctcacttgggcttgatgccattttgttccttccctggttctcacttggatatttgcttggctacttgctaccaaggagaaccagtccgttgagtatttgaatattaattcctctttctacacaagtggctgagcaagtttttactggaagcgtagactactgcctgaggaaagatgggggtggggag

SEQ ID NO: 881 - DNA, 600 bp, Bovine  MMBT07674
atctttcctcatcttattatcaggtatcacttttctaacccgttcttgtctccagtcaaaatgactggcttgtttgttcagcaagcatgaacaagtcactatcattttcatctccgcagctctgagaggtgatgccattaagcttgtataagaggctattggctcagagagagcttaagagstagaaggctactaggtggtagagccaggatttgatgccaggtctttaagaactatgggagccctagtctgctggtttccatcaaccatttctctgcctagaatatccttccacctcckttcctttctggattccatttgtcattcagggtctcattccctccatctcctccaggataccttctgaatcattgaggacaccttttattgcaartgatagaaaattccattccaaagaggcttaagcaaagaaatggaagtttgggggcacaagtaacccaaaagtccagtgagtgaggttggatttagagctcaaataatgtcatcagtattttccgtattttctttcttcctaaatcttggttttgccttcttttctgaaggctgaagtttcaggctccatatggtagcaaaaaggca

SEQ ID NO: 882 - DNA, 600 bp, Bovine  MMBT10612
tgtgagcaagctccgggagacrctgaaggacagggmggcctggcgtgctgcagtccatggggttgcaaagagtcraacacatctcagcgactgaacagcaggcaacaaaagattgaggcccttggggttaatgygcgtaaatcagctacaacgattctcttgaagaaaaccgtgtggatccccgttccccttgctaacctaggaattgacaaagaaagcagaagcccttcctggagctgaacaaygggaacctcatgtctgagagcccctcaggtcgcctggggacgcattttgtgtctkgtaaagagaaatgtgcctgctggagacgtatttcagccccagcatcaattcatcatttccccactctgatactgttctcgtatttttcagtctttcctcccaaacttcagactcttttcctccttggaaaagagattgaatcgtagtgtgaaactttataaatttcaaatgtcacttctctgatcatgagtgatggracttctgccatttaaatacaagattatctggcttctatttgtaaataaaatcagctgtacatagaaatcgatgctggcttttcatttttcacccgagatttct

SEQ ID NO: 883 - DNA, 600 bp, Bovine  MMBT08333
aatgtggaaaggtttacttccagccttataggattgatgtaaaggagggctggccacttcctcttcaggactcatcgttctcagtgcaatcccattcacaatttctctgataactgtctgttctttggccagaaatctggttcttgaattccctctcctgttcttcccatggtttgggaaccaactccagctccatcttgtggtgccggaagaacagagaggtagagtcacttctggacagtggcacagcaagcctacaaggggctggggacgtgaagggagaggatgtgatcctcagakgggaaagggcagggttgtccagagcagagtttgacatcagccggaagagcacccccacccagccactgagatccaaatgtgcgcacgatggaactgtctttacagccaagggccccctccctcccaaggagaaaatcccacaagtggggaacatctggatcaaaccgcaaccatgaaagcacaacatcaaacgagggcttcggagcgaccctgcccacaggccctgctccaagagaaactgcagatcttcctgctctaagcttttaagtgtcactgaaccactcaagtttgggatctccc

SEQ ID NO: 884 - DNA, 600 bp, Bovine  MMBT10749
tgcaaccagctagttgcagatagttgaggaccacttttgtttgtacattgttttcctccagcccctctacctaagttgttttcttcatcctctcaaatctgtttcttccaagaacctttctccctcctggccttcatgagccatgctcactccatagacaaaaacaaggacaggagactctttgccaaagttaaaagcgcatcaaacacgcctagcatttattaatcacaaacttacagacccctcagaacaccctcctcggggcatggccccaacaattcaaagctgacaaccttgggkatatgtgtaggagggatggggatgagcagggagtgtctcttgataactctgaaatggggaggacttctccaaatggagaactgggtggaggccagaggttgggggtgacttagcttctgagtaggaggtgggagtcaaaaaatcagataaacagaagagtgggtatgtatgcttttgcaatcctccccctatgcctctgtcttggtgggataggcttccacttgttcccgggctggggaactccctggaaaggtcccttccttcatcctgttcctctacatgttgaaaaagaatactgtg

SEQ ID NO: 885 - DNA, 600 bp, Bovine  MMBT08144
ttaactaatgaattagtacaaaaaagcctgccccatctataagtaattcaccacgtgctgctctctactgtgggtacacattccacagaagtaatcttgaaaaggacataaagtccttgctatttctctctcggttgtatttctctgagaagacactgttgtcaccagttatatatggtcactagcaagctcccaacaatgtagctggaaggcaaagaaagaaatcaactgacctttctgcaaaaggaaggaaggtgctgatagatagcagggaagccaaaccagttcggaagggaccakgactrgagggccttctccttagttgcgaatgcatctggcctgtgtccatggctagatcatatatctgacaatatcctcccttttaatgctttgcagatccaaggtatattatcataccccaagcctgaactctccagggaaattatgtcaagtcatagccaaggaagttggattataagaaaatcactagaggaaccagctgtctcgtattcactgttttggaggaaggagaaaccatttaccaaaaggtggcactgtgagactgcaggatggtgactcaactcggctttactctcaaga

SEQ ID NO: 886 - DNA, 598 bp, Bovine  MMBT09156
  misc_feature (1)..(115): n is a, c, g, or t
nnnnnnnnnnnnnnnnnnnnnnnnnnnnnnnnnnnnnnnnnnnnnnnnnnnnnnnnnnnnnnnnnnnnnnnnnnnnnnnnnnnnnnnnnnnnnnnnnnnnnnnnnnnnnnnnnnnacctgatcagatgtgtatcctatgaggctgtgtatatacaggaggactctgggagcctgcctgtgtgtgtgttggggggtgtcctggggaaccggggagaggcagtggaaggggtaatctcagaaatggctgagcactagctgaagactagatgcaggagtcagggaggcccttgataccgtgtktgggaacagacacaatgaatggctgcaggacsgagagagggtgtggggggaggagagccaacagaaagaggacttcccaggatacagaaaaaacactcagtatgtttatagacaacaagcacatacaatgtagctctatacaataggtgcttaacatatgtactatgtacagtaagtgctcaacagcagcttgctacatataccatagaccttcagcatgctgaaggcagcgcacaaggcacgccacgggaattcctgactgtgtacaagcaggaattccacatgttagctacacata

SEQ ID NO: 887 - DNA, 600 bp, Bovine  MMBT09657
gagggcacgagaccttccttaggaaggcctggagagccgaagccagcatccggacccaccaggcggccactttccttgcaagcccccagagtctcctttctctaacaaaactgtccccctgacccttggatctgctccagcaacaggtgaataactgaggctgccraggcrcaaactcgcatatttctgccattgtggctgctctggtcgccctgcccaaagcatcctttccacttgccatcctgtctgacactctcctgctcctttttcagatcttcagagcccagtttttggggaagkttgttttattttttttggccatgcagcctggcatgtggaatcttagttccctgaccagggatcaaacccatgccccctacatgggaagtgtggagtcttaaccactggaccaccaaggaagtccagagcctggtttaaatgccaccttctctgagaagtcatccttggtgaagactgtcagcctgcctggcttccactctctgccccactgtgtccactgcrtgctccactcctgccctggttccctgctctaatgcgggatttgtgcttctctggagcagtgatctcagtttggagctc

SEQ ID NO: 888 - DNA, 474 bp, Bovine  MMBT08682
gatagcactgctctaatgaatagatgtctttgcttctttgttaatcctttttgccttgtaagtgagtaagccacctaaaatccttgatgcatgatcattttacacttatctcttctgtttgagtggtcatcataattacatagcatcactctattaaatttgcagtgtaaatggtaaacttgtatttttcccccccttctctagttgctttcaccagaagatttagtgaatgcatgcaagatgctggaagcgctgaaactacctctcaggtaaaagaaccttgtgggaagtttgccgtckgttgtcacaattccaccctgagtagacagaacagccctgtaggtctgtcctcttgcgtggtgagccagcatatacatcactcttctggaagtttgtttctcacgtgggcaggaatcacctggtaccatgggcatctgtcatcccagcttccatccttctcaaggctgtgcaagg

SEQ ID NO: 889 - DNA, 539 bp, Bovine  MMBT06949
aactttctgcagatataaccctaagtggggactttgatatctttgtacaaatgcgtgaactgtttgcctgcaagatccattccttcccagcagtcctccaccccacgacccacattaaatgttatttcctctggaaagagcatctggagaggtggctggtgtttggggactaggtttccccagcacagtgtacacacttctgtgtagacttggcacactgaattctaattctccgtttatgtctgccttccctcaagggctgctcaagggcaaaatccataccctcttctattgtgtctkcctaagaaaaaactttttttgaccgaaagtgaccgctgaggaaattattgaaagaatgaacccagagagctattatacttatttagaaaaagattatgcttacaagacyttcatagcttgagcatgagataaaaggaatagaaaggctgaactggtttacccgctgtttgctgattcataacagggaggaagggaagagtgatttggaggtggaggcaggggaaaaacaaaaggcagtg

SEQ ID NO: 890 - DNA, 600 bp, Bovine  MMBT09046
cagaaagtttgtattttcacttatatctgagaccaatgactgatgaaaaatactttcatgaaaatagaagttcttttgctttatttcttgcacagtggtagtcataatattgtataacatataattaaattcacttttaaaacaaacagtagctgttattggggtaaatgtagcccatgctgctcttcttggtaaggggggtgtttaacggctgaaaaacttttgttttgaaatgtgcatgtgaaawgttaatccaaacctctgaataaggtgtttgcagatgtagctagacactataakacacatgcyacatacatgaagacctgtggtctccatttataggcttgcatgcatacttccaaaacactggtttgaagaacaygaggagcaaagaaaggaggtgaaagaaaaaaaaaagctcatacaaaattcttgagtttcctggaggcaacagcagctccttaaataaagcaacagatcatgggcagaagtttctacaacttcccagtgatagagagatacaatggcttagcagtaaaactcacaaattaaccgcatatgcagaaggggaacacatcctcaagagtattaggattaatg

SEQ ID NO: 891 - DNA, 598 bp, Bovine  MMBT11189
  misc_feature (1)..(175): n is a, c, g, or t
nnnnnnnnnnnnnnnnnnnnnnnnnnnnnnnnnnnnnnnnnnnnnnnnnnnnnnnnnnnnnnnnnnnnnnnnnnnnnnnnnnnnnnnnnnnnnnnnnnnnnnnnnnnnnnnnnnnnnnnnnnnnnnnnnnnnnnnnnnnnnnnnnnnnnnnnnnnnnnnnnnnnnnnnnnnnnnntgaggttttgttgatgcccttgaaatttctaagtgtaccaaaatttcatacaaccatgatagtctgtatgtactagcatatattaatttaatcctttattttgcaatatcctgcaattgctattkcaagttgagttttcaaagaaccctttaaatttctagttctaccatataacaaatgaaactaaacattacctgacccagaatttactgtctaacccttcgacagcaaatatgagaacaacggatgagtgacaatttgtgtgaggtttagatgaagaaacagatcaacgtatgataaatttaayagcaactctaacctaaatgaaaatggaaacgccagattctcccgagtcttaaaagagagackagtcacaggctatactggggataaagaatgtgacgcacttgaatggaaatgaaa

SEQ ID NO: 892 - DNA, 600 bp, Bovine  MMBT08981
ttaattagagccaggtcacagggctcccatactgtctatgtactgttagtcgcccagtcgtgtccaactctttgcgaccccatggaccgtagcccactaggctcctctgtccatggaattctccaggcaaaaaaactggagtgggtagccattcccttctccaggggatcctcctgacccaggaattgaacccaggtctcctgcaatgtaagcagattctttaccatctgagccacagggaagccctatactatgtcctaaacacagttaaagacattgggcacaattaccagaagaggkaaatgaatgctgtataagcaatacagcagacatccatgtaaggatggaatactctaggacagtaatcttaacttttaggatcacaaacccctatgagaatctaatacaagcgctgcatggacgaaaatgagcaaaagcactcacaagcatacaaggcagttgtagactaaaaatgtatgtccttcaygcaagcagccttgcaragagttacatttcttgctcatttttcttatttttataagaaattartaagttttataagaaaattataaaattaataagtatttcctgaaaatgata

SEQ ID NO: 893 - DNA, 600 bp, Bovine  MMBT08818
ccatcccccttttccgtgttcttcccccaaatgtcttcggagaacggatctggcagttaactgtggagtcttgcttctgctttgagtgtccccaagcacgtgcgctctgtgtttcaagagagcttattggctaccttctgctcggcatgtttcacactgagacccactcagaggctccgtccagcactgtcctgatcatcgcagctttacaatgagagttaaaatcgagtcctgtgcgtcttccaacttcattcaacaaccaatccaacctttaaagaagtaacatgtgataacgtatgkgcttcaagttccgtttcagatttttaacttatgcttttatgggaattggcgagttatgattagttatcagtcagccccaccctatttcaattttagtatgtactgtacatattcacaataccagcattcaggggaaaagtatgaatttgagaaccaatgtttgtaaagatatcacagtcatacgctctaagttgtcctggaaccaggttgacctcgatcttcagttaaataggtcagtgcagtggaggctgctttctaggaggtccagccccacgtgactctgagaactccccttccgag

SEQ ID NO: 894 - DNA, 600 bp, Bovine  MMBT07662
gtgttctggagagccaggatcctatttataggatgaaagtcttggaaggctctcttagcaggaacgatattaattaagtggtggtaacacagaaaggagaaggaactgggatatgcagggggcacaggaaacataaagaacaaataatctctaggtcttttctttgctgggaacacactatacagagmgtacaagcatataacaactaaatgaattggctgttctgagtttttaaaaaaagcaaaacaaaacactgttttttcttctctctcccaatggattccacttaggattttgtaktctttaattcttgaagatgttctacaacactgcaggaaggagcatagccaaggttggttgggagtgatgggtaaggttttacggacagatgcacatggagtataagaagttttccttttttaggcagaaaggaaataaactcagtgagaatataagagtaagacttagatttcagtattgatttttttttctatgatacatttgtattacttttccccatcaccctctacatcccagatgtccatttcaggtacaggttaaatcatctttcctcaaagaagattatatataggtagccaa

SEQ ID NO: 895 - DNA, 600 bp, Bovine  MMBT07106
ttagcctccaattaaaataaataaatttgaaaaaaaaataaacaaatgacataatttcccatgatgatacagcaacatgaactatgagatgttacggagaattatggaatgaagaataagttggagtgaggagtaactttgtacaggtacgttcatgaaatcatctttgcagaaatggtaaatctaagcattgaatggtaaagtgttaaccacaggaagatctagagacagagggttctggaagcaaaaagaaagactcaacgtcctagacaagcatttagtatttgaacaacagaaaakctgcctgcatggtaaaagcatggtgactatgtgagcgtgtatgatgtggggtgggagagagctgaagcaaacagaggtgagggaaaacaagggtagtctgaattttattctaattgtgataggaagtcatgcatcagaagttttcagtattttctcagaaaagatgcctgcttggtgcataactatgtgatgaagcaaatgaggctgttctggctcctgtgtaattgtttgtttcatgcaaatacagcaggcacagctgtcaaagcaggtacttctgtggttggtactcagagtggttgt

SEQ ID NO: 896 - DNA, 598 bp, Bovine  MMBT10822
  misc_feature (1)..(126): n is a, c, g, or t
nnnnnnnnnnnnnnnnnnnnnnnnnnnnnnnnnnnnnnnnnnnnnnnnnnnnnnnnnnnnnnnnnnnnnnnnnnnnnnnnnnnnnnnnnnnnnnnnnnnnnnnnnnnnnnnnnnnnnnnnnnnnnntgaaatgaatgaatgaactcaattcactataattaatataactttttttaaatgtctagggtagtttatactagggctctagtaacaatatgctgggttttgaaatgaactcattttcaaagagagaaaggtgacacaaaatgtaaataatamcaataataataataataaackttcatctgtatttcttaaaatgtctaaatcatgatggcaaagtgaactattctttcctgagaaaagaacaaccacttaagtattaataataatagtccaagttaatgtgtgtttctgttatcatcattttggtctttgtattatttcataaatatattcttaaaagctggatgcatctatgaggttatatttacttcagctatcatctatgcaaattaaaataaaagagcaagtgcattgtatgctcctttacttgcatgggccatcaaaaaaaaaaaaataactgaaggctttttaa

SEQ ID NO: 897 - DNA, 600 bp, Bovine  MMBT10413
ttcttccaggcctcagattccttgtaacccccatattcgggtctggggaaagggaccagcctaggggctggaatgcacgagtaaactttgcaagttccctagcttgcaagtttgagctttatgcaaaatctaagaacatccgctgtcgtttgcagtgagattgcatattcgataagtccgcagagtccctcttagccagtgaggcagcccgcagaagtcaggtgtcagggaaatagaaataggtggtcttactattctctctggttttacatctgtctgcagagactatggcttacacakattagcagactcgacatataccgagacggtgcagagagtgatgcttgttgacattatcagcaattcctggaggggagttttcatactttcttttctggtcttgctttcctgagtttgtttctttgttctcctgtacacctggctatcctttatccccgctgctgtttatctccctgaaatagttttgtgtatctagccatattaaatccacttatttattgttcgtttatctctgtttggtgtatcaaatgtttatttataagccactcatgtatctaaaatttacctgattgttgcctg

SEQ ID NO: 898 - DNA, 600 bp, Bovine  MMBT05999
ctgtgttgtccctacaagtttactcttgaacagatctcttattctattgacctgatcttatgctatatcaaatccaaaagtcatatattttaccctaattcacttagtaataatacagttttgtatcagacggcatgaaattttcttcctttctggtccttcacctgaatgtgggtctaatgtacttcgtgtactttgggttttgtgtttttttttttttttgtaatgtgtacctcatttggcacacgtagagataattcattcatttctccatttggggactttaaaaatcaggattakgctttgtctccttgttccattgtttcctggaatgcttaagcacctctagaaaactgggtcgcttgttagattgagttgaagagccttagggatccatttttcaaggaagtctattgggtctgcctcctctacccctttaggcagtccagtaattctgacatgctagttcaaaacagtatcttaaaactattatacctcttctggtacggtatatctttcattttgaacagttgctttatcgttagattaagcttaagtgtctgggagcattatttgatgttctttattttttgctttaga

SEQ ID NO: 899 - DNA, 598 bp, Bovine  MMBT10699
  misc_feature (1)..(116): n is a, c, g, or t
nnnnnnnnnnnnnnnnnnnnnnnnnnnnnnnnnnnnnnnnnnnnnnnnnnnnnnnnnnnnnnnnnnnnnnnnnnnnnnnnnnnnnnnnnnnnnnnnnnnnnnnnnnnnnnnnnnnnatgtcagatactagcttttctttgctggtcatttgtcatgttctttttatggactggtgctcagatgaaacagacaagcccagttccagcagagggtcagagacatgactgctttggaaataagatcctaaaagaaatagacaagggagctggaatgtgatacaaaagggggaaaaaaactaakaggggtgatgtaacatttatgttgaagaggatgaccagctgttctctagctctattgaggaaagaacagcagcaacaacagagttaaaatcgtagcctggagaacttagtatgatatctggggaagaattcaagaacaaccaccctggataaatacctaaatactgggggcagtgcattcatcttcctctggaagtatttataggagaacagatgccccttcaagtctggtcctatctgacagcaaacaagagtgtaaagtggcttcataaccttcctttcctctgacccgctggctt

SEQ ID NO: 900 - DNA, 600 bp, Bovine  MMBT09631
atggtgtcattagatctgttaactttcatgtgttttagtgtttatttttctgttgagtctctgcatacattgagatcagatacttactgatattttctgttagtttgtaccttctcttttcttaaacatttaatgatctttggatttattttcatttttttgtgagtaagaagtctaattttgtgcctgctcaggcccacacaaaataatcaacttattgtctccactcaatttattgaataactcattctttccagtgtttttagaaatgaaatatgtggataattaaaaaataagackgtttgaacttgtgttgaaggtttgaaaaggcctctgtggagtaccaggagcacctgtgtgccatgacaggtgtcgattgctgcatctctagcttcgacaaatccgttctcacrttggctaatactgggcgtaatagtgccagccccaagcattctttgaatggtgagcattccaagtttaaacaaacagttgtagtcaaataatttgtactcatgatcttactatacatttttagatatctctgctctttgaaatatttataactgctttggatctctcttgctgtctctttattttatg

SEQ ID NO: 901 - DNA, 600 bp, Bovine  MMBT06735
agttaattcatttctttccataacaattgaatgtcgaaaatccttgaacactgtttcaggaggtaggggccttagacytatgatatataaaacctctgctcttgagaatatgagtcttatatccaaaagcagcaaataagcaggtataaacaaataaaataagcccaaagaatttgcaatgaaaactccaaacttgcaatgcatttataaagctaaaagcttgttataggaaacaaaaaaaggtggaaatttattgaaattgtgatatattcagaaattcttgggagtttggcaagactktccaagctagatcttgccttattttatcaattcatattatggcaagttgatgtaaaaagcataacatgctttgtaaaactttgttcctgaagtctcagtcagcttctctctctccacacgtgccctaagaggatgacatgtaaaatgccactttaagaagtatggaaaaacaggcaagaagagatggagaaaacttgataggttcagagtcagaaggagaaacgggaagtgtgccttgaccttgcaggtcccactgcaagagatttgttggctagcttaaacgcagcttgtgagcttggr

SEQ ID NO: 902 - DNA, 600 bp, Bovine  MMBT05740
taactggcagggcttggacacatatgggaagacaggaacgaccaaggatgtttgacttaacatgtaaaaatcgagaagctattctggctgctaaaaaagaaatttaaaatgatttatcactgacaagagctgatgttaaagtgatttaatatataatctcaagctatgaagcatcattgccaggctgttccaccaccctttactttttggccttaaaaataaagaggcttatactttaggacttgagtacatacctgattctgttgagttcagaggatgacccccaaattttatttcagkttggcggagtttagtcatgtttagcagctgtgtgacttgtggaacatctgtcgttagttggcagcttcgtggaataatgtctataggttcatctattggaaagggagcatcttgtccagctggaaataaagacaaacattcattccccgaatgtaagcaatttctgccaaatggacataccttataaatgaaaacagttaaagtaaagcattttagagtacgactttggatgggttactcagtgttatacagtcttggttacctcatctgagcataaataattttaaggtttactttctg

SEQ ID NO: 903 - DNA, 600 bp, Bovine  MMBT05669
tgggcacttaggctacttccatatcttaactattgtaataatgctgcagtgaacatgaggtgcatgtatcttttaaaattaatgtttttattttctttggataaatatccataagtggaattgctagatcatatggtagaaataactccgtgaatgtgtggtcaatcaatctatgatgaaggaggcaagcrtatacaatgggaaaaggacagtctcttcaataaatggttctgggaaaacaggatgtccacatatgaaagaattaaagtagaccactatcttctactatacacaaaaatkaactcaagacggatgaaagatttgaatgtgaagaccaaaactgtaaaactcctagaagaaaacgtaggtagtaagctactcttgacattagtcttggaagtaatcatttggacctgacttcaaaagcaaaggcgacaaaagcaaaagtgagcgagtgagactacatccaactaaaaggcgtctacatagcaatggaaaccatcagcaaaatgaccaggcaaccaaaggactgaagaaaagtgtttgcgaaccatattcctgagaaagggctaatatctgaaatatattttaaaaactcat

SEQ ID NO: 904 - DNA, 600 bp, Bovine  MMBT07569
caaatactacttccgtgtctcatgtttatcatcctgtattctgctatgcccaactattattcctggcatccctttccacaattgtcttcctcgcctcctgcattcatccactccctgctcatgattcttatgtcctgcactcaattctattattggtctcatgtatgccctacattcaattttcctctcatcttccattccaattttttcttgcactctatcaaaatcttaattgttttcgtgctccctctttaaagtgacaccccgaaatcatatcatatcatgaaatcctatactcckcctgcatctcaagcccttctttcaatgattactttcactcatcccctcatcgacttaccaagtagatgtttgttgagccccctattgaacgccagacgctgatctagtcaacagccaactcctcactgcactaattgttctcttgcagcagcacaccctctctgctttcatgcaacccgtgcatcccctcctcagcctcccaacaatcttcccagctcctctccaacaccttcaacaattatgcttgagcacagcttcccctcctgccaaacccagagttcgccacctgccctgctctca

SEQ ID NO: 905 - DNA, 600 bp, Bovine  MMBT08264
gaaatatatataagcctggagatagtcctcattcatggtctcaaaattggtatcattcaaagatgacaaagaaaaagattagctccatcacaattcttctcttttggattcatatatttttcaatcacaaaacattgatttcggtgcaatacccatactgttcagtaaaatttagggtcagaataacagcaggggcaacaaaattcctaatatgttattatccctcagtgccttcckaaatcttagtgcctatcatccacattaaagatattaactgaaaaatcaccttctaaaatagakcatgtcttagctgcagacaaggccatatctatctttaaaaatagaaagtgtccccaggaaaagctgcagtctcattaactctgcaaccattaagtcaggttggatgctataaacaacatttcagagcctctgtgggtggaagcactgaaggctactcaatctcacctgtttaaatgcctgtaaaacttccgctctctggctgaagtgcttgaacagcagctgcagggctcctgatagcagaggcgggtagtcatgcatgatcagatgaataagaacccgtaaaaacgtcctgcctccttc

SEQ ID NO: 906 - DNA, 600 bp, Bovine  MMBT06164
gtttgagtgtgatatgtcaaactcagtatttatttctgaaggtaactattgctttaagcattttattgacaattttagtaactgctgcctatgcagagtttctgcaaattgaaatgaataagaactggtctaataactagaaagactaaaaaaaaagggtcaaatttgatatttaagacacgcaaaaccataactttgtgcatactcaattatttttgaatttttaacttctcaaggtaagacataattggaagttttggcttaacctataatcaatatacacttattagtatagtatgkggacttccatttgyactcttgcacagggttgccaatagggtcagccctttccaacacatttgtgttaaagatactttaaaatttcttaytgttttttgtctgcatagactcacaggattaatttttacagttaaagcaaaatcaaaaccagtttgcctttactgaccaccatttcattttatcacttgaggttcaatcatagatgcagaatcactatgaatattatggaataagaaattttttgtacaaaaccaatctcacactattgtcagaggagctaggaagtaaagatctgaaaag

SEQ ID NO: 907 - DNA, 600 bp, Bovine  MMBT08141
tttaaaagtgaccttcttagaagagtctcatgttctacatacttttatgtcttgtgtttgtatgccaacacagtgtctggcacagagcagacatcagtaacactttaattaattccattgatgaaaattatccagcatctctcatatgtcattattcatttagagattccaccatcacataaatcatggccagtctaataatactcccattgttttatagataagtgacttttctaaacttcatatagatggttaatgatggtgctgggtctgaaaccaaggattccttcagctccagakccatataactgaggtctaagctatttatttatttaccaattcaaataaggtatgtatttgtttccctgattggatgtactcaaggagcatgcctgaatacgcatttgtctaaagaaggaaagggaaaaaaaagagaaactcttgaagctggcttatacatttgaagtgcagattgaaactaatttatagggaaaagggtgtctccaaataatttacaacactgtctgttcccagtgagtgtaaacaatccagagtggtaatgaattcttggtggttacgaagtcagcctccagtagagaa

SEQ ID NO: 908 - DNA, 600 bp, Bovine  MMBT06374
tgtgagtctgtaatttagaagacaggctgaagttaaattgtcagtgaagacggtaaaaaaggagaacatggccaaagagggccacatggtgggcagggagggtttgagaacaggttgtgctgaggtgtgtcagaaaggtatggaagttgaaaattagggaggctctacattacgaaataagggaatgatgaaagcacagccagaaaattatcacaaaactcaggcttgtaagtgtggaattatagtagtagaagggtgcctgttcctgacgtaatttgtgatagggctctgttagagackttgggctttgcatgaatcttacagcaatctttatttcataaaagtttataagtagagacaaaaatttgaacacagagttatttagagtctttgtataaaaagtttcttagaatccttgctgtttgttgtcattcagtcactaaatcatgtccgattctttgtgactgcacggactgcaatgcatcaggctcccatccttcactgtctcccagagtttgcacaaactcatgtccattgagtcggtgttaccattcaaccatcctctcatcctctgatgcctcctcctcctcctgccctcag

SEQ ID NO: 909 - DNA, 600 bp, Bovine  MMBT09512
gattcctgcaaaggaagcagggagctcttcggtcccccaggagccatggaggaagtcgtcacagaggaagagagataaagagcggcagaattgtgaggactgaagatgtgcagggcagacatgcaygggtgtattaygtacagtatagatttggcaataggtatggtgttttcccctgtacttgtggtacagtagaaaaattaggaaggtgccaaagatttcttgaaatttgaattataatgtggaatatcacattcatagttttgagatttcatattgtatctgtcagactgcattgaktgcagcttgtttaaaaaaaaagaaaaaatagcatcagaaaaaaatctttttacatgttaggaggattggaatagtgtgaattggactacctcaaacatagttttttaataatattcaacacacagtgaaactcatacttgcagaagtaacttattctctttttctctgttatttgccagtcacacaccatctgtgcaagtcatatattattttattcagtataaaatttatagttttaatgtctaatactattgatgtttgttttactggtatgtattttgatttatggggccattttaa

SEQ ID NO: 910 - DNA, 600 bp, Bovine  MMBT08761
aaatattaaccttaaattttcattttttaaaaactatgcagtatctaagaatctatacattctaataaatgtttttcagggcatccttgattttatttttcactacattctttttctgagtgtttcaatctccagaagacagcaaggaagaatcattgtcatctgttctaataaatgtattttcttgttcttatatttctccctctagcctttagatttgagctctttctgtttctctygcatttcttagcgattcattccacacacctcactctgctagttattagcgtttcctccctkacaattctttatgtcttctcttgaaagggacaccctgctgctctcattacttgttctttagatttccttyagatgtccccttttgtcagctacccagttcccagtttgcagggaacctgtggatggcaatatttctgtcttcttttttaatttttactcaaaatactcagaatgcyrtttgagtaacaatggtgataggtatattgcatttataaattacccttcattaggtggattcaattaatttatgtgcataaattcattaatagtctcaattttctgtgagatgtgggtcagtgt

SEQ ID NO: 911 - DNA, 600 bp, Bovine  MMBT06081
taatttggtaaattcagataaatttttaggattttttcttttcatttcacttgttttrataaaatgtkaaaaagaaatcacattatccacattcatatcatttcttccagtagtggtctcttctcatgtctgtcttattgggtaaattagacctctaaagaaaataaatgccatcggatgcagtccatyaggagactcgcctyctgccgttaagtcagaacagacacsggggaaggtaacacttcactacttgtacaaagtctcaaaactaacttatatacttttaatatttcccgctaktgtttccactttgctggagttaacaataaattttagcatggctgatgtgatgtgaaatggcaaaatatttttaaaacgaaatgtacttcacaggggaaatgagaaccaaagccctgcttgtgaccagccctgccctgtgtggcagagagctgctgccgctccctgaggtcgggctgtgcgacactgagcatgctttacaacttgtgcgttgacatagctcacagccgaattcaggaactgcccggcagacattaattctgaaaatgtctaaactactcctgataaaactcccagcctggg

SEQ ID NO: 912 - DNA, 598 bp, Bovine  MMBT10750
  misc_feature (1)..(75): n is a, c, g, or t
nnnnnnnnnnnnnnnnnnnnnnnnnnnnnnnnnnnnnnnnnnnnnnnnnnnnnnnnnnnnnnnnnnnnnnnnnnnctgtattaacactcttagcacctaccaaaacatacacacggtatggcctccggcctgttggaacataggcataatatcctccactttttaatgtatgtcttgtcactaggtggtcagtgaatatttttcttcccctcatacacacagggtattttgtttttaagcattggagagcaacaatagaagcagtgtgtctgaatgcaggaacagtctgggaattcaggkgctgtgaattttatgatgtctttgctatttccctaaagcacgattctagaccatttaatttctttattccagtgtttcttcatctggataacagaaatgatgagaaggccagaattgaaagtattataactatcttaaccctatcagtctaytagccatagtacatgaatcctcataatcctcataatcattctcataattttctttgaggaatggtctgtataaaatattttttgctccttctcactaagaaaaccagttcatgccctaggctcaggaggcttcagcctgcctatag

SEQ ID NO: 913 - DNA, 600 bp, Bovine  MMBT06230
tatatttaaaacataaattaaatttcttgcatctggatacattatgagaaactggatggaatcctaatgtaacttctctgggaacaaatgaattccccaaccaactaaatcagccaaatgatttttttccccaaagatttatctttgctaataaggcagaacaagcattttccaagtgtagtatattatttttttgctacacatttttccctcctacttcttactcctgcatacacagcatatacataagcattgaagttctcataggaaaagctttatctaataatggcctactggaakattcacaaaggcaaacctcagcatccacctcaccacccatcctaaaatctaggatactcaaatctctgacagataacattaactagttgacaaagatgcacaaaagaaggagtagctaaaccacaggaaacaagtttaagtccaggattcccctaactagctaacatgcaayaatatcttctacatatctctggaaatgtaatgaaaaratactttttcaaaacactcagtagggtttgtttatttgtgtgtgtgtgtttgtgtgtgtgtgtgtgtgtgtgtgtgtgtgtgtgtgcatcc

SEQ ID NO: 914 - DNA, 600 bp, Bovine  MMBT10500
aagataacaaggaaagaaaaccatacctgtagaaatgccttaaaggggagcagtgagtcctagagacatcacttcaagccttcgacagcctttgaggtaaacacactaggcctcctcaagaaacacactaaattcaaactcatttaattacatgtgtcagtcagggcctcacaatcaaacaatcaaccagactcctgcgcaataacaacactgaagccatacctagacataaatacaataatcaggtgtgccaaaaatatgtgaaacattgttacttgaattgactgatgagcccacctkgagcaagatctacttggcgtttgaaatgaacaactattaatatagttgcttatctgtgatggaggtataatcatgatagaaatgagacaaagtctaaccayagcccaaggaagtaccaagttttctgccacattcatcacttcagagagtcaggtactgagccagtgccagagacaaaatagtgtctaaaatatccctcctgcccgccagaggccctgcagtccacttggagattggtaaacaccagactgcgacctccactcaccctgggacagaaacgtcacatgccttatctctaat

SEQ ID NO: 915 - DNA, 598 bp, Bovine  MMBT01917
  misc_feature (1)..(53): n is a, c, g, or t
nnnnnnnnnnnnnnnnnnnnnnnnnnnnnnnnnnnnnnnnnnnnnnnnnnnnntgcgggaagaagcgcgcacagtgaagagctttatcttctatttaaaaactccatggacaaatccatcaagctctttgacaggtaaattaagcagggttccagtttccaaggagcccaactcatattccccttcaggagcttaactggctttaaaacctgcctcagaatttatgcgtctcggtcttcctcatggtcagagccaactcactgggagccacccacagctactgctgtttctcctggatgwggctattcctgtaacaggcagacttttcttcttgaacaacccacccagagggtaagtcattcctttrctgagcttggggaaagctgtggcagttacaaggcacattttggtcactgatggaccgtgacattaaagtcagtaaattccrtttggagacagagattcccagaccttactttcactaggattgargaaatcatagccccwgtccaaaaagaaaaaagaaaaaaagaaactacacaggtctctttcctgaagagtgatattctgaagggagtgggaaggaactaaatcaact

SEQ ID NO: 916 - DNA, 600 bp, Bovine  MMBT01902
ttgtccttctccacggaatcttcttgacccagggattgaacccacgtctcctgcattgcaggtggattcttcaccactgagccacaaaggaaacccaatttatggtggtagaggtcagaatattgattacctttgaccagagcaaatgaataactgggactgttatagcctatacataacaatctgggtgatggttacacttgtgttagctttgtaaaaattcattgatctacacaaaatgatttgtgcccctttctgtatgtatttatgtcacacttcagtaaaaacagctcacttttwaaaaagtggcatgggaggataaakgtattaagagaaataaatgtgatcgaaatccagggaacaaaagcccaagagaataatagaactgtaaaatgtaatgaaatatgaagagaataaaatatatttattttgatataaaagactcaagtaattttaccaaaatattctataattattaaactcctattattaatgggaaacaagtgacatcttgctgcattatttattttcataaatagcttttgatgggtaaataggttctgtatwtttattctgaaaaggattgtgcagaccaatatt

SEQ ID NO: 917 - DNA, 600 bp, Bovine  MMBT02074
atttgcattgatagttggacttggtaacttgccagttaccaaccagctttgtacatttcaggcttgaaaactcccaagtactgttttcctttgagaggctgaaatgtacaaaactggttttctgaaaatcttccagcaaaagaatttttagaaataactccaaaaatttctttccctgtaggagggtgatacgatagtgtggaacgatgatccatcgtgtctcatgttagaatgtatactattgtaattggtttaaaaagaatgtgtattattgtaattggttttaaatgagagaaacawaataagaagctaccctcccttttcagtttttttttccttttactcttacaaatctttgttactgttgaagttcttttctctaatgtagtcatcattttcacaacactatgtctagtgcctactaaaaggagtagaaaggtaagaaagttcatgttttttttgttttccgaaataatcccaagcttaagagaaacaccatgtatgttgctttgaacagtatctttccaacacattttcctttcactttctctcaatttggaaaaaagaaaaaacagaatttcaactcaaaaatatttccat

SEQ ID NO: 918 - DNA, 600 bp, Bovine  MMBT02221
tcatatatcatcatcagaaacttcaaaagacttggctgagcatggaattgacacgttataacttgagttatgcaggcttcagtgtctaaactctgtcaacctggagaaggccctgcttttcagatcagtatctaaaaatagcgaaaatctagtcagatgttgctactgtctgcatgtgactttgggatcatttttcctactctctcacctccttaaaatcatgtgctatgcttttatttgcctaaagaataattcatatatccaccatagaaaatggaggaaatatagcattgacacagwaaccagagtaaaaagatactggggatccaggttgtcccctccccagataacccaccatgaatatctttggtatgtttccttctcgctttttttcggtgtacatgaatacaggtttttgtttttttccttgccacaaaaatcaaaatactgtgtgtgctgcttttgactggctcttttcatttcagaacatgttttaaggtaaaacattaatggttttttttataccatgaaataatctacaacagtggtttcacactggttctagctttcatgctggtcccaacaaaaccccccaagggt

SEQ ID NO: 919 - DNA, 600 bp, Bovine  MMBT02463
agcagtgaaatgatactttaaaattttaatatagaatctatttgaagtcacttcagagtatagttatcagaaagagagaaattattacttttcactcatttgtacttctctttggaaaatcttcttgcatgttgggattctccttggaccactgatacttcttgatggattcttctacatttccttcttaaatttcttaattttttttcacagaaaacaactattcatactcctgatattcaggttagataaactcacctcatcagaatatgttataacatgctataaacaatgtgattwtttatgtggaaaatatttggagctttaaagctttgtcaaatgtctcaaagaaattcataagaagtttgtcatagaatttcaataagattwcatccataaactttataaagtaaggcttgtagggggatgtatattttttcagacacagagaaatgttaatgccccaaagtgtgctatcccttttagcactggaattggcaatctgatgagctgattttgtaggtttgccagtgctcagagcatttttggaactccattcatgggagtgactttagagctagtttatgaaccacacaagga

SEQ ID NO: 920 - DNA, 600 bp, Bovine  MMBT02274
ataaaagttgttaagaaagagaaaatgaatgtctctgtctattcattctgagagtgaaaagatcgaatatatcttgatgttcaacatccactgtttgggaagcatatacttttttttgccaaagctgcaactcaagattattgaacatgacatcaacactggtggtattctttgctgaaagaagtgaaccatcatgggccttcaaggggtcagtggcagatgtaatggggccatttgattggagaactttcagtctcgttgctattcctgtgcagggacttctccctttatattcagtcwagtaagtaaagtggaaaaattcagagaaataaaagccaactggagggactgcttacccccaggaaaatttaataaattgttcactagcctactgaactcatgcacacagagctctttagtagagatgtgttttcaacttcctgtaacacctgtctaacatggtttaaagaatgtcaggagtaaagatcttttaatggcaaagacaggaaggataaccaaggtacacatttgtattaccagctcatttcgatccaggccaagctgtaaaccagggtgctgagaaggaagttgatcatgaca

SEQ ID NO: 921 - DNA, 600 bp, Bovine  MMBT01504
aaggcagacggtggcctttgatgattgatccccaagatcaggtgtgtaaccagtgcttcagatgaagagcagcctaytaactctgcttaatatcattctattacaaattccaaaagtagacttcagtgtacttgtaaggtcttgaacgtaaacctacaaggccatcaagatgtcttatagttcacatccctcattttatggagaaagtaaaaagggaagagtccaagtgctctgcacacttgattttggttggttttattcagagrgttgaccatttgttttctgttttctatgggagcwgaaattcattcctgtatagtccttgtccctaagagttctgaggagtcagaatgaagtcagggtatgatgaatttggcgctagtggtaaagtatmttcctgcaatgcaggagacccgtgttcaatccctgggtcagaaagggagtggttacccactccagtattcttgcctggagaattccatggacagaggagcctggtgggctacagtccttggggttgcaaggagtcggacacaactgagcaactaacactttgatgtgatgaatttgggccagctttcctggaatttactaaattcc

SEQ ID NO: 922 - DNA, 600 bp, Bovine  MMBT01418
ggaaaaaaaggtcagtattttagtgacaaaagccgctgctgtgctgcaaaaaattcatgacttgagttgaatgataaaaggacctaattctttcttacttcaagcaagcaaatgaaaaaaaaaagtaaagtcactgaaaggtttgaaactaggatacgttaaaagtacagactagaagtttgaaatgtttccctctcttcttaacctagcccaaaaagacagggtgaagattacaaagcatcttttcctttttgaaaactgaagtacagttaagaagtgtttgggcttttcaattaaaawttttcaaacttagaaactaaatgaaaaaggacttaggatatgactgcatctgcaaagcaaaatgtccagtggtttcttggatgttggttcttctatttttcattgggaaaaaaaaaatccctgttttcatttgatcttttaagtcaagggggtgactgcaaaaagctgggtgtgaggattccttaagatatcagcagagttttcttctgtacacaattatacataacagggctcatgttttatgctgttgttttaatgttggaaattgtatttcacagtgactttcatctggccttttgg

SEQ ID NO: 923 - DNA, 600 bp, Bovine  MMBT01143
atttccagaaaacagattttggcaaaggttaccactaaacctgcaaagaatacagttccgttttgggggatttttttttttaaagaacatattcattccttttagccacaggctttcatggactatgtttatttttccttttcaggttatagtacatggatttttttcatcgtctgatgtgagaaacacacatttctttcctttcttcgttccttcctcacacagttctttcaactcgtgggtggttagccaaagtgtaagattgtattttagagaatctattttctttattatcattawattatttctgagaaagaatgagttaatcagtccactttctgagggctttgagaagaagcaaacacgcgtccagcaagcaaggtatggttacggatttyaagtacaatccccggacgagtggcctaagtggcccagaatcctgcacccagaggggacagcaggccctgggtctgctttggatggtttcataaaccaaaaacaaccactgcaagtgcactggtttgagaggaatgtctaagaaaattgccttccttctcctcacaacgtgtcattacagaaaaataggaacccgtacattcc

SEQ ID NO: 924 - DNA, 600 bp, Bovine  MMBT06602
gcattgctggctagagatttcccaggtagaagagcatagattgtatttcccatcctgtattttaggatgtaccttcttccatttgtcaagagatgctatttccaggttcctggaggaatctgtctgtccagcttatgtggtgaactgctaccagggttccctaaagggagggaatttgactcatttctgtctataactttgtatcagctagatcagttaatttttgtctttaaattaaaagttaacaagtatagcaggagactaagagaagcatttttacctaagtcagtcccttccccwcgatgttcacatccaactgcagcaaaaaacatgtagtcagaaaatccttagtggcttgagggaaatctgtttctttcaggcagggtagtttccttgtcaggttgtgaacttttcttgactgaacctactttagagataagcttcacttaaattgtttggctcactggtcctggtttgaaaaaggaaatctaccctgaatttcactctctttctctttattctgcagcctcttgtatacttttgtcttaaaaaccccttgtttggggcttatttatttatgagtaatcaggtgacaacata

SEQ ID NO: 925 - DNA, 600 bp, Bovine  MMBT06833
ttagccccaccatattattcccttcttgaatgtagaagacattcttattgttccaagcagcacttaaaatacattgttaartgatgtcaayggccattatttttctcatcctttcagtgsttgttcctttattttaccagtcagtgatgccatttctgatttttaaaataagactttttatatwtttttwaaaaatgtttcatcaagaaaacccctggtactaaaaattaaatgtctcyaggaatgttttgtgtcattagaatatgaactaatgattatcagattgggtctctacctagwaactgctcaggagacccagattttaattgactgcagcaagtaaaacagggctgtgtttgctatgctaggcaactgtcaagtctcaaagaagtctctgagcatttttcataaccaattaatatatgacaccttaaataacatggacttgctattctttattaaaagaaactaggacagggttgctaaatgaaaaaaaaaatgttagaaatatctgcagtcagacaattgtattttctgtgcagaattcctgcaattatttcgaaaggaaacagagatgaccctaagattttctacaaactt

SEQ ID NO: 926 - DNA, 600 bp, Bovine  MMBT08625
agaatactggagtgggttgccatgccctcttcctattggattaaggcctatctaatgattaattttaatgtaatgacctcttaaaagaccttatctctgaatacagtcatatgctgatttatgctagggcttagggcctcaacacacgggaggagacaccatttcagtccatatcagaattattttgttataacttgataaccaggggtagcaatataagaagcataggaatgtgttccaaagtattagaaaagtactggtgtgctttaagaaaaggaaaatgggcctaacacaaatttwaaaaaatttttgagtcttcaagtaggaaatgctgttgatctgaagagggatggtatttgaggaaattctctgggatgaaggccagattacttcctaccccagctcattcgttcagtatattaatagctgcattgagctcatgttaggtagtacctggattatatatgttactctcctagttaaataaagattcttgccttcgggatgctcacaggcacatttgcatgtatttgtgggtgtcagtgcagtggggagagtgggtggaggataaggcaagaagacatacagaacagactttaa

SEQ ID NO: 927 - DNA, 600 bp, Bovine  MMBT13626
gatcctgggaaaaattaaagaggaaatcaaaaaattcctagagttgaatgaaaatgaaaataagctgattcaaaccctttgggatgcagtaaaagtagtttttttacatgctttaaaaattgcagtagagttgatttacagtgtttcagatgtatagcaaagtgattcagttttgtaactgcaaaagcagttataagggggcagtttatagcatcccygctggtcttgttgactgtgtctccaacctccataaatttcaattgataagaaagctcctggttccctttcttctgcatctywtctccccatggagggtggaggtgaagtcagacagaaattgttagatcttcttttgtcttgctgacttcttgcctcttgcagtggctttaaaggatgggagagggagagaggagctgaaatgtattctgtttgtgttttgtgcatgagaagccaagtccccatgtggtaaatgaaagagatcagcattgtctagctagagagaagcagagccacattctgtggtctctccatgcaggggtcctttcagaggtgcagcctgtggcttggcagattctccccagcctgaaatggcaacttggc

SEQ ID NO: 928 - DNA, 600 bp, Bovine  MMBT11764
gggtgacaggtatggagcctcctggggctgaagggttggccaaagtcctggcttgcttccctctatggcccagagatctgccccatagccctagtttaagggctccagggcaccacaaagccccaggttctgccaaggagtttgatcagcaaagggtcttcaaagaataccaaattgggtcaagattcctaggttcaaattccaggtctcaggagtttggggagagtgaggggggttgataatagccacaaagatccttggatagttgggtgaggggattcctcatgctgagtaacaagwgccatgagcaggcagatcggtcagaattagctgggagtgggccaggtctttgaggctcttccgctcaggaaaaccctgttctccatcctcagccaaagggggaaggaaaacaggaaacacatgttctgtaggggaggctgagcacccagccccgagacgcccacaggcaggactgcctcctggatgagagtttcccagccccacctgaggacccagtcctgaccagccttcagggagaaacacacccttcaagcgtatacaaagagcctagagccactaggccaacatctgtgttctcac

SEQ ID NO: 929 - DNA, 600 bp, Bovine  MMBT12640
gcatatagattctacctcctaagtaccctttgttcttccctcacacactgcctatcttttagttcaagtctcacctggtccttgccctgttcagaccccttcaaatctcatggatgatcttcctgtttacaagataatgggcaaactccgtgatctgacagtcagacccctctgtaacctggccccatctccagttgctcctgccactcacccagggctacacactgagcagttcagtttctccactcgccatattccttcctgctctagccctcacagagtctgctgctgctgcctaawatggctttccttatttcatctgcctggaagcaccccttgatcctccaaggccaaactccaatgtcatggccagcactgtcacccctacgtccacatacacaacagactgaaatacgtactccctcctttgtgttcctggagtatctggtattgccctccttgaagcatttaagagttctgaaatcacctgtgtccctgcctgtcttcttcacaggtaatcagattcagagctgtgtacttagcacaagtcatacagcagagggcttggctaattgagttaacagggaagggatcaagcat

SEQ ID NO: 930 - DNA, 600 bp, Bovine  MMBT12876
cgaaggggagacctcgccgtttcagaacagctgaggccccgatggcttcccgaggtggcggtgacggggggccacgcgttccgtggctttgccaacccacgtggggatcccgcggctctgtggacccaaggtcccagcacagcaaggctgggatctcaccccaggctcagcgtccatttcgctcaagtcgatgtgaattcagagcccgtggctgtgggagcaacgactgcttcctcactggctgatggctgggccatcctcaccttcgaccaactgcagcccctcatctttaaacagaawcctcatgctcagaatattcctgactgcctacctgcctcatccacttctaaggggccatgtgatcacattggtcacactgagttaactcacgtggcccaggatcctctctgcagcttacagcctgcaccctgaatggagcgccccctttgctgggtgacagagcatattcgcagtgtcatgctccaatatgccgtccacctcctcccaccatgccctggggtggaagctcggccatggtgagcagatgggcagcaggaccctggacagcatctcagccccacggcttggcacagatgtgca

SEQ ID NO: 931 - DNA, 600 bp, Bovine  MMBT02624
atgattaaaaacagcaggctagcaaagaagatggtatctcttggattagactggccgagaagatctggctctaaatctgttatgcttcccatgaagcatgagctctggctacctgacagagggcataaatcatgagtcttagttccagtctctggaaggcttcatcagcattctattgccccagccaggaggacagcaccaaagtagtttccacttagctaaaactgggactccaagtaaaagacaatagaacattcttctaaagctctcaaagagccaaaccatgatctataatatatkaagtcaaactgcttaccttgattcgaggcatagtaactgtaggtggctttgcttcagccacaaaactgagagatgatcctttttccacaagataagttgtgtagggcataaatttcacaccctttgatccaaacacaaaatcatctctcaaggcatctatcagcagaataacaactttactgaagagcggtggtggaagctcggtccagttggaactggctcctaaagtgtttgaaaatgaaaaaggaaattgaattttaaactcttttttagtatccaggaactttataatctggtttc

SEQ ID NO: 932 - DNA, 600 bp, Bovine  MMBT01735
atatacatcttatgttatacaactgagaaattcagaaagcaatatacccaaaaaggaggaaatgacttaaaaacaaattcgatgatagacaatatgcacgtaggtgggttccagggcttcaagtgataaatccagaatttctcctggtcagtgttctcgtctgagggtgtcttggtcccccaggagatatttgacagtractgaagacattgctgattttcacaacttgaagagggaggaggtgcttccggcatctagagtctaccctctagagtctacagtacccaggacagcttccgmacacaaaaacaattatcccactgccaatagtgctgggaaaccctgggtgaggggatgctgtgtcgctgtctgttactagtcaatgtctgcttggggacttgakctacatggaatggtgggtcagtttcaggtctttactttttaaaaactgcccacatccagcagccatccagactgatagaaactgatatatttatcactagctattagaatggccaggattttcctatgtcattcagcctgagcaatttcctaatttttagtagttttctgcatggttcagactagagacatatttct

SEQ ID NO: 933 - DNA, 598 bp, Bovine  MMBT02010
  misc_feature (1)..(253): n is a, c, g, or t
nnnnnnnnnnnnnnnnnnnnnnnnnnnnnnnnnnnnnnnnnnnnnnnnnnnnnnnnnnnnnnnnnnnnnnnnnnnnnnnnnnnnnnnnnnnnnnnnnnnnnnnnnnnnnnnnnnnnnnnnnnnnnnnnnnnnnnnnnnnnnnnnnnnnnnnnnnnnnnnnnnnnnnnnnnnnnnnnnnnnnnnnnnnnnnnnnnnnnnnnnnnnnnnnnnnnnnnnnnnnnnnnnnnnnnnnnnnnnnnnnnnnnnnnnnnnnatgcacatgcacccagggaggtgactggcagagatcttgggagcccmatattaaaattaatagaacctcaacatgggtggaacctgggtccttgtatcactgcacagaaaacrgctgagtgggctttgcatactgagagcaaatctcaaatgtatgtaagcactggggtttctgtgttcatgtgttatggccaccagcattctcttaactaacacagagctctgtgatgggagcttgggaagtgttcataacacaacaaggctgaggccaggtcaacagccttgggaggcaacaggaagatggttttgaaagccatagcgccctgcttatgagctatgtgggtca

SEQ ID NO: 934 - DNA, 600 bp, Bovine  MMBT01208
ggcttttgtgtatttaaaaaaaawtatttaaagaattctttccattgtaggtggttatgatgattggcttgccaggagctggaaaaactacctgggttactaaacatgcagcagaaaatcctggtaaatacaacattcttggaacaaacaccataatggataaaatgatggtaagtaaaatgggcttgatttcagctagaaggtattctaggtaatatttttgttttttatccattttgtttagtattttagagagaggagtttgggcagttaaatgtttatgtaagtaggtgctttacmtgtaaggtaaattgctttccttccagtgactagagtccattttctgtagaagttttttaactcaattatccagtagataacgacgagctgattggcattgggtggtgttacaggataaaatgtcctttcttgtagcattgaggaaaggcaatgtttaaattttttttcaatttaaaaaaaggtggcaggttttaagaagcaaatggcagatactggaaaactgaacacgctgttgcagagagctccacagtgtcttggaaagtttattgagattgctgcccgtaagaagcgaaatttcat

SEQ ID NO: 935 - DNA, 517 bp, Bovine  MMBT01560
tgttcttctctgccatgttgcatctgtgacaggcagtggacttagaaaacaagactaccattcaatagttgggcaattaatataagcagtttctacttccatttccttatttaaaaactagaagcccagacctccagatagttcacgatgggattttccgttacctgaatgtctgcactatggaaatgcctgaacagagggtcagcaggctcagggatgctgctcttcttcttgatcatcttcaacaatggcaaaacctttttccagtaatgaacacttctgcctatgtattctcgttgmtcataaaaagaattaagaccactgccctaaaatacaaagttagaagcacacaaagagacacaaacgaacagattaaaaaactcacttgcagatgctctgaacaactggctaaaatttcaaatcctaggcaaaatagaatctcaaaagtcatatgctcacctttccaaattctagaataactaagcactttaccatcagcactcattctagacccaac

SEQ ID NO: 936 - DNA, 424 bp, Bovine  MMBT00811
tgttcttctctgccatgttgcatctgtgacaggcagtggacttagaaaacaagactaccattcaatagttgggcaattaatataagcagtttctacttccatttccttatttaaaaactagaagcccagacctccagatagttcacgatgggattttccgttacctgaatgtctgcactatggaaatgcctgaacagagggtcagcaggctcagggatgctgctcttcttcttgatcatcttcaacaatggcaaaacctttttccagtaatgaacacttctgcctatgtattctcgttgmaagtcccacagcttgaagcagaaaatgggattcaaacttgggtatgtctgactctagagccaaacctgcacttccatccactgtgctatatatactgtagtctcccaaaataagtatgtataaa

SEQ ID NO: 937 - DNA, 598 bp, Bovine  MMBT01830
  misc_feature (1)..(48): n is a, c, g, or t
nnnnnnnnnnnnnnnnnnnnnnnnnnnnnnnnnnnnnnnnnnnnnnnnttttagattttaacttacctaaaaattttcaaaacaaacttggagtgttcttcatatgttccctgcattaagtttcccagtgcctttgataattcaccttatattccatagttaagaattaaataagaatttcttttgaaaaatttattgtgagtttggaaatatctataatattttgttacattctttgatggtgatagaaacatgataaggtacaaatgtggaacataagtgaaaaaaataagttacagmtatactttaaggtatttgtttatacatattgraggtgacattgaacaaaaccatacaatcctgacattagatcatacccttttcaattttcaaagtccacgtattcagtcaaacaatgtgaaatgatactttcctgatgtatttccatgtatgttttatcctagttaaattgctataaataaaaaggctctacatgtaaatgtaacaattgtcagcaagtgagtaatttctatcactaaattcattaaaacatatagaataaatttcatttaagagtgaatttattaaatttacatat

SEQ ID NO: 938 - DNA, 600 bp, Bovine  MMBT02096
tgtcttaagagcagaggggatttttacttatccttgcatatgggagacgagccaaaccagctcccactacatccacttagtagctcccactaccatccacaattcatggtagatttaactcctggatccatgagtttgtgacatgttcaaatactgactgaacactttacacatgggattaactccaggttcacagaggacagcaaaacagctggtatttcaattatcattgcaatgaatgtataaatgatattggggagactagtcaccttaaaagtactgaagtagactctatgaacmcagtatatctttctacctattatgttctcttaagartgtcaytttaaaataaayggtggcgggacttccctcgtgatccagtggttaagaatccgccttccaatgcasgggatgtgggctcgattcctggtgggggaactcggatcccgcatactgcagggcaactaagcccttgcaccacagctattgagcacacacaccgcaactggagagaccacatgccacaaactagagaacccacgtactctggaggccccggcatgactggagagaagtccatgtgccatagctgagacctga

SEQ ID NO: 939 - DNA, 600 bp, Bovine  MMBT01986
ctccttccctttgttgttcctatctggtaaaagatgaagctttttccattcatggaaactcacagaatcacatgtctcataaagatcataactgtctcactgagtgacatggtcagaaaaaaagctcacttcaaaatgtttcctacttgatgccagtgccccttaattctaacaaattgtgttttttcttaaattaatgtatataggtattatagtcccagccaatactattattatcatgtgtttatgtgaaagaaaaygtgcaaactactaatatgtttcccagttcctgacaagttmtacatttaacatattaagggtggatttaagttttcttccaacaaaagcattttagttgtaccaaccccatatctggagacaagcactagtcagataccagcagttatttttgcttcctactcattttttgcccttcataagaactcaacccttgggagctgacaaataaagataaattaccagtctggagcattctaactaactaagccactatagtcacttaaatgaatgttgaaaccctttttttgctatgttagcagaaatttctcattgtcttgtactctgtgactaagaattaca

SEQ ID NO: 940 - DNA, 600 bp, Bovine  MMBT02024
ccttcagcgacgtccacgcaggatctggctcagggccggcctgcagtcggagctcagagtatctcgtttccctaattaaaccagtggttctatgccgtgtgctccctgactcctgactgtctttcaggcctctgtactcgtccagagtacaaaagaccacttgtaaacacttctcttataataaggatcagagctcttctttatgaggtcatagtttctacctggctgactctactacaacattatttaaaaagtaatcatcacattgatacctgccatggtttttcctttaagactttmccaggctgaggactgctagcaagtgggttggataaaagtgcatcatgatgaggatgttggaagtcagatgaagggcagggggcttcccctgtgcagagtttcgaccccccccccacccttggctctcggcggtgtttttctcatacagctttaggatccaggggaaacgagtggaaccagctctttgaacaaggtcacccaacagcatcacgaggtgatgacgtcactgtcagctcttgcccaggaaaaacctagggctcaaataactgaaggagaggacaggtcatctccatggcaggt

SEQ ID NO: 941 - DNA, 598 bp, Bovine  MMBT01753
  misc_feature (1)..(127): n is a, c, g, or t
nnnnnnnnnnnnnnnnnnnnnnnnnnnnnnnnnnnnnnnnnnnnnnnnnnnnnnnnnnnnnnnnnnnnnnnnnnnnnnnnnnnnnnnnnnnnnnnnnnnnnnnnnnnnnnnnnnnnnnnnnnnnnnnaaacatgattttattttttgatgacttttatttttagattctattacaatgtgcaggtctcaagtataactacaatataatttatgacaaactcaaacattttgagcattcatatattatgaaatttataaagaattctatgtaaacagcattattatattcatggctattcmtttatttttatgaagcaactcaattattttcctcaagaatataacataacaaaccacagttattaaaagaaattggtggcctctatacataggtcctaaacccaagccagttacttggccattctaatttagctggcccactttcatcattcccattaacatttctctgaaattgctatttagaactgctttatttacatatgcatttcctcttaacttttgaataaagctatcaaaattctataaaatcatgctgaacatttagagttgaagttttcatcagttagcatttagaaac

SEQ ID NO: 942 - DNA, 600 bp, Bovine  MMBT02506
atatggaaaatatcacaatataaaattattaaacttagcacccaactatccattgaatgttttaacatggtgaaattcaaaatatatttagtgtttttaaagtaaatttaaatctttgtaaataaaaagagttcaaagcagtgcttactaaggtattatttcaagcaagctttacaaaattataatagaatagtcatttggaaattcagcatggaacttacttcctattgaggagtctaattaccagacactttttgctcacattgtcagaaggttatgattagaacacattaaaaaacmagcagattcagatctaagtgaacaacaaggtacataaggtaaggaaaggtctcccatgaaagcacaaggccacagccattaagtatcttctgtgagagtaaaatcatttagaaatcaatgcacaatcttttagagtccatgttcagtaaaatayaaataaaactgcccggaagaatgagagcttctgaattttgcatgaactagaaattacatggagagtcatagggaggaaaaagacttgagtatgtagattcataacaaatattagctgttttaatgctttatagttgttattgagca

SEQ ID NO: 943 - DNA, 600 bp, Bovine  MMBT01404
agtggcttggtctgtagagttaacagtggggctgcactgtggctgcagcgagatcatcacacacaatctgtttaatccaggttagacccatcatgggcgcttctaatagtcaaaccactgggagtaaatgggagagaatggtgtcgggacattggtatgtctcatctgtggtgagcacaggaaatattgtttaagcaccgctgccttgcataccaacagcactagaggcgggttatttccaacacagcctcacaaaattgaggaacagtttaaatactgagatctaatctatataatttmgttaaaaaaaaaaaaaatctggtcttccctctgcacctcaaacttttgttaacttggagataaagtgtttaggttgtatttttccccaccctccccgagaaatgctctataaattaagagaaaaaaaatcaaccacatggaggaacatttaggcacagagagtaatgtgttggttctgagcttgcatgctggaatttcactgaaaaggtaagagaagggcaggaagtgacagaaaggagttcacttctttttgccaaaaaggctgaacctcttttctttgtctttctctttgtccttctc

SEQ ID NO: 944 - DNA, 600 bp, Bovine  MMBT00836
caataaatattcttcccacttctctccttccctttctttcaccttctcttccttaccatttttccttaagacctaaaggtgaattagcacagtatatgtgttcaattcttgactattcagcaacctaataatatgggcagtgactgtaaatgaaaacacctctaggctttctagtcagagaaacaggaagcttcaattaaagaacatacatcagttatggaaatgggaagggtaggggcttgcaagacagaaaagaggtaatgccactcctaacttctggtaccgactttcaaggatgcmgagagggctaatttccagaggaaggatcatcttaaaagtatgaataaggctaatgaggctataaagtttttatacaatgacyggacctgtccactctgtatccatggtctcttcctgggaagttaagattgttctttggcagttctctgattctctgatgtcctaactggtctgtgatagggtttggattgagtcaatcaatttgttagcatctgctatttatatttctctgcaatctatgtccatgccatgttgcttcaggccgtgatttacaatcataagctgtggtttatactyatc

SEQ ID NO: 945 - DNA, 568 bp, Bovine  MMBT02670
ttaataatctattctgtttctgcttcagttgccaataggctaggggggaaaaagagaatataaggaaagatataaacaaaacaaccctgcatttagtgaacatttgccactaaaaaaaaattacaaaaacatttcccttttttaagaggaaaatttttcattatcctttattttgactcagttgcctaatttcattgaataacctctaattacattattcagacctaatgagctaaattatatggaagtttaattccatttcagaggatctcaaggtttgttttctgcatcaacacagcmgtgggttaacaggttataaccctgtttcactccggaaatgcatctttgatggctggacccttccatctgtttccattagaatctcacagagtaggcatttcagctgacagagatgtaccacccaggactggctgcataatgtacaaagtgaaagtgaaagtgttagccactcagtcatgtctgactcttcccgatcccgtggattgtagcacgccaggctcctctgttccgtggaattctctaagtagaatacaacagtgttccatct

SEQ ID NO: 946 - DNA, 598 bp, Bovine  MMBT02798
  misc_feature (1)..(177): n is a, c, g, or t
nnnnnnnnnnnnnnnnnnnnnnnnnnnnnnnnnnnnnnnnnnnnnnnnnnnnnnnnnnnnnnnnnnnnnnnnnnnnnnnnnnnnnnnnnnnnnnnnnnnnnnnnnnnnnnnnnnnnnnnnnnnnnnnnnnnnnnnnnnnnnnnnnnnnnnnnnnnnnnnnnnnnnnnnnnnnnnnnntatctctgtgtttttattaacaaaaaaaacatgggttttacaggaaggaggctgatagcaaattcgaatatttctatgagggatttactaaagccaggctggctatctggctgggaaaggaamatatttgcagaaacatttacattttcygagaaagtatctcatgycatgtttcctgagctgctgatccactacccaggaattctgttagaactgsttttctttggtaaaagaaagatctttcttcacatcgcatctcacccctccctcatctattgaatctcctccatgaaacatcagaagtcagtccacttattcacagactttccatgtggcaggcagcatgctaaccaccaataatgatgtatgaattgcagcactgatgtcttttgggagaatagcaaaaagagccttatgtttc

SEQ ID NO: 947 - DNA, 600 bp, Bovine  MMBT01384
taaggtgcaccataggcaaccatcctgacgtatgttcatatgttttctaatgtctggtgtgcctgtattttaattctgcaagtagtattgtgcatatatgtcattaatttcttaggcatttctcttttttattttttttaatttaaatttatttcttttaattagaggctaattactttacaatattgtactggttttgccatgcatcaacatgaaggcatttctcttaacaccatgattctaagatccacacacactgctccgtgtacctttacacacttgctcctacctgccgacccmttaggtaagtgtgcacatttcaccrttccctcaagaaaatctttgtgaaggtttccttaagtatcagtgttgagaacttctctgggatgtatacaggagtagaaccgcagggttattgggacaattgtccacgttgctaagagcttctggcttcatgggtagaatcacagaagcatcaaacaggaaaaggatcgcctccaaagggagtacattgagatggttattaacaaatcatgggccacatgaacaaacatttaaatacaggatacagacacgtkwatgcttcggaactgctgccct

SEQ ID NO: 948 - DNA, 600 bp, Bovine  MMBT01780
actccggccgctgccgccgcggccgccgctgagttggagaagaggccgccgtagtcgctgctgaaagcggacgacgtaggggacgtggaggccaagcagaaggcgctgttggctgcgcccgagcctcccgccaggccgcccgagccgcggccgccggtggccactgcgaagcccgagaggctggacccgaggttgcagctggacgaggagcgcttccagggatggaagccgcccttggcaaaggcgctcgactccggcagcgtcgtcagcgggctcgtgttgccgatcttgttacaggtmgccgccagcatggccaacggggtcgttccgaagcgcggttcttcctagagtgggtggggtgagggagggagcaaggaggaggagggcaggaacaagtgggaggaagacacaaagtgcacccgtgagcagccccgtcccccagccgctggtcccgaggcggggggcggggggtcgtggccccccgactcgcgcctcctcccggtgagctcgcggaggatgcgccgcgccccgccgcgccccacgcgggacagagggaatcccaagagagagggtcccggagctgtaaagttgttcttcggt

SEQ ID NO: 949 - DNA, 600 bp, Bovine  MMBT05624
tgggacgttaactgatcctattacatggtctgctctgtgagttagaatgatgactcaaagaaagaattaaactatattaaacacagactttaaaaacaattaaaaatgtgacccatattgattcactctccacatcttttggctttagcagtattattgtcatgccgtgacctcttgttaattaacaagattacaaaagatggattgatgaaaatgatgtgctaaacaacttatctgatgacactgcaaataagtaaaaattcttttggaaatctacttaatctataccaagagacactmtctgtttacaccagaattgttttaatatttgatctcatattctcattcccaataatttattacaaataatctacttacagaacaaatatttaccaagctcttactacatgcccctcactgtaatggatggtgaaccaacttagaagaaggaaaaaagcactttccacaaagatatttatttcagtattaactaagatgaaaagcttggaaactaaatcttcaacaactggggaataattttgtaaattttgctgtaacaattcaaagtaatagttcaagacattaaaaatgccgtgtagg

SEQ ID NO: 950 - DNA, 600 bp, Bovine  MMBT06373
tgccataggagctgggcttgggcttctgccttgtgagaaggaagccactggactggrgtcactgtccctccttccctgtccctagcctgggatttcttttctctcctctctctgatagctcggaagcaagcagaacaatgacgtcttcagagaaaaggccatttcctgctggcagtgtgcacrcttcactccaagtcccagagcttctgtaaagaggcaccctcctccctgagcycagatctcctttagtgctataggctcagtaggacaaagacaacacctggatctgtccccgggtcmgctctgacaagattagcctaatctctgctatctgagagaagaggatgtctagggaggaagaatgttctcatttccaggcagaggaagaggttcatggtccccagccttgccaagggtctctgaaatagggtggggtggggcaggatggacagaggtgactttttggcttccctcatccatctctgaatctgctcttcttggaggagttgggatgacagtaaggagacatctgagcaaatggaaagaggtgtctgagacaacattccagtactacttctggtgctttcatcagccaaagaa

SEQ ID NO: 951 - DNA, 600 bp, Bovine  MMBT08709
tgcagtcgttgtgttagtgttagtcattcagtcatgtccgactctttgtgaccccatagcattctccaggcaagaatactggagtgggttgcagttcccttcttcaggggctcttcctcacccagggaatgaatctgtgtctctggcattgcgagcagattttttaccatctgatccttaggcaggtctaaatattgcatcacttytaagatatgtgaggtttcagataatactttgtcaagaaatttctcattgtgcacatggcaatacacttctgtcaaagtaccaaattgagcatcmataagtaaggaatgaagggtcattcataaaaaccacggtacctattaggcctctaatcagaacatttaaactaaggacagatacttcaggacacatttgaggggtattttcctctgaaatctgtaattttactgtgcttcaaaacgtctacaacctagccatgagttgacagggtttttattttctgccaatttggcgatcaggttggtaatgaatgaatccagtacaaacatgacttagtttgcaattcaagtaggtttcgttttttcgttctgtttttaagtggaaaagaaggaaaag

SEQ ID NO: 952 - DNA, 600 bp, Bovine  MMBT08067
agaagtaattrttgagggctgccaccaaaatatgaagtgtgcccttctagaaatttagtaacacattctcttatcctcatttaataacacattctcttatcctcatttaataacacattctcttatcctcattgtattaatttctccatccaagaaagggctaacttgtcaaagccttttttttttttttgaagggaaaaaaagatggcagagaaggaggactttgagctcacttactcccacaaacacatcaaaaatatatctgcatgtggagcaactctagctgtaaagaaattggamactggcaggcagctcttccacaagcaagactgtaagaaagacccacacaaagataggtaagaaaggaggcaaagaaatcagagtttgaactacatattgaacacctcattcctggggtctcacattgagaagacacatcactttagctggtttgaagaygggactgtaagaaactgagattttacttttgaagaatgcacacacatccacttgtttttgggaaaatgggaaggaagcagattgaaaactctctgggattctggctagtttttttttatgaccatcctagagctttaatac

SEQ ID NO: 953 - DNA, 600 bp, Bovine  MMBT08035
ccaaacagctgtcgggcttcaattgattttgtgtcacttggaaaccaagaacttagaagttaaaagaaccatatcacaaggttgacaccttaatctcacttacctctggttccctgactgacatgattaagagattaatgagtacaggttcaatgacattcttatgccttaggaacactatgttcactatcaatcctagtttttcatctgttcatttgctcattttcaattatcaagtgacctatactcataaaaactctacatgctttgaatatcttatctataaggtggacaagaacmtattcttttggtgataaattatgtttggacacctttcaggagaaaaagagtaaaatagtaacttgaattgagtacaatgtattgaatgccaagatcagcacatgttttatcacattttgtcctttattgaattctatgaggtaaggataactattttttcaggtaaagaaacaaagacttggaaagctgaggaatacacacaaggtcacgtggctaataaatgtaggagttaaaacatggagtcagctttgcaagcctgggatgatttcccatcactgtggcctctctccccctctcctc

SEQ ID NO: 954 - DNA, 600 bp, Bovine  MMBT13578
caagaacatcacctaaatcaacagaaaattaaccaggtaggttggatacctcctggaacacctctaaggctttattgaatttccaaaaggaacaggattaaactgcttgccgacttcagggaacacactctttcatgatgctgagcaagaatgtcccagaaattttctcaggacatcaaacacagctccaaatcttatagatagcctcccagggaacctttaataccttcacagaatmaaccacgctatttgtgcctctgaaggatgaagggtgaagcaaccaccccagctgtgacttgmaactggggttctgatgcgtttgggttctggggaagcagggtatttcaaagccagctttgcctttagcctwgtaaaccagcccctctggctgtgttcaracacatgacttgctcactgcacagtgtaatgattatccaactttcaccagagggctatgcaagaacaaaagrctgaatggtaaagaggatttttattattaggttgctgtkcttatgaaacattcatatagcaaaggaattgctttgccgttaaaaaatttttgtgaaggaagctttatgaaaaatgtgcttacctggcctt

SEQ ID NO: 955 - DNA, 600 bp, Bovine  MMBT13296
ttcaagtgccgtggcaggcactggcatacggtacacaagctgtcacatccagggacatgggaacagaaaccccaaggcccaccagagaggaagcttgatggaaactgcctctggggcctgtttccagagccacaacttgacctagcacagcccactgactttctcagacctgagtctccccatctgcaaactataagattgacatctgactcctgcttcgaagaacttaagatttctaatattagggccatctccacatgcagggggatgctctatagggcaggacagagccctttctgmccctaatatctctctgatcacatgcctcagagcttggcattctgaccacttgattcatgtcttggataagggctgtatttttaaaaatgctgctgccagaatatttttaagactgtaaacctgacaaatgattgagtctaccctactttttgaggtaaggagactctgagtaagtgaaacttcagtgaagcaatttgatagaatgctgaggattgagagggtctggtacccagggtgctctgaggagggacaggctctagcaggatgctatggggcgaggacaaagaccttgggcagctg

SEQ ID NO: 956 - DNA, 600 bp, Bovine  MMBT13111
tctgtacccacaagaaaccagatgtgtagctggcatacggaggagtgagcagaaaatgcaatctctcagaatatctgttccagtttctaactctatcagcttatccagttactcacttctattaaatacttgtgcccatcaccacccaggtaactagattacaggcagaaggggacttttggaaagagagaataatgaaaggaaattcaattcagtggggatttgctggccacctagtgtgtgcacatccttgtagggaggtgttggaaaccacggatgcagtgactgatcaactgtccmtaggataacyttcctctactcctagctcacctctgacttccaggaggggctcagggttttcttctgggcctggggcacactgagagcaaggttggggagcaagcaaaaatgacgggcaaatgccaargctgaagtggcgaactcaggagaagtctggacaattgtgctcagatctgaattatggcctgggagctccagcccagctcaaataggtcagattgaaagagcagaacaagggctaagctttcagtgtgtgatatagagatgctgcaagggccaataggctaaagtaggagccga

SEQ ID NO: 957 - DNA, 537 bp, Bovine  MMBT12089
gtaattttcaggccaagaagctgacctcagaaagccaaaactgaaacatactctcctctggataataaacacatgcaaaagaagataaactctctgtttgtaaggaggccatgcagccaactgaagtgagacacttatcagtctcacctgggacatacaaccagagcaaaatacatttaatatgaataaagtagtcccaagaatccaaaactgtcacaaatacctgcctaatctctgtctcaagcagattagctatgcaatagaatcattttagctactggtggcaaaggctggaacaamatgtctcaactagcactgggctagttaagtggcccacacttgttctgaaccgtgtgagggacagccacactagaactgcacagagggtgggatggagaggggacctagggaacggagagactggaccaagagagacagagcgtgagataccgccaacagtgatgcccactcaacccagagacctttcctccaccactttcttgtgccactctcaactcaacgcctttcttccaatat

SEQ ID NO: 958 - DNA, 600 bp, Bovine  MMBT13016
gcaataatattaaagtttatgtactctatttcaaccttcaaaatgagaattcatagggaaaaaaaagtaatttggatttttaacagaggcaactgagttctgctaccttgccaaatactgtattaattattcctctatgtgcttttgtttaaattgatttccattgtaccacatgaactgtctatcactgatttagaatgcaacatccatacaaattttctaaaaccctctttcctacccttctccttcacacagacacacacactcaacacagcacagccccctacaatccaaactacmcagaagtagcattaaatggagttgagggtacagatgccaagaaccccatgtcatgttctgcagagcagaatattttaaccaacacttatttatgataggatctgtacttgttgatttgccaagatgaaacaggctcaacctagaaattggaatctgagtttaatgagaacctgacaatcctttaactaaaacagaaggaaaaaatattgttacaggatcataaaaacaactatatgagtatgcaccccaaagagaagccaaaaaattttggcaatattctccactcacagaacaatttat

SEQ ID NO: 959 - DNA, 600 bp, Bovine  MMBT12924
gcggggtggggggacgaggtttgggtgttgtgggcgcaggagctggtgccygtgtggctgagacaccggggtttggggagggaggctccctcctgtctgctttgattttcctgaagcatggagtgaccatttcccacgtcttcacattttacatcattttagaatttttaatataaactgatggattattgaagatcattccattattcattgggtgagacacgcttaccttttgagagcaagcatcattttctatcaatcctttgaagtgcctggggcttcctggcaccagccacatgmccccacctccaggagccgggagaggagcccttggcctgtggattctgcatgcagtgtggacaggtgccccgtgtcccaggcctggaatccaatcgattcctggggcgatggaggcttacagctgttggggtttcagacagccagctctgtctctcaacagcctcacctacttgcttaaaattccagaatttaatcatcacgctcagcataaaaataagaggggtaggtggcgggaggggaaaatactgatggaaatgtgtgggaccacaggccccagcttgaggtgggaagtgtgtttat

SEQ ID NO: 960 - DNA, 600 bp, Bovine  MMBT12899
aggccgtgtcagtggaaggaaatctaccctcacccccacctcagggctgaactgggcagagcctgccaggaatagggcagagcctgctcggtttaaagaaccgacagaggttgcaggagcagctttgcattcaggaaaatgcattgagctgaggccaggtccaagtctgagtcagctctgtcccttttggaggcatggcctggggtccagccctgggctgggctcagtttccattctgaggggtctgggtggctcctgaggcccctcctgtttggattgtcggtgttgccagctctgtgmgagctgggaatcaagggagaatggccaaggttggcggctaccgaggattccctaacaatggtaggaagaccaaattcccaggggggcccaagggtataaggatggctttctaactaggccaaccaggacctggtacaaggaaggccttcagtcttggccctgaccccggggcaggtctagacaaccactttcattccccttcatcagatgggttcatgaaagtcctttggaaagtcctttagggacggctgtgttgaggctgggaagacagcggggcagggggattgagaacttcagcgg

SEQ ID NO: 961 - DNA, 600 bp, Bovine  MMBT11924
accataggttggaaaaccgtggttgaagtttgtcaaccttacatgtaaagtagattaaatgggttctacatagtatttgcaaggtctttcccatggaatagcagatacatttagtatatgacattcatcctggatactcagaaacgttataagatttagctcatgaagcctaccctgacccccagagccaggaatcatgtctctcgtcctcagaacaccgagagctctttgactgaactraaacacttcctacggcatttatattgtgtggtctgtccattcttttcccttaggaccacmtcgcatctccctactagtttgtacatttcttggcagcatgggctatgtctttttcatggtggtatcacccactgtgtctagcctaacacacagcaggttcccaaaaggtttactttatagatttgtgaaccccacaagtggttacctgagaatgtatctgcccatggtcctttgtaaaaacaggagaagcagtgtgatccaaagagccggtgtggaggagattgttgatgtggaagggccatggtcactcacgtgtctgtcctctttcaggagtggctctgccctggcccaactctatgg

SEQ ID NO: 962 - DNA, 600 bp, Bovine  MMBT12209
tttttgttgttgttcagccgctcagttgcgtctgactctttgagacccccagactgcagcacgccaggcttccctgtccttcactatctcttggagtttaacttaaaaagatgctgaatgaggaccaatcctccaatgtgggaataagagaactagaaactggaagttagtaaaagtcttaaaatattaataggatggtttggctgcattcaggaaggggatgcattcatatgcattcatatgcatatgcattcataacgtatcgtccaaaccggtgggacaggccasgggagcagagcmgagaccactcctggcaaatcaggacttaggctcacctttgtcacatgcaatccatttatctgctattttcggaaaactatctaggctttatttcattaaaacaagatcagttcctagcactgtatctggcatatagtaagtgctcaataaatatctattgaggaaatctaagatttaatttagtttatctgctaaagaagagatccagaggtaaattgagatttatatctcagcataaattagtttaccaagtgctttcaagtgccccatgtttttgagtatcatcttttgttttaaaaa

SEQ ID NO: 963 - DNA, 600 bp, Bovine  MMBT13662
gccctgtgtcttacgcaatcaactgcacaagcatttccaaaactcagcacaaaggcagaggaaatgccgacacacactccacaaggagccaaaggaaagaaacagggcccccagggggccaaccctgaagcctcattatctggagctgtctgagagtcaggaatgaaaggaacctattaaacccaagagaagtagaaacaaaatctgcagacagagggtgtttaccccttagaaaagtgaacttttcaagcagtagctatttggcttatgggtgtggccactgtgaaaggccggcccacmgccagttcattacacatcatccacacgrctattcaagaactagctgcctcctgcagaaagagctgggcgactttgttcccatgaatgactccatcattcagctgcacacccaagtgcttccacacgattcgccttaaaactgtcccctgggccacatgccccaccccatcttcatccttttctggtctggcctcggaattcgagtccctgggaatgtacactctgggcaaatctgggtcacatctgccttgcatggggcactatgcaatatttccaaagagaaaagttcacctgctgctg

SEQ ID NO: 964 - DNA, 600 bp, Bovine  MMBT13677
acgtctctgtacaaggtcttctgagtaggattaagcagctgccactcctccaatgtgaaattcacagccacatcttcaaacgatatctaaaaaagtataatccctgttaaatctgaagtcattctctytgctgaatgtaggcttccttttctacagcaacaagtggcctgaaagctggacccatgatctccaactcctggaaatgtgcttttgtttaaccctcactgccccacgtcctgaatatgggctggatttatcaagtcacttccactgaatggaatagggtagaagtaagggatmtcccttccaagaccaggttataagaggacatgacttctaccttgggaaccctctcctgctctctttgggggaagtccaagggccacatggtgaggcagctctgtgtacaagcctacgtggcaaggacccagaggtctgccaacacccatgtgagtaagcttgaagtgtgtgaccttcataccacagcaattctcaacattttgaagacagggtcgtgtgagattctccactagaaccaaatggggtgagccactggcagattcctaactcacagaaactgagataaatgtttaaacttca

SEQ ID NO: 965 - DNA, 600 bp, Bovine  MMBT12881
tgtaactattcaccgtgtcatgtgattttggggcagtggatgacctcagctcttaagaaaaatatgttcggtactccctgaccgcaagagcacagaaatgtgtaggcagcctacacatagctctctctaaaggggctcagagaagaagtgcttgggtgtttgttgaaggaggaagcttccggtttaaaagagatttcactgtccttgatgttgtgaaaccaatgaagcctgtttctgctcttgtatatcttctagggtagatgcttctgctgttataaagaggttggggtgcatcagggmaggcctgcctccccaggattccaaggggagcccagcagacttgaggggtgctgtgcctgctgagcatagcgcrtgggctggagctggggctggatttcccccagcctgcacccttgctccggggagtgtgttcccgagtgccttctccccctcccctcaccctctgttctctctccttcaggacgagcccagctcaggcatggacccctgctccaagcggcacctgtgggaggcactgaggaaggaggctgaggagggctgtgctgtggtcctgagctcccacaggtgagcccagtggct

SEQ ID NO: 966 - DNA, 601 bp, Bovine  MMBT12464
  misc_feature (1)..(1): n is a, c, g, or t
ncttcctgagtctacacctccttgataaagcacgtcacctgtctatctaacgtgttcttaaatagtccacatgggaacagtgggttggctgtggttccattacagtgyctggtggcagtgagcccttgcataaattctctgaaaaataaattcaattaaaaaaawaaaaggccttggctgtcgcaatatgatttcctggttgaacgaaatgactttgttgttcagatcctttgggacaaaatgtattttacatgaatttatttcagagattgattacgattccccctccatttggtcctgmggttggtataattggaagtttagatggaaaagacagaaatgactttaaactattcacgtatccccctaaaatttgcagaagggtaaaaatayaggmgactttaagtaaaataggctgcgttagactctttttaagtttaaytatcttcactcttttctgacatccaagcacattgggtttttttttaatctgtttattttgagaaaccaactcaaagcgctttggctgcttgctgttcatttcactttacaatttctgtgcacgtggctctcggagaaacttgaagctgcgctcgatcgc

SEQ ID NO: 967 - DNA, 600 bp, Bovine  MMBT12728
ggaaagatgatttgagtgcccaattcaatgtaaaaagtgaagaaggaaaagtgatatgattatttgattctaggcattttcatttactctaaccactgattatctagatttaccattaattgaaatattttatctccttactatggtcacaattatttaagagacaagttatatgaagttaccagaatttcatttatctcacaggtgttgtcttcagatcacatttagctcctcatctaaggatatggtcataccatgaaaatgaaaattacttgcagactttaaatataaaatatgagmaattcacaaagttgctataagaattttctccccacagtttcaatgccttaggtttctcagaaagttcccaataccttttttctaaatcatgcatcctgttggttctgtagagaatgaaaaagagaaagtgagtaagacttatagtatattttagggccagacttgatatttctgactcaaattcctaaaataaacactaaacaattgtgtcacaaaataatacaaacttgyaaatatctggaaagtataaactttataagggaaaaaaattaaaatcagtcataatcctattgttcaagg

SEQ ID NO: 968 - DNA, 600 bp, Bovine  MMBT14260
gttccgttttgacttttaaaaagacattgccaaggtgatttacataattgaaattctatatttataactacagatgtgccacaaaattcaggctagcagccagattgtcaaaactctcaccagtttcatgaaaaagaaggtttgcccaaattctcactggttcccacataaataaagctgttttgggaaacagagaataaatggaagatctttttatttcaaagcacctgtaaagatttaaagcactaaaaaaaaaaaaagtcaaatagaatacatgaaggccaaaaagatgaaataatmtgctgctattagcctttgatatttgtaaatgttggaaaaacttattagatattttagattgctttatttagaaatcagttaaggagtcattaagaaataaaaggtttaacstattacagttggatttttaattgtggccttggcagctttaatgtctatatcctatggatatgattctttacacacaatatttttagaaagtacattgatgttcttttatttgccacatacaatttgattgcagagggtccatatcatttttcactgggttcactcagtcttcagtgccatttctaagaa

SEQ ID NO: 969 - DNA, 600 bp, Bovine  MMBT12671
cagaaaatcatctagtcttttccaataaacatataagggcacgtaagagcagcaacgctaagagagggaacatcaagattgatctctgcagacttctaaaatgatgcatattactaatgctcaattacaaagtctcaaaggaacttggctgagtcaagtaatgaacatacacatttactaattccagcagcactttattcaagaacacatctccaaataatgatgcttgggaagattaaaggagctagtgtttcaaagactaacattctcagaaaagctttgatatcaaaaattaagatmttcagcattaaaggtatgtgtgtgtgtgcctgtgtataaaggggaggggggaagggaagactgcagttaagcttggttgttcagatacagaaattaggcatagacgttctgtaagcaggactggcaaatatagattaaaaaatagtgtggcttttccatccacagcttcaaacttgcccattttccctcaaaaaccaccacttacactaatgctgaagctccaatactttggctacctgatgtgaagaactgactcattggaaaagacgctgatgctgggaaagattgaaggcaggagga

SEQ ID NO: 970 - DNA, 600 bp, Bovine  MMBT14193
agryctaaaacacaactgggatatcaatttttgccttctctgctgcccctttccctttcagaaaaaaaccatatatataatgtatatgtatctgartgtgtgtgtgtatgagtaatagttgaccactaatatgacctctaaaaaaaccacagcgtagtttgtggtttatcgtcaggaaaataaataaaaggaggaactggatcattgcttttatttagtttcaattgtataatacttctcaaaattctctaagccctttacataaagttacatgcccatactttcacagttgtaaagatmtggggaggcaaaaaaagtttatggttttagtaataaatcacagttatacttggtgtaagaaattgtgtcctgagaattgcatcattcatgtgttgaatttacagaatggtgtttcataatacttgaggtggttgcatatgccctgagaatgactgtagccctttaataatggaatagcagtcttttttttttctggcattgtacaaaaggagtactgattaggtccaactagatgtttaggggaaagaaagtcaagaaaaaaggagatgtcgttaactcatttacaaagaaagaaatgaa

SEQ ID NO: 971 - DNA, 600 bp, Bovine  MMBT14440
gcagccaaaacccaaacattggttctttgacctgtgaaataagatccattatgatagaaagggacaaaggaagcccctgatattacttaccctttactctctttcaggtagtaaatcagaaggaacaatgtagccatgtaccaccaaaaaaaaaaaaaaaaattatgcaactctcaaagagtggctgctgcagaaaacatacagctcacagatggatccatttgatatgttggtacaagataaaaatacactattacactatagcccatgcacgaatgaactacttcagtgttacttaamatgtggtccacagatgaaagcaagctcacaaactgttttttatcattccacaacaagttatatatatgcaagtataaacagtgagagtacacagttgaaaacatttatatcaactttcagttcagttcagttcagttgctcagtcgtgtccgactcttcgtgaccccatgaatygcagcacgccaggcctccctgtccatcactaactcccagagttcactcagactcatgtgcatcaagtcggtgatgccatccagccatctcatcctccgttgtccccttctcctcctgtccccaatc

SEQ ID NO: 972 - DNA, 600 bp, Bovine  MMBT14308
attttaagaaccaatgcaacacctcagaaaaacaagtcaatcaattctgaccaaagtaaacagagaaatgtaattaaaaaaaaaacacaaccaaaaatacccacaatgcattgctttcacaagcagagataatgagctaaaggttaaggtgattggtccaaggtccaagaattgaaaggtgcagtggggatcccagatagtaacaatataatccagagtgggaggagtaactggaagactttaagggttcttttttgaccataagaatattcatggaattctgaaaaatacagttgatamctgaggttctgggcatgacytgttttatttaaatgaataaaatcgagaaggtagcttgattaggaataaaaagatctattttcctgtttagaaaataaatttgtattgaacaacaaaaaaaatacaccattctgtttttaatcctaagtgacactaaactattataatcaagatatagacttcaagccttttgagctattttgtgcgtataatttccccaaaactttattttgggaccaaaagacagaatagcagtagagaaaaaaagataagagtcttttcactaaatcaagatttggg

SEQ ID NO: 973 - DNA, 601 bp, Bovine  MMBT12405
  misc_feature (1)..(1): n is a, c, g, or t
ntaccaactgactccagctcctgcctttcaacaggggccagawaacagtacttttacttgcttgaaaattaaaccactttaaattccttagctgcaatgacactccaagttttttttttttctctccattatgattgtccagtctttactgcctacttggagaataattaatgaaccacaggaaatatcctttctcatgaatacatagcaagaaatttcatcaggcaataatctctcgttcttggtatctcactataatccaagtagcacagggtttgaaaacataacttctaggtttgamtccaatcaaatcttgtrgcataacactatctcctttccctctttatttttcaccataatatcactttctaacatccactatcatggatttattcatcttgtttattgtctttcttycccattagaatctagaatataagttccaagaaggctgggatwtttgtctatggattcactgctgaattctatgaagtarcacaatgcctgccccatagtcagtgcttactaagtatcagccagacaaatctcactgttacaagcctgtaacatgttggtgcctagtttactagatggtgatgat

SEQ ID NO: 974 - DNA, 581 bp, Bovine  MMBT14141
ataaattaagaayaagaattgctgaaaattgtcttatttcataagcattagggaaagactagtcataataatatatattctttaggaccaaaaaaaaaaaaaaaaaaagaaagatcagttaattttaaagattcactcaacaattaggagaaaaatctggattgcggtccaagyttttccygtatgtatgtgaccttgggctgtttccacttttagatcacctcttaaatcatttttaattgcaaatgttactattctccaagggctcaatataaaaattctaacaattctatgttcacmtccattcattctgagtagcttattcactattctctaatcatgtaattgactttcatatgctcttaaatagacatgaaataatggtttactacagcgattggtcacacacatttgctctgtctggagtcgtaatctgcagaaactcctttttccccttgtctatttgttaaagtgccagcttgcttttaaaggtgaagaaatagtaaaatattctattggaaaaataaacacatgacatcagacatcaaaatttctctctaagcagaaattattttaaataa

SEQ ID NO: 975 - DNA, 600 bp, Bovine  MMBT13117
tattatatcatgcaatgaatttgacatagaatttccaaacccatatttatttgataaatggtgcaatataaactgagtgcttcaaccttctctttgctttaatagattgttgactttttaatctttatattcagaagttccatctagggcaagtgtatacttgctatctacatttagacgcagctctcaaatttcttgtacttggttgcaaaaacagaaatgaagaatggaaatactttattaaggtcacataaaattgcttccaggatgaatctggataaccagactgaaaaaataaamtatggggaacttagaattttggaaatatgggaaattgtacttagaatttttattcttgcataggagaaagatattaaatattcagaactacacaattgaatagtgttatgtactctccactgattgctttgatgacagatgggaggaaggctctggaaataacagaggtaaccaaaaggataggaagtagcctaacacatgcttgcttttgaaaaatgatttaaagtagtatttcaacctataaccctagtacgctaactggagtgcacttttagggcatttattttaattctcaaaaat

SEQ ID NO: 976 - DNA, 600 bp, Bovine  MMBT11587
ttattcttctgggtttcagagataagtagttaggtttttagggcattaaagtgaagcctgtcagggaatcaagtccttaagtcatcaaggtgggagagaaaaccacctactttaagcagtggaaagagaagcagagaaaggatctctagagattcttaaaacgtctttttccacttcattctacataggaacctgtgtcagctaaaaaggagaagaaagtttcctgcatgttcatacctgatgggcgggtgtctgtctctgcacgaattgacagaaaaggattctgtgaaggtaaaaatstagtgcttaaaatgagagactcttaaaacaggaactgtgggtttgggagtaagggcaggagccaggaacaggttaaaagtcatggactgcactgagcatcagttttcatctttctcattgccaggtgatgagattaacatccatgctgattttgaaaatacgtgttcccgcatcgtgatccccaaagctgccattgtagcccgccacacttatcttgccaatggccaaaccaaggtgctgacgcagaagttgtcatcagtcagaggcaatcatattatctccggaacctgtgcatcatgg

SEQ ID NO: 977 - DNA, 600 bp, Bovine  MMBT12660
aggcacaagcagatgatgggccctgcctgcctccagcccgaggaggaaaggcagttaacctccgcctgcctaactggggcccaaggtcatgttcaattgtgttctgaccrggcagctatttccccagctggagagcgaaactgtcagttcagaaacattctccacctggagacaaacgctcctggggggcgcttggcggctctcccttctgtggtgtcgggtagcgaagggcacgcttctygcataccttcgctggatcacagtttatctgggagcgaagccaagcgctccatcctttgsgacctgacccaagaagagagcttctgtgaacttctgctctctggttgggcaatcttggagagttggttgggagggtgtgaggagggagggagtcgagtcagagtcaccctatctatttcatcaccagccacgttagacaaagggtttgtgtctgcagtcctctcctggtggaggagctcagtgactcaggaaaagctgtctgacaaatcctgttgcaatagcttatcctctgaaccccattggtttcatcataattttcctccaaattaatgtccccccagttttccttttgctacatag

SEQ ID NO: 978 - DNA, 600 bp, Bovine  MMBT13060
tgtcctcttcaggctgaaggagtttgaatccatggtagcccaggaaaagaaagagaaggaaaaacaaatggcagccataaagataaacactaaaaatatttcaccttgaaagtttatgcaaatatgtgcaacctcttcaacaacatcttaaagtttgctggggcccaaggacaaattccaggactttagaattgcaaccagaatgaaacaggttagacattaatgacccctttggccgcagtgttttccacagactcatagatagaaacgtggcaaagcacagcttcatcacacaagctstgacrcattccctaggtcagcttgccctttcatctgctctgagcgtcgggatcttgaccatgaccttgagatgagtccagctgattcaggtatatttctgcctacaatctatccaccaatatctaagcttatgtccttttgacarcaatgatataattttttgagaatgattccatccactgctctgtaaataccaaatccagttgactccacagtttttcagactactcagcatccttacatcctcccccatctgtctgggtgtcccaggtagattccaggtggacaggtaaaccaagc

SEQ ID NO: 979 - DNA, 600 bp, Bovine  MMBT13013
ggtcccctctacagtgaggaccctgggcacacacaggtggaggcttgtcggggtcctccatactgtgagggcacggggcacacacggtggaggcttgtcagggtcccccatactgtgagggcactgggcttatgcggatgaaggcttgttggggtcccctctacagtgagagcactgggcacatgcggatggaggcttgtcggggtccttgtagagtgagggcacggcacacacggatggaggcttgtygggatcccctctacagtgagggcactgggcacacacggatggaggcttttscagggctcctgggtagctggttctgagagagctgggactaacccccgtgccccckcarctctgttccccaccccatgcttttctagggcaatgcattaaaagcagtgaaagaagcgaggtctggttactggagaagccgtcatcttgaatgaaacaaaagccgatcgatcgcaagtgtgacaggtggcgaggctgagtcgaggctgagtgatacacaggacacaggagagcggctgcgatgtgtgcttggcgtcccggagcagccccgagtggggtgctgcatcttcccgtcatttttaa

SEQ ID NO: 980 - DNA, 600 bp, Bovine  MMBT14237
ctcattctatgcttaccttctaaagcttttttttttttagtctatttatttattattttttatttatttctttggcagtgctgagtctttgttgctgtgcatgggcttctcattgcggtggctcctcttgttgtggagcacaggctgtaggtacagacgggctacagtggttgcagcgcgcaggctcagcagttgtggcacatgggctcagttggtccacggcaggtgggatcttcctggaccagggatcgaacctgtttcctctgcgatggcgagtgaattctcatcccyagtaccacsagagaartcctctatgcttaccttggttaggtaagcccttgattaggactaattacactaactcacaatttctttcttcttcttttttacctgctaagacaatatatccaatctttttttaactgatgtgcagttgatgtacaatattactttctttaaaaaggaaatctgtccctcctacagagctgtgagcttatccctagcgcctgcttcaggatctggcacctagtgtgtgtgtgtgcctagttgctcttagtaggtgcttgatagttgcatgtggaatgaatgaatttgctagag

SEQ ID NO: 981 - DNA, 600 bp, Bovine  MMBT13079
caaaggaaaccgtatatgccaggggatggaggccaagaatgacaagcctgcctggtgaccgggggaaggtgatgctgaacaggtgcatgaccgggggccttggatgtgctgccaagggatctggacctgatcttctatgcagtagacaacattagggatttgtcagtaggtgcctgcatttaataaaggcaactgtgcaagaaaacagataggtgaagggaaagactagaccagagttatcggtcagcagcataatgaaaccaaccaggagggaaatgttgaaggtacagatacagacastaggagtgaatttgagggacatttcaaagagacagtccacctaggggccgatagactgggaagaggcgttaaaggtgacactttagatttaaagtttgagtrgcttgggtgccttaatgtggacaataaacctctcaactcaaagaaaaayattagaggagcagtgagtttcatggaaaaaacaatgagccccgttttcaatcatctgattttttctacatgatgcttctatcatcctgaaatacatatatcatttcaacgaaatgctttttgaaaagagctactacacatttaaaagaa

SEQ ID NO: 982 - DNA, 600 bp, Bovine  MMBT13917
tagaacccagccatgctgcgggggaagaaggagtccacgacgctctgtgggaggtaaccactgaggtcagtctggaagaacgtgaccaagctggttttgtttggctccctgtgaaaacaaaaacagggctgttaggtatccagaactgagggcccacccaaggaaagtggtccaaacccagggatttcactgggttcactgcccagaggtcccctctggatctgcttcttttcaggatggaagtggatcctctcaagcatgcttccctggccccacatcgatggcaagcgaggacatgcsctgatttccatcacagcaaggtcattcattccctgtgcctgattcagtcaggaaagtcttccagagaacttactctggtgccaggtcctgggagaaagagacatgatgctgccctctgaccattgatggcagtgattctgcgagaaggtctggcaactcttgggggttcctgataccctatcaagggctttttaggtcaaggttattttcctcacagtattaagatgtgatttgccttttctctcccattctctcagcctgtattttattctcacaaatttttcccatggccagcacaac

SEQ ID NO: 983 - DNA, 603 bp, Bovine  MMBT11488
  misc_feature (1)..(3): n is a, c, g, or t
nnngcatattcaggctatgggtgctggtgagtctgctcatttgggaggaggagaaggggaagagatgggatatgtggtttctcatatttttcagaccactggccttggccctgaaggtcccagctccaaatctcaaaggcaggagtgaggtgatgtgggctgccaggagggaattacagatcagtggtctggcaggaagcttgacccttggccggggcgagccgcagagggtacccaggagccccctggggaggagagttctggtgagttacccatggttgcaccattcacatgcttcccaasccgctatcccaaagtgggaccccacttatggttctgctgctgcctggctgcgtgtcttgtggcaggccactctcccctcaggcctgccaggtccataccagcaacttcactctgccttcctctccaggcggggtctgggggatgctcagctgagcaatgagctgggaaagagcttagctaataatagaaatgaacatcaaaacaatcacaatcaaaatagctcccagcattagggctttactatgagccagaccctccaaagtgctttacctggttcattgaaaggacacaagactcccc

SEQ ID NO: 984 - DNA, 600 bp, Bovine  MMBT13559
ccttgaccctgactccctggagcaggacggggttggggctcagacagtggaagctttcttgcccactgcgtcccctccgtagttcagggactatcttggggcaagtggcaaccaggcctccacttgggagcactgaatgccagactggaggctggaggagttggaggcaaaaggagaagggactctgtctgcccctgtgccctgcttctcctgcccaccctctgcccaaccagactctgggttctgggcatcagggtcttggggacattttccaccccagagagggattggatgatgggsagctggtggtggtgagcagagaagaagctaaacggataaggcagagcaatgcacaatgaaaaatcactgctccggtccttctgctggtcctagacctgagcttctacctggagtagaggcttagagtcctgtgcttcagccgccctcctttatttatttatttttgagttttttttattatttatttagttatttattatttatttatttggctgtactgggttttagttacaacacacgggatttttcagttgcagcatgcagaatctagttccccgaccagggatcgaagcagggcct

SEQ ID NO: 985 - DNA, 598 bp, Bovine  MMBT12657
  misc_feature (1)..(10): n is a, c, g, or t
nnnnnnnnnnacacacaaacccgtacatacacaccctgaataatattggggagaatcagagtttgacaaggtagagggtaccttcagtttctccacttataaattcaataaaatatgacccagttccagaattgtgcatttctagatagctctaatttaatgaatttttccctcaatacgtggctctttggggtatgtagaaaattggactttcacctaaaatctctaccttcaaagtcaagataaaatttaaatctttagggacttccctggtggtccaatgattaaggctctgcattscyaatgcagggggctcaggttagatccctagcagggaactacatcccatacgccccaactaagatctgatgcaaccaaatgatttttttttttaatttaaatcttacacaaaattggaggtccttgagcatttcaaggactctgtgacatcactttaaaaatgaaaagtatttcttcactgtcagctcacccacgccagtggggtgagcaaattgtaacaccttcaaacaaaggtctcttttgtttggtcagtgccaaagccttcaaacgccgttgcaactggttacaaagctcagag

SEQ ID NO: 986 - DNA, 600 bp, Bovine  MMBT11744
caatccatgaaaatcttagatttgcagaaaagttaaactagaggagattacgtatgtgtttaccaggatggctttgtgcaggaattgcagtaatttgaaaacctgaatcctaggtcaggccctgccacttcctggcataacctctctgcacctcagtatacatctctgtacaatggcaagatgtcaggttatgccatttcacctgtccctcgaggttgtcatgagaatccaatgggccatagactgtaaaccaaggcatatttagaaaggggaggcccctttgatagaaggagaggactsggkcgagggcagaaggccatcctgtccagggatggtaccccaggttgttggggaaccagtccccttcctagtttgattarcttgtgaacaggctcccaccrcagaacaggagccattccaagtcccattatcctgcacattctcaccctgcagccctgctattcacttaaacaccgcagctcccragtacattttaatctctgatcattagttacaagattttcttgttaattctgattcagcagattttgctgagacaacgctcttttttcccttttcattttggtcacgctgcacata

SEQ ID NO: 987 - DNA, 600 bp, Bovine  MMBT11783
ggcatctgactggaacttcacacaccggaaccctcacttccgtaattacctctgtatagaacacagagcattggatattacttcagtcttgcatattctctctcctgctgccatttctcaaccaggactattaagtcaacttccaattatccccaaacagcacaggttgccatttagcaaatgcatccacaaacaaggaatcatcatgtttcaacataacatcaaccccaggaaggttccatcgctgtgcaagacgactccagagtttggagcatgaccttgtaaatttctgtggccctstatggaatggcacarcctgggaatcatagctaaccctttcccagagtgactacgtagctgatagcagatcacagagatttaaacttggaacaggttgaaaggtaccaccatttcacagacttcttkttttttaaataaacaaccctaaatactgccaatggttggtgccaagctctgtctgccaagtgccacccaatttggccaaacggctaaggaagaatgcagctctggacccagttcaatgtactgacacccaaggccccaaaagcatttcaggaggcaagctctgacacgcacctg

SEQ ID NO: 988 - DNA, 600 bp, Bovine  MMBT13026
atgtcagggaacatggctcaattgagggaaattaataaatgagagcattgctgtcattccaggcccagctgaaaccttttacaagcggcactcaccctaggcactgacatttcacccaagctcttaggagatgaggaggatgtactcagtgagacttctgagcaaactacttcttgccatccagttgaatatgggttaaagastaggaccagagcccagagaatccactgacagacaggcctgaaaccagagaaaaggttgcttttgaagctgttaaggccattcatcatcaaggccctscaaccttctaccattaatttttcctcctgcagacactgcctggattctccaggctggctttcctttgcaggaagctcttgaggctttgcatctagttggcagaaatgcagacctaccttttcttgtttcgcgagccaagaatgttatattcccacatgaccatgaaaaattgggccagacaatccgccattcccttaaaaaagctacacagacacacgtgcacattcctatgtatgcaggagatgtttaaacctccaagtggaatgttcagccagatatttttaaagtcatttatgttag

SEQ ID NO: 989 - DNA, 600 bp, Bovine  MMBT14269
gtgggtagcttcctgacctagggatcaaacccgtgtctcctgcatctcctgcatagcagtcagggtctttacyactgagtcactggggaagccctgtcggcaccagtgcccatctctgggtttagagmtgtactgaatctaggctgggggtgttctggagggggaaaaaatggtaactcatcaagagtttggggatatttcagattctgtcttcttacagtctctaaactaccatttgcttttcagacagagtgaaatgtgcttcactcctcattgcccccccagttggagcccagcatsttttatctcatgcacttacttacaacttaagatccataggcctcttcagcttccaaagaggtgcctggcttagtaaggacttttagtcaaaagggatagacatatcaacaatgacttgcaaatcagcactgtgcattcaaaaaagaaccagagcatggaaagtgtcggtcatggtgagtagttttgaatggccaggacctgaacttcccttggcttttgagaccatggcagaagaaaatcacattgtttcattaaacagcattggtagactattaaattcaatgaaactctaagtccatt

SEQ ID NO: 990 - DNA, 600 bp, Bovine  MMBT11702
aactagtggtataaaagaaattgacagcggtgaagctgcctatgctgttatctaaactgtcttcttgacctgtgatgtttatgtaaactataaatgaaggtattttaaattggaaataaaagtgggagaataatataccaggaagaataagaygatgcaagggactcaagtttccgggaaggagtactgatcacagtgggcactcaaagatgctgtatacaattaattttcctttttctcaacagtttctgaaatcctttagatacctctttgtttcgaagactgtagatgagagggttsagcatcggggtgaggatggtataaaaggctgataccaccttgtcctggtccggtgtgtgattagaagctggtctcatatacataaacatggcagctccatagtagagtccaaccacagacagatgtgaggagcagatggtgaaggccttgcggcgactttccttggaatccatgctgatgacagcttgaagaactcgtgaataggaaccaataatcacagagactggaaaaaccagcatcaccacacaacagataaaaagcaaattttcaaatgcagaggtatctgcacaagatagaggt

SEQ ID NO: 991 - DNA, 600 bp, Bovine  MMBT11799
attatttactagactgaaagctcctataaagaaagaactgtgtcctaaactcaactggaattctgagtgtgaatacaaagaaatgtttgttcacttgcattgaatattggagaaggaaatggcagcccactccagtgttcttgcctggagaatcccagggacgggggagcctggtgggctgccgcctatggggtcgcacagagtcggacacagctgaagtgacttagcattgaatatttatgtctgagacagtaactcaagttggttgatagaagaggtgaaccagaaagccatattttstcacagagatttacttattctgcattggaacagaacaatgttaatgatcttattcttatggcatcattcttctcacacatttgtctttttaactctgagaagcattagtaagagttaggctgttgaactagaaagatctgtacaagatcccaacattgctgcttcctaccatggtacccttgggcaagttacttaaacatcccaagcctgtgtttttatctctaaaatgggaataaataatcacaaatacgtaagtgtagtattttgagatgatatttgtaaggtctatgtattaagtgc

SEQ ID NO: 992 - DNA, 600 bp, Bovine  MMBT12075
tcttcattttcaagatgctaagctttttccttgctccccattattaatacacactctccgtagaagttgttcacctgtacagccttcctttgtcttggtggcattgtccattttcagatttactttaccagttagtttgactgatcctgagatacttgtaggaaagagagagaaataatgagtaatttagtagattttaaacgtatctacttctaccaaatctggaaaggaattctgtatttttggccttctaacagtgaactatattggttgatactgttgtgagtgagatggtgaaaswaatcagtcatgtcttactgggatgaggtagctgaggctctgtgttgtgtattgtgaggaaggcattgttaccatgaggcagtcttccagtatccttggaaatggacgccaaaatcttgggtcatattgtgtcaaaaaaggtctttctaaaacttggttctcttcctctagtgtggtagaagaggagacacggcggtcccagcaagcagctcgggataagcagagtcccagccaggccaatggctgcagtgaccacaggcccatcgacatcctggagatgctaagcagagccaaggatga

SEQ ID NO: 993 - DNA, 508 bp, Bovine  MMBT11697
ccccattttgtgtttagatctaattttattatttatttatttataggtaaaataaggaattcatgatggggcatgagaatcacactttcagcaatgacttcattcttttgacttcactctttacttcttctcaagcaagtctggtatttttctcttttatattcaccatttttgttttgactgtaacagaaaatacagtcatgattctcattatccacagggaattacgacatcatactccaatgtayttcttgcttagccatctctcttttatggatatcttgcatatttccaacattsttctcaaaatggttactgatttcccrtcaggcagcaaaactatttcatttgcagcttgtggmgtccagatatttctatcccttaccctcttgggtggtgagtgtcttctcctggcagcaatgtcctacaatcgctatgtagccatctgtcacccactgtgctaccccattcttatgaatgactatgtcagcgttctcaaggctggagg

SEQ ID NO: 994 - DNA, 575 bp, Bovine  MMBT12332
atcaaatgtatttaaaattatgtatactttaatttcctatccagaatataaataaaccttttcaattaatgaattaatgcacaattattgtaggcagttcagaaagttaaattctattacactccctaagtgttaatcaattagccattttcattagctataagtcagaatactggagtgcccccaaagaatgaattctttttaaaaattaaaatatttttataattcaatttaatgaaatatgtcatatctstggctaattttaccttttccttttcattctcactcaaatcctctacscttgccctttgggcatgcacagaagcccagctctgtacatccacacatgacattcgattacacatattcctaactgctggcatgagctgtatactaaatattgtacctatcaagctttacatgttttcattttaaaattcccatttaaatgcaaattctgccatttaaatagagtcytcgtgtgctttattacactataattactatttcccatcttcctggaaccaactgcaagaaaggccataggtcactttaccagccctctaaaagtgcaa

SEQ ID NO: 995 - DNA, 600 bp, Bovine  MMBT12031
atataaaatgagcggtacttagataactttttttcacttccatttactttggagagataagattctttcccgcttatagtttcattttccattggcccccactggggaggcacgataccagtgcatttggaagtaggtggcagggttttcctttcagtgggaatcagtgctggtcaaggcactgggagtagttgagagaaggcttctcttgctcttttagatacagagtcagctactgaaaggaggtgtatgagtaagttattacagccaaactaagcacaccgaatgtgttagcatgasgggcgaagatcatctgattgatgctaacaagatcacatttgcattagtttcgcagagatgctttctacatttgagatgcgtgtgaaaatttgctattactctgacttagttggggttccctcagagttrgatgcgtgacaaggataattaaacartttctttgggtggtgagcccagaaagtaccgatggagaaatggaaaagggaagcgggcagggagaggctgtgatcctgcggctccatggggggcaaatgttgcttacagcctctgaggggaacccggcatctcacatctcacaga

SEQ ID NO: 996 - DNA, 600 bp, Bovine  MMBT13474
cctcttagacattcatgtgcagataccatgtacgcagttgaagctccagggtcaggccagaattagagacagagtttgggaatattatcttaggtattatatagtttttaagtcgagggtctggattaatctatccatggagactcacttgaaagacaaaataaagggacccaggaaaaaaaatagcaggactcaccaagatttagagatagaccctgaaagacagagaaagtaaaggaagaaagtgagaaagaatcagccatgaatactgaggaagggtgacaagctggatggaaaaastaygtwgattatcaggaattacctgaaataaactgccaagcttagggaagctacaaaaggagtatttatacagatatctcatcattaaagcacttctgccttaagagagctatcagatacctaatctgagaacagaaatgagggtaaatcctggagtatgcttattagcctgcaatgtctacatctatctgtttaatattatggctccttaaccttaatataagttaacagagcacactgtgtgcagaagcattatcctaagtgctttttaatcagcagtcacttttttagtcctctcaa

SEQ ID NO: 997 - DNA, 600 bp, Bovine  MMBT13506
atgaatgcaatattaactacctctcaakaatttctgttaactttaagggaaatacaggagccttgtctttcctataacacacagtaacacacattatgtgatcaaaatgtataactgggcaacttttttacttcattaatgttttccattgattacctaaaaaggaagccttcaatatacctttaaatatattaaacagtggtaactacaatctattaggaaagtttcactgaagaggatcatagtgggcttagtgsaggagacggcatgtttagctggactttaaaaattaacaatttsattaagtggaaaaactacagatgtgcagttgaagtaccattcaggagagtgtctaggctgatatkctcaaagtcagttccctccatgtgattcttctagtagcaaagagagtcacatactttagacaaatcattggttgctaatttgggcttttatcaatttcagtataaaagtaattttgagattactatctatagtaagaatcttaaaagtagatttctatactgtgggaaaaaaagggtggaattttatactttgaaaataagcaaatgattaacttgacattttctgatgaatatt

SEQ ID NO: 998 - DNA, 600 bp, Bovine  MMBT13968
aattgagaaatagtgggatttatttttccctttctgtttattacagacatttaattttcaacagctcaggaggtagagatggaaatgtggccttttgtatggcactgattttcgtctctctgtattgttcaagtacattagtcagcatatcttatcaagaatgactttcttctcagtgtattgtctaagtacctcaataatcatatcttatcaagaagtcagcattattagaaaaagtagttttaattgcttgatgaagggctgatcctctcatcacttatagtaggtggcagtttcctsatactaaccctttccagttttgtatcatcatggtgaagcatcttgagggttaaacaggtaaaaataggaaaattatttttatggaaaacatgttttcttacagtagaaataatgctttaaaattttttgttttcttttccaacttgaaaaatgaaacatcttcagacaaaatatttgggaaacaaaatattttgcttggcaaagatgcttttttacattgcttgatactctaaagtgttttttaaatggtggaagaagtaaggttgaaaatgaatgttagcattttttataagccaggct

SEQ ID NO: 999 - DNA, 600 bp, Bovine  MMBT13572
tgttcatgaacaaatgaaagcataactgaaacagttgttattgttgtttacttgttaagttgtgtctgactctttcatgatcccatggactgtagcctgccaggctcctctctccatgggatttctcaggcaagtatactggagtgggttgccatttccttctccagcagatttcctgacccaggaatggaaccctctctcttgcattggcaggtggattatttaccactgagccaccagggaagccccatgaataaaacaagtcttccctaaattttctcctttctgtttcttcatacsgatgactcaagaataagtctactaagacactatggtggatcacagtataggcttacagtctgattttgcctctctgagttcaaatcctggctttacccactaaatagctgtgcaaacttgttttcccttttggctcagtatcttcatccttacaactgtgaccataatactatctcttgcataggggtattgtgagaatatgatgagataagacatgaagggcctacaatagcatgtaaggactctaaaaatagtagctattattatgaacaggtgcttatttctttgcatcacattcaa

SEQ ID NO: 1000 - DNA, 598 bp, Bovine  MMBT12429
  misc_feature (1)..(56): n is a, c, g, or t
nnnnnnnnnnnnnnnnnnnnnnnnnnnnnnnnnnnnnnnnnnnnnnnnnnnnnnnnagtttatttctaggctctcttgttctgttctacataggcatgttcacatgtaagtcagtagattctatttgtgtaattgccgtaagtcacgtgttatattaccatcagtatctttttatagtttgtattactagtttgatttttatcttttatccacgaagtgtttaactttgtatggctgttgaatcatttttytttctttgttcatagatttacttgtctgatagttgttaaccaagaatasttatcacagtctagatgactgcatatgacagtgcatcaccagtgtgcagtcactgtaggagaggcagagacacacacacccagrcttagaaaactgtcagtccctgttgtgtgggatgtggagttaagttcacgcaccacacagcatccatctgggtcctgtttcacatttacatctgcagctgatgaatgggatasagatatacataagacaaagataaatgtattagaccacgagaaagaacttagtcatttttgaaataaaagctttattgtccatacccagatattaaggaatt

SEQ ID NO: 1001 - DNA, 598 bp, Bovine  MMBT01757
  misc_feature (1)..(41): n is a, c, g, or t
nnnnnnnnnnnnnnnnnnnnnnnnnnnnnnnnnnnnnnnnntgagcttctgattgatggtttccagcagtgtttactgtgggcattacccraggttcctaagagtgagtatgtattcattcaaatgtaataaatctttaacataacttatctttttaagattccacagttcatataawtggcttttackgagaacgcccactttgcttatctgcactgacatctatgatttggcatctttaatttactgtggttcttataaaaagcactgaaacaagaagaggacacatggttaattatrtgccacttgaagagaaatgtaacacacayggaacaaaaatgacttccataaaggaaacattataatctaattggttccttggaccttataaattagagctaattagcaaaaagaaatttttgcatctcagaackcttatgttgcctggccagaattacatggtcagtcaattggcaagtcaagatttaagcttaagtcttctagtttagaagttaatattcaatatatctgctgttctctccagatgcaataagaagaaaactagaggtgttctgggttttcatggaaattgccacaa

SEQ ID NO: 1002 - DNA, 600 bp, Bovine  MMBT14250
agctacccactctagtattcttgcctggagaattccatggacagaggaagtctggcaggctacagtccattgagtttcaagtgttggacrtgacttagcaactaaaccaccacataaygaaaacttcccacattaaatttggtttttagggagtcaacaatgtcagggagccaggtctttccactttttyctgtgttaatttcatgctcaggttcaactaatggcaagagggatgcccagaagccctcaatctacatttttccaactttaagtctagtggagaagaatgtatgcttcaayatttttctcaagaaatttgtgcctgaatccccagatcgggctctgctttatggaatcgagtctaagagagcaaggaaggaaacaatcccaaactgtgtctgggagaagaggttctcattgtatgatctcagatggcagaggacaatggtttccagggtttgaatgctcatgcccattgatgggtaaggacgttggaataattcctactgatccctgtcagaacaaaacttgtagagcttattattaatattttactcctttaaagaatatttacttattcattcttacttgcggggctca

SEQ ID NO: 1003 - DNA, 598 bp, Bovine  MMBT14270
  misc_feature (1)..(4): n is a, c, g, or t
nnnnttcaagatggaaagattaggaaaacatttaaggagcagttttcatttttatatctgctcagagaaagtcatttcttcccttcccgctttgtattctcccaactcaaacattgctgatctgtgatactctcgctttgaacttttcaaggtacctaagctggggacccaacaccctgaatctaactctgccagaaatgacgtgtttgccaagttctcagcatttataaaaaacaccaagaaggatgcaaacgagagagtccctcccatcttcctgttttctccatggacctccattcygcctctggtgtggcttcttatgagatgtggggaattctgcctcactgcacagtggggagggacctgtgtatagaaataaggaaaaagtacctcccactctgagcctgcacatgggtttcagggactgagtgcttttctagagattgtccagaaaaggacatttttaggagaaaatcatcaccaccagtgattcctctcccatggaattcagggtgaatgaaccttctgttggtgcttccttcattatgtgattttcacaaagatttttttttaatttttaattaaaaaaawttttttg

SEQ ID NO: 1004 - DNA, 600 bp, Bovine  MMBT13768
ccttacaggcttgaagtgtgggcaccaagaccatagaatgttgctggtcttaggagacaaactttctctccatcctacagagactgtgacaagtcagaacatgtcatctggaccccacatggcctcgtatctgcccaaagcagcaytcaggagagatgcwgtcccaaggaacaacagcatcatgggctgctctgcagagatcttcagataccccgcctctcttcttcactgaaaatgttaccagtaaagtgctggaagtagcacctggcacactattgctcagtacccctggggagatgyggargcctgsggtgggaaactgaggcaagaagcaaagtggtcccttagccacaagcttagcctgactaaggtggtctcatcyctctaggatctttaccctgatggtgggtgagccggaagagcttctgtgctgtaagaaccctgttctagacctctgtgatattggggtctaacttctttggacactggattcttcatttgtagaaagaaactgcactgactgaatatcaactctaatattctgtgtttccctaagtcattgtaggtattgtaaatttcctcttgaaagcatcatttgga

SEQ ID NO: 1005 - DNA, 600 bp, Bovine  MMBT14040
tctctcagtttttaaatattggtgatgaatttaaaacactcctagtccaggaattccctggcagtccagtggttaagactcggcgctttcagtgccacgacccaggttcagtttctggctggggaactaagatcccacaagctgagcggttcggtcaaaaaacaaacaaaacaaaaagtcctgtgggcacaatttggttcttaaactgccaatttgcaatctctggtctcctccaagtctgcctgctctccattttacagatgataaagctgaggctcagagaggcctagtgaccttccyagggcttcacaggtcactgttgggaaaaccatgggtccaggaagcctgtctagtgctccttgcccaagatagcagatttgttggctgagcccaaggtcttaacaagcaattctcaaatgcttcccacgtatctctcgtttgcasagacatgaggtttacaaacacctcataacctacttgattctagcaatggccatgagggagcagggctggcattaatccattttcttttacaggtgaggaaaccaaggcttggagaggctaagtgacttgcaaggtcaacagtcttagagagggctg

SEQ ID NO: 1006 - DNA, 600 bp, Bovine  MMBT13164
gaagggatcaaaggtgtggtggcaattaagctgggccctggaggatgagggaagtgccaaagaaagaggaatgtagggaagttcattctaacggcatttgagtcctcaaacgtttcatccagtgggagctgatgctaaaaacagaaaaaatattgttctgttcacccccagggaataggatcaggaccagcgagcagcagctataaggaaagaggattctgttcaaagggaagaagaactaacagttggggctgaccactggaagggctgtgcagacaaaaggcagagtgtctcctctayggatggtcagcctcttggcacaggtgccgtggaggatgtgatttaagtgtaggacagggagctgttccactgagctgtcttccaactcagggactctatgtatctccgatgcctctgccaagccggctttgcacaacatttccaggagggagaattattttagccctgttacagcatttcttatagaacagtctttgccaagttccctttcaaggctgcgttgcttaggttcacccagtgtgttcaatcatcagccagtggagaacatctctgcacattaggcccacgagagccccttgc

SEQ ID NO: 1007 - DNA, 600 bp, Bovine  MMBT13712
cggctacatgaaaccggtgactgggtccgtacaaacaggatccggtctgaactggtgtgcgccatgcttggatcytgctttaagataattaggtgggcacgcccccagatgacttcctcctactcatcctctgcaaaacaatgagaatggagtagtcccttcaaatccagaaacggaagccatgggttaagaatgtcagagtctcctcactggccctgaatcattcttgtctgagcaataaagtgagagagcaataaatttccatcttatttacaccacagtactgcgggtcttctttgytatarcaccttacctcctccctaaggatcccactgtttgagatccaggaccagcctatagatctatctgtgctttctcagggacatagttccacttaggcattgagagtgggcaaagcagaaccgagccagtttcagagaagttaccacatgaagtattcatttttagatatctgcctaaggaaattccaaaatcagaaaaaaatcaacatggcatgtattctttatgaaactaagaattgaacttgatcaccctgaacaacaatagggcggtaatgaattaagatataggccatctacc

SEQ ID NO: 1008 - DNA, 598 bp, Bovine  MMBT12935
  misc_feature (1)..(98): n is a, c, g, or t
nnnnnnnnnnnnnnnnnnnnnnnnnnnnnnnnnnnnnnnnnnnnnnnnnnnnnnnnnnnnnnnnnnnnnnnnnnnnnnnnnnnnnnnnnnnnnnnnnngtacacatacacacatgctcacttgggaaatcatgatagtagagacacagcactgatgtgtgtgtctgtttcgtattcagacatttttttaagctccctcaccccttcaacaaaagcaaccyggcgacattcgctgagttcctcctgtcagccatagttgtccattcagtcttaagcaccatcagcatcatctctatcagtyatcaggacagccttgggaaggggttcctcccatctttcaaatgaaactcagagatattaaagaacttctagagggttccccacccaggtgagattagtattcagagccagagaaaacatatttgatcaaatagttatatgccttcaagaaaatcaggaaacttatatctcaaggtagcacttggaaaagagaacacctgtgaggcagagggaaagtgcacccagggcaagacagacgtggacggaagcaaggaaggaggaaacgacacgttattcttggtcatctttcctgagyrgga

SEQ ID NO: 1009 - DNA, 600 bp, Bovine  MMBT12366
tctttttgagaggattctcatggctgaatttcccattctgcccgcttggattccagtcctgtcttttgaatggcctatttggaatctgccacaggaacctaaaatgcaacgtgatttaaactgacctctgcctttgcccacccaaatctacttctgctccactgatccttcatcaattcatccacatcacaatcttcccaggtgagaattcctagaatcatctatgactcctgattttctccttcacttcttaccccaactaacagctgggtcctcctgacatcatcactgcgctaagaycttcactaacytctcyctttcttacttggattcttgcattattcttctgactcactgctgcccagacagtgtcttcagggtctatgtagagaaggcagaggcatcattctgaatctaaactggcttggtccttcccctttcccatttcaaagcacaattctgtaggctccaatcacagcacsccagagcctggccctaccttccttcaggagtccatctgggtgcgccttagcctcacttttctctgaacatacactaactgttcctaagccagggaaaccctttccttctctgtggcac

SEQ ID NO: 1010 - DNA, 600 bp, Bovine  MMBT13219
gatgataagttacataaatccgggaggcaaagaacctcagcagtgcagacaggtgcggcagagatggaaaacaacaagcaggaactcgtagattcgyctctggcctccaccatcttgaccatctattcagattctggggcacctttcccattcctagagagagggaaatctaaacagttgaaggtagtaaaggagtaagaactgtgatattctcatttcctgaaccctgcagtctctagaccttcagctccttgaaaacagaagctgaagttgcatcttattcatggtcaaatacctcaygctgagcacagtgccaggcacrgagcaagatcagtgacaaggggccgggctttgagcgccagctccgccagcttcgtaacctgagctcctataaacatcctcctttttgtgaccatgtattgagcccttaccatgtgccaagccttgtgccagacactttatcatcaacttcactaagcttctcaacaagcttataaagtaggtattgttgttctccccgtgttgcaaatgaagcacatgagccaccaaaaagttaaatatcttgcccagagttattcagctccaaagagcagaccaaag

SEQ ID NO: 1011 - DNA, 600 bp, Bovine  MMBT13245
gcagctatcagccagcatttggttcccgggggtgcctctcatgtccagaaaacacttcaactgtgaagagaggagccgtggacatttctgcttgtggaggttaagtcttacacrttgcttttttttcccccaagcctgtgctaggttctctgcatggaagagtggaatcttgttagcagaggcatatgtctgccatatgcaaagaatgtaaataactgtctcttcatagagtgtttccttctattcagccagttggtacttaagtgtaaacacccataatataaacaccatcctggtacygttagggactcacaagaagcacatgactgggtcccagccctcaacactagtaaccatgtgaccacatggtatgagagaaatacttgtcaaccaggaacgtagatttttcatgtataaaatgaggtcttgtcttatgttccttgaaactcgaaaaatacatcctttggattgtgacctttgttccctgcagtttgaagattttcacgagtggttatccactctgactgcctactagaattgttgcacattcatttcagtattgtagccacttattgactagagacatgttagtacatcttt

SEQ ID NO: 1012 - DNA, 600 bp, Bovine  MMBT13965
tgcggtctcaattggagagygctttcgtggaagggagaggcccccaccctggggaccttgtatccctcaccggaagggcaggagctcaggcaatcaccctgagccagcccagctggcctccttggaccacagagcaagctcactggctctctcttctctctcccagggcagaaacggaagcagctgaggtgttaagtggatctgaaccctgtatctgatcctagaacctatgcttcctcacttgagggcttttgaagaggcaagatggttctctgggtgacggtgcccacgtatctgtgyggaagggatgagttatgggcgatctggagatgggcataaacatcccactgtctcccatgaccccctgtgttccaggctcaggctgtgagcaaagctgaccagggcagacatcgctgccacgatggggccaggacaggggccctatggccaggggtcccctttctctctgtccactcagttcctcccacatgaaatcctcctgtgatgcatcccccgccctgccctctggccagtagacctgtcaggatggactggtcgacccggagggtggtagacttgatggtgaggatgcggatatct

SEQ ID NO: 1013 - DNA, 600 bp, Bovine  MMBT12682
ttcacctgcccgccgggcacacgaccccgcactgtgaggggggctgggcctgaccgtgcacccagcctctaccctgcctgctaagcacagcaccgtgtggtgagggatcctcaccagtctcctccagctgttccctggctcttgatctgcccccctacctctctctcacacacacacttttaagaaagtcctcacatggggctgaggctctgtcaagacgtaacaagaccgtggactcccccatcctagaggtatacacatgccctcacgcgtgcacctggacacaggaaaaccaacacygaagcctagacagactcacggacacaggcggaaggcactttgcccttggtttgttaaatggtgctggaaatagtttataataggcctagagatattctcttagcgcaagtctatctacatcaatcccaacgtttttctttgctcagactacttctccccaaaaccctctctgctccccaggttggaatcatgtatcctgtatgtacaatctaaccctgcagtcaccctcttcttcagggtccttgaagcaatggctcccaagcagctttctgctaaacgagtaaaggccagagcttcggc

SEQ ID NO: 1014 - DNA, 600 bp, Bovine  MMBT12806
tgcctcccctttctcaccaatcctgcccagcttcttccagatttcccatcccaattcaccatctcacactcatgtctctattctgcccagaaggaccaattttcaagaacctattgattctttccttctattgttttacactttacctgctgctcgttaagctttttctgtatttcttctgagtcacaggaatcgtagacgatgggtttggccagctctgactcgatgtgggctaaccacgtcctcagactgctcatgttcttatccagctgttgtactgcaaccagagtctccttcagyttctttaccctgtgggcagaaaaggagagatgtcaacttcagggagaggcctcactcatgcttccctcaggaacagaagccagagctgggtctaaacccagagtccagcctggttcagccacctactgtctgtgtgattgtgggcggtggcatagcccttctgtgtctctgtttgcttgtctataaaatagagaagaagtcacagtatttatgaaattcaaattaggtgaataacgatggtgccagtacatgggaaacattaaaaagaatattagccatggttatcctcaacacaactat

SEQ ID NO: 1015 - DNA, 600 bp, Bovine  MMBT13316
gacaaggaagatattatgaaactgggtcaggaatttagagcaacacattagacacaggaacccagtcaaaagtctctccttcagtcacgaaggtccttttccacacagctgccctgtttccaaactgtgcaaattataaacacatcgtgactaacttacccagtctgccctgacgagatgaacaggtaaattctgtggaaatcgagaaaggatatttttgttcacgttctagtttttactgtgtgtggtccactagctcatggagtgtttattcaaatagttgttttcactttcttcctyctctttcctcttctttaccctgggccacagacctcaagggccccaaccagaagggctcgtttgtgggacaggaggagcagggctgggatacaggaggcagagagacaggacaagcctggctacagccactgaggatgtgatatcctgtcccatgggcaaccagagcgcttagacgtcacgggaggggagtggtggggatgggagggcgaatcatctctagtgagtacctctcctccatctctcagacctcaggatggagactgcctggttctggtccacaggggaccayggagctgtctc

SEQ ID NO: 1016 - DNA, 600 bp, Bovine  MMBT12754
acaaggaatggataagctgtctaccacacagagccagtaaacaaatattacaaggccctggggacatagggaacaagccagtctctgccctcatggcttttatcctttgggtcatccttacactgctgacagtgtatggcaaggatgaagaatgtgctaacatgcccccaaaaatgagaatctggggggataaagcaactataatgaggggtgaagagaaagaccatagggatggccaaatatcagagcaggagctcctcacagcatcttacaaacaccccacaatcctcagggtcatcygtgtttaagtgcagttccaaatcaagcaggcgtgggagcactagcctcttggaggttcactcaactgggaagggtcacagtgcctatccgctagggctgctgtggaaacgacgacgaacctccagctgggatcacagtgaatgacacttaggaggtcttcagtacatttgcactgattcaacgagatggcatttccactctccagttgaaaaacaaaccacagacacactttaggattaaaaacaaagatacaaggaaccccaggagaacaaagctaacttctacctggcacagggctct

SEQ ID NO: 1017 - DNA, 598 bp, Bovine  MMBT13422
  misc_feature (1)..(92): n is a, c, g, or t
nnnnnnnnnnnnnnnnnnnnnnnnnnnnnnnnnnnnnnnnnnnnnnnnnnnnnnnnnnnnnnnnnnnnnnnnnnnnnnnnnnnnnnnnnnnncctggtgtgcactgcgcgtgctctgagccacttatctaaccatctatcaccattagacccttaggatcattccacttttttatttttcaaatgctgtgattgataccactttttaaaattttcccraaaagtctttgtgaggagaggatttgcaaagtagaagcatgaacatgcctcgccctgaaactattcacccaagcacagttgygatcatattgsccacagagctgttcgcagaccagaattaaatcctgtaaaattacactgggcagttgtagaagaggaaaaaacgccctggaaatagctcagaagtattcarattagaataattttcataattaaataaaatttaatttttcattcctattataaaagattatatcaggtttctcatttcttggaaaatcagagagaacttaataacaaataccataattatctgcaaagactgaaccgtgattaaattatcaggtggcagctcctcctaaaactacttcttcaattag

SEQ ID NO: 1018 - DNA, 600 bp, Bovine  MMBT13895
catttcctgcaaggatttggcactctrtccctgaacatgtaatatgaagcaacaaagcagaagtcatcaaaattggcaagaaatgggtgatgccattaaattttcacccacttctgatacttgaggacaagatcaaataacctgtacattaccacagaaaaaaactggactatccttgagtacaatcctgccaatgacctgagaagacgagcctgggggagagcgggtagggaggtgccaggggacctagtgaatgaccccatttcagaagcaaacgcggggatgtattcaatamattcyagtagcaccaagtcacatgaatctggatgcacaaattaaccccaggctggttttaaatcatctctaagagactgttacacatttcagggagatctgagaatgttgtgcacatgatcctcgctktgtgcaagaagatgcctgcctcaytgaaggacaggtggctgcctttagcaactttgtaagtagattaaacacaccaaagaagcagtgcagagttctggataccaggatgagacctgcagcyagatggaacagcacaggagctgcgtaaccttaaccaagtgctgcacattccctaag

SEQ ID NO: 1019 - DNA, 600 bp, Bovine  MMBT13598
cactggagaaccagctgaagaaccacccaggcgagcccagtagagactgcaggattgtcacaaataaaatgcttgttgtttgaaatcacatagttttgttacacagcagtatataatgaagcactccccatcacccttttagaagcaataataataatgagtatcattactgtaagaggaaaatggaaaagatctggaataaaaaagacaaacgtcattctaacaaaccgaggatactggacaccaagtctggcatctggccctgsagtgaacagagttctttctatcctcttactgtgytgcattgtgtatcatgtgtactcacattatcaagaggtttggcaagtctttacttacagtgcatgaccaccaaggactaaagtcctttmtactggcagcgtgtcactcacagtgtgaaacaactcagttcacaccgtgagtttctgagaaaatatttctcaggtcttataggagctgatcagcttacagagtcaactgatatcaacaagcacccagttgactcccaaccaatttgcgcaaaaattaagattctcaagtgggttagttttcgcatgtgaggctttcattgagatgctcttg

SEQ ID NO: 1020 - DNA, 600 bp, Bovine  MMBT13461
ggatgttttagaatatgtgcatccacattactgctgttgtgtcatttccttctttcctacttctaaaaaagtttgaaaggttatttaaatgcttttgtgaacacagtttttgaaaaacataggaaayacaactaaactttaatcacttagatattcagtggttcttctactggtccctggctctgttcccttttctgtctaaaattgggacctcctaggaaaggcttgcttgtattttttgaatttgtattttgtttgccttgttgcacttgctaaggcagcctgccaggactctttgtyctgcccttccaaagctccttytgtctccccagtcttggatttagcctggggttagtgtatttggtatatacactgacattaaataagcaccacacaatgtgaatttgctatgagaaaattctcaraattctctatttggagagaacggtaaagtgactcctctctttcaggtaacagatctgaggatgtacagctatatacagatgkgatgagtagtgtataaaaaatgaccccagtctacttwtggaaagtgttaagagatcattttctccatccttctctgcccccctcatccctcat

SEQ ID NO: 1021 - DNA, 598 bp, Bovine  MMBT13413
  misc_feature (1)..(1): n is a, c, g, or t
nctctggagtgctccatttttgctacttcctgagcgtgactaatgcaatttgtcccttctctgccacctacacagagtccttcccacttgcctcagtgctgccagagcgacctattgtgcaacaggaaatccatgctgatcaatgcggggcaggccgcataaggcaggcaaattacacgaatatgagttagggataactatgattaatcctttggccaggcatggcctggactcccatcatgccctggggcagctccgaggtgacggggctaaggacagcacttctgatggccgcagtgyccagccattcattaccgtgacgtccccatcacccagcctactgatgagattattgatcccaggaaataatcatatgagatgcatcgaggtaarcgtgggccattgtctgtaagcatttattggcaaaggaggtaagcttttcgtcattttagaagagcctcacttttttgaattaactgatggcatcttttcaagctaaacgtcagtacttttgttggaagaaaaagcagaggagagaggagaaaacaggaaggacaaaaacccaacgtgcagggaaggcctagaaaaatgagaagcc

SEQ ID NO: 1022 - DNA, 600 bp, Bovine  MMBT13468
tattgaaccaatgcagtacaacagataggacactctgacagttccatccctgggttttaaaaggcctgaatattccatttttgtcattttgatagtaagcctccatgtaaaatgtgaagactcttcttctgcagaggccacaaagacacagagattcagctagctccccctaattccaacaatcccatctgttgtgccagacaagtgagtgaggctatcacatgtcctaccattcgagtcaacatgccgcagccaataccacgtggagtagagatgattcattcccagtgagccctgtcyaagtggtgtaatcgtaagtaataaattgtcatgtttttataagtcatgaggttttgtggtactttgtcacacacaagtagatacaggcattacacatgtagtctctcttgctagtctcaagaaaacgtccctaatacagcctttcatacctcaaatcattttctcttgttaaactacactgctgtccaaatgaaaatattcatatattcagaagattgaaccaatatgaagatattgtacttgaattacctaaattatcccctcatactccacttggctacaaatgttcatacattcatg

SEQ ID NO: 1023 - DNA, 601 bp, Bovine  MMBT11989
  misc_feature (1)..(1): n is a, c, g, or t
naagaggcagtagttatttttggggggtggaggaaagaccattctctttttcaattagcacaaaaataattttataattatttcatcagctactactgcactgatttttaaggtgtgaggtttttttttttttttaagcatttaccttaatgctaataaaattaggtccaatgacaggtgaagaaattctgtgagaacaaactatacattaccaaactccgagtggtccccagagtggctggacagcgtctgtactgcgagggggtgtgttgcaaagctctacaaacactcttaaagggayacacgtttgtaggagaaattgcaacatggttggggagggagctttctccctgttagctgttaatgatctctgagacagtcacactcaggaaaggagctggttgatcaaactgtggtgggacagagattcaggaaagctttgactccttctcagagaggaactggagacctaagggggaatgatggtggccaagagctcttagtaggaaagcacatcacagccttatttttcctttcaaaagtgcttcccacacgtggtggaaacgctgcagacaccccctctgcagacctgttgctggag

SEQ ID NO: 1024 - DNA, 600 bp, Bovine  MMBT11818
aaactccaggagacagtgacagacaagggaaacctggcatggtacactccatggagtcacaaagagttggatgtgacttagcaactgagtaacaacaacaaaggttgactttggtgggtgcaattgttttactagttgactgcttwacagaaggttatttgcatgtgttaacagataacttccggagacaaggctarggttaaaagaaggatgccattccaggttctgtgtcagsctgtggggctgtgtgtgagtggctgtggttgtgagaagccctttaaaacactgttcatatcatayccttcaggccacagcctcctgtagagctcatgtcagcccttggagtatatttcagggtgacagtcttttctgcccatgctactggacttggaatgagagagtagatgaaatgtaaattcagatacrtgtgggaatgagcagttgcttcttttgaatagactggcatggagttgaagatacaggtgacaggccagggactggtgacatttataaattatcagattctaaaattcacatgctaacaggattattttaaagaggcttakctttctttggttgtataatgtcttattctttcat

SEQ ID NO: 1025 - DNA, 602 bp, Bovine  MMBT11709
  misc_feature (1)..(2): n is a, c, g, or t
nnttggaacaaaagctgaccctccccaggactgtgctctgacctctgcaagccctcttttstatggcaccatatttaggcggattgacaaaggaggattttcactcagcaacgtagtcacactgtctgtccgtcagccagcgattcagtccaggcagacttygcattgttgaactatgcagttattttaagatttcactgtatttatagcattttataagaaaaaaggaaagaagagaaaaaaaaagcttatacttggggtaagaaggtgcagttttcagacaggagactccagacaaatayggaaattcttgggggccctgaagtgacacgttttagccacatttaggggcctattggattatggattcaattctgaagggaaccratatagaataagtgtgcaaggtcagagactcctcagcgatgattgcatctaagcagtgacgtgaactcaggggctttgaaatgtgttttatcacaraccaatgcagcacatacattgctggacatgaatgtctcatgcagtttcatgttaaagagcgtggtggtctgttgttcacatctcactaccatttttaattttgcagagtctaagtttat

SEQ ID NO: 1026 - DNA, 600 bp, Bovine  MMBT12035
acacaccattctcccatccagaaatggtttggttattacttgaaattcggacataataatttyttacaatgttatagcaaaggtggagctgtttagaaatcttctcattttcagaggggatgaacagggtttctttactcttggaaaaaaaagaagaattagtttttcaacataatggaaagcaggtgcacaaagaggtactgctgtggagagggtcacgtgaccccgcaacagggaagcgcagtggtgccgccgggaaactcggaaattctcctacaggctaaacatcatcagtgtggygctgacatagcaacagacattagtaagcagcaaaccagaaacaaactgcagctgtgacttacatttcggggactctgcatcaacatgaattcactcccaccaccaccacttaattggacacagcagtcgtctcctacagctgagtcctagctttcaactcaacctctccacacggatcaaaacgactgctgaggacgtgaacggggacacatcacttaccttgtctaactcgctgcactgacctcctgctgcacagagactctaagcccctacgaaggtggccagggccgcacacggctc

SEQ ID NO: 1027 - DNA, 600 bp, Bovine  MMBT11768
cccgtacagaactgccgtgctgtgcgtgtgccttctgggaacggaaagtcacagcagaaacattgtctttgaaccaaagcagactcttgagtcctgacccatcatcctgcccccgaggactgaggacagacagggaagaggctcgagtccatggagatatgcaaggaggtagattctgggagggggtgagagcctcggaggcctagaggagaccaagaaagatggcagaagcacaacatggagcttatgaatgtggcttgggttgtttgtttcattatttaaagttttcattcctgtggycttgttgttcctcagtctgaaagtcccccagactcactggtttgtagccggatttgagatggttaattcggtctttctccagaggaagattggggaggccctaccggaaagactaaagacagacagacagacagacagctggaggctagtggttctgttcagcagatcctcataccctagtggcatgatcatgatccaaacagattttcagtcaagctcacagggctgagcttcttcaggaagttggagtcatgctaaccaaaatcccaagagactgatggagaagccggaaggtggtgg

SEQ ID NO: 1028 - DNA, 600 bp, Bovine  MMBT11482
agggagacacagtagaatctggagctaacatttggaytyacccgtactggcggtggtgcctggggaggctgccccctgattcttgcaacctggacccctggcaacatcttctttcctgtccttcttgaggtctggctgttctctcctgagccactccgaggcattctaatastgtattgttattattaatttttcttgcttaagttagaaagtgttggtttctattatttgtagctaaagaatcggaactgacacaaacccaaatgcccagcaatcggggcttaaaagcatgatacagcycacgatggagtactatacaccaggtacagcaacgagacacaggcacagaaaagatgcttacaacatatagtttagtgcagagcagattctaataaaacaggatgccatggtatgatacaatgcttgcaaaatacactctgtaccatcatagaaaaaggtctggaaaaaaatataacagtatttattctggtgctgacatattcagtatttccctgaagctgggaaatactgacagcaaaaagaagggggcagcagaggatgagatggttagatagcatcactgactcaatggacatgaat

SEQ ID NO: 1029 - DNA, 600 bp, Bovine  MMBT12254
tttcgccggaaaaaaaaaaaaaaaaaaccctccatccacctgacttctgctttatccacttgctttgggatgaaccaggtcagaatgtcaggaaaagagggtgctatgtaagtcctctccactgaatacagactcaagtgggtgatacagaaccatttatacttactgaatcgctaggatatgtcaggctctatgccagactttaaggatcagaaggtaagtaagacactgtccttattctcaagagtttacagtctagaggcagtcacagctgtgcaaataccagccagggcagactcygataaagatgataagaaagatgcagagaaacgggggaaataggaaataggctgaaaggcattaaggaatgcttctggagggtctgtcatttgcactgggtctagaaggatgaatgggactagagagatggcggaggggggcagggggaggggctgtcaggaaaaagcactgtagttagaacatccctgctgcagggggtacagtacatagtctggagtcactagtgggcagatatataaagagaagagtaggaggtaaggcttgaagagaaaaagcaggggccaggccatgaagggcacc

SEQ ID NO: 1030 - DNA, 600 bp, Bovine  MMBT13964
acacaggagggaattggtatcaaggaaaaatatccagagcatggttaccagagaagggatgctgggtgtgagtcaaacataaaagattgctaagctcgcatgagaaaatagccatgaaactctttgtaaactgggaaactctgtgtaactttcctaacttgctagctatttttattcttggtctggtgctccaagctgctgatacatctgatttcaagggccataaaatgccataggagacacctccgggagcgtgtggtcttgagatgaatgattcaccactccattttctttacccayggcagacatsgctaatggatcacagcactctcccatagagcccrggaggtgctcacagtccttctcccctcagctgtccaggcaggcactaccaagtgaacagagaaggaatgaaagatggaatcctttagttatccttcatctagcccacttccatcatgaaccagcatgggaaaaggtccagagaagggtgcgactgccccacttcactgagcaagtcatcagcagagcttggggacacctcgagtcttccaatttctaattaatcctggtaatatccaagatgactcatatggaggg

SEQ ID NO: 1031 - DNA, 600 bp, Bovine  MMBT11837
gaactgtttcatctcttcctcctcctcctcttcctcgcacctccatgtctaattttctcttcctcttttcagctctagtcccttccacacagggggagcaattaagacttttggatgctgatatgtgggcccaagagccacccctgtatccacatgacaaattctgttagcactctcagaggtggtgcaggtgagtgagaggcacagggccttggagttccgagaatgtccatcccaccactgttctttgtccctgagtgacttcagtccttcaaacacaagagatgtagcaggaacctygtgaaggcttcttccagttctaacctctcaaagtgcaatgcttctgacaccaacaggtctttaaaatacagaagcataacactagtagaaaagaccctgatgctggggaaaattgagaacagrgagaagagggaagcaacagagtatgagatggacatcatcaactcaatggacataattctgagcaaactcaagaagatagtgaaggacagggaagcctggcatgctgccgttcatagggtgacaaagagtcagacacaacttagtgactgaacaacaagagctcatggtggagttcct

SEQ ID NO: 1032 - DNA, 600 bp, Bovine  MMBT12695
ggatgaggagggctgctcacatgtgcaggggaagcccctttggggaggcggcgggaagcggcagcatggacccagccacggagcaacattctccccggaatcggyctggtgggtgtggctggtctgaaagggctcagacccgggtgtatgaggtgatggaagacctccttgtttggctgagctgsggtgggggccccggagggggtggggctgagctggtgcaggcagagcacttggctgtttggttgaggttgtgagatgcagctgtcctttgctggacactcccctctgctggggtcytcacagtcaagaggctccccagrcctcctcaagaccccatcccaggartctgtacttttagaggttggggtctccatgctgcctgtcgggggcccctgtggcttctggcaagctgagcggcctagggtggaggcccctggagctcatggttctggatttgattaggattttgtttgttcaaaagttactaggaacagtcttttttgttgattcaatttaatatgcatacgcatgtgcctatttggttttctccaccagaaatctggctctgcagagctgcgttggtttgtggccccacct

SEQ ID NO: 1033 - DNA, 600 bp, Bovine  MMBT12362
gatctaaacctgcacctcctgcattggcagatggattctttaccactaggccaccaaggaaaccccatgtatgttgtataaattgcaaagattgtatcttgctttctgcaaaagttaaagaatcatataagaggtttattaaagaagtcaatattccagcatgaaaataagagagttttcctaccaggtgttattattagtcaccttgacagatgagaaagatgaaggttgctacttgcatggggtcataagcaatgtgtcagaagtcactggggcagatggactcatcactgaggaaaygagtggagataaaggcatgctcttgcctcacaaaattttcacggctactgcatgggtgtttgtgagccaggttgactgcgtattagcattctttttcgcttggcagttcccagaagtaaaaaggttttttattgcactaaattctaaaaacatcatctaatgcagctggcggagatgtgggagagccacagaggaacaggacttatttgggggttttaatcagcagcaggtccagcatgaatcagcagcgtgatgcaactattaagaaacgmatgcaatcttgggctgccttgccatgta

SEQ ID NO: 1034 - DNA, 600 bp, Bovine  MMBT13610
ctgttaggagagacatgatgcctttcctaaaagaacctgtggtctaatgcaagagagtttttatatgtggacatcccacttagaaggggggtggatagaggagcatgcctaggccagatctatgagagctgtcaaaacatcactggacactgaatgagatggaatcatatctcctctaagcgagagtgctgagtgtgtttgaaaggaatagtttgccaagtccctggggtgacaggaggtgtaggctcttcacaaggatttaactcaaaaactaacggctctcccagacgtgtgggtcaygtagagcattgttttactgagtggaatttgcaagagsggtactgaaactcatggcccatctttttccatgcagcactcaacctctctcaaaggatactgaacaaatgcttcaaaaataccttttacctgggctataaagattaattttatcattgttctttatactacatatacagttttcactttatatggtacacaattaagtgatcattgcctgctttaaaacagtggcaaattgtttaaaatctactaattatattggaagaaaggaaatcctgtaataaattcaatatataatac

SEQ ID NO: 1035 - DNA, 600 bp, Bovine  MMBT12020
ctgcaatgcaggagacctgggttcaatccctgggttgggaagatcctctggagaaaggaaaggctacccactccagtattctggcctggagaattccatggactgtatagtccctggggtggcaaagagtcagacacaactgagcacctgttgggaatttwtcataataaaattacaagacaaagtgtacaaattcactgtcactcctcaggagagcccttgtgcagtgygcaacctgcccaaccatcctcagcaacctggtgtaccacatactctatgtaatgccacctccccacaccyggccctgccccaaataccccacatgttggcaaatctctctctcaggcatactggcagcccagaggggagagaagagaccacggcttacatgagctcttgtgttcccttctccgcggccgcctccgccccattgtggtccgggggctcatgggctgggatccacgaggcagagtgctggggttggtgcaagaaaaggtgtggttcacggtcggcgaggagaagggagatgaggataaggctggggagatgagagcagacccatgagcccagcagagccctccaccccaccccagggagaca

SEQ ID NO: 1036 - DNA, 600 bp, Bovine  MMBT12868
gatacaataactgtaacatttctcccaaatccttataattaatcactcgaattaatgataaattaagcactcagcttcagttcctagtaaagatcattattgactcatgtgttaaattcatcataataatctatttcccctgctttatctttcttagaaaaactgttcttgaagaccacttgctatttagtggtacatatatttggaccagacatcacaaaactgtgagtatactaatacattcatctgattcagttgctgggacatggtgggaggtggggagaaaactgggagatggcyggctccatttccagccggatgtacttactgtacacgacataagtcctatctggttcttgttaatagtagaaaattcaaacctgactcagatcgtcatcctaggcaaaggctctcttcaaattactgtgtggcaacttggctcagtttctctccaagggccgtttggaagaattttgaccaataatgccaataaatggggagatcctagtggctgggactggatgtctgcccccttctcttgggctttccctccactccctcctggattctcaggccgtatgcttctcagggtcttctctt

SEQ ID NO: 1037 - DNA, 600 bp, Bovine  MMBT14065
tcatgcttaatgactaaggccttctgagacacctcrctggaaagctgccctatggtttgctaactgaacgagcagggtggcagagaaaaggcctttactgttctttttagatggcctcacacatttaccctcagctcttggtaaagaagaatcgattcatctcacaacctccgctgttgccatggcacccacctggmtgtagctggagagaagcacccactgttcttgttcagtctctaagtcacgtcatactttgcaaccccatggaccacaatacaccaggctcccctgtccccgacyatctcccagactttgctcaaattcacatccactgaggcggtgatgccatccaaycatctcaycctccgccaccccttctctttctgccttcaataattataaaagcttacacatrtcaaccatacaggaactatttgttaataaatgatctgtcctaatacttacaaatgcaaagcataactccatcctggtaaatcaagtctgggaagacatagccgttggcttgaatttttgaggaaggttttgcggagcttgcacaggtcttaaaggaccatacagattgcgaacagtgcagcaaag

SEQ ID NO: 1038 - DNA, 600 bp, Bovine  MMBT12261
ggtgccctgcagaggcactacttcccacgctgactacccagccctctggccgctgactcatgagtatcaccacagtcccaatgcctgcccctcctaccctaagtcagtagtgactccctggaggcttacgtgtgggcgcctttcttcctcaccctggttgaggtggtaggggctgtggtaatatatttccaggagaaaaagcaggtggactggcttcatcgtcactgccacccctgtgcagctacagccctgttgagatacacgaggctgaacaggggctcttctctgacgtgggggacyccaaggtggtacatgcctggcaaagtggctaccagctcaagcgaatgcctcgctggtgtgaagacacgctctgacgaccttaaccggatcttcagaagcctgcggcctggagcgcgcaaggccgagtgagctgcggcttccctctgctgcttgtacgcatccagcgccccctgctggatactgggtgtcccttcctcctcccacccgttcccagcaggatcccaagcagccagcctcaccctcctacccccacatcacctctctcccctctaggccttcagtcctgtgggctctaagctc

SEQ ID NO: 1039 - DNA, 600 bp, Bovine  MMBT13367
aagatcagagtgagacaaggagaaacagagtcatcattcttactcttaaatgggtgaacactcctgctgaactcccaggctattgatcctctacatgggcactggagaagtttcgtgaagtccttttccagggaaattttgagattccttgttatgcaaagaatgtagtcccaagccaagaatactgtccaggctacttagaattcaagcctttctattatcagctaatgttgttttaaaattcaaaaccatttttctagcctctgctcttctccagtctccttctgcttcctctgatgyggtgtcccccaaatacttgcttgttcctgactgtgtccttcaggcttcgagcctctaatcattgttcatgtggttctcactgcttgaaaggtcctatgtatttcttgaaatttcttgaaactttattccatttcttaaaattgccattccttcagagaccaggttttacagtaaaactgtcttttatgcctcccaggagaataaaagacatcaagtcttttattgtcataaatctctgcaacaagcctttattatcccccttcttatggtttgcttttgactctactgagcctttctcac

SEQ ID NO: 1040 - DNA, 559 bp, Bovine  MMBT11696
gagactggcaagcctgttgctaaccaacttggcaggagacctttcaactgggcaaaatgtgctctcactttgttccaggtcagatgggtaaaccaagctgaaagtattgtttaggcagtcagacatactgaattactaatgaagtaaaaaacaggagcactcgggattcctgaagctgaaatactattggaatatcctattagaaacagtggtgatattctctactctttcctcaacctttcatgtgcccatgagattgataactgaggtcaaggccattctatgacaaccagagttttytattccatgaaatgtattctatttgtgcttttgctgacttctggatcttttagtctgttgacaaaaggccaaattttagttgacttgttaaaagatagggagtttataaatattcttgataaaggaaatacactctttaaaaaaaaacaaacaggtggaaagaagtacatgctttgccaacaaactcggggaaaaattggaaagaaatatttgcattctcagagttgtttttcacctactaaaagtttaaggaaagtaa

SEQ ID NO: 1041 - DNA, 602 bp, Bovine  MMBT11691
  misc_feature (1)..(2): n is a, c, g, or t
nncttccaaaagtctttaaagtcagagctgaattcatgccagataccgaagaaaacgtttggggacacttccttctctccaatttttggtctcatgaagaaataggctgtagtctccaaaaagctgtgaaagcacacacacacacacacacacacacacacacacacacacacacacacaagtgtaaaagctataattactttccaatatggggtattctttctccatcaaaaggctgatttcattcaggcagttactattaccaagaggaytcaactcctcaggagttctcttaaggtttyatgttacgagtttttggacacagatgttagcagcgggtaagagtcctccatatactatccggtaactatccaggtaamtatccctggtccatccaatttcartattaatcactatctgtctgacctatttcagaaatgaacctgtaatcaagttgggacataagggaagttgtgggtctatacctagactctaaacaaatgaaatatcagccctctgcccctaaactaacatgtawctatacgtgtattgtactgcttctatactatctgacttcctatattgctgatggggraaaatca

SEQ ID NO: 1042 - DNA, 600 bp, Bovine  MMBT12204
tctgttcctaatttgtgatgtgaccccaagaaaccttttgccctctttaagcctcaattgttttacttacaaaatactattgtgaaagcatgctgccctgtatcttggctctggcttccaacactctatcttttgtaatgtcctttaattaatttgttcatctattcaacaaatatatattgagcatcttccatgtttaaggcactggggcagccgctttgggactctaaaggaaattaagacattatctggaacttaaaaaayagaaacaagagctcttacatgtataaaaataactayacaataagccactatatgttaagtgttattgaatggtgcaaatgatataccaaacaaattctgaggatttgcttctggcaggctaggttagcagaaagagcactgaacaaagggtaaaacctcatctatagatccaggtctgccacctgtaaaatggatgcaataactgcagaactcacaacattgttgagatcataaaataaaatattataggagaaagcactttataaatgttaaggtttgtaattgcaaccaaagagaccagagaatgcttcaggcagacaacactcagaatgatct

SEQ ID NO: 1043 - DNA, 598 bp, Bovine  MMBT12531
  misc_feature (1)..(44): n is a, c, g, or t
nnnnnnnnnnnnnnnnnnnnnnnnnnnnnnnnnnnnnnnnnnnnccccgaacacatacaatttcagtcagctatacctcaacaaagctgaaaaaaaatttaaccccctccattattcttgcctggaaaaccccatggacagaggagccaggcaaggatcgaaaagtcattccatgtaagaaatacaggaaaacattagaaaaagtacaggtgaacaacagaatgaaaattagtacattcagtgtatgtctaaaccatgcaaatgctatttttatttatatgtaaaacagaatcattatcyaggctagaaaacaataaacaggtgatttttttggtctacataaccgtctggcagtacagtccatcctttagccctacccactacatgccacgtgcgcccccaaacagaaggggaaaaaaaaaacaggccctgcaaatttcyaacctgtcccaagsgggcagcactaccctcactgagaatccagcgagaggaaaggcgkggcagggacwgacgcttgccttcgtccgccttcaccaccaagccttggaggcaggagaacataaaaagcacgaggagacatcttcttacttctttatag

SEQ ID NO: 1044 - DNA, 547 bp, Bovine  MMBT12537
aagatggggaagcagttgggagacatgtggaaagaaagggatttgcaccaaatgtgaagtgtgtggaaacccattgctgattcatgcacatggtaccaggacagagaataaggatctcagcaggctttttaaagcacagactcaatttagtttctaggaggctgagcaaacaaaataaatgtattataaggagctgttaattacagaaaaggccaatgcttgccatgagttttaaagtagttccaatggtctgaagggtaaagaatgaaagaaaacaccctgtactgagagtcaataaaycctgccctggctttgccattaatttattgtgtgaatttggggaagacatttaacaaatctgggtctcagaatgatcccttcgagctcacatttccctgctgttataactatgaggaggataagcatcattgttggggaccatctagaaatcaaagagctaagctcaaaacaagcacagaagactatttgatctcaacagctgtttcctccccagttacatttagaactgctctataacagccatcat

SEQ ID NO: 1045 - DNA, 600 bp, Bovine  MMBT12569
ctgagatttcttatcaccatgatctatcaccaaaagttcaaatccacccaggatctgattacatagatccttccttgttttcactcactggaccacttttcaagttattttttaaaatttggtgtatggtatagtttgaggagtttttgctgcttttggtacagaagctggagaatattcttgtgtgaaataagaaagaacattttaccacatgcctgatgtccgatttcgtgggagacaatataggagatcatgatctttttttctgttagtttatcatttggttgcagcaacaataaygactcgtcaaatatcaagagtccccagttttccattgcacggttgtcaaaagtaggcaaagcaattatatctaagtggatttaaatggagggaaaatgaatcatctctttctaaagatttgagagttccagatacaacatctcaaaatgaaatcataaaattaccgaaataaaatgcaaatgaatatctatgacttaaggggcaggagaaaggcattaaagacatagagaagacagagtcagaaaacaaattgctttgactgtatgaaaattaaatagttttgattaaggacctatatcc

SEQ ID NO: 1046 - DNA, 600 bp, Bovine  MMBT11729
ctctcaagtcagattgaaccattgatacagaaaagtttgcaggagtatcttagcatccttgccaaygcagagggaagggggaaagagaagattacagagctttctaccagtgctcaggaagtaattaaaagctgggctgttgcagtgaaggaaataatttctgattaccaccagcagttcacatataaactacaggagttttcagaccagctctctgattactgtgaaaaattcatctctgagtctaaaagattgattgacctgtccattcaaaactaccacatgtttctgaactatatyatggagttgctgaaagagctacaatcagccacaatcaatgacatgagcccctacataaaggttgctccaggagagtttactatcaccttctgagtttttatagcaattcttcaattagactttcacatagtagggaaaaaactcaaactgtatgtattaatataacttttgaccaagccagccctataacagttataggcagctggctccaagcagaagcacgtatgaactggaccagcactgaagctggcatcagttctctgaaggtctctgaactctggggaatgacattttttgcaa

SEQ ID NO: 1047 - DNA, 562 bp, Bovine  MMBT11737
catttttatgagagcgtattatactgacagtatgtttttaaaaaacaatgatatcattagaggtttttaagtgaataggctgtccttaaaatgaactcatccaggatactttaccttaataatccttctgttgcttttgatagttcttttctatctactatacaaacatttgtctcattttgctatatccagtgacattgtaaattttaatctycagtcatacattatacacaattatctaaatgaaaactaaagatgcttctatagctcatatataaaatacagcatgtagtccctatyataaaattcagaacctctttctctgggagggtggggttatttttggtttgtgactatgtaccaggtggttgaaggtgcacaaaatctgggacatacttccacctaccaattcataggaaatgcagaggaacatgttaaactgtgccacgggaatataatcaacagaatctagtctgtggtaattttataagacaaatagatctgcttcttccatcataaactgcaaatggggggggggggagatggagaaaactgacaagtt

SEQ ID NO: 1048 - DNA, 600 bp, Bovine  MMBT12626
tacaggagagtggagagaggacatcatttggttaggatgtgtccaattttgacttttttaaaaaagaaggaggtatagaaaaaaaagatagaaagagggatggagaaagaaagagctgacagtaacaacccttgggtttcagcatctcagtttccttccgtattcactcattgggaatttcctctgtactttttctcagttgctattaatttttgcatgtcttttactatctcagttttgaataaatactgtctttttgcagaagacaaagtggtaaagaaatcgaggtcacactctttycccaacagattatgggttgtttaaaatgcarttactcttgctattgtggttagatggaaacacttagtarggartggaccccaactgtctcytaaagtgrtaaagggccttcacaacgctattcttgggataggcacaaccaaatttcagttctgtcatttttttggcaagcttttaacaggttattgaaattcttaaagaatatcatcacctctttttaaaaataacatttcaatctttaaatatgttcataatcagtagtactcgtttcttgaatacctaaatgtgtgactagaccca

SEQ ID NO: 1049 - DNA, 600 bp, Bovine  MMBT12078
ccaaacagcaggccattaaggatagtctcaatccagtttttcacttcattcccaagggtcctcttccctcggtaccaccagagtggcatgaggggccaggcctccgggacttttgtcaggacccgcctcctgcctcctgagtcaagggcgagttgaatgctagcagcatagaaaccttggaaagcactcttgggtaattgtgaccgtttattaaggtacaatattaatgcattgtttcacgaaatcctgagagcaatcttataaaagaaaaactactgtctttcttttagagatgaagaygaggggttttcagtgggcaagttacttgcccagagacatcaagctagtgaatggtgaagccgaattcaaatccagatccagctgatttcaaaccccaaactcaactgctttattacactgctttcggccagggactccacttcatgctgcctcaagaaaagcatggcttttgccttctttacatgagttgctggaggcacgtgggacattttggcatgctgaagggcagctttgacactgaaatcccacctcagcaaatggcagggcatttgcacattcaaagaaacattccagtccctg

SEQ ID NO: 1050 - DNA, 600 bp, Bovine  MMBT11743
cccgagttgggaagatcccctggagaagggaaaggctacatttctgagttgggaagattccctggagaaggaaaaggctacccgctctactattctggcctggagaattccaaatacagtccawgggctcgcaaagagccagacacttctaagcgactttccctttctagtacaaagtacaaaattcttttagctccactttctatttgtaaagcctccaggcctttttttctctcctaagcctctgtttgcccaraagcaatccaaagcctcattttctaggtctaatcaataccaatycactttatagaacccttcctatttcagtctcattgtcccatttttgaattctcataacactcatttcataaattactaatatttaactgttacccttcatttccctatgccttttyactaaaaatsattagtttctagagaaaagttggcaatttctttgcaatttccttctcatctaacacayaagtatgcaacaaacttctagaaaaagattacaccaagacacttcgcatctggcaaatatgtaccctggatacactgcatacattttgggtcatctttgttggaacacagcagcta

SEQ ID NO: 1051 - DNA, 598 bp, Bovine  MMBT12713
  misc_feature (1)..(91): n is a, c, g, or t
nnnnnnnnnnnnnnnnnnnnnnnnnnnnnnnnnnnnnnnnnnnnnnnnnnnnnnnnnnnnnnnnnnnnnnnnnnnnnnnnnnnnnnnnnnntatatgaagttctgagaaacaaagactaatgagtactgatgaggaggaaatgatcaacaaaatgcaattctgctgatagatcacatgaaatgaagacataatattgacctttggatttagcaacattaagggcattrgtgacattttcttaatkttatggagagatgaatgtgaactaagyagagaatgrgagaagaattgaagacaayataaatagcaattcttgagggattttactstaaaggagaatagtgaaatgaggctgtatctcctagggggacatttatctttctatctgttaaaatatttagcttgtgtgtgtgtgtatgaaaatacagctattaatataataaataaagggcaatcagccagagaagagactttataagagtcaaaaatgggaatgccaaagacttctcttctaatgtgagacattttaatatggttttggaataactaggttacagtctaaacaagcctgtgtaatggagagtattagataaggct

SEQ ID NO: 1052 - DNA, 600 bp, Bovine  MMBT11800
attaaagatatagagatacacacataaatacacattacatatatatgcataaacatatatagagaatatacatatatacatataatatgtttcagtaatatatacatacaaagtccctaaccctaactattcccctacttcaataaatgtttctttacttggtgtagaaaggctacaggtactaagtataaatgaaaggtactaagtataaataataatacaaactttattatccatgaaacagacatggaatcaaagaccatgtgtacaaaagctctgaagtggcccttttaaaaatgytaaacaagtaacaaragtgraatggacacactgctaaagatgtattactcgatccaaaactgcattatctagacaagtagacacttgtttctcagtaattatgcttaaaatcacttttttaatgtaagaatgctccataaggaagacattttctcatccttaggtcttaacctgagcgtttgcagtttcacacaacttcttttctttacaaagaacacatctatccttgttaaaaaatccacacagaagtcataaacgcatgtaagagtcattaaatggtttcctcactatttagttttt

SEQ ID NO: 1053 - DNA, 600 bp, Bovine  MMBT12733
tcaacagcaataagagcatccaaaccaacaatgaattctgcagctaaagtctcaatgaagaaggggagagattccccttttcataggaacgttcatgggaaactcacaatgtgcaattgtgaagaagagcaacaggaaacagtttggttttttcatgggaggggttggggtgcagatctttgtttaaaaattaaaaacttacccttttagtcaggaggatatccctgatctttaaccagaaaagctttaaaactgtaaggaaaaaaataaaattcatttgagggcaaaatattctggtaytgtaaagatttacattgatccagtgggttttatctgtaggtctagatctataaaggcacaagcctcacttcayaggaatgtggttcttcatcatttgcacaaagaaaggatggattgcatctaattgagttattttatttatttgtattttatttattttcacataggcagaaaaagaatgcacacacatatgcagaaacaaatagcataaattttcacttttcatatatatatccgtgtgtaaacacagaagcaccctcacatacatccagttttgtagcacacgtggaagacacagta

SEQ ID NO: 1054 - DNA, 600 bp, Bovine  MMBT11625
gacattctggaccggtaagtcgccttgcaagtgtaaggtattccgtccttacacttgcacttaaacttgtgatccttcaaatgatgacgaaaggctgggcttcaggtcaggcaatgtaggttcaaatctgggcttgacttctgaagcctcagtttccttgcctacaaattaggcataacagctaccttgtatattgtaaggattaattgtgatggcacasacagcaatgctagaaagcaataattttaattattgtaggccaagataatctgaagggattcaattatttctttccctgcygtaacccatgaagtacaaccttctaactctgattaatgcgccaccatcagttttatgagagtgggtttagatctgataacaaagtgggctgtcttcattccatttatttctgtgaagtcttgagtttaaatggttgaggagggggtgttgggaggggaaaggccatgttcttgttttaaaaaacgttaattttcagttgccaggctgccagaagtgagccagagccttctattgtactggtcaccgccagcaccagaggtagggatggcacacggaatagaaaatagaaaagctcagttc

SEQ ID NO: 1055 - DNA, 600 bp, Bovine  MMBT12759
gattcagaggtatacatttagcctagtcaacatagctcatagagcaaaaggaamcaaagaaggccaaccccaattaaagactcaattttactattgctattcattatcctaacagctatatttatgtaattactaaatgcaatattcttgcccatctgccttttcaaagaattctctggcacagcacagatgatacgaaacttttactgacctctccacaggygtaacacatagcagctaaactgaacaatttcaacaaagctcccattctgacatgctacacagaagcaatacaacacygtaactagtgccagcagtgataggaaatatcctaacacaacaatcaacattttcactgtggcacaacagggcttgttcttggccccttttctaatttgttttttattcatttatagaccaccatgatttttttaacaaccaaattgtatggttttattttctcaattgcgagtyaacctgaacagactattggccctaattatggacagaattaagaactggaaatcaactgttttgtaatgaaggaaattattactgctaaatatacccaactttttaataatatatggtaattagccc

SEQ ID NO: 1056 - DNA, 600 bp, Bovine  MMBT11977
atactctggctgcagagtcccatgatgtcacaggccaggaggaatcacttacaaactcctgggaaccagagttgttatattgatcagctttttgttttaatattagcaaagagttgtttcaaaagcaaaaattaatatgagggagcaaaaataataccattgcagaatatttccctcagcctatctctatggattttataaatgatttttcctccaagtcataacaactgagggtctgctcactcttcttccaagactataccttgatcctttattcagtcagtaaataaatattcattygatataaatgtattaagcatcgatcaaatgccagtcattgggcctatctgtgggaataagacatgaccctgaccacagggaagtgaacaatctgtttgaggaaactcaaatgccaagaaatgataataagtttagaataaagggtaaacaaaaaggttggcttcaggaaaagtggtaatgaccaattctggttggagacttaagtaaagcttcacagaggaggtaacatttaggtaaggtcaagcatgattatatcaagatagtgggagagagcattcccagcatcaggaacagcgtgta

SEQ ID NO: 1057 - DNA, 600 bp, Bovine  MMBT11971
acaaatagaaaaccctgaacagcagaggttgtatattctaaattagcagtgggtcacaagattcttttctcttttctagatgaaattatgctgtttggacgcttgtctggggtcatctattgcatgtctcaatttagtgctaattgctagaccatcatttttgtgtctattgtaaatttcctgaagattttggaaaccaattaatgctcaatcctgagtgttgtaaagtgttggtttttattttgtttctgtaggcagtcaggaaggactgagcaggkgattttaacagatggcattttygaaccgaaagaagtgagaagactgatttattagccacctgataacacagtcctttgttgctgtttagttgctaaatcatgtccgactctgmaaccccatggaaggtagctctctaggctcctctacccatgggatttcccaggcaaaaatagtggagtagattgccatttccttctccaagggatcttaccaacccagggatccaatccccatctcctgctttggcaggtgaattctttaccactgagccactagggaagccctggcacattcctaagttatacaaatgcctttgtatct

SEQ ID NO: 1058 - DNA, 596 bp, Bovine  MMBT11967
cttgctaatgagcaggaggggactgggcaccttggaggcccctgcaccatgtgtttacagactcagattccacctctgctctttggagaaggctggttcatgctgctttctgagaaactggagaagtaaagtcaatgctatgattattgtctttttttttttttttttaatacgcagagcagagccatgaaagcctgaactggtttagtcctcttacatttaatgttggtcaggtaatccagatcacttttttataactctgttgtatagacggggagggtcaaatatcacagtgaataytacagaccacatttacttcagatatgtccttggagattgttgtgattttctttggagaatgagcttataggttgagtgagctgtggatatgtggtctttctagtacagatcaccatgccccattattacctcactcaatggtaaattgaagtttcaggatttcgtttctcttccttatctgaaatttggctgtaaaaaatccctctttgaattgccttagcactttttcacaagccacatctcacatataactctctgtgtcttctcacagacccaaaaactaggtttgagtcact

SEQ ID NO: 1059 - DNA, 600 bp, Bovine  MMBT12809
tgcctgggaaatcccacagacagaggaacctaatgggctatagtctatggagtcgaaagagagtcggacatgacttagtgaccgaacaacaacaactgccctgaccccactctattattaaacattaagaattcatagatggtgtttccagaaatccctcaagtctgagaagaggtgaaaattatgttgcatgggattttttagagakttgaggattaaaataagattttgatgactttctggytaatcctgacgatacatgaaaatcaattttagtggcactattataactyttcttayattatacagtttgttgtatcctacaaacaacttaggcaaataaaatgagctaacattgtggagatatataaggcttatggagatggtgggtgttatttgaatctaaatakatattccctaaaaattgatgttcctagttacagccatacctttaaaacattcataacaccagttaccagatgcattcatatctgttgaccaagcactggaatattgactctgtcaactcaagataaagaagcagagataagarttatctgtctccaattattgtaactattgcatctttatttcctttcc

SEQ ID NO: 1060 - DNA, 575 bp, Bovine  MMBT11675
ttcccccacacctccccacaggaaaccaaaacctatggatgctcaagtacttttataaaatagcgcaacctttgaacataaccgacacagaccctcccacatatttcacctctaggttacttataataccttatacaatgtaaatgctaagtaaacaggtgctggcatgaagcaaactgaaactttgctttttggaactttacggaatttttctcctcccaatattttcaaaacrcagttcgctaaatctgcagatgcaaacccacagatttggagggctgactgtacaaattcagtgayaggcatctacagctggaacccttaataggaaattcagtctgcagaaaaaagcattggtgtacttaaagacaagaaggcacaaagaggtccaacctcccagaaaccaatcgtacctcccacttctccatttgctaattcatctgattcacttcctcctttattttgatcctcagattcagattcacaatctaaccgattcaactgtgtaatgcaattagtcaaagcctagaaaagaagcaataggatatttattagaaacagcctctcaatttcaa

SEQ ID NO: 1061 - DNA, 600 bp, Bovine  MMBT11957
ttttagaaatagtgcattcagttttcttatattttgaaattttgttggagctcagatctgtcacatataagccagtaccaaagaaactattctggcaggctgtcctagattcaacaaaaatttactcctctgagtcttgaattccttgacaataacaaggatgttaaccacaaatttggaaaaggaaacttattcatatttcactccatcatcaaatatgttccttggcttaaaaaaaaaataccagaaaatgaaaacatggtacttccttgtagtaggaagacaccttgtacctcacayggaaaggcttctgaaccttagtgctcagaaagtgaaagctattgtgctaaacaacaatgccaactctgaggatacagattttaagtaaaaggttagcaatatctcttttaaaaatgtcagagctcttttgagtcaagaacatttctcacagaatgacaataaaaatgccctgtgacttcctgtactttcattgagacttcactaccttgcttccacccttttgccaattgctagacaaagtgcttctaaataggaccctactaacacaaagcaaaagggtctgacctttgattatctgaa

SEQ ID NO: 1062 - DNA, 598 bp, Bovine  MMBT12870
  misc_feature (1)..(40): n is a, c, g, or t
nnnnnnnnnnnnnnnnnnnnnnnnnnnnnnnnnnnnnnnngagtaagagagtcccagctgtgaagatgcagtgactgcatccctaggtacacacagcactttcagggtcttacactggttctaaaatgatataaggatgataggagatgtgttatatgaatttggacctcaggtttctccatttctataaagaagaaatatcttttcctttttcattgccgttaagataatatgtttcctgcwttaaaattaggatttggatacgtaatgttttaagtattacagagcacttttacttcycctcttataatactgatgtgtcaggttctaggaaatattttataaaattagcattttaacaatcagaaactatcttttataatttatgaaatcctgttatgctctcctagcaaattttaattgtgatggcattagtaaagtaaagtggtttatttaggttcactagagcactaatctgattagggtatgttcaattctgagttaatttatacaaatatcttttattcagaatattgtaacttggtcataaaaatgtaactcaggggtaaatatgccaaaaatatgtcctagtcttttg

SEQ ID NO: 1063 - DNA, 600 bp, Bovine  MMBT12040
aactaatgcatttgtttgggttggttgcctgagagcttttaatgttttaagatagaagagattttcaaaactctttcaccagtgttatcttatctgagttgtcacatgttaaatattttaaaatcagcagatataaatgaaacaaaacaaaacacagcaaaatacttacaaatttagtactgcaaaagtttttcaacaggcattatatattcaggattctaagctctgtttcataaatcaagcttttagtaaaaaaaatacttataaatgcaaatgacagaatcatagaaaagcataaayaaacccaggaaaattacaaaattcagaatatgaggggagcatttgggaagatacatgggacttcagttcttctggtaatacgctatttctgaagctgggcgacgtggacatcggtatttgcatatacggcttttctcatgttttaaaaatatttcttaaaaattaaaagcttagtacttgccttttcccagctctgtagtggcacataaaaaaggattaccactctaaagcttaatgatcacatctgaggggtttcacgtgccagaatatttggcagtcgtcgtgtgcagggacttggag

SEQ ID NO: 1064 - DNA, 600 bp, Bovine  MMBT12356
tggtacccattaaataataactctctatgccctccttccctcagccacggcaaccactatgctactttctatctctatgaacttgactgctctaggattggcttaagatacgatttttttgaaagttaagattataactctcatacaaatataaaaagattatatgtcagaggttttacttacctcattaattaatgaggaaaccagtaagatgttacagttagatcacagaagaactcaacaaagcacacagataggcaactaagaatgctggaatgaatttagaaaaagatagaaaayggtgcaaccacaggaaggcaatcaactgtatttcactggacacaattcatttccattcctaaaattgtttacattattcctcattttctacaacttccataatatgtgaaacagtccaaaaacaatggaaggaaaagaatgctgttgctgtttactcgccaagtcgtgtccaaggcttttgcaaccgygtgsactgtatgtggcctgccaggctcctctgtccatgggatttcccaggcaggaatactggaatgggttgccattcccttctccaggggatcttcccaacccagggattga

SEQ ID NO: 1065 - DNA, 600 bp, Bovine  MMBT12913
cttgcctggaaaactccatggacagaggagcctggcgggctacggtccatggggtcccaaaggaggtggacacgactgagtgactaaacaacagcaacataagatcagacagttcgagtctgctacttcagagatgaagaaaccgaagacaaaatgtgttaagtaacttgctcatgatacwtaggtagttgcacagtcttcatcacaactttgctatatggaacttcacctctttatttcttagcagcctgaaagactctacatacaattggatcagtaaggatttgggactttcrcacycagtcactcactcactggttcaacatgcacagaacagctatcatgtgtcaggcacagtgctgcgtactgggtaggaagacccgagctgaactccttgtctgtcacaaagtatgtgtgtgactttggacaaaaatgtctttagatcccagcttcataaaaacttcttaacacgaagacagtaacatcaacttctctcacaatggtgaaaaattaaatgaaatcactcaggaaatgctgaatgatgtctccaatttacaggcaaccgacctattacctaacgtgcaaaccatataaacaaat

SEQ ID NO: 1066 - DNA, 435 bp, Bovine  MMBT12919
gccatgaccttgggccagtcacctcacctcataggcttgcagcaactcaaaagcacaggagttgaaatccagagcctggtatgacttatgactgtgggcagaactctttycagcagcagactcttctgtcagaaggatgacgtcagaccagaagttttctaaatgaaactccagcattagcattcttcatttcgagaattagttaacaccagagttattttccaggtggaagtttttttaaatttaattgttttgaatgacacctgtcccttcattcaccactccacttcatggtacttyttytgggatcattgaactgactatcccagcacagagaaagtaaaagtattagtctctctgtcgtgtccgactctttgcgactgcatggattggtagcccgccaggctcctctatccatgggattctccaggcaag

SEQ ID NO: 1067 - DNA, 600 bp, Bovine  MMBT11864
ctagattttgtaattctcaatttcttggtttgatagtaatttgtaaaagttatctgcctttatttagtctttccaggatcttcccaacccaggaatcgaaccaaggtctcctacattgcagatggattcttcaccatatgagccacmagggaggcctaaagtatctgacttagttgttcttaaaatatctcagtatcttccttttctacattcctgtttggatcatttatgtaaagattaaattaggtaattaaattaagtacagtttggaaatgttccccagctgactttgrtaaagayttagcttttggtaggaacagagatgagctgcaggagaagttggctcctggtcatggagtgagggggtccttctgtggagctaaagctggaatgcagatttagattttccaggggtctttaaattaggtcagctatagggtcctgctgtattacatgttactagttggagttgcctaattgaaatttttaaaatttcaaggctgtgattatgaatgctacagttcaccagttatgtagtttaaatattacattaaaaaaagaaaatccttgcttctagtgttattgtctgaccttgataag

SEQ ID NO: 1068 - DNA, 600 bp, Bovine  MMBT12945
tgaagcaaatttctattagacggagattattttccaggtatcaattcagctaaactattagttccttaatggttctttttaaaaaactaaataattaaatttaaaggacttttttgaatgttccctcaaaatgtatccttattcatggtgacctttgtacatctgccaaattactagcataaaacacattggtctttcattgcattgaytcattttccttccttaaagatttaggggaactcagtgtataaatattttaaaattatttcctagaagtttccttggccttctagtgataayagattgcccttctgggtcaatctcattccacccataggtcctagataacattaaaaaaatacaatactctcagattgttaaaaaaaacaaagtcaccatcctatgtccaacacagcataagcactttctccttaaaccacacccattactggtagaataccatagtttgacaaagaaacaaataaatttaaatgcaccttatctccatcccttgtttaatttcattatcaatgcaaaaagtctcaaagcatatgttcagaaaagcaagccattaaacaaagagattcacacttttttttt

SEQ ID NO: 1069 - DNA, 600 bp, Bovine  MMBT12958
tggaacatatctgtactatgctatgacaggaaaatatctgtcttacacagacacagtaacagagcatgtcaaaataattataaaaatatggaagcttcttagaccatggctaaatgaagttttaactcatattatcctcctaacaccattttattgttaactgaacagccctgttgaacacactggcaataaagcacagactaacaattcatagaaaaatgaactcatgagcataattttgttttcaaaagggagagagaattcataaaagctaattatttacaatggtgtaagattttyaaacmatagagaaaagagaatgtgttttgaactgttttcagttgtgcatgcttacagaaataatggtatgcttaaacattacaaaaataatttgcttttcaaattatttttatcattaatgaatttaaatgccaaactcttggtaggaaaagttagactgtcattaaatggctgattttgtttgtacaaaaccttaagaaaaaaaggagttggcacttatcatttaagtccataggaaacctgactcaggaatgaatgggaaattttatacctgagatattacttagattcaaattaaac

SEQ ID NO: 1070 - DNA, 600 bp, Bovine  MMBT12959
ttgcacaagggtttgcttgagtctaaagtcatcctgaatcatggaaagggtggttaccacaagacttcataaaaatcttgccttagccctcttagcctaagatcatctgggacatagctgtagtccaacgagatcattgactcactgcagtgagggtgaccacacactagaggaaccattcatggtcttcctcccaatgaaaggaaaatagagttacagaattttggaggaggagggaattcaggtgaaatttaaatgaagtaacattttgataggttcaaagcagaacaggactgtgtytgaaatgggtcaacatgcctgcaaagtggaccatggtcctatttcctaggaaactgcaaaagttgagagcagtgtggaatgttgtatccagaagcctctttcagaaactctgcaccggggctgtaaatcaaggtgacttctgtttgaagaacaacttayatcttccaggcaagaaggaaaggcttcattataactagaatttcaagcagcaaagtttctgatagtttgattttagagaatgaggtttctccatgaggaagaagaatatccttgacaaaaatatagcctcctgtctgttac

SEQ ID NO: 1071 - DNA, 600 bp, Bovine  MMBT12961
ctttttttagtatcaatacatcagaaaagtttaatcttaaaatctaaagaaattaatggacctacttctgacatttcatacagaattmtttttaaattattccctaaagctgaacattacagtctaatatatgaatgtacacccatttgttcaagcaatactatgccttttagtatcttctttgcttcataaataatattagctagtcacccaatgcattagtaaaattaaatagtgaataatagcttatgatttattattgtctttaaaactctccaagaacttaattacagtagttayattagctacagtagtattcattacattagttcttatataattttaatcttgaattgactgcttttcataatctttaatgagatttattccataatttatctcagttttataatatcctgtaagttcatatttaggtaatcgtttatgtaaactgaaaaagagaggcagaatttctgacagaagtgaaatctaatttgactgactgtgctgtctttgaagatatatatgtaagttcacttgctcagtcatgtttaactctgtgaccctagtccaccagactcctctgtccatgggattctc

SEQ ID NO: 1072 - DNA, 600 bp, Bovine  MMBT11782
tccattcaactcctttggaataattttcttgaaggggatttcatgcaattgtgttttattaaatttcagggagtattcccatctgaaagaattaaaactaaaagtgaatccaggtaagtagaaagtatattaaaaatatcaccagtcaatcctaggtgaggtaaatcctgcttcagttttgtttgttatcgacagagaaaggaatatagtggcagtagagatggtggcattttatttgctttttgggtttttttwaaattaaattaytttaattcacctaatacttttattaaattatcyttcttagaaggtaaacaaacctggctcttaaaaaagaactggtccagggagcacggcttctatgyatgaaagctatttaatgatatattaattccactggaaatgttagcctatttatcaaagagaactgaaggacaaaaaaaaaaaaaaaaaaamcccgaataggaaggaaatcacatcaggaatgcgatggggtggaggcagtttgcaaagggatgtctcagaaagaaaagccacagtcactggtgaggcctcctttagaaaatgcagcagccaacccaagcccttgatcttccgcca

SEQ ID NO: 1073 - DNA, 600 bp, Bovine  MMBT12986
gattattcatttttgaaaattgttcaggggtatgttcattgttaggaccttggactttggagtcagtgcctagctatgcattccaggtctgccattttctggctgtgaaattttggacaagttacttaaccactttaaaccccagctttaagaagtaaattaaccccagtaaattaagaagtaatagcagccacttcgtagagttgttatgaggctcagatgcagtgcaaatgtgtataaagtattcagggagtcacctggtatactataatagacactagaatagttgccaatattatyagcatacaatctgaggattctgtcagccaatcattagcaatctgttgtttgttgggacatgccagtgttctccagttgaaatcartagcaatctaaaaatggatagattattcctcatttaaatagtgtgttcatataagtgattgcttggatccttatcagaagttgctgttactgaaaaatgataaggctgactaaattgtgatagttgtcagttactaaccaactcccagaaatgaataagaggaacctatctctagttcctagtagaaggtatggacaaaatagtaggtgaaaaat

SEQ ID NO: 1074 - DNA, 600 bp, Bovine  MMBT12995
ttgatactctaacataccagcattgaatgtgaggctccttgtgttccaatgcctttccaattctgtaaccccctcactcctcctatagaagaatattgctccttcctaagtgaactatatgctcccaagcctctggatctttgcacatgctgtttgttctaatcagaatatgcttcatcatcttgtcaacaaatgttctttacacgctgagctttcagataaaattagaaactgcatgttctgttattgaaatgctctacatgggtgggatgttgcaaataaataattatcttgttgttytgcaccctgaaaatttcaatgtgtggaaagaagaagcacatacaagattggtggggttaaattaaaatcctataaagttctgcatttgaattagaagcatcactattgtcatgcaagtgtatgctcctcaggttttgtctcatcacaacaaagatttggagtgacagaaattaaagccccctcggcgtgtcacagctctcgggtcttggacagaccgtgttatagctgtcaggtctcaagcggaccgtgttatagctcttagacaaatcagtgttacagctcagtgttacagctctattt

SEQ ID NO: 1075 - DNA, 600 bp, Bovine  MMBT11817
ctcactagagtggatgatatttcaagaaattatggagcattcacacttctggttattttatctctaaactttaagtttttagttttagaagtcacttaataaacattgagtggcatgcatcattatgcaaaagatttccaagcccctctcgattctttcactttccttaggtagaatcttttattgaggctgttctgtacttatgctttacataacattaagccaaagaacttggtgtcttgatcatgaaaggccatagacagattgcaagccttttctgaaagggatgaaaataaatgyattttcattcatttgtgctgcctgctgtggacaagaacatcctgcagataaaagaaacaatatttttgagctgcagacttagcctcaaatgtaaaagcattactggagtgcaatgttttaaagcaaaaagaaaaaggaaggaaaaataagcttttataaaacttcagcataattttttttcttttctaagaatatttttttcactttgtgttaacagagttactggaaatggacaggattgtaactagaatattaggagaataagattaatgtgaaaaatgcaacagaaataaaatagaa

SEQ ID NO: 1076 - DNA, 600 bp, Bovine  MMBT13028
gacaaaccttgtaaagttatgagaatatccctagtctgtgatgttgagggcagtgtgtccattcttcttgtctgaatagagcacttataacacctgtgtttgcatattccaaaccaaacatcaaccctgaaaatcctccgaacaattttaaaaagatgttttcgtacaaccataacacattttaaaaaataaataaatcacagggtttaaaaaaaaaaaaaagattccaataaaggacgaagaaatgaggtgagctccatctgggacatgaaccattccttggccaaatctgatttccaygataagggtctacaaaattgcttgtcatttttctcattttcagcatatcttgagggtatcaaagtggtgacctcccttcctgtgtttctgttgtaaaagggatttgttaatctgtctggttatcactggtatcattctattttgtatagacgtggttgcctatttcacatgcaggctgctccatgcagtgcaagtgggcatttggtgatgatatcacagcctcagagaactgccgccctcactggtgtatctcaccaggtctgcttttgcagtcggagcaaatgcatatgttatccccag

SEQ ID NO: 1077 - DNA, 600 bp, Bovine  MMBT11794
atgctacatgtgcatcatgatgcttcacattaacataatttaaaaataattacctacaagtctggacccattccctctttgtttttcatgttcaaggtcttttatgctcatgaagaatatatatgctttttctatgcacatagctagaaagtaaattgcagctctggtttggaaatggttaaagatkatgaatgggtaagttaatttgtgtgacatgccttgcccactttccctacctcatctaatctggattgagattttggaggcatgggtcytctctctgactctgttactatttaygcattgtaagtaagccactcacatttcctcaaccctggttttctcatctgtaaatgtccagaggagaagrgatcatctttatacttctgagattctaaggctctcatttggagagccaggtgaatattttgatggcatacgagagataatgtcaatacataygccctggaacagctctaacctgttgataacatagtgaaatcttttgtatcactcattaaaatgaccctgctggagcttccaagtaacctcatgctccaaacccactcctttcaatgtccctggcccttcctcctggat

SEQ ID NO: 1078 - DNA, 600 bp, Bovine  MMBT13049
gcaaagagtcagacacaactgagcgactgaactgaactgtcacatctgttcacgctttattaaccatgtcatgtgttcaagyccaacacgaatattctattcttcccatgccaggagaagggagagagaatatttgctagacaagaatagagtctaccacagaggatgagatatgttttagagaatatttcctcttccaaaggagcccagtggaaataatctttcctaatatcagaagatcccagtgagtagctaaatgtccttcatgtaaattactctayaagcacaacagtaagttayacgtacctattggaaaaacataaagggcaagcacataacagtacataaatttcactttgtatagagggctgaataacatacagttcaacagagaattggaaatcagtttgaattaccaagaaaaaaaaaaaaaaaggcaacgagacagaatgaaacagatgaatttcacatagatctgggaaaatctgattaggtaacccataattcttcctctacctgtgttgccttaatggaaaaaagataattccagggaattggactgggtttatttgaggggccagtattggagtgcacaggaga

SEQ ID NO: 1079 - DNA, 600 bp, Bovine  MMBT12216
gcgggagctggggctgcctttgccgcagcgcacgggcttcttgtcctgcggtttctcatctctcggtgcgsagcacaggctctagggtgtgtgggctttcgtagttgctgcaggtgggctcagtagttgtggccacgggcttagttgctctgaggcatgtggaatcttgtcagaccaggggtcaaacctgtgtcccctgcattggcaggtggattcttatccattgtaccaccagggaagtccctatattcatatacaatttgattcacgtcaaaatatgagttgttctctacaagataygattacgtgttcttgagacttcatatagaaaaagatggtatccctgagccatgtctaamttgtctcttttctttcttaattgttatagttccactttacaactatgatacattcagcattaaaattcatttttttcttaataaacctgccccattttataaagaaatatgactatctgattagtgactttcactgagactattacagaaatattttattaatagaagtaaagaaacttattattacctggcctaatttttaaccattttgtaacatttgcattctcctttttctgcctct

SEQ ID NO: 1080 - DNA, 598 bp, Bovine  MMBT13813
  misc_feature (1)..(74): n is a, c, g, or t
nnnnnnnnnnnnnnnnnnnnnnnnnnnnnnnnnnnnnnnnnnnnnnnnnnnnnnnnnnnnnnnnnnnnnnnnnntttttttgatatgaccattaaaatatgacttggaagattaagtaacttgccccaaatcacactgactccaaaatccatgttcttaaccatggatgttttctgatataaaatcttagtctgataggaaggattaaaatgaaaacaaatttattcacaatcagggaaactgtataggatgctacagatgagggcacattagctggtcaagaaacacttgagtgtctayacaatagtacctggtactaaggcattctttggaaaacattatgccaaaaggaaaaaaaggacacataataatatatagacttagaactcagagccacaggaaaaaaaacaaactgatctataaaattaagaaaataatggcagcattaatagcatacaaaggctaggtctacagaatggcataaatgtaagcatagagtggattaattcctgaatttggaatgaaggcaaaaagagggattaaacacggagtccactgaaaacagagcagcaatccgatattctggactgttgtcaaa

SEQ ID NO: 1081 - DNA, 600 bp, Bovine  MMBT13104
cctgcctggaagccagagggcaaggagacttgttggtgtagcccatacggatcaactacctagggggaagaggatggaaaaaaaatctgggagggcccccaaactaaacccccaaatgaagcaagtatgatacaatttcaaaccagcaggaagacaaactggaaatagtgtttccgctgttgccacgtggccctgccatttcagctggtaaatagcactcttgcccccgagccccccaaacggtaatacctacctatctgtggttgcgatcgcttttgaattgtgtggattttgaactaygagatgcttttaggaaacatgctttccatcaacttccctaattcgtcttcttcaaaataccactttgctttggagtctcttgtagattttaagctgcaaattatcaggctacagaaagaattctggcttacctycctttatgcagtttctgtgctcatgaaataccaaaaaattaagatttttctaaatgcaattctatttttattttgaggcatgggacacatycagttctgtgcagacttttttcttactgtagaatcaactgatgctccaagaagttaattttgaacagaatgaaca

SEQ ID NO: 1082 - DNA, 600 bp, Bovine  MMBT13739
aaatgttttacaaagttaaaaagtattctttttttgctcacttataactcaaaaatcactaaagtcattctgctgaaacacgccaagaaacccagcttcttgccatatgcctgcataatcttatcaaatctctgctattcacatgcacattcttacacacacacacatacaaacaagggatgccaaagactaaaaatatatgttttacagaagcttgaattgagaccatgacctcatttgaacacagaatgtggcctatttctagggctattttaagccagcattaacaaaattacatayrtgttttttacttggaacttcctggtacccgctgtcatttcatcccagtgattgaaataatctcatagatgcataacttatttctaaattttatttactgtgtacaacttgcttaatcagttaataatgttataaaataaaagcatgcaggaagcaccagataagcattagctataatataataatatatttagtatttaatagtaataactataattaaaacacatgtataaataattagatacgggctttaaattagtgtctaaagctcttaaactctattaataaattgcttattaa

SEQ ID NO: 1083 - DNA, 600 bp, Bovine  MMBT14054
ttttttttggtgttagttctagaaggtcttatgggtcttcatagagccattcaacttccgcttcttcagcattagtgattggggcatgagctagcacatacactggtgctttgatctccagtgggaaccatttttgtacagtgcaacagccctggtctgacaaaggtacaaccaggagtttagtcatctcagggtgaagatctggttaccctaccaatcaaacaacctagactagcttagcagaagttctggttcaagataagagtaatctagarcaggtggtatttagataaacatgaygaatatyatcattaarcaggtttrcatgraatgctgccagtgtctaatccataattctttgcctttatcactttggtgtatggtagtagttacctgtattccytttcttaaagtttctttctttctttttttaatttaaattaccaaagcttggtttgctgtctctagtgtaactcataagtgctagggaattactgtcccttggaagaagtcttcaaccaatgactgatcctagtcagagtataaacaacacaactgtctcaaacagtaagtgggaaagtcactttatacaattctttt

SEQ ID NO: 1084 - DNA, 600 bp, Bovine  MMBT13220
cctggaaggccaccagcgtgtaatgggatcaggtatcattaataattataggaaaatgaaaggagacagtagctaaaggaggaatttgagctgaggcaggcagcctgaagcagctggaaagccaagttattatatgtgcaaaatcgaaccttccggtcagtcttcaggagactcacttattgccaagaagggtttaattcaattagcaaagagctgtggggaaaaggcttgtgcaaccttgaactggctggatatctttagctctaaaggaaggttattttgggaggatcatcataattygcttgcttcagcacctgaacccatccaggatgtgctccctgaaactcaaagaaatgctctcacatccagtatttcagcatttatttatttttttwaattttattttatttttaaactttacaatattttattggttttgccaaatatcgaaatgaatctgccacaggtataccctgtgttccccatcctgaaccctcctccctcctccctccccataccatccctctgggtcgtcccagtgcaccagccccaagaatccagtattgtgcatcaaacctggactggagactcgttccgtat

SEQ ID NO: 1085 - DNA, 600 bp, Bovine  MMBT13729
aaataactgagagttattttgcaaaactgctcaaactaaaatcactctaatccgtgaaagacataataagtggttcactttaagcgcatgtggtttctctgcttgaattaccctagtaattgtagctatgcagaatcaagctaaacgcactgcacatgtatagtactgcatgatttcagtaaaacgtagaatctctagaatcacactcgcaccactttaagactctaactgagaacaggacagaagcagcactcggagtccataaaaataatgggcccaaagcaatcccatgaatggttyccagagtgttacacagaattataatgaaatcatattggataaatgaaatggcataaagaatttaaaagggtgtgaagcatgaaactcaaacgtctagccacttaactataacacagcttttatgtgaacaaatatcgataattccaaattcatctaaatgaattctggcacacccgcacaggcttaaaaattcaacaccacagcaaaagtgggggaaaacccaaatgaggaggtgaggaagagaaggagagaaaccagtacacgggctatgagagggagagtccgcgagagcatggatca

SEQ ID NO: 1086 - DNA, 600 bp, Bovine  MMBT13930
aattagtactccccaaatcttgaggcattatgcaaagcagtcattttgatcttacctaatgtcaccttataaatacatgaaactcttcatgaatttggaaaattttgcgatttgtccatgggaaatttgggagacttttgctttcttttcatttgctaaagtaaagtcatcaaagagaatattaaaagtggattttgtcaaaacttctttaaagtatgtcaaccttgcgtgcagaatcttgtgttgtcaataagatgcgtggctagactttgtagtcctgaagataaaggactattcaaytaatcaatacaccttgcacatgaaggagtctggagacacttaagtttacgctgagaataatattcccattaaattgggattcatctttgcttcatttccatgccactttcttaaaatgcacctttcatgtgtgtggcagtaaaataaacgtattgatttacaaagaagatggaataaaaccagaatgcaaataaagacaccgagaaagcaagagcacaagaaataatgacgaggacaaacccatttgatttaaaaatgctgagtggacttttaagaacattgcaactagttaggcaaaaa

SEQ ID NO: 1087 - DNA, 600 bp, Bovine  MMBT13927
gaatactggagtgcaaaaatagtcccggtggtgaccaggatttctttttactgattgattgaggtatgtttgatgaacaatgytgtgttaatttctgctgtactgcaaaaatgcctcatgtatgtacatacataccttcttcttctttttttttaaatcttcttttccatcatggtttatcccaggatattgaatataattcccttgtgagatatagtccggatttctatgttaactctgccaagccaagcagattcaggagtagttctttgagcttttcttgtctttttctcattagaygcattaaagtgacttgcattttgtggactgtaaggagacttgagtggagggagggaagaatgacatttggtgctatttgcacagagaagcatcccccaggtattcgagcatattccacagataaaagaaggtgagtgcacttctgaatgctcttatctttcttagccttatccccagggctcaaatcaaacctgagatggcggagaaaatgcctctccacccggcggggacacatgctgtcaccagccccactctctgtctagcagagattgtcagccccctcctgggagctgttttcac

SEQ ID NO: 1088 - DNA, 600 bp, Bovine  MMBT13613
tagttgaaacaaatatgccactctggtggggcgtgctgaccacaggaaaggctacgtctgtagggaagcagggagtatatggggaatcgctgtaccgtcctctcaattttgctggaaagcaatcttaaacatttttggaaaccaccaagaaaagtaaattgttccaagtttattctcagagtgcttagaaaagagcctgaaaaattaagcctgaagtagaatgaatactcattgcttgtatttcaaatgtgaagacagaaaagcatggtatagcagaaagtccagctttcaaacaagaaytgttgtrtctgtgacagagctccaatctaattatgccctagccactgatttttctatcaccacttcccctttgtttcagagacagcatccacgaccttctgtccatgtggtggaggaagaaattgcttcccagaaaggcttagcccactgcattttactagataaagaaaaaacaaaaagccattcgactctgacaagccgattattgtctatggaggagtaaaatgcctcccttaggactgcaaggtacaatatgttcaaacctttaaccactgctctgccatgagctgctatacgtgc

SEQ ID NO: 1089 - DNA, 600 bp, Bovine  MMBT13618
aagttgttgcagtaaagtggcatgaatgagagcatgaagtgtaggtcttcacacctggaccacccaggatgatgcagacaaggagattccagggctggatcatgttttcccaaccacacctttccctctggtggttagaaccatttccattctaattcttatgccagaaacagccaacataacttgagctctccaaagagtaggctgtgattattggcagaaaggacttagcctctaccttattggtagaacaaaaactaaaacaatttaattaaaatattctcttttgtaatacaatgytgtcactctaagatttgccttcttttagattttaaaggagctgcaggagagttaattgttttcccttttgattatatttctctttccccttgtccaaggatataattcaattgcacatcagctgcccctctgacaaggaggaagaaaagtccacaaaggatgtctctgaaaaggaagacaaggacaaaaacaaagaaaaggtcccaaggaggatgctgtctagaggtaaagacttttcccccttgctcatctgtcctagggcctggttctgcagtgccctttccttccatcttcccacta

SEQ ID NO: 1090 - DNA, 600 bp, Bovine  MMBT13410
aaaagtattcctttgagttcagtgttcatttacttttcattgtgagcatctgctctatggttaatgtctaactatagcatttgctcctaataatagaattaggacagtagagtttttgaactgcagctgaccccagacggcatatgttccaaccaccttattctgcatccaaggacacgacaytaaatgcctttctcaggctgctggtggcagatctgggctggagtatggttccacccactcccttttggccttcatttctcgacaccagtgctattacttttcacttaatttcctccyaacttccccaactgatgaaataaaaataagagttatttatgtatattttaataaaatcctgttcgatttttcaacttacagctggttttgtctgtattattcaacctatgttttctgaacattgagcagaggagaaacccttgaaccagtgtccatagtagaaacatacaccagagcagttttaggagtcttgtgattttaacccttcagaagataaaacgtagaatttgggggcatgtatttatatccatcttcagtttcttaaaaaaaacaaacctaaagtcaaaacagtaagtaggt

SEQ ID NO: 1091 - DNA, 600 bp, Bovine  MMBT13369
catgaagctttctgctagtcaagatgaacagttaccactgtgaaggattttagtgcttttctccatatgaggagatactactgggctaataaaatcagctcctgaagtatctgaagacctgttctgccagtgccccccatacccctcacaccagcatagagcacctcatttctgtgcaccctcaacttttagtgggtgttgaaaatcagcagctccaacagcacatgacttagtccttgtagagacacatggcaagtgccaatttgtagttgacgttctatttaccataccctctgttayacaactctggatagcaaaaaggtccctttaatctaggtgatatacaggtatggttttccatttttgttccttaagccagtgcatgacctttggagtattcaaactgcagacatataagcaaagaaaacagaggtttgatcaaaacattcaactgtattcaattttttcttcagtttaaagactttctatatcaaattacttatctatgcatcctgtatgagatcattaaccgacagtgaactgtgcaaacctcttctagtcctttctagtatataaaaacttgtttgcaactttttaatg

SEQ ID NO: 1092 - DNA, 600 bp, Bovine  MMBT13643
aaagggacataataagtaaagtatatttgcattgcattgaaaaaaaaaagagttcattttttgtcttatagtaatttcagagtaattttttaaaaatacttaattagataactgttttaaaaaaycatgagtaatacaacatttacattaaaccggtagtttaaaaaaaagcaattttgctaaattctctgtatcaagtctaccaaatctatattgaatgcaagtgaaagaaaacacctccacaccagaagctacttcattagaatctaggaaaacagaaaacaaatctcttttggagaygtgcaagttccatgtaagaatcacatgggagaaatataaagagacgggagcatgccctatgctgctgtggcatgtttcttagcaacacagaaaaacatctctctgctaagaaactctgtcaagtaatatgtgttcagggatcataattcagaaagtgaattccaaatagaaccaggaatatttacattcatgataacactaaactgttaagctgttttcatatttatcatgtcaattttataaaacaattattaagataaactacttcagtcataaaaaatatgtccaaatgaaccacag

SEQ ID NO: 1093 - DNA, 600 bp, Bovine  MMBT13669
aaaggacatttgccagctgcttatcaaatgttccaccaaaacaaccactcaaacagaatgtattagaccaaaaaagacagctatttctgatggcagataccaaaatccttcttgctgacagaaacttgctgtccttagaaagcagcagatgacggatgcagactcgaccaatcctttccacatggagctggctcgcaccttaaaaattgagtgttattcactttaaatgcaaaaatgaacacagaaatgcaaaaaactagcyccagggaagaagttagtggtctcagcgacacacaactygattgttttctatttctggcaggcacaacataccagggtgttctgttgggctttttttttyccccagaagacttacttcctaatatttagaggaaaactaaacaagatctccccacttcctggacttgtgtggacagctgtgccaataacaagcgttattcctggcatcaggggccttgcaattcctggggactcagggtggagacagagaggggtgaggagcagaaggcaagatgggacccaaacagaccacaatgttacctgtctctgaccctcatctcctaaaagcaaggggcttgt

SEQ ID NO: 1094 - DNA, 600 bp, Bovine  MMBT13456
cttggactccctcttcccataataccacttagattagcattaaacatattttcatctctaactttcctttttctatgaagtcatgtgaaccaatttctcctttctgaatgctatgtaattccttcagatctgttaacatatcttattagtctatgctatctacctggaagccatcctgcttttcaatatatatttgctcaatactattcttatctattasatattgacttagagtttaattctcaagggcttattttcatgttcttaggggagaacctcagaaactctcgattcacagaytacagytggatgatgattttacattaacaatatggagatttactactactaactcaaagcgttgttcattgtattttacaaggcattcttagcaagacacaagaacagcagaaatttgcttgacattttattacctctgcccaacaaactcaatctccaaacatgagaagatagttgacctttactattagtcaccggcctttaaaggatttttattattttcttttatgatcacattcttcattccatgaacgccaatttgtgcaaaagaaggtataaggtgcagaacaaaaaggttcc

SEQ ID NO: 1095 - DNA, 600 bp, Bovine  MMBT12815
gagcgggaggccgtcggggctcaccacgggagtccctcccagatctgaaacaaaagcaaataaaagctgtgcagccaggtgaaacaatccagggaagtaaaaagcaagtggaaagtatcttctcaatgtcttatattctataatcaataaaaggcaaagaaataatgaaaaggataccagctgaggtcacagtacctgctactatccagaaacttctgggccttttatattgtccattactctgcactagcttataaaagtatataaataccgcattacctgcaataactctaagtctcyaggaaggaaagtgaktctttccctgtgcttactcctaccactacggacttaagtgttactttggaccagtgatagcaaagttattctgcaaagagccagagagtaaatattttaagctttgtgttgcyactattcaackctgccactgcataacaaaaaacatagacagtaaaccaagaaacgcatgtttctgagttccaagwaaccttcgtgtatggagagtgaactatgaatgtaatataatcttcacatgtcacaaatattattctgtgattttttttggcagtcatttaaaaacat

SEQ ID NO: 1096 - DNA, 600 bp, Bovine  MMBT13178
ataaaaattatcaagataatatatatgcagcaaaggatatctctagtctttcatccctgayttgtcattacattgcttgaactcagactcagttcccagaaggattagacaggtggtctatagaataatatatggcatkttttttccataattagtcctctgctctgagtccaagatgactggtctaagcttatttgagcttagcttatttgagcttcttcttttagctgagttttctgctaggagatttattgcattatgaacaaaatatgaaggcagcatcataataaaataaaaccyttgttggatattgagacataagcaacactactttgaaaacttccctaaagaacataacccacagaggataatcattcttgtgttcctcacatcagaacaccaggattatgtcttcctttttttcataaaaaatgacaatgtctgattgcagggcatcattcatgatacatgccctgaaaatgagatgggcccaattcataagcagtaacaatgccaagaagtggcagcacatttgctaatggaaacaggaactgagaatagggggaactgtcctagaaaataattgccaaattggaaaaa

SEQ ID NO: 1097 - DNA, 600 bp, Bovine  MMBT13172
ataaaatttggtatattaaatgcttatttactcacagttatgatgatgagaagcaggaggaggaggaatgttggtcttatggaaaccatagtaacaagttttatctgactgccttcaaatttagagccaacttggttcacaggtgatcagtcattctagggaaaaacaaatactgtatgatctctctcatatgtcaaaaacaaaacaccacaatttcatagataaccagaacagataggtggttgccagaaggggtgggggtagaagtttgagaagtggatgaaggggatcaaaaggttyaaaaaataaatgaaagtgttaaactttgtcgacctacatccaactccaattctaatcaattgaacagasagccttgctaagtctggacccgtgctcaccacttatatttgaaaaaccataaccaatcatgttgcaaaccacaaaaattctttataacctatggttaacatttcatcccttctttgtgtgtctggaaatgattgaccgggcttcagactattttctctgatgtactgcagcctgaaatccaattgttatcttggttcaattaaactcaaacttattggtttgtaggacaca

SEQ ID NO: 1098 - DNA, 598 bp, Bovine  MMBT12932
  misc_feature (1)..(69): n is a, c, g, or t
nnnnnnnnnnnnnnnnnnnnnnnnnnnnnnnnnnnnnnnnnnnnnnnnnnnnnnnnnnnnnnnnnnnnncatgacaaaggaatatagcataagaggagtagctctcccttcatcctccaaggaggtattccagcagtttgcagcagctccccaagccggaatgaattggtgagttcagaccagtaataggtccccagaattcactacagaaggtggcccaggctcatgaagatatcattcacagcagtggggccacaggaaaaatgatccttytcttaaatcactaatccttccattgayttcctgtgtaattaaaaggtttcctaacttagttttatgtacactgcatttgctctgcttagcaatcrtttgattcagtgagtttcttctatttaaaaaaatatttatcttaggattcataggcgttggagtgcagtttattttacagctgggaatattctttatgccttctacctctcatcaaggaatagtgggaaataggatgttagtggtcacttggcattggaggacattrcagaaattcctaaccratgcttatcattaattccatacctttgactaaarcatgctaattcaa

SEQ ID NO: 1099 - DNA, 600 bp, Bovine  MMBT13730
aagatgaaatatttaaatttgcccaacacatctaaagaatcaaattataagacaagggaaatatatggtcccaatattctttacaaaaggtaccagtggtcatcagggtagatggaatgggagaaagctggtacaaatcactgggccactggtttagaagagattccagggtgaaaaactgggtgaagaattttagctcgtgtacctttctttcatatctttccccttctgggctctactgaacccatctgtcttgctttgggttctaattaattatgtacaatctagagactttggatytataacaactggagagaaaagaaaattcaggacagggtttaagactttctcaacattacacacacacacacattaatatacacatgtattgattgaatgaatggactgaaagttcagaaaatattttaagatctttctgttctgtccccctttcagtcagtcatgatgataaaatagacttgcatttggatttctgttttcctggtacctcgctgaaggacaatataagacagcatagtgcttatgtaagcattatccttgctgacattccaaatgagcagatcaaatgccacctaatca

SEQ ID NO: 1100 - DNA, 600 bp, Bovine  MMBT14118
gactatttgaccaaatattctattttttaaagggctttattaagtgttttgtgtttgggaaaaaataagagacttatttaaaaatttgtatcataaataccattcacaacctcttgccctcaygttcccccaccccacaacccacaaccaccaaattgaggcaacaggtcaacagtcaagtcaaaattgtacccactcctacatgtaaactcatgcaaaaagtataagtgcagatgtacatgcagagtaacatcacctacccatggaaataacttgtctgaaagtcttcatcagtaggayatacaagcataaacttgttatctggcttcattcttgtatcttccatatttccaaacagcacaccttatagcttagctcaaatttagtattcatcataaacaaagacagyaatattttcacattttaattatacttaaaatkaaaataaattatcactgtcgtttttcatatctaatatattcaaacaatgacaagtcagtactatataaactttaataaagttaaggaaaggtgtgtttttccaattttgccttccaacaagaaatcacaattaagcatcttgtgtcccaaggtcatctc

SEQ ID NO: 1101 - DNA, 600 bp, Bovine  MMBT11961
tttgagccacatgctctttttctggatcccctctcccctacacggaatgcccaccacagactcccaactgtcartcatccctggacaagccctccagcccctatacctcatctataatacctagggatgggggctccaggagaggagagccttgaaaaggacacacacccaggaaacagcagagcgaagagtggaagcagaatgtctgcccaggygtgggcacttaaacacaaccttattttgccagggaagctctagatttttataaacatgtcttcttcgaggcaggtggaaattctyagggtaaggcagagtaarcggtcacatggataactagcaaaaaatgagctctctggagaccatgccattccaaggtcaaccttagcccagccacccacygctctaggaagcgttgaggttgcagccctttaagacagaaatcaacagtcctctcatttggggcactctgtcgtatctttaagtaaaagggccttggggtgtccttgtaatagtgataatggtattgaaaaaagccaaaggatttggcaatagctctttggaagtctctgaaatcattaccattattgatctagagacact

SEQ ID NO: 1102 - DNA, 600 bp, Bovine  MMBT11730
aagagggggaaaggatctggaccgatcctttctactggctttttctaaccactcaaattcatttatcactagcagtccttagatttgttccaaaatagaatttaattttaaatgtggtccagggaatacagtaaagggtcattctaaagtaaatgtataggtacccactaaggaaacaattatgacaaattaaggtgatttaaataataatgataacaaaaacaaatataygaactactaacctttatggaacacttatcacatcctaggcactatgctaacatattcaagttgaaccayatgaaaatgacaatttcataaggtagggcctaatatattttytcatctaatccttacaactaccccaagagaagagtagttttccataattgcagataaggaaactaaaatttagaggacttaactttatttcctaaagaactaggaaataaaatggggactgaagcctaggtgcacatccaaagcccagggtctcattacctactgcacaatgtcagtaacctccatgtcttgaaaacctaacagaatgagagtgtaggtgctcaagtactctcacacactgcttaaggccattataga

SEQ ID NO: 1103 - DNA, 601 bp, Bovine  MMBT14059
  misc_feature (1)..(1): n is a, c, g, or t
ngatcttcctcctccactttgagtgaatggtttttgcattaataattcaaagccagtggcttaaaattccagaccccaaatcaaaaacacccaaataatttccccttattaagagtccagaccaaaatggttttctcaggccattggagtaaagaatacgagaatggaagggatgtttaacacgaggaccataaattgcgcaacacctccccctagtgtcggtggggagcattacttcccttcttacgggtcacgtgcctccagtgatcttctgttaatagttcctacaaagttgagacaytctaatgatttctttgggaaattttggaaacgtggatcacttagatggccttttggatcatgaacttaatttggggggttccttttgcctgttacttggactgtggaatgatccaagtgcttaggytgcctctctgtaaggatcttttaattatttacrgtgagcaaagaaactgaaatgataaagaaaccaagtgattcagaagcatttttaagaaaacatcaacctgttctgtttgaaatcctacagaagataaaaagaatctagatgtttgaggagttggctgtagagtttgtgtgc

SEQ ID NO: 1104 - DNA, 461 bp, Bovine  MMBT13716
cacccatggtatgaaacttcagctgcactgcagtaagttactaaaggtaaaaattaccartggaatttagcagtggtggtagattccaactcctgaaaagttggcttattggatctgtaaggaaatgaaaaataataagaagcatgccaactatataatcccttggttattggtatctgtaatagccaaaatggaatgaagttctgggtcaggccttgttgctggacctaactctgattttggatggtctgaactttagtcactagtcttaaagcttccctcaaagagaaaaattatgcyagagcaayagaaattagctgtaatatctctcgttgccaagaaagtagtcaacacaggggtttcagaaactcctgaaaccaagaggtttaatgtgaaggagctgtctcattttgtagatcagtatcatcagccttctgaaaaacctttactaaaatggatag

SEQ ID NO: 1105 - DNA, 598 bp, Bovine  MMBT13714
  misc_feature (1)..(47): n is a, c, g, or t
nnnnnnnnnnnnnnnnnnnnnnnnnnnnnnnnnnnnnnnnnnnnnnngagccagagaaaaagagagtgaaccttatagaaatcagtatccagaaatagcatattagccatcttgagggaagggtgctagttacaattataaatatgcctaatgctttttgaagagaaatctgacattagaaaatattttaatcaggcattaagttactcaattcaatcaaatgtcaaaatgtgtgtgaaagagtttcttttcaaaattggaatataggattacgtaagagttgatgataatacaaatacygaaaatatcacagccaaagcrgttcttactagtaatttattgtgtaggtgtaagaggatgttattaagatttaccaaatatgtactgcagctgatatttataataaaaatgctttgcttgttgaaagagcccaattcggaagcaatggcactccttttcayatcttaagtgartaaaggaagaaaggagatayataaatatttkgggaggagtgttgattatataacttgtcaaaaaaygcatctcttagatgcttcatctactgacatcatgaaggtcaatcccaggccttggacat

SEQ ID NO: 1106 - DNA, 600 bp, Bovine  MMBT13020
tacttgctgggaaagctaagccttatttacccttcagtgcaaattattctaaatagaaattttgctgtggaaagccacatgctgggggcagtgagaatactttgttgtttgcttattgaagtataactgactcacaatgttatattagcttcattttgtcttttatttattgaagtataaatgactcacaatattatattagtttcaggtgtacaacagaatgacttgatatttttgtacaatacaaaatgatcaccacatggagaagcgtactttgaatggaggactctccaggcatayaggttacagctctaatgctaattagtgctcctgcactgcaatccacttttggcccrgattcctggcctgtgcaaagccattctccatggtgtaaagaatccgggcatctttgccaggcaaagctcatttcaaatcttggctctgtcacatcctggctctatgacttgggtgcattactcaaattaaagagagactattttttcacccataaaatgtgagagtggtttggtggtaggatgggaggcctcgtggataccagtcatgtacagcacactgtggggccctgaggtttgatcagct

SEQ ID NO: 1107 - DNA, 600 bp, Bovine  MMBT11978
cactgggttagggggcttatatgccctcccatgtaatattctccaatattccaatgaggtaggcacgattatcatgccaattttagagatgaggctctaaaagatcatttaggaactgaggatcacgaaaattaaataacacacttgcttgtggataccagctaggaaatgacaagggcaggattcaatcctaaatctcaccctcttcccatgatgcctcagaactttcaagatttgaacagcattaatggaagtgattagttgctgcagtccatggggtcgcaaagagtcaaacacgaytgggtgactgaacaacagtgggagggagaatgaaaaagaaaacatgattttagagagatgtgcctttataagatactaggagaagttgatcaactcctgggcccatcctgagtttgggtgactatgggatataagtgtgactgcctcctccactcaagctggagatccagttctacattttggggcagaggttgggattatcaatcagatgataacactgtctgaaagtagacagatgtgtatagactggaaaagaaggatttcacacaagagtaacaagatgaataaatgaatgaaaag

SEQ ID NO: 1108 - DNA, 600 bp, Bovine  MMBT12833
tgccctccttccagctgtgcagcaggagcaggagttctacgagcagaaaatcaaagagatggcagaggtaggaagatgtgtttgtatgtgtatctaggatctgatttgctggtggggctcagtgtaaagctgtctttgaagatttgccttttcttttaagtgattaatgaataagccatgaagtttttaaaaggaaaacaaagctaggttttgtagtaatactgactaaaattcatagtttcacaaatcagatttacgttattttaattggcacttagtaaacacatctgtttcaccttyttcgccctctactgggagaggaataaacagattccatttagctctttaattcttccaaaagkgaaagtcaaagtcagtcagtcatgtctgactctgcgaccccatggactatatagtccattgaattctccaggccagaaatgtactgtcaaatgtgcaagtcagctggaagatacaaatttggttttttaatacagacagacctcagagacattgtgggttcagttgcaggccagtaaagtgaatatcgtagtgaagctcatcataagaatgctttggcctcccagtgtgtaggagagt

SEQ ID NO: 1109 - DNA, 600 bp, Bovine  MMBT12614
atcaagagtcttttccaatgagtcaactcttcgcatgaggtggccaaagtactggagtttcagctttagcatcattccttccaaagacatcattagggaatggtaaatagattgaaaattttcatgctaattctaattggaagtggctgcctggattgtgtgttaaagaggattccaaggctcagttcaggctttatagaaaattggcagtaatggccatgggatagtgttattccacttgtcatatgtattactgtttccataagtcattttgtgacttgaaacgaatgtcttcaaaaygtayagtagattctcagatagttgtgttgagtgacctttaagcatcacttaggttttaaagctttgtgattatatgatgcaatgattcaattccacgtctttcaaaaacatatccactttaaaaaaggatttaaaaaataagcaatgtcagtagcaagcatgcacagtatgaaatatttgagctggaggagtatataaatagctgtggtcgatgatcttgccttgttcttttctaaatacagtgcttctcagtgctagcatttaattatgcactgtacttgggtaaaaatgggcattagg

SEQ ID NO: 1110 - DNA, 598 bp, Bovine  MMBT13175
  misc_feature (1)..(25): n is a, c, g, or t
nnnnnnnnnnnnnnnnnnnnnnnnnaaaaaaacagggggagaaagaagggagggaaagagagaaagagagagggaaggaggaagtgagggagacaagaagttaaggagaagcagaagatcctgtgggaactgggagatttgaaggtttggttcagcttggttttagaaaaatacgtatgtgcatatgtgtgtgaatgtacatactatacaatattattaagcattatatgtacacacacatgtaacacaactatgaaatataatacctatgattattgatctaatttaaagactatcaaygtctgattttacaaaagtagtcaaatgttgccattctacataagaaattacattaacagcattcttctatttaataataaagaaatagaatatcctgaatatttcatatagttataaaatttcttgagagactgggaagacaaggtctgtttcagtatttacatatattatcactgaacttctgatgtagaggatcataacaaacctattatctaattattatgaaaactctatgtgtagtagaaaaagwaaattgttcaaatatacactttaggtagttaaattggaaactgcagtt

SEQ ID NO: 1111 - DNA, 600 bp, Bovine  MMBT01739
ttcaaattgtagggattttgacaaagcatctaagtttcctgacaggctcatgaaagaatgcaagggaaactttttctaataggaggttatagactccattgtagcaaacacaaactgtcagttgcatcccaaataagatcctagtctttgtgtcatagcttaatgagcgtctcatagcttaacagtgctttgacttaatgtcttttagttaacatgaataatcatcaacatttagtgatagtgagaggaaaatattggcttcatgttgttcatggtcaacgaatcccttttgagatcacrattgaaaagagcagctagtaccttacttgtgtctctacatatattaagcctgatttctagttcatgggctcattgccttttgcagtactgtttcattagcgtccatggaggcaccacacttaccatcttggcacaccaacatagatgatgccamccattgttttctagtactcattcatgacttactccttagcaatcatgaagccaaaacaatgtttctgactgttttatcctttctgtgtattttgttccctcctggtatccatttgacccttcatcttttacactaaggaagttgct

SEQ ID NO: 1112 - DNA, 600 bp, Bovine  MMBT01318
tccttgggtggcaaactgccaattactaagccagagaatactcctataaaataatataaatctacaataaaagcttaygaaaacatgttagaacttaagtggcaaggatcataacccagggacctgggagcaaaggtagaaaatgaagatttgcagcaaccactatctttaaaaatcacctgactttacaattttacgaagtacacatgcaagtgtaatacaggaaaattgcttctcttcctaattttcaagtgaaattgatgctccacgagaatacaatcccaagatgaacactggatrtctctacattgctcccagttcgcaattctatgactcaagatctaaggttcaagtaagagcactggatcagcagtcaatgccctcgactctaatggccacaactacttcactggttattaaggcttcggtgaagtcagttaaacgttcttagttctgactctcaagtttttaaaaatgtgactttagggtatttcatagagtcagctggctaaagtgagagcatacgagtaaatggatactgaagcctgtaagaactttttttaatgcagcctgactctttttcaaggaggcctccaaaag

SEQ ID NO: 1113 - DNA, 600 bp, Bovine  MMBT13004
gtcaaggcctgcctgtctctcaccctcggaggagagcaggacccctccaggctttcttgctgttcagctgtcttcacctggtcttggagatggaggagttgcatgtgcttgcattctaaccctcagctgagagcagagacacacrgggcttttcctgagaacatcttggagcccagaggtgggttgaaggcagtaggagaccaggaaggtctgaggccagccccaaggaaggcccaggaggctggtcacaagcagagacatactcccaaagccttgagacaagtgctgtcggcctgggcycayggttggggattttaagtcctgcagtaatccctataaaatcctatatctttaattatccaacccacagaaactcttaaaatagatgattaaatgggagataattaatgactttccgtgcaaacctgcacgtttgccagtggaagccatcagctggaagctaccctrgtgccccaccctgccggccggagggtctgcctgcgagccttctgaaggcttgggaacccctgtgtcygagatgcccaggggcccaggtgccatcctctggctcaccccttcctgggcgctgagactgggctc

SEQ ID NO: 1114 - DNA, 600 bp, Bovine  MMBT11918
aactttagctctttagctgaaataactcatatgggagttggggaggcggggtgcaaagcacctcctggaagaagtggcacataatgcaaaatggaaaccatctgggggaattgctagattacagatctatccaaatcagttagaattatgttcatccatgagtaaaaagaaactctctcagattcacagctaacaatggcttaaataagatagaagcttatttctcttccttgtaaaaggatatagaagcaggcatccaaaactggtttgctggcttcatgtcactgccagggagctggyctcctcctattaagctcctgctataatgtcttcaatatatctcactgtatagtgcrtgatagctgctcagactccagccatcttacccacattccagccagccgaagaaggaaaggaagaagaacatgaccattccctttaaggctgctccctggaagctgcacataatatcccactggccagactgaaatggtcctaataactgcaaggagggctggaaaatggagtctttattctaggcatccatgcatttagctattactaaggaagaagggaagaatggatattggaaaagcaaac

SEQ ID NO: 1115 - DNA, 600 bp, Bovine  MMBT14239
agaacacagaaagttaacttgcagaattaatgaagacctcagggaaaagcaagagttgggatgaaatgccagcctcacgctgtgttgagtgtgattggtgaactagaatctgtggctggtgtgatctgaccacgctcccatcgcagctgcccagagcttccacctaccagcacaagcgctcaggaaagtcctgctgccggtcacttcattgctggtgcaagtggcagctgtgtggctctcctccttcaggtgtctggtctcccgaggcagagtggaaggtgttggcccagggtgagggaygctcagttcctgactagcagctcagagagggkttttaggggcatgagatctccctggcgtcccagcagttcctcactttctctgtattggagtcaggctgaccttggagaaccctgagatctgggccatgacatgtctcggggatgatcttcaactttcagataaaagaagcaagtctggggaggagctgcactctgatccaaatggggcgctcgaggctcatttgaaagctccaagcacagccacttgaagctcagctggtttgctcagctgcatgtaaaaagaggcacttttatgaga

SEQ ID NO: 1116 - DNA, 550 bp, Bovine  MMBT11601
gtatagttgctttacaattttgtgttagtaacattgtatgttgagtcttttactgacttgaaatttttctcttcagctcttgaggtaggaggtagatgggcaccctccacctcactcccccaaggtaaagcaattggagattcattccctataaattgaaactccactccaaggcaatagcaggacaattaagggaggaggctgggccctgttcaaaccatttctcactctggaagtcaggagacctccccaaccacacatgcgcagaaaggctccttgcaggcagaagcagggagcaaygccaagggatgctctacccataacgcctcttcagtagaatccaccttggctaagagatgtgtgcactcatctgagagaatcctgatataccacatatggagtgtgaaccagacaaatcaaaatgattggccaaaggaaaccaacaagaaatgcctcataaaagtaattcaaactgcttcgagggcgcatgtactgggacagtctgcctgtgtgcctatccacatgtattatactcttttttctcttaata

SEQ ID NO: 1117 - DNA, 598 bp, Bovine  MMBT13295
  misc_feature (1)..(52): n is a, c, g, or t
nnnnnnnnnnnnnnnnnnnnnnnnnnnnnnnnnnnnnnnnnnnnnnnnnnnntaattttgacattagcttgtataatcagagatgtaaaaagacctctgtgttccaaacataatttcacaccagcatctcatttcatgaaactattagtcaagacgagagcctctgaatgaatttacctttgattcgtttcacttatttaagaatgctgaataattaagacagctgaaacacgaggaaagcgaagcaggcacactgggcagtgctgcagccgtcggccccgcccgctcccgggggacccyggattcagaaccatcaggactgcgagtaccttcyaggcggagccacatcagcctccccttcacagctatgacggaggccacacagagctcgccygggttcctggggttcacggcttcaagcttcatgttcttcgtgaatccccgactgaacgatgtctggaagagaaagagaacggacactgagccagcagatgccacaaygagaaaacgctcagcgagagcagagccagctggcgcagcagaaatgcacacacatgcacacgcaatcaagtgcacacgcatatatgtgcacatgcat

SEQ ID NO: 1118 - DNA, 600 bp, Bovine  MMBT12840
catcattaaagcctacccctgacagcagaaacccaaggttttccctttcctatttcatgccccctatggtgtgggcaggctaaaaaatcacactttaagcactgcaggaaatctgaaacatgaggacaagtatctttattttgtaggggggaaagcagattctcaaagagactaggtcagttttcccaaggtcatatggctagtgagtggagggggcgagtcccacgctggctgacggtggagtccatgtgctttcagtatacattccagtacctgtgatgccaggcatttgcttaagaycttgctaaggaaagtacaggctgcagatcagcatcacygatgtctcctgggaacttgatggctgtgtggaatctcaggtgccacyccrcaatgctgaatcaggatcttcctttttactaaggtccccaaatgatttgtatatgaatcaaatcaaagtttgagaagcatagacacagggcataataggtagctattaaataaaggcatgatgagtataaaagtaatttttcaaatatgtaggagaggtcaagcagttctgaaatcagtcacttgggagttctagaagaaaccaaaataatg

SEQ ID NO: 1119 - DNA, 600 bp, Bovine  MMBT13850
tcccagaccagggattgaactcatgtcccctgcattgacaggcatattcttagccactggaccaccagggaagtccattaattagaattttttaaagttttcttcttcccgatgtatctgttttctctggagtcagttctttgttcaccttgsaacttttcctctkaatgattttccttcaattactgataatccttggttggtctttttgcctgtagtatttagaaagcttccctaaaaataatagagaattactagttgtccctgttgaggggtgatgtttttgagtacttctagatycttagtccatcaggtttgatagtttttcttctctgatagcatttttgtaacaactctagtttgtaatgtagataaaacttcataagaataaaaaaaaattcatgccattcttaatgtccatttcgcagtaccacgcgtgtatcttatgacttatttttttccctactatagtaattattttggattgtattgtaagtttaatgatgcttaaaatattacatttattacctgagaaaaatatctggcaataaaatgaattttaaatgttttttaaaatgaagtttggagtggagaaattta

SEQ ID NO: 1120 - DNA, 600 bp, Bovine  MMBT12690
ttttttaaaaaatataataataaatggttgggggaaaatgatgagttcagatcagcagggccctgtgacttgtatcctttgttattcaaagaattagtaaaatatattgatagagcaactattacttactatttttgagatgccatgaagcacacaaaagacagctgtaggaaactagagaatagcttctggatgaccctggtaattacagatgtcttcctattccagatagcaaggaagatattacaacatatcatcaaacaatccacttaaaatgagcacctagacaaacactaggcyctgaatagcaatgactctgtttttwgcaaatggtaaattttgtcagttgttaagtctcctttagtgatagacaggccatgaataaaaagaggagataataaatgtaacagctaaagcttgrtgaaactttgggggtwttcttagcagctacattgacaatattagtttctttgtctggtaagtttgtctatgagacaggcattatgcagaacactacagatatcagattgttcaatcttcacaacagccccatcaagtaaatactgaagcattattcccattttatgaatgaggaactty

SEQ ID NO: 1121 - DNA, 600 bp, Bovine  MMBT13318
gactgggagctgtgggcgtggttgggctttgaggggtgagaccactaggaagacattggctgaagaggaggtggatccaggagtagcaggtgggagcctttcctctgtcagtgatggggagctacagaagaattgttagamagagaattccatgatatacatgccttttagaaaggttagtaaatggaaaaatcagaaaatacagagcagcaaaaacgacaggaaatcaactgcaatccatcctcactgttgaaatccgagtccatcactcaccagccgttttttcctacaggtacgtayacagacatgcttttttaagactcaaaatgatcaaaagttgtacacacttattttgaaccattttmgtttattttcacaagcatcagagtttcataagcattctaaagcttcattctgataagcacactgcaatatattatatcaatgtatcatacagactcatctttaagagtataggctactttaaaatgttcgctattataaataatgctgtaatgacaacttgaagatcctcttatttcttcaggataaattcccagaagtgaatgttgtggctcaaatgaaatatgaattgtaaga

SEQ ID NO: 1122 - DNA, 598 bp, Bovine  MMBT12453
  misc_feature (1)..(41): n is a, c, g, or t
nnnnnnnnnnnnnnnnnnnnnnnnnnnnnnnnnnnnnnnnnagccgcctccacacccttcctccatcccggcctcatcctgggttgcgccccgccacgctccctctgtaaacacacaaaagccacagagcctgcatccggctcctagagcttcatttttttaaaagcgagaatggaaaggaatttttttaaaaaagggaaagaaagactaagaaggtgatgcaggagataaaaggcacatgtgggtgacaaagagactatgacatagtcaaattttattaatggctcgccatatgcatgyggaggataattaactattcacaggtgaaattagctgataggggtggctgtctcgagcaaatcgaatgagctccgattatatcaatagttaccaaccagtgtccctggttatccaagcatcaaataaatttgtccactcttcttcctttggggggagaaactttaattatccagccctggcgcctggcaggtcattaataaaacctagttatcggggccgcagcttccggrgttttcctgttatccatcttttatctaaataaacatttgggaaatgtccttaaaattattacagacac

SEQ ID NO: 1123 - DNA, 600 bp, Bovine  MMBT12559
gtgtgcgtgtgtccatacygcatccatacacacgaggaggtcagaggtgaggccagccatgggagtacagcacagcaggtagcctcctccctacatcttgcagtgactccttcaacttcttcttttttgtccactcccaacctgttcttgtctcacattcagtattgtgccctgtataatatccatagtcccaagracagattgccagaggggctctgaccaatcagggtggctggggaagctctgccaggaagggaagaattcacagatcgggaacattcactctgagwtaaggcctgytctcaatcccagctggctatcagctaatttctgcaaaaagatgcctctttttccagaagcatttacatgtcaamtggaacttccagaggatttctasggttttaagataatcttttttttaattaaaaatcatttttaagaagtgatttatggcaatactggagaaggaaatggcaactcactccaatattcttgcctgagaaatcccatggacagaggaatctggcgggctacagtccatggggtcacaagagttggtcacgacttagtgactaagccaccaccaccacatagtaatac

SEQ ID NO: 1124 - DNA, 598 bp, Bovine  MMBT13761
  misc_feature (1)..(14): n is a, c, g, or t
nnnnnnnnnnnnnnggaaactctgttcttcgtgatcttcaaatctcccaccggaaaccccttaaacggaggagggcgggtcctcaatgctgactctctcgtgtcggggaaggtccgacagcctccagygcccctactgacttctgggcatcccccctggaccccaccagctctctctgctccagctctctctgctttgcctgagctgagaacctctctccttgtgaagaagttttctttctcccttgatgtctttaacttaaaaacaaaaatcagagagttgcaggattcccaccgggayggttatgcaggaggaaattattcccattagaacctggtgaatttcacatgtatccagaagtgcttttataataaaaaataaatgctgtataagtgacggtaccgggggaatttcgccagttctgacacgcctggctgatttgggctcagaagtcagtttttctgtctcctctttatctgtcatctgcctgagtctccaccccttacactgcagcttcattttacggcacctaatacccgatgggtgttctcggaaataacactattggtggctttaacatggcttcgtttagataggt

SEQ ID NO: 1125 - DNA, 600 bp, Bovine  MMBT14035
gaacccctgttacttgatctgagcctcagttttcctcatctgtataatggggtcagtggagggatttaccccataaggttagtgtgagaattaagttagcactktgcctctcacaagatgaatgctcagctattattcatttagacattctctataggacctaatgtggctttcatggtaatggaaatgcttagtgtaatcttgaatgcttttcaagatattcttgaaaatatcttttcaaggtattcttgctgcttgggtgaagygtggtacagagaagggtccagctgaggtgtgcaycctgggaaagtttaggatagttataaaatgtaaagtctgagtatcttcattttaaatgtgatggtgagcttggaaaatggcccaaatcaaaaaagagttagtgggagaaaatatttgtgaaccatgaaaccaacatctcccaaaatttgcaagcaacttatgtggctcagtttttaaaaaaacgaacaacccattcaaaaaatgggcagagggcgtaaacagacatttcttcaaaggagagcctttggtttgtaagttcctctctcgttctgctcctttctgtcccccctctctctttgt

SEQ ID NO: 1126 - DNA, 600 bp, Bovine  MMBT12414
tccttatgtggccgtccctggatctgtttctctcacctctgtccctggggctttgttcccactgcagtgcaaaaagggagcatgtgtgcattgtgcgtgctgatggctggtcttgttttaggtctcagagcatcagcaaccccaatgtgagaaacttcggccgctccctcctggcaggatactgccccacgtacatgccagacttggtgcttcacgggaccagcagcgacgagaagctgaagcagtgcctagcagccgacctggttcacacggtccaggtgagtgatcccagctgggagyttcaggctgctgaccagggggtgaaggaggggcagccaggcgacgtgggcagtcacaggtatagtcatgggattgttgctacagatgctgccagggttacrggaaccagtgaggctgctgaggcatctggggacgtgyggagctggaggctgtgagcaccacaggacacagcagtggggaaaagaagagggtctgcctggttgtcggagcacgatggggtgggggaacccccgacctctcactcctccagccgctgagctcctacagggcctcctttgggctaagcccagctagaagcct

SEQ ID NO: 1127 - DNA, 600 bp, Bovine  MMBT13672
ccacctgggggttgcggccgggcccccggcagggcggccgggctggccttacttgatcagttcctccttgtcattctccacgtcgggcttctcctcctccttctccacctccttctccttctccttctcatctttctcctcctggctgctacggggcatctgctgctgctgctgctgctgctgctgctgctgctgccaggccccaggggagggcagggggcggtgggggagagagggacacagtcaggcaggcgaggctctgcacctggactgaaagagctggaggggatggggagtccrggggagcccccttctccaacacctgcactgtgarctgggcagaaagccccacaatctggggcactgggaggcaggagtcaaagggcaaggtatagaaagtgttcgtgtcagacgcctggcctctggcacttkgtgactgcgtgaccttggatgagagtcttaagctctctgtgctccgattcttccctttgaaagcatgcctacccctcagccaggcataggcaggctgaaacgagagaatgcttacagagttggcatctggcaccagtatttaagcgtggtgggaaccccaaggcatga

SEQ ID NO: 1128 - DNA, 598 bp, Bovine  MMBT13454
  misc_feature (1)..(79): n is a, c, g, or t
nnnnnnnnnnnnnnnnnnnnnnnnnnnnnnnnnnnnnnnnnnnnnnnnnnnnnnnnnnnnnnnnnnnnnnnnnnnnnnngagaggagaagtgtccaagggcacagggaggcacagagccagcctacaagcctggagtctcgatgccgaggcccaccttcctttcatggcattggatagacctcgctggcccagccgcatatcagcggcatcatctggcttatcctcaatcaacacgtgcgttccagaggaggcagaaattgacgaagaggcagccagttcctggsgctgatggcctaacraaaggggaagcttgagctccagactccttccttgttcgagtatccctcgctggccgaccccatctttcaccttccggctcccagggacctggacagacccttggcctggagggggcagcctgtcccagtgccagctcagcgggcttggcccttgtaacaatagctggaagggccttttggagcaagtacttcctgaagtgcccagaacagccgctgccgtcctggggcrcaggaacaatcacagtgcacgccagctcccgccctcctgggagcctcagggactgagacttcaggctcc

SEQ ID NO: 1129 - DNA, 598 bp, Bovine  MMBT12072
  misc_feature (1)..(119): n is a, c, g, or t
nnnnnnnnnnnnnnnnnnnnnnnnnnnnnnnnnnnnnnnnnnnnnnnnnnnnnnnnnnnnnnnnnnnnnnnnnnnnnnnnnnnnnnnnnnnnnnnnnnnnnnnnnnnnnnnnnnnnnnntgaactgggtgtggataggattccagtaatttggtcaccagtctggtgagtcagaggctgggcaggcggagccggggcagcctgtcccatgaatgggtagacacttgacctggacagagccaaggcccaggggactgacgcacccttagcggtgcacatctcgcctgagacatgcaatacrtgtccactggtttgtcaartgaccttggccgcaggtgcaggcattgccttcctctcccaaggactgcctggctccctctcccccagttactagggagtcagactctcaccctggtccccgcccctgacggggaggagtcacggtccagggaaagggaccctgcatctctgacgccccccagcgtccaaagggcgcaaatacagagaaggcgtcggagtctgacccctcttcagacgtcagtcagcggcggggcgcatgcgccacagtcgttggccggaagcgccgggaagaggcttgc

SEQ ID NO: 1130 - DNA, 600 bp, Bovine  MMBT13668
aaaattatcttccttcagatacaatagagaaactccaagcaaaaaaggaaatgagaagcgtgtgttggagtaagtcctgttgtgagcaccaggtaaacactccatattcagtcccttaagaacaatggatttttggctcctttgcctgagatatccttacagggcactggggccaggtcacagaaggcattagaaacactcaacacaaagaaatctcataaacaggacagtctccccttctcccctaaactcatgcccctatggagggagcaaatactgaatcacattagaaaatgtaartaagatgggaaaactgaggttaaacagctaytgaacttgtggacatgacagagaaggccccctctctctggccaggttggtgaaatgctctgggtgagaggtaaaaagatccatgggtgggcgagagggcaaccctgctgagtggggtgcagtgcccacaggctaagagccaggtccagtacaggcctgagacggtggggacgggggtcaggcactcacagctcccaacgacctctggtctgacgggcccgggcaggccctgccactgcctctctgtgcggaggaagctgtgctaagccg

SEQ ID NO: 1131 - DNA, 600 bp, Bovine  MMBT12081
tcagtgacatttagatcttcctttgattacctaggttcttacaccaggaaagggggttagaaaccttaggagcagtccttcatttcacccctaaaacgaagcattgttggccctgttacaaatgccacataggagcagggagcagactgaagtctgctgaactcagactgcctgctcggcactgtcgctgagcactgtcctcactgacgtcctttgatgtaacaggagcagaccacaaggttcacagacctcggtggtctggccctgtgcatggcctgcaaagctccttctaatgatttractttacacagcaacagagaagggygtgaagaccatcgcagcagaaggtcacgtctgtctcccactctatacacagctgtacctttattcttttccatagatgtttgcttatctgtaaacattgtgcccgagacctggagccctgttatgtctcaaggatggagattcttgtcagcgtttgacactgttgacttgggagtgtttttctccttcaggagagaaagagatgcagctagagagtttatgtcctaatttacagagaagtcccagttgtagctttaaggatctgttttagcccac

SEQ ID NO: 1132 - DNA, 600 bp, Bovine  MMBT14226
aggctccaaggagtgatctgacgcattgagatcacatggctagtaaacagtaaacctctggaccaactccagtaccagtgcccatgaccaacatataccccagagcaaacagggtcttacggtattaacttccacaaagaaccagtgttaatgagccaaagtataaacaaacccaagtctccttggaaaagacacaattatccagaccacaaacttttgttctgaatactatgtccctagaaaatataaacgcaacttatgaagcagaagttgacttctgggccaacatcagtgactacrtggcccagccagaccacagcscccyggcagtgcagcaggcagacccrtcyraaggatatagcgctcatagatggtgcgggcccggtccacctccttgtatctcagctcgaagttgatgtacgaatgccaggcctgctcctcyggccgccactccatccagcgctcgaacacctgccgggcaccagcgatgttcccgagcatctcctccatgtacgtgtacttgtaccttcaatagaaccatctggaacttatcagtcacggtcaaaatgacttcagaaaaaaacggtctttggcaatctc

SEQ ID NO: 1133 - DNA, 600 bp, Bovine  MMBT13756
tcatgctcttctgtaaaccctttccacctcctctgtgcatcccaacctggtttgggaagcatgctcgctccccagaaactgagcccacagtcacattgaagattctcaatctgaacacatggccactaaccccaagtggacccttaatgctggcagaccatgaaactgtgcagatatatcccagccattctgttactcttccagtggaaaattctgtgctgttccttcctcagatttccaacacagcttcccctcatctgctccttcagtctgaggtctgattttgctttatcaatgagraaataggagcaatctgaagaggatgccctcaactcccacaggttcatctccccacccaccagcactgttcaccttccctctgccgtctctcctacctttatgaaccaggatccatgcccagaagatccacccctccactcctgcactgggtcccctccatctcacctgctctggagtattctggtatgactctcatgtccctctcatgttcctctcatgcatcatcgatcaattttccatctccactagacccttagcatttagcatataaccatgcaatgaaaccttaaacctttaaaa

SEQ ID NO: 1134 - DNA, 598 bp, Bovine  MMBT14224
  misc_feature (1)..(108): n is a, c, g, or t
nnnnnnnnnnnnnnnnnnnnnnnnnnnnnnnnnnnnnnnnnnnnnnnnnnnnnnnnnnnnnnnnnnnnnnnnnnnnnnnnnnnnnnnnnnnnnnnnnnnnnnnnnnnntggctctgttgttgcggaaaccagtactggagaaaccatgcaccacactcggagagttggatagtcaggtttattacgctggcgggcttccggaagagttaacactccaagctctgagccccgaacaaaggggttacagagctttctatacacagacaggcatgattaagcaggtttgcaggggctagrgcrattgcaaagagcaggacaagggtgagtgagataagctccagttcctagtattctgagtccccactttctgagacctatgtgatccagactttgtaaggagcaagctgggttacagaggcagaaggagcaggaggtaaaatgtctgtaaaattttaacttttcctcttcattatggtgcctccagaaaactaggctgtgatgggtccaccccctccctctctgaaatcacattcattcccttaatgcaagtgtttcattgttttatttcacctaatgccccataccaccttatctccac

SEQ ID NO: 1135 - DNA, 600 bp, Bovine  MMBT13419
tcccaggaacagccgctgaggcatccgtgtccctcggaggaggggacgtgcattcgctggcaggccctgagcggccacgggccacgtgggtgccaggttgggccaggcacttgggggtggaggcatctgtaggcggtgggaccaccccggggtctgccccagacggacagggaccctcccccccgagtcagcccctctggcctcctggccatgcccccacgggtctccagatacccagttcttgacccgtgggctctgggtgcagagacccgcaggctgtggtcggcatgctgactcagragagacgtgacggcaggaaggcctggttcctcttaagtgctccgggggctaccggggacccgcggcccctgtggcaggagggctgccgagccgggcgtcatggttggagggagggcatgcaggcaccgtggcatgggcagatggtgtcctggggctgaggcccagccgctcgggtgccatggcggggtgggtgaagctggggcggctctccatagccagctgcccccagcggggcagaaaatcttccttggccagagggcccctgccctcagggaagcaggcatcccgagtccattccag

SEQ ID NO: 1136 - DNA, 600 bp, Bovine  MMBT13406
ttggtttcaaatgtgcaaggatatttgttattttccaaaatgtccaattttccatcatttccactttttatccactttaaattatgttttgagatgcacattagagattctctacatttaatattattttacagagaaaaaaagagagaaaaggaaggttctgactttctatgccagagaaatgagctattggtttttgtcttcagacatctctgattaatactcaaaaaataaaggtgttctcacatgaggaactttgctagcacaaagtccaccagtgtgatcagcagccctgaaacrggaggtggtgagagtgggatatgggggcagggaggactcatctggtaccgacgcgcgatgcagggattgttttttatggaaagcctgttttgtccagcagctggtgaaattcaaaatggtccccaaagcctgtctctgaagccagcaattcagaaacaggagagccagttagcctccgagcttgcttccccattcagcgacaccccagcccagagagcctccaaaagcaagacttttctaaccaaagggaagctgctgggaggggctgggttccaggatcaacagttttttgcgttaaaa

SEQ ID NO: 1137 - DNA, 598 bp, Bovine  MMBT13825
  misc_feature (1)..(57): n is a, c, g, or t
nnnnnnnnnnnnnnnnnnnnnnnnnnnnnnnnnnnnnnnnnnnnnnnnnnnnnnnnnggaaaaaatacaatactctgtctgcaaatcctttctcatttcatgtcaatatccacccctcccatcatcctgtgttgacaggactgatttgctaaaggagagtttaacattacaaacaccctttcatcagcttaaaaattgaggcgagtcaatatttacatcatgttgctgatcttgaaagtacataccctgttttctgacctaataaatagctgtcactcttgcctccatcagagcttagcrgagagtgggtttgcctgctcaatggtctctgcattccgggaatgatctaatatttcargtctctcctgtggcagcaggtcgatttctttctctcgctctttcttattggtttccaatgacagacctcataaaaccatttaggtctgcttagagaaaataaaatccataagcatgctgggtttatctttcaccagaaatgcatgaaatctaatgctccatgagtgaagataagcaggatatgtgttatctattttgcaatgcaatgttcaggacatatttttagcccaaaacactggat

SEQ ID NO: 1138 - DNA, 600 bp, Bovine  MMBT13108
gaaaactgaggtccagtgcagtaaactggcttgcccagggtcatcccaccagtagaagacagggctgctggacttaacatctgggttccttccatgatccccacttataaacgactgtaaaaacaaagggataagcagagttctaagacaagctaactaaagcaattccaaaaataactattacagaccaagcaagaagtttcgtttagttctccaagttctcaaattgaatttcagcaaggcttcccttattggacctgagttgtaagatcagtwcattttctagagtgacatcttggrgaaggggrtgggaaagaaygcttgggacaattaataagaagaccctccccccaccatgccttgcccccattaccagcttacctttatcagaagatgagaattaaaagtgatgacacaccagaaagcttacaggatgggaaacctaactcaaagcatcagtttcgattctatgtgaaccatcggctctctctctttactctttccatctggctttctggtctttcatgattgggtctttcctgaaggaaataactcccaaaaggaagtagaaggctcacatcaagggaagatacaggactg

SEQ ID NO: 1139 - DNA, 600 bp, Bovine  MMBT13655
aaggaaaagtttgcagagcctgggcataaggcctccattcacactgtgcagagttcaaaggagtcaaaaaagggtaactattgaagtgggtttttctttcttttttttttttttcaacttcctttttcttagagcagtattatttatgtggatatgcgttctattgaaatctcttcaggccctgctcctccacaggaaggagctacagtgactggtggggggcagggggtggtgcagggagagtggtccacagggcaaggctaggcgcccagcagctggccgggaagaccaatgcacacracacagggcctgcagacaggcggtcaccaagagtgacagctcatacatggcccaggaatgkaacattctgaggaggtttwaccttaagggaaccagaaacgccagccttaggtggaggtgagaggaggggctcaggaagagcacacacagattgggttaccaggcgctggaaagtaagctggccaccacagccgccaggcacggtgtgggagccctcacctgcatgtgagcaaaaagaaacagtctctatgggcacaagtgaaaatgccaagcaaaccattctggcactgcatgtcctct

SEQ ID NO: 1140 - DNA, 600 bp, Bovine  MMBT13046
cctggaggaggggcgtggcaacccattccagtattcttgcctggagaatcccatggacagaggagcccagcaggctacagcccatgaggtctcagggtccaacatgactgaagcgacttggcccacaggtgagggtgtatttcccccccccccgccaccccgggaggtatagtgattgtttatacaagatatcatattctttgaagagttggggttttttttgcagatttttcttgactcaacagactctcgacttcataggactgcaattgcaaaggtgaggctagaattccagatagracggtcagccagcttacctgcctgtggtgactcatgctgcttgcccctactcagataatggcttgtcatttcagccagcacagcccccgacttgcagcaacttcactggaattcacttttcctgtttttttgtgtgtttttttttttaggtgctcctcctagttccaggaaggtaactcagaaatcatcaccctttgccttttcccacagcaccgttaaacagggacgagcaagaaatggccaagtttgactggagccagcccaggacagagaaatgttcctcttggccactcatccctg

SEQ ID NO: 1141 - DNA, 600 bp, Bovine  MMBT13851
tgccaaacttaaaatgggattcaaatccacatagtaaggaatttattcatagcagctaccctgatagagcgatctttcactttgctctattcaactgtcttaaaatttcctgtttcaaacagctgttatttgattaaaacaatgttaaaattaaaaaaaaaaaagtgaaattatttattttattagatttcacagctgaatgcatgtctttctaatacttgctaagtgaggagtacgtgtaaggcatttctgtctcccccgtagggttataggttgaggaaaaccacttcatagcacacrcaaaaggaacgtggaacgcgactttacttaagaatgcctgagagacacccagtggttctgaaacttgggtgtttggcaaacagcttcttgaaaatgaatgaagtgaatctgtcacttccaggaaaacaattgacagtgtttgttgctaatgataaaatttgagcttgcaagtaaaaatcacaattttagaaaaaaattttatctgccacttaggagcttgacagctacattaaattacacacttaagatcttttttgatgagactggtgggtgatgtaaataaatgtgatttctttgatg

SEQ ID NO: 1142 - DNA, 600 bp, Bovine  MMBT13545
gggcatggggcgggtcttgtattcagagaaaagacagaataaagaatgagctcacagccaacacccctcgcctccctcctcctcctcaggagcacatcagtgctgtctgataacctgcccacccgcagagacagcacctgagtcgactcttgttgcgggccacgcgggtgagcgtgtagcggttgatggtgtagaagtagtcgtgatacggtacatcgtgcgtgaggacctcggcgtcgatcacatagcactcgctctcctggctcgccttgtacatggtctgcagggaagaaagggtgrggggatggggctgaagaggagcaagacgggagaaacccctccttcccgacgacctcccccagcccgctcctgacttctgaactgggacccagaaccgagggaaacgcagcatctaagcactgtttcaggctgaacatcactcccgcccagatgttcatcctgacgtctctctcctgaatcctttacagcagaacagaggccgtgcccgcccgacctcagctcacctgygtctccctgacggtggcagttttgggagctagagggttggtaagggtgatggtgtaaaggatcactcggctc

SEQ ID NO: 1143 - DNA, 600 bp, Bovine  MMBT13614
agattctcagactcccttccctggaagcttcaggtcaggagagggcccagagcgctcaggctttgaagagatggctgatgggggttgcgtgggaagaggggtcctgggagcagccggtgctggggtggaggcagaggaggcgagagcgggagggaggagaggcaactcctgcttctggctcagggaggaggctggggatggcgggggcaagcgcttatggggagcggggaggggagtgtggctggctgcagccttgggtgctggggttgccgcaggagctagaaggtgtctgtctgtgarggtgttgggtgatgtcattttgacctttctaatgcccagagctgggtgggtgactgtgggtgtctgttgcttgtgggtggaagaagacaacgtgtgtcgctcgcacacggggcagggagttgccatgcctgctcttggagcccttcctagaatgagtgagagtcagcgcctgccctgtcccagcccttccccgcttgcatgtgtctgtgcaaggtgtaaatgtgtgtgtgtgtgcaagcgttcacatccctgctgcagtcctggcccactggaggagcagtggctgttccacgtggtgta

SEQ ID NO: 1144 - DNA, 600 bp, Bovine  MMBT12931
gagtagacctgaaagacactatgaaccaattcaacataatcaagatttatacaattttcacccaacagcaggatacaaattctaytcaagttcccataaactctaaaccaggagacayggaactcaagttattttttattttaaggcaaargcattccaattattataataaaggtacatgtagaaagtggtgtacaaagctcgacaccctcctgcttgcctggtttcatggctaaatgtttgggctctgaatgtgaatcacggctcttctacttgctggactgtgtgatctcaggctarttacttaacrtcatcttcagcatctgtgaagggggactgatgatacctctagtatttggggggaagatgaaacaggctcaccgcaatgaatacttcacagttcctggtccaggggaagaactcagttaaactgttaggatttagcattatgaaaactgaaactggattcaagaagttaaagggattcttctcacagctttgagatgtgcaaacaagagtaggactccaacggatgttctgctgaacttatttttctgtttcctttgctgtctcacaatcatgaatcatgttgaatgtggg

SEQ ID NO: 1145 - DNA, 600 bp, Bovine  MMBT12925
gctgttcaaccactgttttgtgtttccagctggttctataaccacattaaatagaactagtattctttaaatacttttgattttgacataaaacattagtgtacaactttcacaaaataaatcagcaataaaaaccgtgggaaggataacaaggatagcagcagtacttaaaaacaaaataaataaaaatacattataaagtggttgagagacaaaaataaaccaactttaaaaatccatactatgtgttgggaaggctgccgtgcagcaacacctggctgcagccggggcgtcttctcrgatagctyggcctggacgaccgcccgacctggactgggaccctgggctgggcgagccccgggcctcattcccaggcgcttctcccgggaggagtcggcggacggctggcagccgccccgcagcccctccggtcttcctaaagcactgaggagcggtggttggctacatccctgagggtcggctgatggccgctggtgaggcaagccttggaggtcgggccctgaagcttccgggcagaggcggggggacggggttcgtctgcggctcccgggaagggcagggggcggggggctcacccgg

SEQ ID NO: 1146 - DNA, 600 bp, Bovine  MMBT11787
taaatggtgaacttctccttagcatccagttcagattacatattggttgaacaggataagtaacaagaaatcaactcatttcttctacttgtggtttccccactcacattacctcatcacagcaatgtctcctcttttgccatcagtcaatggtgctgggagcaaaatcaaacactgacctgtgctggaacgttctcctctggatcacagccatgttcccctaggagctgtgggaaaactggctttactccaggagaagtcagcctcccctcactgctgctcactaataacctttcctcrtttttgttcggatcttaatgacctcaacctttcacaagaggtttgcctcccctttttttttttttaatttttcaacaggaacacaaaatagcagataacccaaagaaatgaatataatttagatggaaaataaaatctatctaccactgtgtgtatgcagcctgtgcgtctcattggcatgcaccagattggactaaatggcaagaatttcccaagggaagacaatctccagatactgctacaaaagctttattccccacactctgcaaattatttaatttaaacactgcttgatatgac

SEQ ID NO: 1147 - DNA, 598 bp, Bovine  MMBT12811
  misc_feature (1)..(112): n is a, c, g, or t
nnnnnnnnnnnnnnnnnnnnnnnnnnnnnnnnnnnnnnnnnnnnnnnnnnnnnnnnnnnnnnnnnnnnnnnnnnnnnnnnnnnnnnnnnnnnnnnnnnnnnnnnnnnnnnnntgaaatccttttgaaaattaaaaaaaaacaatttttttttatgtggaccattttttaaagtctttatttaatttattacaatatcactggtgtttttggccatgaggcatgtgggaatcttagctccctgactggggtgcgaaccygcactccctgcattggaaggagaagtcttaaccactggatcrccagtgaagtcctgaaaatttcttgctttaagcttgtatttcttccttgggaaaagtgatgagtgagccrctatttcatcyctcattctcagacyggtacatactattgcattctgaactgtatctgttgcatttcacgataaagaattacgttcatcttcacctgagttcatagagttggctgtattttatagcacctgctttcattaaagtctaagcacatgcaagaaaatgcaaatacagttcctaataagcgctcttggatgggagaggggtttttaacaaaatttctttgtct

SEQ ID NO: 1148 - DNA, 600 bp, Bovine  MMBT11769
ttccatccttgaatatattcataatggctgttttaaagttcttgactgttgtgctagttatcaatttattgcctctcagagctaaatcaacctttcatgatctgctcttgctaatggatcagaccctttaatccctattgttgcaattacaatgttaatttttgccagtagaggaagctgggggtactttgcaggagaaagttctatcctggttccagcgctcctgttcttgttcgtttgctcttgttgtatgtcttaaccactggactgcaaaggaagtccctaaggagctgcattttrgtttgggttttatttccagcacctggccctgtccttggcatctgtaaaagtagtgaactggatttcattccatagggtgactcctaggaggaccaggccaaagacccttccccaagagggtcaccagcaaagaaggctctccctgacctttaatcttygcctcttcctggtgtaactggcaggttaacctctccagaggcagccaagacctccctcttatctcctgcatcctccaagtcagcatggaaatgaggtctcccaggggccacagctgcgatgtatggccctcagttggctctt

SEQ ID NO: 1149 - DNA, 600 bp, Bovine  MMBT13970
ttgggtcccctgtgctctcagagcataagaggacacgggggaaacagcagatacagaataacttctgtccctttaaggaacatcttcactcagctctttgtcaccatcccaaggcgtcttggcttgactgagtcagagaggctaatgggcagggacttggaccatatattgattgaccctgcagcatctcaagccctttacaggggcatggagggttctcacagaataagccacacaaatcccacagccttgaaattctgctttgcctcacccagtaggggtcccggtcccctggagtcrgatgcaaggactgcattccctggctctgagcttaagctggttgttattggatgctcaggctggtgtctgcatgataaccccggagctagcatactcgggcaaggggcagatgggaaggtccccaacatgagtctgttgtcagatgatgactaagctgccctcatcgccaccgggccttgtcacagtggaatcatgtttgtcagacatgaattgtaaccttgaggttatcacatgggtccaggggagggatgcagacagtttgcaccaccacctttgatcacttcttctggaggcgtggag

SEQ ID NO: 1150 - DNA, 598 bp, Bovine  MMBT14192
  misc_feature (1)..(129): n is a, c, g, or t
nnnnnnnnnnnnnnnnnnnnnnnnnnnnnnnnnnnnnnnnnnnnnnnnnnnnnnnnnnnnnnnnnnnnnnnnnnnnnnnnnnnnnnnnnnnnnnnnnnnnnnnnnnnnnnnnnnnnnnnnnnnnnnnnntgggggaaaaatgtgggtaccccaggagaactagtgccagctctggggtctacgcctcaaggtgctgcccctctggacaccgcttctgtgttttctgatacatagtctagcattcagaccccggacacatgtctcctcacagctgattcaggcttgagggaggcacagacrtcctgcatggttgtcaggtccccagaccacagtccctgaagccttgctggaccttgattggagcttggaccccttgagaaccagggggcatcggtcttcagccaggcccaagttggctctcctgaatgctgagttgcatcatttaaagatactgagttgaccacgaagatccacacaggacagaagtgcgtgttgacatgtctccttccctgtacaccatttgtgtctgcacatgtgttcacagcgttgagaagaggaagttctgaagccacagctatcaatctttctgcatgtttgc

SEQ ID NO: 1151 - DNA, 600 bp, Bovine  MMBT11739
cctctggaggccagtagaacacaggacctcttctcatatccccagtttggtcctgtcgaagtcrgcagatgaactaaataacttcttgctcagtgaggtggttgaaatctagggttctagagggacacctgttggaggrtgaatcctgaatttccacctattagctgtgtgatgctgggtaaggcacttaacctctctaagcctcagttttcccatttatgaaatgagaataatacgagggcctgcagcgcagggcttggggtggattcagtgaggtgctgggtgcgcctagcacagagrcagtgcccagtgccagcccacagctgtcattgtcgttaaagagactgttsctgtcattattaatcatcacacccattctagttcttgggtggaggcttctgtcacatgcatcctggggccctagtccccacactcctagcagtgtagacaccctttactcagaagctcatatatgagtttgtaataagctgcctctaatcttttgtgctctccttatggacaagtatcaaatccaggcaagatctgctaccaagctagcttttaatgagggacttagcctgaaccactggaaccacggga

SEQ ID NO: 1152 - DNA, 600 bp, Bovine  MMBT12057
ttagggtaagtgggtgtgtgtgttcagtggggtagtattcttgccctttcctctatggccccatttaaaacaaattcattgtaaaccacaacgttatggcatcaggaactttaaaatactaaaaattatataaacactaaaaaggcaaataaaatcatagctatggtacaaatcaatcagtttgatgcacagaatcacaccttctttaaagtatagctgaaaccctaccaccctgccatgaaaactgtccttacaggtttgggayrggaactcaatacaggtcagagggtcagctacagrgagctttgctctccactgcagaagaaacatttccagtaaaccaggaaggcaaaaccagaaggtgctaagtccccttactcacctggacagatgcctctcaaatcctctgcttcccagggatcggggtcccatggagcttcccctctctccagctgggagatcagatcaggtctggggaatggagacactactccaacaagacagagagacagacaagttgaggggagacatccagagctgttactgagagccctctgcccaccccaaggcaggcgagttgagttggggggagaaggggac

SEQ ID NO: 1153 - DNA, 598 bp, Bovine  MMBT14248
  misc_feature (1)..(90): n is a, c, g, or t
nnnnnnnnnnnnnnnnnnnnnnnnnnnnnnnnnnnnnnnnnnnnnnnnnnnnnnnnnnnnnnnnnnnnnnnnnnnnnnnnnnnnnnnnnnactcgccttgtcttagaacaactctctgagatacatacatgtcatcaccttcgttgagataaatgtcatcccctttattctaaagatgaggaaactgaagcacagagagttcagtcatttgtccaagatttcacaaagctagaaaggaatatacacaggcatggagttcgggcagctcaccggagaccattctcttacccaccacccacraatacggcgtatttatttaggacagcacctggcataaaatgctaaataagtggtgattgctattgttgacatgacagatcttcacgttcttttgttatttcctccagggaccgaagcggatgttggatgctcaagtgcaaacagaccccgtgtccatcggaccagcgggcaaatccaagtaaacaaatcttcacggctcccatcaggttccgccaccggagatgtctcctcccgactctgtttccccccaaaccctctccatctgtatattttttcttctgatggccatcccatgaaa

SEQ ID NO: 1154 - DNA, 600 bp, Bovine  MMBT11738
gtctgaagcamagttggtgtgtttggtgctcaggcagcgagcatggctgcagcttagtagtttggggatgtgatgtgagtgagcacaagggctcccctggttctgaaatgaccttgaccccattcagtgagaaaatactcagaagagacagttgtgtggaatttgtcatcactaatactgagaagcagtcttggtctgactgggaaagagaggtgctgctgggaacccagcccccttgyaaggggctggaagctctgtgatggaccactgagccctgtgtgttcagaacttgccaggtgrccccgaagctgtggatccctccctacctttctccttgaagactataaatatccacatagatttctatgggatattattcttggagagcacttaggactccggaggattaaatcacgtcctaagctgaattcttacattgagcgtccatttggcatctgtgtgactctcggtgacactgatgccacgcatgcagtattgacacattcactactgcagggtcaggattcaatagctgtggttcagccacacagcttgttaagtaagtcattttgacagtcccctgtatgctcttaatattgc

SEQ ID NO: 1155 - DNA, 600 bp, Bovine  MMBT14261
gaaccctgatgcctaacaccacattaacctacgatatccagaaaattaacctttttgatagtttcgaagcctcacggagaggtaactattttcacacttgtaaaagcttctttgggtgatgtttctgctcaagtcaccttctctttgctacctgcccttttgcacagcagacatctctgtgccaagggtttgcyggcgatctcagcccagcatcatctgaaccctcctaatggacgttgcctagttctgttttctgggcctttctgatcagcttgcccttcagtgccctccactctatgrttaactggttcagctgtgaatggaaaatgtcaagcttgatctgtttttccttcctgaggctgagataccaccatgaaattgtacagtgcagtcaaataaaactttgtggaaggtcatacctactgagcatgtggaaatgcccacaacacacagacttcacaacctgaattctaagcggccatgagccactgggtttacctagcatcctctcaaatattaccttattccctttccgcaagatcagagaaatgtgaagattatgaatattgaatcattatgttttacacctgaaactattat

SEQ ID NO: 1156 - DNA, 600 bp, Bovine  MMBT11802
aggcctccctgtccatcaccaactcctggaatttactcaaactcatgtccattgagtcagtgatgccatccaaccatctcatcctctgcyatccccttctcctcctgccttcaatctttcccagaatcagggtcttttcaaatgagtcagttctttgcatcaggtggccaaaggtggtgtctcttcaggcccccactatggctgctataggaggacctctccagtgtttatccccaacccgagaaacacaagggtctgtatgcacaacaagggctygaatggcagcgatgctcagctcarggatttaccttcatctggatttggctctgcaggcagaccctccactgagactcactgggcaggacttccggatcctccactagcttcctggtctctgtcacaaatctatcttggtctccaaccaagtttgtctgaactttccccaaggaccctctcaaacctctgtgaccctgctcttcaccttaacacccttcttctgcttctgcctgatgaagctccatgcccccctcaccccaggggaaaggcttcccttcctttaataaccctgtttagaaggaacaatctgtctcttgagccttt

SEQ ID NO: 1157 - DNA, 600 bp, Bovine  MMBT12592
gtggcctgtgcagaaactttggtctgtaaggtcctcagcttggggtctgtctgctgcttgagggaaacctaattgccatgatggtagtgatgtcattactagtaaccacagttatttaatgaacacctactacgtgctggttactttctagaagttatctcacatcagccctgcctcagtcctgtgagggtaggtcccgytgttcttcttttataaatcagggaacattaaggtttggtgaggggaaggtactgactcagggacccgactgggctccagttggtaatcccttgcagaccrtaccctcattgaaacctcacaaccagcctcccacctcacccagatccacctctcataacttttaataagaagtaatagcaccaagcagcgggcataggcttcatttttaattatctaatttacatttaattttccccaccaacgtgatgcagtttattaatgttttacctaagagcatatatttatgggctaaaaatatgtttacaaaactaatgggcaacacttctcttttggagtcccctagttcagacccagggactccagctggagccttaggtcctatgacccagcaaccaacat

SEQ ID NO: 1158 - DNA, 600 bp, Bovine  MMBT12753
tggcctactgatgtttgctggtagattatccttgtaaaagttactattgtcaggtttcattttgtaaaggtagtgaagactggcaattcacataaattcctcagcctcattgctcgtgatggtctaacaactaagaacaaaacagaaagataggctcattttaaacaaatcttcttgcttcaaataatatactaaacagacawacagcacccccaccccccggcaaaaaaggaaaacaaaaaaagaaaaaacaccttacagttgaatttactgagctgaagaggtcaaactttgccagartcagggactggtaactgacatccagttatccagttcagggattcattttcccttttttcaatagtgaatgaaattccctttttaaaggcttataatttattgtctaaaactggaactgggacaaattcaaagcaggatgaaaggaagtctccaaaacaatagcattgaaattctcccagggctgtttcaattgtgagaacttagagcacctgaatggctgcatagtggtgaggcagaggactcaagagagtggcaatgtgcccaaatgctgtatttttgtggtggcctcctttgctggat

SEQ ID NO: 1159 - DNA, 600 bp, Bovine  MMBT13728
tctactgtctgagcctctgtcccctggtaaagagtaagccccttgaaaacagaggctgttttatttgttttcacattctgagcacttagaacattgcctgatrcatagaggtaattaatatttggtatgagtacaagtgaatgamtgcatgcaatacaattaactttgcattggcgtggaaattctaatttacctctttaaattttctccatgtgtatttggagtgtttctttctataatagcyttggtcccattctaacatcctaacctgtcccttctgattgttttctakttccattrcctggtaactgctgtctctagcaggacgtggctttctcctggagcaaatattatctgccactgaacactgttttctctactggatcatgtgttctttccttgtggagacaaccaagagtttactatggctgtagtgcaattggcaactgtcagaatcaaaactcattaataaaaaaatgataatgcttcaaagtacattacattactccttcaaaggcctttgtgaacattatcttattaatcatcacaatagctcaggggaagataaacattgttggttatcttacctagatcatattt

SEQ ID NO: 1160 - DNA, 600 bp, Bovine  MMBT13683
actccgtttatccgattatcaccaacatgcataactaagcggcrgattttacgtgtatcaacataagggctgtctccagattttctgcagactctttccctccaggaaatacctggaagagctttctattcatcagaggacacgagcactgctagctgagtgagcaaagcaaagctccggcacttaaaattgtttgcctggagctaagcgtcatccatgaaagaggaaggaggaacaygcctgtgtgtaaaatgaggtttacggctgggacaccctggccaggaaactgacgctggaaartcagtgtcacaccaaataaartgttgtcagataaagagggaaagggcatagtgtcctctgattggccatctcagcgaagacttgccacttctcttggacacgacagtaactagacctggcctgtgggactcacacggtgggtttgagttataaattgtcctgtgaacacattatttcccattaattgtgagcgaaactggaaacgtttcaaggccacaaaattaaagctctgaacctcctagcttcagctttatgtgaccatatggtctccattcacttagaaataaaaccctggaaggc

SEQ ID NO: 1161 - DNA, 598 bp, Bovine  MMBT12630
  misc_feature (1)..(103): n is a, c, g, or t
nnnnnnnnnnnnnnnnnnnnnnnnnnnnnnnnnnnnnnnnnnnnnnnnnnnnnnnnnnnnnnnnnnnnnnnnnnnnnnnnnnnnnnnnnnnnnnnnnnnnnnnttccttcccctgaactgaggggctactttataatctggtcaggcactggcttattcttgaacctcgggtgttcatccaagacgggctggacagtgaaacactggatgtctgcaattcctgtagttaagagctcacaacatgttggtcgggggtggggggcagttccaagcacagcaggtcccagctgagaccygccrccccccaggacagtcctctggggccaagtttttaatgagtgacaaacctcaagatcctaggtcctagtgaccacttagcagtcaccgtggtccttaccagagctgcaaccctgtccgagggctcagcctctgytaacagttggttagtattaatagyccttaatctttgctatactattatcatgaacaagagtaacacstaatgyatttgtagctcttgattgattgcacagaatgtctcccctcrgtctcctttcatctctctagttccactgaccagcactgttaacgttaatca

SEQ ID NO: 1162 - DNA, 600 bp, Bovine  MMBT12420
ggtggttcttgatcattcttccacgatgcatctgatcccctatccctaggggaacaaacaaaggtcaaagggtcaaagtacttattaagattctgttaagtgcttataacctaatagcatggaaaataaaaaagcaaaagacctaagctcaatcttaatttgcaatatataagacaataagagaaaagaataaaggttcatttctctgttctttatttaagaaaatgtgggaaaagcacacatatatattaggagtggagaatcagaatgagaagtcgacaccaygctgtgcagggcaargtggttctgcaattcttcagcagctccaggtgctctgactctgactgatactctcgtaatacctgagctcagctcataaacctccttcagtaaatacctatccaagaccaccatcagacgttcaggtgccaaggacacgaaaagggaatatgaggtatttccttatgtaagacttyacaggttcaacaacagagatcayaacatgaaatgcttcttcctcaattcacctgagaattatcagtgatcctccatgagtaagcaaggcttgttccaagagtgactctcagagcagagggtaga

SEQ ID NO: 1163 - DNA, 598 bp, Bovine  MMBT13407
  misc_feature (1)..(19): n is a, c, g, or t
nnnnnnnnnnnnnnnnnnntataatgaggagggcaatgaaatggcattccgagagtcaatggaggagaaccctttagttctctcctcagggaatagctgaacaagtgattgttatcagagaacattctccagagttcccagccatgcaggattactcacttcccccctcatcaacacccactactcggtgcacatctctgaaagattttatacacgtgtcacatagacccttccccacatggcaggtacgccgcacgaacacggtcatacgcatctcactaaccagccacccaaacccmrccggctctgctgctaccccagtcagcacaggttagagatcccttcaacaaaaycacagtgagtgttggactcagatgtctctcatctcctccccttcaaaaaccatgttggaccccacttagtctctactctctgctcttgacacacaccagccttaaccctatgcatttacacctttctaaccatcctatttaaggacataattttaagatgtgtgtgcagaggtaattaccagggtgttcttcaagccttagtataatattgaaaacgcaaaacatcttaagtgcctagcattaat

SEQ ID NO: 1164 - DNA, 600 bp, Bovine  MMBT13597
ctttctctttatcacagagaagtttggagataggcagtccagatactcagtaccgtttcttaaactcacagatcactttactgctttggggcctgcacccctacatccttattccttttttctatggagcctgcctctcatctactctggattagtttcttctcaactatcaggtagcaattaaaatatcactcttcagggacatctccctcaactcataatccaagttacatcatccttccttcccttcctggcactcgtctccgtttgacactataggtacacatagtgtgtttgccrtctgtgcccctcactcctggaagacaaggatggcacactcgtttgtttcactttcgtgtattcactcatcaacatggtgcctagcaggaagcacacgcatgaacagttactgaagrgctcagggttaacagttattgagcccttaatctgtgccagacacttttctaagttttacattctcatttaaagctcagactctattaggtagaactttcttttatagatgaagacatggaggaagaggggtgaagttacaaccaaaattcaattcattcttccaatgttccttgcacgcttcat

SEQ ID NO: 1165 - DNA, 600 bp, Bovine  MMBT14127
tcaaccttaatccctagaaatcccgtagagtgtgtcaaattagaactccattcccacaaacacttcttcacgttgctgtgcagtgaattcaatacattccttagaatttaaggctcttaagcatttttgctgaagtrgatcgatgtcctccttgccccctgcttttggctttcctctgcttcttccttcccaccgtactctcctgatatatttcaaatccttatactctacatccccccaaattctattggtttcaatttatgaacgatctctgtaacatggctcccctggagaaggaartggcaacccactccagtattcttgcctgggaaatcccaygaacagaggagcctggcgggctatagtccatggagtcacaaagagttggatacgactcagcgactaaaacaacaatgacaacaataayatggccatcccctcttttatacaaaacctgatgttttggctttgkatgctgtaaaacttggacaccaagaartatgcagaaatccaaagtctaacaacaaaaaaagttactagatgcggatatatagtatgctcttctgttggttatgaaagtaaattatttccttttctttg

SEQ ID NO: 1166 - DNA, 600 bp, Bovine  MMBT13949
cagtcttctctttgaaagctgtcaagagcttctcgtggcatctcagccagagtccaggtaccttctcaggatctgcatggccctgcctgtctcatccctttcccctctgccagatgagcgccaccagggtggccattctgaacacaccctgcgtgttccgagtctttgcgtattctgttccctctgcctggaaccggcaactcttcccctacctggagtaaaccctcygatttcaccattgcttcctgctgatcactgggtgtctgctcccctgtcctgtcctcagagaggccttccccraccgccttgggggtgggtgagtctccagcagctgtgctttaccttcctggcaccgaccaggartctggtttgtatactatggattgcctgagcctcctgcttggctgtgggcaccactagggcaggggtcctgccttttttctctgctgttcaatacccattgcccagatccagggtcatagcagacattcaatacaaactcgttcaaggatcgagtgaattagagaaaaaataagctttgggaacgcagagaacacagaggactgtgtacaagaggctgacgttcactgaagcaactat

SEQ ID NO: 1167 - DNA, 600 bp, Bovine  MMBT11637
ggcattgaggaaggtcaaatccattagacacccagggagctgcctaccttgagtcagctgcagtgcttcctgctgtagtcactcaggtgccctgaggcacctgcatcccaagcagtgctggcacctggcagggggaagagagagggcttcacactggaagttgctcagaagtgaygtttatcactcaccacccatctttcagaaattatcacattgcactgatcacatgaaactggtagggccaaaaaatacagcccactctgtgtccggaaggaaggagaatcagaaatattccagggrcagcaccaggggccatagtgagtcctactgagagagaaaacaaattgtcatattgctctcttcccttcaagaaatggagrtggaagaaagttctygatggmtgttatcagggctcattccatacaaaggaaagctcagagctgagtggaaagaactmagctcatttattttgcttaataaaggaagtgaaatacaaaggtgagaaattcttgagggagagaagctaagcctcctgtgtgtgagtaaatgacttctacaaagagagaggaagagagagacatctaatagttaaaactgctg

SEQ ID NO: 1168 - DNA, 600 bp, Bovine  MMBT12196
gggctctctctacctaacaggctttcccaggactgaggcaagcctctcttgagtattcctctcagtrccccagaagtaagaggttttccagtcatgttggtgggaacaggaactattctcaattctrttatgagctctgaggattgttccttttgatcatttcaagtggttctctcctggccttgagtaatttcttcacaagcatatgccagtcattactcaagggagctctcacggggagctcggcaagtctccagctcactttctcygtgcagccctcttttctggtaccctgccctrtgaagtctaaccaccttggcctccctggacttgcagctccatctcctcaattcagagagaacgctgggggccgcctgggtccccctccctggacgatccccacacgggagacaatcttacagatcaccacctgtttcctctctttcaagcattatggtctttctttccttgggyttttgrttgkttttttttttacctttctaatcactgacctatttatttattttttgaactctttattgttggagtatagccaattaacaatgttgtgaaagtatcaggtggacggcaaagggactc

SEQ ID NO: 1169 - DNA, 600 bp, Bovine  MMBT13838
tattttattgtactcaaacttcacaatgactctcccgtttttgtgacagaagacacaggctccaagaggttacagactcgcccaagtttgcaccgcacataacgaaattaaaatttagtccttggtgattcttcaagctcttggcagttttagggtggaaattccctgacatagcacgagcagaaaaacactctccaacacggatatcgacacaaagccactgcgggcatggacccaatgtcacgtgtagatccaccgtgcatttccagtgctcagagggttgtaacttgatcctcttcrgtgaggacaaccccgcaggcattatcagggctgagcgggtatcagaggcccctgggccagcagtcccttgrctgacttccagcccataaattgtcctaaatggcctcctggttttggctgttggtggagggtgggagatggagaggccctgagaggcagtatctttcccatctgttccacattatgatgctgttaaatatttcatgctctccattgtcccaacaaacacaaacagaactaatctctgtgcttaagcttccttgactgacattgctggtgattaaacaacgtacttatttt

SEQ ID NO: 1170 - DNA, 600 bp, Bovine  MMBT11502
ttccaagaacccagcagtgcctccttggagggtgacccctgggagccaagactggtctaggatatgctgcaaattatccaaaggtttatagcagctttggcggcatgacaggtatacagaggagctcaaaatcttaaaaatccatctgggtaaataaaaccaagttcttctgcagctctacattttaattcaacctgaagtttctgaacagtgctgggtcacgagcctgacctgtcatcagtggacagctttgatgacaatccattcaacttgtctcctgggaggagggtgtgcttgccrtgtgcagtgaggcagggaagagaggctcctgcagccaagacccaggcagacttggaytcggccatccatcttcctgctcccgacacagttaagagctgaatttggtccagctttcttaagaacttagctcaccctgggttaaagcttgggcrctgggcccttcaggaatcccaggggattctagatcaacttcattctctctaaggtaaagcctagggctgatgtgatccagtgtgtttctgaagctccaggcatcacatccccaatatgacagtttascaagtagaaaggaaggggcta

SEQ ID NO: 1171 - DNA, 600 bp, Bovine  MMBT12873
agaacctggtcctgggaggactcacttggcgcagtagaggaagtggtccctccagtccacctgggcggtctgccctgacagcgtctggttggctgtgagcagcagctgagtgcggttgttctggaagtactgcaggaggctgttgacgcagcagtcrgacagactggcgttatgtgggttgaggggggcgtagcaggtgtcccgcagggagacgttccgctgctcctctggcgaccacacctgcagatgccgcagcctctcctgcaattccagcacctcyagcagcagatccgaggacargatcccgctgaagttcttgggccccagcagcagggagtcatacctatagctgggccggtgaggtgctgtcatgaacacctggctggttcggaagaaggggccgaaatacttgtcgtggaacgccttctcacgtcgggctaggctgttgggggctgaccacaactccacggggtccgtggtcagttctataaaagccaggccccctgccagggccaccaccacaatcacagataccgccaggatggtcagtggccatgaggccacccaagtgccccagcactggaagcagcggctgaggag

SEQ ID NO: 1172 - DNA, 600 bp, Bovine  MMBT12058
ctgaacacaggcccaggaagacctcaaagacatttttgcaaaaaaaagaagtaacacagagcccttatatttcaggagaaaagagttcctcctggtttgtcaacatttcacagatctatgcaatcacacttaggtaccaaaataacagagcaatggaaatagaagtgctgaattgtaaccaagacagaaagtctccatgctttaaatactggacactgaacaacttctgcctgtaattcctcagctcagatacgaggaaatggtcaatccagtgtgggtgtgttgagacagatgtggaarcagggtcttcactttgaggaagtgagaggaacacagaaccagggcagtagaggaggaggaggtcccagagcagaccttggcttccctctcaaacagatgcagcttctccttaasaaaaggggtgaggaggagccactcggttaagaggaggaaccacttaactagccactagtttaggagccacttaactcccaggggagttcgtctacatatattttgtaatttgcctgcatctatttatgtattttttataagtactttttagaaagtacttaattaaatcatttcgttttggctgcc

SEQ ID NO: 1173 - DNA, 600 bp, Bovine  MMBT12938
aagatgaaccagatgtcaagggagcaggtctacaggcagggaagtcacagaaacggcagctgggccccaggaatgtgcactggatactgaggtggaggttgcctgaatgtgtgctccttgcatgccagaggcccgcccctggggtgcggagaatacaagatgctgggctctggcccccaagtccatgggctccacaggtgtgttctgaggcccagatatgcacactttttgaaagttcccttagtgactctaatcatcagctgggtttaagaatacctygtatgtttctcagagaggcarccaagctcagaccaagyaggcccactgggtacccctagaacccagaacaatggcaggtgggagctggggcagggctgatgatgactgtaggagaggttcctgtgcccactgaggaatgaggtagacatgggagagaatgcacttcaacagggtccctamaccctaaagacatccttagaaggcctttgaggttgtcagtagaaaacatgcaatcagyaggttcatcctgcctaaggagaagtgacagctttgggaaagaccagatgacaaactagaaaacagagctgcagtggcatagct

SEQ ID NO: 1174 - DNA, 600 bp, Bovine  MMBT13066
gtgatggctataaagggagtgaccaggagcagcggagccacctgtccctcccatatccaatatatgtgcttcacagaaaaacaaaaaaacaggtccacaaaacacaacagctaaaattacaaaaatccattcatccaagggcggtgggaggcagaaagggtaaatggaagggaaatggcacagggagaaaragtattcaaatcagtccaggcacggggctggcaaatgctagaaaagagctgcagaaaaacctgtggtcctttcagactcaccagtgtttaaaatccatactggtcgcargaagattctgccttacgtgcaccagagacaaaaatctggattcctcagagagaagggaatgtgggcagggcccttggcagggtgggccctgccttccctgggagaggtggaggtgaaccagagaagagccgccacagcatccttccgatcccacccggcccctccagatggcgggtgaccaactcagcggcctgtggcagccttcagtttggcaggagacgggtgtggcgagggtaatttttctgcagaagtggagctgctcagggccgactgtaggtagaccgtcttatggaagagtct

SEQ ID NO: 1175 - DNA, 600 bp, Bovine  MMBT14285
cttcacagtctgtgtttgtatctagcaggtactgtccttcaccccctraagcaggtccaaactggagggcacgtctcctggtcagcctgtctgctttgaggcactcaggtcagtggtagctttttatctttggggaaacaggagattgaatcccgtgagcttggtctgtaatacgtcttttccatctgtcaggtcacgtgcattctttctgtcccgcccagggcagcctgtctgtgggtgcacaggggtcagcgagcccctgatggcccttcagccttcccaagccgtggccsaggcgcrtttaacaggacatgagaagcccttctgggacactcgagccttccagtgtgtgtggtgttttttaaaggatttactgttatgaayctgttagagtaaatattactaattataggtaaatagtataaaattaaaccaatattttgaaaacttatcttaaaaagtgattagaactgcttttaggtagagcacttttgtgtttgaataggcttttgcgttagtgtggaattccccggccccgggatctgctgagattgtgggttttggtcccgttccagatccttccacaaacaagaggccgtt

SEQ ID NO: 1176 - DNA, 600 bp, Bovine  MMBT12955
tatatgcatatttaaatgctaaaatkatacttatttttattgtatactgcaagtaaaacaatacgacagcatatattgtttcctctaaatccagtcttactgccagacctacctaatttcaagggccaatagagtatccatcttcaattctccccacattcctacatatagaaatgtacaaagtcagggttatttttagaaaattgaaaactgatgctaagcatattttacattttaattttcaacacatgctcctcttaaaaaatmattgaaatgtagataattcatttaatatttgtrtaaacattcatggtatggatatattaatatttactcaaaattttcccttattaatgagaatttactctttttgtttttktcattttttgtataaaaatgtggtttaaataataacccttaaattcatcttaaagyactgctacattagtatctaaagtgtacattctctaaatgagatcgttgtgtcaaaaattatgtgtatcttaaagtttctcatagttttacccagtgtgtacgtgctcagtcacttcagttgtgtctgactctttgtgactgcctggactgtagcccacaaggctc

SEQ ID NO: 1177 - DNA, 600 bp, Bovine  MMBT11674
cttgaaggaactctctaacacttcttgttgggcgggtttagttaaataatttctccggcttttctttgtgggaatgtcttaatttctccttcaattttgaaagacagctttgtcatatatggaattcttgtgttttttttttttttttttttactttcaatgctttaaatgtatcagccttgtaacctrcaacattgctgctgagaaatctgctgaaaatctcactgaggatccctgtgcagcacagtcacttttctcttactgctttcaagattctctttttgtctttaactttcatcrgtttgactatgtctgtggactcaatctacttggaatttgttgaaatttttgcattacacctcatctctttcctcaaatygggggactttttaaccattatttcttcaaataagcttcctaccctttctcttccaatctctctgtcccttcttatgggttcccgtaatgtgtrttattsgtcctttggttggtgtctcatgtctcttaagctctcttcactttttttaattctttttttttttaatctttttgttcctcagacactatmatttcaaattatctgtttctaagttcatttat

SEQ ID NO: 1178 - DNA, 600 bp, Bovine  MMBT12984
ggggacaggttgcaaaagtgatccaaagctgccatctgggtgctggaaagactggaggtgattggrgatgggaatatttctggcactgggggtgcgggggtgatgaamagcagmctggggggtacaagaggggggccacaggatgattctgcaaatctcaggctatagatttttcagtgctcaccaattctgaatttttaatgttgaaagtttcttgattaggcataaacccacaacttcctgctcaaaaccacacacacgcatttagcaaagcctcttaaaaatttaaaaattaccaarctctacatttgagagtttttgactgtcaacttagggacgtcagctatgattctcttttgtactgtgatatgaacattgtcgggatttgtctgggcttggaagccaaatttttttcagttgttctttctaacattaggctaaatcatatgcatttataacataaataaactgcaccctcaaactccatttaataaaggccagtgcatacaaggaaggattgctgagttagacatttgttctggcttgaattgtatccccctaaaagatgtgttgaaatcgtaactccacagttcctcagat

SEQ ID NO: 1179 - DNA, 600 bp, Bovine  MMBT12282
tgattcattggaaaagaccctggtgcagggaaagattgaaggcaggaggaaaagaggacaacagaggatgagatggtcagatggcatcatcaactcaacggacatgtgtttaagcaagctctgggagatagtgatggacagggaagcctggcgtgctgcagtccatgggttcacaaagaggaggacccgactgagggactgatttgaactgaactgagggcttgtcatatttgtctttgtgactttctctctcttatctgtacctgtccattacctagctcactgcctggcatgttacargggttcattaaatgttcaccaatggaaatattaaaatagaacttcacagaaagaactgaacattcctgctatttcatgagatgtttattttcttgagatggagccagcacaattatctatactagcatttctcaaagtgcattccttgcttcagcagcttcacaagactctatgtgataaagaagatcctatgaacagaaaaatttgggaaatcctccctccacagataagaaatgtcctgggagctccctgaatatgatcgccctggcgtcctgatatacctctgaagcaggttgacct

SEQ ID NO: 1180 - DNA, 600 bp, Bovine  MMBT12871
gactgttgcgtttatttctcagaatccatggaaattactactataagcagtaataactcattataaataaataataaataaatgtttttaaaaattgcacactaaaataaatgggagtgtccagccatgcaaacacatttctgtattcagaaacygggcctttggtgaacatagatgttcaggtagttctacataaaagtttcaaaacttctgtttcaaaaacaaaaccaaacatcttctgctccttgttccacacaggagaaaatgtcccacggagagcggattcatccttggagaagrtttgctgcttaccttttgctaccagtagaattcctgagtaattggagtcaggagttttttttttttttctttccttggagcttctgatcaaagctgtttccatccaaatgaaggcaggatggagctctgggaggccagtgctcagaggccaggaggggggtgggcagctttttcagttcaggagatagaagcttcctccagggatttttaaaaagcccttttgaatgggctcattgtttataagaacagctccttaatggaaaaacaaaaaggcaagagggtctggagcacgctttctgc

SEQ ID NO: 1181 - DNA, 600 bp, Bovine  MMBT11791
tggtaaatggatactacagtggcaagatgttgttaggggtgagatgttagctctgcctatgaattaatttgagctagctcctcttcacgtccagattcttcactakgaaaatcagccatatttttttttctgattttgcactaatctgggatctaccacagctgacatcatctgcacttagcttatcatcagccatgtgccctttgtggtactgaagctgaatttagtgatgctggattgccaagaagcaaataattcatttccagttstctcccaagaaagtgattcctaagatgcttrtgctatttgggcagcattcatttcctctgaaatatgttctggatcttcagagtgtgaataggcatgtagcatttgtatttgattatctgttgatgacattgactgttaaaaagcaggtcttttcctgtttcattgcttgctaataggccttgggaattcccttaagcaaaggtctgcttgactttctgtttcaaagatctgtatcacaactacttttaagaggattttgaccatgatcttgtttaagggcttcagttctgcgagggcttctgattgacctcttggcagagctgccagctg

SEQ ID NO: 1182 - DNA, 600 bp, Bovine  MMBT13097
tagttaatttttctaccttgccaatttaatgtctctgccttttccatgkcccctaattcagtgccacttcttcctgctgcagtgggttagttattcctagactacagatattcataaaagtatggttcagatacaaagtcattatattcttaatttaaattgttaagtatacctttatttactttttattttgaaattattagagattcttaggtggttgcagagtaaagaagtctcatgtacccttcacscagtttctaccagtggttacgtcacatataactatagtaccatttcaargccaggaatttgacattggtacagtacacatatgtagtttgtagttctgtttcactttatcttgtgtaaatttctgtggctatgatagcagtcaagatacagcactattctatcacaacaaagataccacttatactatccctgcatagtcatgttcaccttccctccatcgtccctaaccgctgtcaaccagtaatctgtttttcttttctataattttgttgttttgacaatggactcatacaatgtatgatattttgagattggctttgttcatttagcataaggcctttgagatcc

SEQ ID NO: 1183 - DNA, 598 bp, Bovine  MMBT13114
  misc_feature (1)..(109): n is a, c, g, or t
nnnnnnnnnnnnnnnnnnnnnnnnnnnnnnnnnnnnnnnnnnnnnnnnnnnnnnnnnnnnnnnnnnnnnnnnnnnnnnnnnnnnnnnnnnnnnnnnnnnnnnnnnnnnnagaaatgccatggtgttttgttttgttttgtttttaatcaatgaaaaaactccacttgggagattatggccaagagggtgactttggaggttgtgactaaataactaagagtttgatcggataatatttaaagatgtttaggtttgcagaagcctaaggagtgaaagaaaaaaagactccataaaacttaraggtcttcagaactagatggaaaaggcatttccatatcctaacaaccagagaaatgstccatccaacagagatgtggggataggaacttgatggctcctgttagattgctctgtccttttctttctgttttattacatattatatttaaatctagttaaatttactttttcccagttttattcagataataattatacagtgatatataacacaatatgtagtgacatataacaccatacaagtttagagggtcaagcataaggatttgactttcatataggcagaaaccaacatagt

SEQ ID NO: 1184 - DNA, 600 bp, Bovine  MMBT12189
gcttatactctgacgcttgatggatttctggcttcaaatgttttatcaagacaatccaccttgtagccatctccaaagaagactgtgtggctctattaagtctgcaatttgctttttaaaagtgactaaatatgctttttcacaacaacgacaagtcatctccctcctggagccaacagagtttgtcacccagcttcaccggctkttcaaagccagccatcaaaaagcaaaggaaatgtcatgactttggagcggtcagaagctcttaagtcgcagtgcaggctatttctccttttgtgrcacagaaaagagtggacagacacaatgaataaataatcccattgtactyacacacgagtaacaatccttcaaaatgaggtgaggaacaaagataggagatagcggtgcagccctggtcttaacagaacagcttgcaattccagggcctaaactgcttttgcaaacaaacacacatgcggtgaccctgagaaaataaaatttaaaaatggcatccgattcagaatgccaataggctcagcctaaatggccttctgcataattcactttggacatcttcaggctccgtggctaaaaggcagt

SEQ ID NO: 1185 - DNA, 600 bp, Bovine  MMBT13170
atcaagatttcaatagaaaccaaagatgaaagcattcatgcataaaaggcaactgtgataattatgatgtgcagacaagataatggaaaatatacgaggctgcttttcatattatgtatcaagtgctgccttgacctagacatcctataaggctccctcacatttactgcattattttatcattttaattgtttaccagaattcaattaatttgtctgacatctgctcaggagatagaaatcctccactgtcttatagggtctttcccctgaatcatttctcaaaataatgctgcaaaarttttcaataaacacgcaattgagtctaaagttccttttcaaccttcaagtttattaatctcttactgattaagctaatggcatccatttttctggaatgtcattttcaggcagtttatatcaaagtgtatacagacagtttacagcaaaaaatttaacatgtgattccataccgcaaagtttacattgctccatttgaaaacttctggggcagtgaggtgaacagaaaatggtagaataattatcacagagaacagaagagtccacagcatatagatttagcacaaagttcactgcctgt

SEQ ID NO: 1186 - DNA, 600 bp, Bovine  MMBT13183
aaaatatgttttggagattatgaataattagcacccatttaacaaatacaacttgatattcagtatgtaataatacaacataaataaaagcaattattacttcaattatttaaaattatctcaactgccattaaaaatacaaataaaacagttacatactgatcacttgtcattttaatcataaaccatcattccttagataagctgaaaaaaaatatttattcaacacacaattactgaggacctactatgtgccaataagcaactcaggaggtacacaaamaaagcatggtcactgcrttcagctctcaggaagcttaaggactaaagaagattaggtaagtgtgaaataaatgttctagctctaaaatatctgtaacaacatattatggaagascagagaaaagagtaattattttcrcctttaaaaggctttaaaaggtgtcccaacagaacagyrttggaatttaacaaaaacagaaggaaaatacacagtttacrtttgactgtcaataaattacaaccagtattactgttcacaggcacttcacaagttctatttcacctaattatctcaacaacccttaggaccagtgttca

SEQ ID NO: 1187 - DNA, 600 bp, Bovine  MMBT06947
ctatgtcacctctgtcaaagtctccatctcttcctggttcaactgccagggtcactgtcatggacaagcccagcaatgcatgagctttcccctcgtttaggtccctggagcagtttatggcagccaggatacctgaagatctttgagcctgtcttgtgaggagatgacctccatcaattccaggatctattccaagccttcaataattttttttagtcacggagatgacattttttggctctaaaaagttcttttctgggtcttctctgtcctttacgactggcagctctttggggctgmaaaacaatgctatccgtatactgtctggccagatggaagggctaattccccaggcaatggctccagccacaccttctgtatgtttcagttcaagcgaagcctttggctcagatctccaaaagcacatccttctagattcactccttgttctcaatacgaggtgtattccatgaactcccctctcactgcatgtcatgtcctggtgggctggatcataggatcgtgcattttgtgcaatgaacaaaggcaggccaggatggggcctggtgcctgcctggcaagctgtgccccggtgagggc

SEQ ID NO: 1188 - DNA, 600 bp, Bovine  MMBT06696
tgatagtaactgaactgtgaacaagatttttcatacacttaggtattttctcayatttcaaatcccattagtaccttkgttgttctttggataaattaaatccttctatgttcacaatscatcacacttcaagaaagactttggcatggattattatttgttcttcacagtaacttctgtaggaagctacagaatgcattattattccttctctaatccactggcatcccctagaggaggttcagaaagctgaaactcacattccagttctgactctgaacctgggaacttttcctcccmmaaaaaycagttcttttccatttccccccattattttgctaataatcaccaacttaatcatcctggacataaatgttagaaatatacagactagtgcgtgcatgtgcactaagttgccacagttgtctccagctctttgtgaccctatggaccacagcctgccaggctcctctgtccatggggttctccaggcaagaatactggagtgggttgctatcccctcctctatggaatcttcctgacccagggattgaacccacatcaatagttgataatcaatcaagtctaagaagcacagag

SEQ ID NO: 1189 - DNA, 598 bp, Bovine  MMBT13411
accccatctgggtcccacatccaaaacaaatttcctgcrgtcctcagcctcctgtgggccagctttccagcacccagctgcgagcctgctgggtttcctgtcctggttgttctttggagagctggctgccagtccccgcaggaggggaggcgtgggagggccagggcacctggcccagagatctgggagaaatccggagggtgtggagtgtgttctctctccctctctctccttcgatttctcttgctctctttcagactcaaatgctaagccactggccatccctccctgccaggcccmaaaaccctcccmaaccctcaagaaaycccatcaactgagcaaatctccaggtgagaggcacctggctatttgccaccctccctaggggcaacccgtggtggggacattttgatgccaaaatgcgcagagctagcaaaaacaggactattattaggcttcccccagcgtcgcagtcaccagccacatgactcaaccctttgatgtcacagtgggggcttctgcccagctctcactaatatggtatttctgcaaatgctggcccactggcacgtactatcattgtgctctcagcaattat

SEQ ID NO: 1190 - DNA, 600 bp, Bovine  MMBT13356
tggaggaagaaatagcaacccactccagtattcttgctgggatcatcccgtggccagagaagtctggcaggctacagtccatgcaattgcagagtcagacacaattgaattgagcacataaacatactctcaggctccaaacctttgtatttcctgacactgggttccagaggtggccttaaagggtggagcagaaggataatctcccttctggtccagggagggctcctccaaggacagagactcaggtgaggagctaggagaggaggaagatgttcagtgggaggcagggcaccccgmaatccagaggcaggaatgtgcttggtgtkaggtgaggaggaccacagargagccagagcrggtggtgacggggacagggagcctggccgaaggtggcctggtggctgctcttcctgggcagctggagaaggcactggccctgagcccagagcagggagtgaagaaggaagtcagccactggctctctgcctgtgccttgatcctcaccgtggagcccagcattcccattttgaaacccgtggagcggtagttggcattaaaaaaaaaatgtaaatctgacagaagactctctcgtcaggg

SEQ ID NO: 1191 - DNA, 600 bp, Bovine  MMBT14088
atattttaactgttagaattatatccagagtcattgtgatataatctaattttgtaagaaacatgacactgggtgtttttttttaatcatgataaatgtgcacataacataaaacttaccattggtgacatttagcgcattcagagtgttatgactgtcaccaggatctaatgccagaacactttcctcacctcaaaagggaaacctcattcccattaagcagtcattcctcactccctcctctccccagcccctagtacccactaatctgctttctgtctccatggacttgctgactskggatatttcacataaacggaatcataggatatgtggtctttggtgaccggcttctctcactgagcgtacataatgttttcaaagtctgtccctgtcgtagcctgtgtcagcatttcattcctgttcatgcrtttctgttttaaattgtactctttggctcagaaatcttgcatggctctgcattgcctgtccaggagaagtccaagctcttccacatggcatttgctcttctgcagaatcccgctgcccatcttacctgcaccaacccactctgctttcttagttctacacctctgccta

SEQ ID NO: 1192 - DNA, 600 bp, Bovine  MMBT14136
tgtgacacttgcccttcaaacctaaaattaagacaagattcagctcaaaactaaatgttcccaaaccatggcctgggcgcttaacaaggaggaaatgctgtggattcttattgccgtagcagaaggtcagattcctgataggctgatcagagatgtgttttgaattgtccactttatcatcatataatatctaacttcgtagtttcacttggcaagttctgatgagtagagcatggtgctaatgagatccagggagtgtcggccaaacggcctttaacctaagtggtataattctgactkgatatcagaattacgggtccagtcatcacccagatcagttgcttcatatgaaccattatccagtggccaaaaatacagccctgaccctggagctgtcatttgcagccrtgtcctttgtgacaaaggagagctgagagcacgtctacataaaacatgcttatcaccactttaggaaaaagcagttcacttacggccatagragatattcaatagcattaacctcccaggtttatatgagctcatctgagtggtaaacattcttttttaawggagaatattttaataaaatgttgcaaaagt

SEQ ID NO: 1193 - DNA, 600 bp, Bovine  MMBT13865
agtcttcccacatgtcctgttttctaaccttatgagctcataattctacagcttttcccctgccttgatcttgcaaaacaagattctttggctattgtctctctctaatgcctggaaggatttgccctgaggtgtctgaaatatgagactttttatccacaagtctaacaatctgaaattgaaacagacccagagaggcagggtgctggcaggaatgaagggcagggcaatgtccagtaaagtcagagtagacacgggccaagaaagcttgcctctcctgctcccagctccaagccatckccctctcctccacaagtgctgccagggacactgtcaacacctggaccaaactgatacatgacacagtgagcctgacaagacagcctgggccacgkgtatcactcttccccacccccactgcaggaccactgacacagctcttacctgggagagtcacaaacccttgctgtcccccaagaaaaagacaggacctgagtaaggaaggagagaaacaaggaccatggcatgtggacaaggaggactctggcatggtgcagaggttcttgctagccacacactaggatcggcagtggagcttat

SEQ ID NO: 1194 - DNA, 600 bp, Bovine  MMBT13937
tacagtggataagaatctacctgccaatgcaggggacacaggttcaattcctggtctgggaagattctacgtccccaggggcaactaatgccggcactctagagccctcgagccggtatgcctagagcctgtgctccgctgcaacaagagaagccaacaaagagtagcccccactctcagcaattagagaaagcccgtgtgcaacaatgaagacccagtgcaatgaaaaataaattttaaaaaaccctccaagcttccattgcacaggggtgtgagtttgatccctggtcaggaactagkttcccatggttcaagccaaaaaaataaaagcaaacatgactcagagcagaaatcctagaagccaggtcagaaattcccctggaaagatccagtcgttgttatccagaggccaagaaaacacacccatgcgtgtaccaagcccctcctgctggcccaccccactcactggagagttatacaggatgatcccaatcagtagtaaattaatacagacatgacagaaaaaaggggcactaaaataaaagtgtttatttcctctaggtagtgggaggtatttttttaaatataggtgattttatt

SEQ ID NO: 1195 - DNA, 600 bp, Bovine  MMBT13017
tggtatgcattcccagttcaggcgttgatgttttcccaaaggctcaggaccttccaagtcctaagctccacctagacctcgaagatactactcccccccgccaacatcattcctttattaatctggtttcaatttatcaaatactcaattcacagcttatctatgggaacaaatggccttcccgctttaatatttcggtttaatatccctttctgcaagccaggagatgaaatttcagccaagcctacaaagagaggaattgtcagggggatcctttcctggggatcacccagccgtccktctgtccatccatccgtctgtcaacgtaagtgcggggatggggcgcctttgtggctcttctatgggtttgcggccgccacggggcccagacagagcaggagaagtgactgccagacctaaagcttggcacgaagaaccagctgtcagccagataatgcactgggccagcgacatgaaacccaatcattaagtgttggggggattggtcagagagagagaaagactctttgtcccaagtgtgtggagcagatgacggcggagtgcgggagaagggctgtgactcacgaagccacgaggttt

SEQ ID NO: 1196 - DNA, 600 bp, Bovine  MMBT12858
aaacactggtacactctctctctctttttttttaaacaactgtataatctcctggagctctcctagtgtctcagtagtaaagaacccacctgcagatgcaggagatgtgggttcaatccctggatcaagaagatcccttggagaaagaagtggcaacccactctagtattcttgctttggaaatcccatggacagagaagcctggcagtctacagtccatggggtcatagaagaatcagatacaacttatcaactagacaacaacaacaatcatctcctaattggcttagaactaaacakaaaatgcagaagccacagccatcaactgtgtatgatacaaagctagtagagggtattaatacactgggtgaggaaccagtatccaaaaaatcttggcagactagcatcaaggaatccaataagagaaatttaatgaggggtcaatgtaacatattatgcttggttaacataaacaaaagcaaagcacaaaaatacaccagcactgtccagtgaaaattcaggggagatgtagcttgttagttacatatatatcagaggatgtagggatttcatgtgactttgtaaagcacagctatgtaa

SEQ ID NO: 1197 - DNA, 600 bp, Bovine  MMBT12433
tgtgatggctgccagtggagcagctttcagacagactttagggattctgttttggacatgatgactctgagctgtttctaagatactcaaatagtgctgtcctgactattgaatatatgaatctggacttcaggagagaagcctggatcagagataaagattttggagttaccatatcttctgggcagaattgtgccctgctcccaatttatatgttgaagccctaactgctagtactcagaattatgactgcattcctaagtgatgaataccaagaacgctttttgttctaatgtttgktcttcagccctgtgcctgatgcaaagctcctaagcctctttgcgtatcctaggtgacagtagtgtcttttgtttgaatgaggtgactttgggtgggctcctgcatgggggctggtccccagaaagaacaagatatggttagaactctgaattttcagcccctcctcttcattccctggagaggggagaggggctataaatggagttaataatggatcatgcctacttgaggatgccccgaaaaaatcccaatagtatggggttcagagagcttccaggtcagtgaatgtttctagtacca

SEQ ID NO: 1198 - DNA, 600 bp, Bovine  MMBT11453
tgaatatgccaagtcagtaaaaaattctcctgaaattagtgtaaattgaatctgaaccttgatcatctctgaaaccttaaatttttaatttgaccctttaaaaaaattttgtggcctcttaaaaatacaacctacaacccagttaaagttacactgtcatgattatggaaagaaccaattttgagttaccacagggaaataagtcaggtgtgtgggaatatctgtgtatatagtagtgtgtgttacttatatgtgtacacgtatgtatatatgtaagtgtttagtatagacttcagtttkcttttacccatctctctcctctctgcctcaggaaatggggcacattttcttcagttgaaaacagaaatagaagcgacggtcttgacccactttacacttatttatttcaggctctcaccacacacttgttcatgggcgcggcgagaagagggagccacagagccggagccgggagggctgccgctggagtgagagctggcagaactcgtagggagagcacggccatgctgccagcgccatgtctggcttcaagacaattctattagtgaattaattgtactcaaaacccgacattaattt

SEQ ID NO: 1199 - DNA, 599 bp, Bovine  MMBT13068
  misc_feature (1)..(4): n is a, c, g, or t
nnnnctgaatgagcagctgactaaagacctctcccacatgcaaggtctcacaattttacttctgtgcaccttttctcagggaactacttgagggtttactccaccaaaagcgagtatataaaccaaagaagaagaaaaagaaaacacaggatccaggaaatcagtacaatacagagacaaagggcaaagctgatggggagtaaagatcacaagcagactggagcagctctgaagatccaaagacaataaagtaaatgaatatctgtgtttgaatggactgaaagaatacttccataatttkaagagagtctggatttaacttaatgatgagtacagagaaaacaaagmaaataaaacagaaagtttattagcctttaggggtcatgaaatactgggcagcacaagaaaagccaattttcataagaaatgattcagttcaaaatagccttgtagagttctaatgatgttatatagtatgttgatctaatcagagctataacataaaaatgatgaaaggagtagagaaagaattatgactatatatatatatagacatatatatatatatattatgactatagagaacaggaacaggagtg

SEQ ID NO: 1200 - DNA, 600 bp, Bovine  MMBT13185
gctaaaaagaaagatgaggttaagtgtagtatgaataatctaaggattatttataccataatttacctttattagtaaagttaaattaaaattgacagaaacatatctttaaggattctttagtgatattcttaaaatattctttaagggtatctttaaacatatctttaaataactcaacacatgttttcatctttaataaaatttataatcaccttgagtttacactgcaattgcttcatttccaaatccatgctccttgaagggccaagtgatgtaatctgtatccgtggaactgtkacctgggcaacttcttcagtcaaacatgtgatttcagatgaagactctactctctttagtaaatcttctttttctttttgaagctcagccaaatccgaatttagcttctttttaaagaaaataartataaatttgttataaaagcaattacagttaacctaacaactatcatgtcaacaaaggtccatctagtcacagctatggtttttccagtagtcaggtatggatgtgagagttggactataaagaaagctgagyacagaattattgatgcttttcaactgtggtgttagagaagac

SEQ ID NO: 1201 - DNA, 600 bp, Bovine  MMBT11871
tgggatttttcaggcaagaatactggagtgggtcgccattccctcctccagggtatctttccaacacagtgaccgaaacctgcatctcctatgtctcctgcattgcaggcagattcttgacccactgagccatcgggactatagcctccaatagcacaaatccactctagtcttttgaaaccagagtttaaaagttttggtgttgatgggaatatgagtmcctgattagaaactttctgtccaaataaatcaaagcctaaggtggggaacaatatggaaatacacttctcctttgrtggkaacaaagatactaatgttacttcagctccctttggagaaaataggccttgaattattctccaaaactcactgaaataatcagccttgttggaacaataagggaaaggaagaaagaactagtcttccagggaaaatagtggctccttcgtgccccatgtgagctgaagtagcttggctcwtcttagctctggggtgatttgtgagagcttttggcttaacacattatctctgaaatatcaccaagagtcagagaatccctgaacagtgggcaataatctgcttggagttttgaaaatattt

SEQ ID NO: 1202 - DNA, 600 bp, Bovine  MMBT16787
tatctcatatttactaggtagagggccctaggggaataacataacctctcaatttcatctgtaaaaaggaaatgtgtacgctatagagttgttgatgcaagggttaaatcagataatgcatgtgaattacttaacacataacagtatatagaaatatacccaataagtactaattccatcataatcatgagtaacaaaccagttgctggtttttgaggatttgagcatttgaggattccagggaaaagaatggatttatgcatatcatgaggcaaggtgaacagctgccctatccaatgwacctactggaccccagtttcctgaaggatgatatctrtctgtcctcttttcttttcctactaatcatttcctccaagcccccacccccacccagctggttcaggcttcagaagactcttcgggatctttctgcctttcccttggtctccaggcgcagtgtgtggggtgtgcccagtaccttaacacctcgctgttcgctgcagcatccccagccggctgacagatacgatgacttcagccttaagctcgcttaacgagtatcctcattggctttcatycccaagggcttttttttttttt

SEQ ID NO: 1203 - DNA, 598 bp, Bovine  MMBT16873
  misc_feature (1)..(68): n is a, c, g, or t
nnnnnnnnnnnnnnnnnnnnnnnnnnnnnnnnnnnnnnnnnnnnnnnnnnnnnnnnnnnnnnnnnnnnttttaaaaactccaatgaatcccttgtattaacttctttgcctttaaactcagcttacattaaatgaaaatattttgaaattgtcataacccaggctataaattaagatcctacctttggtcggtgccatctgcagaattgcaacagactggctagactgcagaagggtagctgtgtctccttggctgtattatactcaagcaggcatcattcacaacacacaacagagagwgaagggcttctgctagacgtaccctcctgacsctcagattacatgatttaacgtgtgtatgtgtgtattatgtcagacatgcacatatatttaaacatacaatatagatttctgcctatacctaactgaaatgattatagtttttttttttttttttccagagtccatgattttgaagaaatgtgacattatttctagggaggtgaggaggggaggtttcttgcctctttcactgtcccagtgaaaatctcgctcggaacaatacatcttctgtgaaacactcggcacagaaagtcgt

SEQ ID NO: 1204 - DNA, 600 bp, Bovine  MMBT17997
gccctatctccaaatgaaatcactttgagaattagggcttcaacatataaatgtggtgggggaggggctcaattcagtccacagcaaacccttgccaatgttttcttcaattctgtgagttgccatttcactctgctgattgtgggttctctgatgcatggaagtgtttaattttttaaaaaattattttctatttgcttgactttttgtctgcattgggtcttcactgctgtgcataggctttctctagttgcagtgagcggggactactctcttgcagtatatgggcttctcattgcwgtggtttccatgctgtggagctaggctgtagagcgtgggctcagcagttgtggcttatgagcttatttgctccatggcatgtgggatcttcccggaccagggattgaacctgtgtcccctgcattggcaggagaattcttaaccactggtcaccagggagtcccaagtgtttaattttgttgtcatccagcacatcttgttgcctgtgcttttggtgtcatatttaagaatccattgccaaatccagtgtcgtgaagcttttcccctgtgttttcttctgagggttttacagttttggct

SEQ ID NO: 1205 - DNA, 600 bp, Bovine  MMBT11715
gcagttacttgtttataacttgggagttaggccaaagagcaattgtttcctttcttaaatatatatttttaaagtatttttaattctcattcccctcttctggttttcacgtatccaaacctgtgggagagaccacaaagattatccagaagtctgtatrtagaggtatgattgtcagtgtgctcatttgtgatcaaagccccatttaccatggtgggaaaataactctgttgacttttaaggtttattgacaaaagccaaatatggaacatctaaaacttcctgacaaagtcaatatawgacacaacacaaaatcattaaatataggacatgccctgtatcggcataaactggacattttgtcaatatattacttatttcaacatgagtaatcacgagtataattagctaaaatgttaagattaggtatgattatttaatagagggagttgatgcagctcttcatctatctctgtccatcatttcagtctcttacttggaacttaatgttttcacacttcatgtttctcctgaggcacatgtgtttgagtggaagaattccaacatgaaaatctccaagatgacactcaacaatctcac

SEQ ID NO: 1206 - DNA, 600 bp, Bovine  MMBT13786
ggaagactgttccctccagcaatcctcttctacagaagcgtgcccccccacctgtttctatgcttcatgtttttcattctagcatttctagctttcatttagtttcagttttattaagactacacctaataagaacctgaccatttctgaatgttcaaaaagagagaaaaataccgtaattaatcattttccaatagcatgaaaaacacaggctattcttaaaaagttgcttagatgcagctgagcaacttctagatttttagaaaacctgctatgaaaacaaaatccaatagatacttwgtgtgaatttatcatagctgagaccaaatattccagtgaatgcagagaatcttctgttcatggttcatattttttttaaagctacatgctcagtagtcttccttagtatcagataaaaccaacaaattattccttaatccaataatgttaawaaaaaaaaaagtcatttaaaagtcagatattcaaaatgctacgctagtagcactggcccataggaaaaaatgttttaaaagtcctgttagaaaaatggagtttaaaagtgtaacaacttctaaatttagtcgttcatttactgtatga

SEQ ID NO: 1207 - DNA, 600 bp, Bovine  MMBT14749
ctaaattattttctgaatggtttgaattttactacactaggggactgtcctctttcctacaccctgacaacacagaaagtcttttttaaattctggcaatcttattctaccaaaggttgtagcaaagtgctgtctccatttggatatatgtgactgaacatggttttcatattcccagttgtaatttatcaatagtatatccatattttgctcatttctctattagggcatctattttctgtattaattgtggacagtttttaattgagtagggatattagccactggtcaaatgtttcwgttcatttttccaaccaattctttttattttattattattaatggtgttcatagtaaaataaggtaaactagtaacacctactgaaatcaggaatatgaaaaatcatcataatgttacttattacagccattacatccaaaacactcctaaagaatgcaacatgacatgaaaatagttcacattaataatatgtgaaatgaataatcaaaaaataaattatatatattatgaccacaaagctgaaaaacagaaagtagatttaagatggtatggatatatacaaaaatattgcctcctat

SEQ ID NO: 1208 - DNA, 600 bp, Bovine  MMBT11773
gtctctctcaccaccatctgttaacccttcggtgagtaaagaatgacaggctatgccaagacagaaagaataaggccatgttcaagttagatttgaattccttaatgtaaagaaaaagtaaagaaaaggaaatgaaagaaatggaaggcattcaatagaaatgggttctrtagaggaaaaagttaaggcagttcctttcagctcccagaggggcatccataaacgtaaaaatatctatcattgactgagggctaaccgtggaccacatactatgctggcccttcacttgcattatctaawtgaatcctaccaataacaatttcatggagaggccattatcagcttcattttatggatgagtaacagtgatttagagggattaagtatcttgcccaaagttgcagaactaacaagtgatgcagccaggatgccatcatgccggttggattctgaagcctgtctaattaatcatgatgctccatgccttccagccacrtattcaactgaggaatgcctgtgcgtagttgcctttcgttgagaggacaggatgtgaaacacaaagcagtgaatagagaaatgtcgratgattcagtcagaaaa

SEQ ID NO: 1209 - DNA, 600 bp, Bovine  MMBT11953
ttttccargcaagagtactcctagacctggtcattcttttgactatcgactcacatgatcaattccagttgacagcagagtgtcatcattttaatttatatttatattaatgtatatttataatttatattaatatattaatttgtagttacattttaatttctgtggaattatttgcactctctatyctgaaatgtcccttcctaacatcaagttacctagaggtgagtttaatcagaatgctgattgatgagcatagatraaaattgctttgggaggaagttttatgtaaactttagwaaagctcaatgaaatatccatacttcaccactgaaaagatgatttgatgtccagatcatggaatctccaaatgtggtactctttcaccatcaaaagtatgagttctctcagtggagtagagaaagtggtaaggaacaaaattgataagctatatgtagcttatcagaatagtcccccccaaagatgtgcatccctggagcctgtaaatatgctttcttatatgacaaaaaggactttgcatctgtagctaagattatggacatggaattttctaagtgggtgggatgaaatcacataagc

SEQ ID NO: 1210 - DNA, 600 bp, Bovine  MMBT16269
ttctggaaatttataatgctgtttatcaagtttatgagcaaattaattgctttaaatctattttgaaattcatgtaattacatcagttgtattgaagttttctgaattgaggactttatcagcttttaggctatcttaaaatttgttcattatctcaagtgagaaatttccacattattttatattactttttgcataaaactgaaaaattgagaagtccaatttgataaattaaagttgcatgctgatscccacaacacatcttgtggttggatgacagtcttccattaaggcaagtgwcctgtataaaattagcattgtaactaatatataggacctttgtggggaagaaaaaaattattactcattaaacagctttgaatgaatggaaatatatatgatgctttggatggaaagtactaatattaaaaaacatagtcactttaggatggataaataattgttataagcctttaaaattaagtgtaacttacaatacatatatgctaaaatatgcatatatgctaaaatacacaaatcttaaagtayacagttcaaaagatttttataaattgagcatattcatataaccatcagaca

SEQ ID NO: 1211 - DNA, 598 bp, Bovine  MMBT12761
  misc_feature (1)..(19): n is a, c, g, or t
nnnnnnnnnnnnnnnnnnnacttgttctatgaaaaacacattttactcaaaattttcataaaatgacaatgtctgccaaatgtacagcttgttacatccagtttaaggacttgaattctgtttatattgagtattcaaacatcacaaaacattgtgttaagcaacatttataaattattgtaatatgctgagtattggccttccaaaaacaagtcctcacgcttggatatttaaatgttacctttaaaaaaaaaaaaaaactttgcaaatataattaagaatcttgagatgaattcagawgtgccctaaatgccatcacaaagacatacacagagaagtcagtgtgaaaatggaggcacatattacagtgttggagccacaagccaaggactgtcagttcagttcagttgagtcactcagtygtgtckgactctttgsgaccccgtggactgcagcacgccaggcctccctgtcaccarctactaaaaccaggaggagaagcatggaattctccctcagaatctccagaaggagtcaaccctgtcaactccttgatttcaaacttttggtccccagaactgagagagaagaaatttct

SEQ ID NO: 1212 - DNA, 600 bp, Bovine  MMBT17067
gcagacagcattgcagtctactgggtagatattaaccactgtatttacccaacataagataaacattttattcaatttacctgggaattaggtggaattaattgagccacagggaatcccctgccccagccctgagtagagaaaaattcccttcagtgacctcagcttttctgtttagctgcacacatcaccttgctagtggggctgtgtcatttttaatcattcatctcatcacttgtggttattgttaattagttttacttttcctactatgactcttttttcttgttacttacatgwccgaactaaataaaaattaaacttgtaacctagagtggaatagaaccggatcatcaatattctgtccaaaaatgtggtttcaccatctaccaatcatctttttggaaatcaaattgtatcatatcatcccttctaaaagagatgggctatacagcatttaatatcaggtgacaaatttcaatagaaaaataacctgcttgactcttttttattgttttccctgatttttaaccaatagatatatatgttttttccaacattatataaaggtataaagataaaagaaccatcatcccacca

SEQ ID NO: 1213 - DNA, 600 bp, Bovine  MMBT17755
gcatatgctgcgttagaagaagctgagcatacagaactgtgggtagcattgacttcactggaatgctacgtatacatatctgaaatactaggcttcatatgtgaaaaggaaattgatgagcaaaaatagaatttttatggtaaaacaactaaaagcattagattgttaacttggaaaaaaagactaattttgaagacaaaaagcacgatgactaatttcaagtggttaatggcttctctgcagaagcataaagagctacctttgttccaatacttcatagaacgggactaaaaattaatwacmaagctagagaatacatttcagtactttgttgtcactgctgtttagtcctgagtcatgtcggactcttttgcaacccaatggactgacagtagcccaccaggctcctctgtccwtgrgatttcccaagcaagaatactggaatgggtttccatttccttctccaggggttcttcctgacccagggatcaaattcctgtctcttgcattgcaggcggattctttaccattgagccaccagagaagttcctggtgtgtggatcacaacaaactatgccaaattcttaaagagatggaaat

SEQ ID NO: 1214 - DNA, 598 bp, Bovine  MMBT17978
  misc_feature (1)..(88): n is a, c, g, or t
nnnnnnnnnnnnnnnnnnnnnnnnnnnnnnnnnnnnnnnnnnnnnnnnnnnnnnnnnnnnnnnnnnnnnnnnnnnnnnnnnnnnnnnncccccataaaattaagcccctaaagcacagcttttgatcacatcactgccctgttacaaaatgtaagagagctccccatttactatgacataaaatccaaattccttagcatattattcaagatactataagaagcagttctaagctatttgtcctggtatcccatctcctcaacttcaactaagtaatctaagctaaaggcacataaatcwagttacgyttcccaaacatatcttacttgtgcattagctgttcagatctmtaatctaggtctgtggaaatcctatctttaggggtcaactcaagtacaaggtctctatgaattatttcctgaggacccaggtcagagttaaatctctcctcttgtacttttataataatgatagctaatacttacataatacaaaccacatgtcaaatactacatatataataacacttaatctttacaaccaccctttaatcaatgaggaaacactttaagggagagttttgtggttttctatcacc

SEQ ID NO: 1215 - DNA, 598 bp, Bovine  MMBT18223
  misc_feature (1)..(45): n is a, c, g, or t
nnnnnnnnnnnnnnnnnnnnnnnnnnnnnnnnnnnnnnnnnnnnnaaatctaaaggcaaaatttctctttgtcattttcgttttttcattcatttgacaattcccgcccccccaatcttatttacattgcttatcatctatataacacagaatcatttaagagttttctctcttcaaatatatttgcaatgttcttgtgattagcagtaatgaaaagtttatagcgcattaaaaatgagcacagaggttctgttagtattaaaatgaaggtacttgaatgcaagaaaaatgtaacccacwttatactctgtaattrctctgctaaagactttgctgtttgtgagccatccagtttgtgtagacatgagaagaatgtggttacgggtgactgaaggtccaatctctagtcaccggtgttggtatctckgtcactctggtgcctgagttgggatgtgttattaactcggtacaaacaaggaactaagagggatctgaaattcagttccacagaagtttactatttatttaccaagtgcaaggcagagtagccacaataggaaccccaaagtgaatgactcaatgccagccttccacccct

SEQ ID NO: 1216 - DNA, 600 bp, Bovine  MMBT12842
atttgcaaaaatatgttttaccagcaaaattaagacaagaataaaccatagaagagtgtaaatagcgttaaataaggcaactgggtgcatgaataactttaaaattaggatacatttcctatattgcaataatcaacaataccttgcaaaatgaacaaatgcaatatcttggaagataaacagctgacatcatagtatgcaaaggcataaagaaaagtaattagaaacatgcaagaataatagtgttactgaataaaacaagagttataaagaaagcaytgtgaagaagaaaaggtcttwtgaaacagtgagtttcacatttgagtagggtttgagtagwtgatgaatgaccaggaatttatagaatataagtttggaatgatcacttccaaccctaagtttctctaaaatcaccttaaataattatgcaatttgttcctaacacaacatgactcatttatctagaatataaaccagaaaattcaaaagattagcaagaaaaaggataatctgtaaaatgcattatataatcttmgaactttttgaaaataaaaattcctgaggggtaaatatgggaatcttctgaaaaacaaatgagag

SEQ ID NO: 1217 - DNA, 600 bp, Bovine  MMBT15970
tgaaagacagcactggttctattcttctctacttttcacacagtcttgagttatattttgagataatgataaacatagggtcctccccatgttagaacagtgctcagcacacagtgatatatatatgtagatgaaattagcaatatgaatgtaattaaatctttattctggtttacaaatgaattgattccatacgaaggtttgaaaataaagttgatcattatctagcaataggaagtgaccggtttttcagtactttgctcattaccaaccaaaaatacgtttaaaatgttgcatctwttttgagaatacacttttcaaggctatttttccactctactccgttaagcttatttgaatatataaattgactttcaggtatgcaaatatacatcacaatctgaattaagtttcatatataatcaggctggtagtcaaattgttgtttttattgtatatttactttatttttgctaacagggtgtattgcttaaggaaagayatttttggtgtttacaaatgtgtctgggtctgcatacttggaaaatattgcaaccaaactcagttcgattagtcaatatgtattgatcacaatcagag

SEQ ID NO: 1218 - DNA, 600 bp, Bovine  MMBT17822
ctgcctcttgccaagtgggattccccaccaccttgtcctgggcaaggcttctcgtttacagattcagaaaaaataaaaaccagcagggagggtcagggaggccagaaacaaaacttaatcagtacactgaaacagtgtgttaaaaaagaaaagaaaaaatacatacacacacacacacaagaatcaagaaataattaggccaaaccatcaatgctgattatcttggaacgaggtagtatggtggacaatctttgttgtcagtgttgtttctggccccactgaatggcttgcgggatcttmgttctccaaccaggcatcaaacctgtgcccctctgcacagtcctaaccgctggacaaccaggaaattcccacttactgtttcaaactcttttmttttacaccatatttcaaaagggtagcaaagggggcatctccccccaccattaaaccaagcaaacaaaacaaaaaaaaatcccttcctcttttgttctgtgctgtgggcgacagagcactggcttgtcacttgacctctatgagcctcagttacattctctgtaaaacaatgattaaaatgcagcacttcccaggaggactttctgc

SEQ ID NO: 1219 - DNA, 600 bp, Bovine  MMBT16245
accatatagacctagacataccacgtcattagaactcagttggtaagaagcattcttctcacattgtccccagacagcattagctgagaagtcagtggttttgaccttaccaaatgtgtgaccttactggacacattatctaattttactagcattttagaatctcacattcctgatgtgtatattagaacacttttaataatgtatcaaatatttgcatggccttttgcagtttacaaagtgcttttaattgggctagggcatttgtgtaggtcctagaatgcacatgcctctctctcmtgggcatgttatayattccacccctccacagacaccrattttgggtttcttggytgttattctgttgtgtacccctttgagagatccacccctttcttttcacctccattccctagttccaatgcattgagctctgtctttgcttcttggacatgctcatccttgtgaaacctcctgccagaaagtgccccattatcttgctttgccctctcccttgctgtcatttgtccagagtcctatgaaattgacttgcgagcatccagaattccaacccagtcttttcatgatgttgagcaaggt

SEQ ID NO: 1220 - DNA, 587 bp, Bovine  MMBT15932
cagagcattggggtgacatctgagaaggagagagtgtgacatggatcaaggcaaagcacaaataaccacatttcaaaatgaatactaattgcataatgacagtttccaaactattagcctactttacaaaaaaagttaattcaacacaagcccagaactggctgtggcttacrtgttgtgctgccagttggcaggcacagtttcgccaggggattgggggaaatgaaggttattgtagtggaagcacacttggccttttgtgaggagggtacaaactgcatcactctctcaaggtcctamtgttccgtgttcaagagtggacatcaggatactgcatactttcaggggaggttgcttacttttcctagaggtaaaatggcccagtaccaaagcttgggaaggagacttgagttcatagtcccttgaaggaaaagagttctgtgcagaaagaggtgatgagcatggaggaggtgaacctggacttgcgtgtgctgcccttggccaggaaatcctgggcccggggcaggctgtggccacccagaggctgaccttctccagcatgaactgtgcatgctacccaaggtggg

SEQ ID NO: 1221 - DNA, 598 bp, Bovine  MMBT14818
  misc_feature (1)..(23): n is a, c, g, or t
nnnnnnnnnnnnnnnnnnnnnnnctgcagagaactcatttcataagtcagctctgctcgcctttctgtcctgctgacgtccccgagccgcactaaccccagctctcagacacaggcgggggtcaaggcccatcgttcaaggtccttcgtgagccagatcctgcccactgctcctgtgtcagcaaccacccaatcacccaccttacccaatcactctgtgtggacgaaacgatttctctccttcacccacgcaatactaccattcttccagcctctctttttgaagttggaaaatcccgamttcaggctcaactcgggcacctcctcctccaggaagccttccgtgacctcctcccagcattgcatcaggcaactcctcggggatcccacctgccagagctggacagacctgggcccaggatcctggggatccatctagaaccacccatctcaaagcatggtccagcctcatctagaaacttgtgagaaacatggcttctcagtctccaccctggaccttcygaatcaaaactgggagcayggcccagcaatctgtgttgtaaaaagcccctcatgggattctgaagctcaagtttgag

SEQ ID NO: 1222 - DNA, 600 bp, Bovine  MMBT16194
aaagccatagtgtagagactcagagctctccctcaccatatgttacaggtttctcacgggctctctctccatgctttacagagaaagcagtcaccgcttcagacattacccctcccgttccagactacctgctgacctttgtgttgtttattttctcctccaaattggtgcgtgaagcttattttaattcagtttcacctggatacaaatatcaatgggactaaagccctatttctggacttgaggatgtgggtctttccctccattccagatctagaacatgagggccagtagagacgmagcaggggacrctttgctctgactgagctttccctagcaactctcgggtttgctccggccacctgatcaagtctggagttccagggtttcaccttgccacctatttcagcgtgagcttgataaatccgcatgaattctgagagatgaccatgtgtctcaggtattcagttactactagggtaagaggggggaataatgttcttcttctctcagggttgttaggagaatctcaagctaagatattggaaagtgcctgacacagtgcttcttaagagtttggcttttgtcagctttgctttg

SEQ ID NO: 1223 - DNA, 600 bp, Bovine  MMBT17476
tgcttttcccttgaggcactgcctgtctcagtttattgtcacgcccttttcgctcatacataatgcagcgacatcaatccagtctttgacccacttattaaaaattctgaactgatgaaatctaaatgaaagcactttcttcgtgtataatatatgaacttattattcttatcatttcgtaaatacacacaacagaacacgcactgaatataaaaaatgagatcaacagatttggttccaaaattcctgctctgccacctgttaaacactcaggacagtttccacaacatctccggggcmtcagtctcctcgtctatgcagtgtggttagtagccggtaataggtggtggtaatagccaccagccacatggggtggttttgggaagtgagtttayacctggaaagtgccacgcacaaggccaggaagttagaacacatttaccctcgccagtcctcaaagtgttaaaattctacaaccaagatcattatatccatcacctaaacataattcagagaattagaataagttagagaaacactaagcgtagtgttctttctttaaagccccctgtagtcagggaacagctgtaccagtgattt

SEQ ID NO: 1224 - DNA, 600 bp, Bovine  MMBT11788
ttcacaactatgatgaggcaggactttatttgcacctcgaaaatgttttactactgttataaaggcaaaggcaaaagaaggggaaatatgtttaattaacaataattgaattttcataatactgtttaatcttctagatatgcttatgaagagatgggtattattattttttttctactacagatgaggaaaccagcctgagagaggtcaagcaatttgcctaaacttgaaatgattttaagtggttgggctgattcaaacctaggttagtagcctcygggccatttcaacaataaatamcattagagagactgcattaacatcctgcgaagtaagacgaccactaaggsactgaggagtgatgaaagcatatagcaatgggtcatgaatcaggaaaggcttccagaatgaggkaacagaaaatggaggaaaagcggrggaatgcagcactgaaaaacagaggatccagtaartggagcacattaataaagaaaagaaaagacatttgccattaagtctgtagaaatatttccagttggtttccagtctcctcatattttctatccagccaaacagcaataaaggtatgtrgttatataa

SEQ ID NO: 1225 - DNA, 600 bp, Bovine  MMBT16210
caaacccagtgccatctggggcctcctgtccacattccaccttctccgggagcttcagaggaaygcccgggtcctggtgggcttggccctggactggcggcagcatccctgcttgtcccgtgcagggctgtgccggacctgtgaggtgttcggggccgcggcgctggtcatgggcagccttcagtgtgtcagagacaagcagtttcagcacctcagtgtttcagcagaacagtggcttcctttagtggaggtgggtggaaagtgcatgattattaaaattttcattcaccagactctttmtagtactctgtcttcacctgtccatccttttgcagtagtccagcctgtcatattttaaaaataatactaaaaagtaaaatatagcccactctgttctcccattcttttttttatctctcacactattatatttttagaaatcatcaataatgtagactttttagyaaaatgtgtcctgttgtaactcactctggttttataaatgtatgtgatgttgggagcattcttttttatagtgtataattctgtctttttcctgttaacaaatttcagtttcatcagaagttttttttttttttt

SEQ ID NO: 1226 - DNA, 600 bp, Bovine  MMBT15917
ggtagtgaatttattacaaagtaaatccctagtgacctactgtttttcttttctagtgaagtttctccaagcataatcctatcacttttgacttgaatgaactagtcactgtctccagatgtgaattatagcaccacatagaggtttaattttctttttgtttaatttgaccttgagcaatcataaaaaggcaatatgagctccagttctaaactttatgcatcttgtaactactccacccagaatgattcccaagagaccttgtgaagtaaaagaaaaaaaattggccaaattttcctmctctacttttattaccccrgatattttggcatctctttcttcctmtcagtcagtgcctctcacactctagtgcacaacctagatggacaaccctatgcatggggagaaacttasaataataaatcccaacatcatcttctggctggattccctgctctaatgcttaccacaatgcctggcacatagttgacagtcatgtggtattggttgtttaaactactaactcaatgaattaatgaacagaactgccacccaaaagaaaaacagagtgcaccttccactgtcatttgtttggagttc

SEQ ID NO: 1227 - DNA, 598 bp, Bovine  MMBT17224
  misc_feature (1)..(205): n is a, c, g, or t
nnnnnnnnnnnnnnnnnnnnnnnnnnnnnnnnnnnnnnnnnnnnnnnnnnnnnnnnnnnnnnnnnnnnnnnnnnnnnnnnnnnnnnnnnnnnnnnnnnnnnnnnnnnnnnnnnnnnnnnnnnnnnnnnnnnnnnnnnnnnnnnnnnnnnnnnnnnnnnnnnnnnnnnnnnnnnnnnnnnnnnnnnnnnnnnnnnnnnnnnnnnnntcgataccgtggatttagtgctccgtatcaaggtatatttaactaatacctctgcctcttttgacgtgtaaaatgattttggtatacataactgmattttatgttagaggcaaaatatctttatcttaaaacatggtaatttgagtaagcaaaaatgaccattttattgctaaggcaatattgtgatcataactaaattgcagtataaaagttagttgggttttatagcacactgtccagaataaagaatattataacctccaaaagataatgtgtaacatgtaatatttatctttaagaaagtgyttcagcagtgggacatgctacccaaacatgtaccacaaaacactgcagaaaattctgaacagagtcttcatcaattgaaatccattt

SEQ ID NO: 1228 - DNA, 600 bp, Bovine  MMBT17168
gctgccttagaaggatggatgggtaccgcaaacttgtgtcctggctctggagcaaacagcatctagttagcatcagatgtgacaggcgcacaaacagagaaaaaccaagaaaacaaggtgttttcctccacttcactgtgggactgaggtgcacacagtcaacccaagacattaggaagtccaattgcaaggtgactttgcatgagatgccattgtctaaaatccaaacactgatacatacttgagaargattttatagggtaaagttgattaataactggaaattgagcattcccaaamcagcaagatcaatcagctgtaataatcattgaaataactccagtgaaatatcactgccgggtaatggagcatattgctcgcttttcacaaatgactccccacacaaatagctagaatgaaatcagctgggttctatgaatttgtaacttcggaacactaccttgagcactcagtcacatcagacttggctgtgaacagctgctgcagaagcccattcagtcgtactgtgaactcactcacgccgtgcagtgctgtctcttaaagtggctgctcaagttaacattcagggaccatcttcag

SEQ ID NO: 1229 - DNA, 600 bp, Bovine  MMBT17008
gcccagtggcaaggaataatgtcttcagccaacagccctcggagaatctgagatctgccaatagccacgagtaaacccagaataggaatcttccctaaatcaggttttgagatgactacagccttgtgagagactctgatccagaggactagctgagctgctctggcttcctgacctatagaaactatgatatggtacaaatttgttattttaagctgttaaacttgggggtaatttggtatacagcaatagataattaacacaaattttatgagaagaaaagaaactaaacacataacmttgctagaaatatttggaagcatcatgatttcaattactgtttacaacaaggagttagatctkcctattttgggagttaatcagtttggtaggaaagggagttccatttggcaataggaaatgatcactatattargaaatactaagctatcattgtgcaagaaaacacagttattgacttacaattaaatcataagcatgtataagacacctacaatttgtgcaatactactttagatgacagaatgaaaacaacataatcaaaagattgcccctaccatttattgaactagagtctat

SEQ ID NO: 1230 - DNA, 600 bp, Bovine  MMBT18207
ttacacagaatcatatcctagctttcataataacactctgactttgaaccacgaatttaatctctcttagactgtgtccccaagtgtaaaatagaatgattatagtaactacctctgtatttatactgcaatactgtattatatgcttcaaagctgctaagaagctagatcttcaatgttcttaccacaaaacattgaaatggtgattatgggacacattggcaagtgttaaccaatgatatggtggaaagcacactgcaatgtataaatgtatgaaatgaaagtgttgcacaccttaamctttaacaccataggggaaaagtgaataaagggaacacaagattcctctgtattgcttcttacaactgcagacttatttcaaaataaaartgttaatttaaagaaaagagacatatgattttattttatttaaccgaaaatgttttatttatccaacatactttcatcttagtctattaaatgasataaaaattagtgagatacattacttttttttcatactgtccatttgaactggccgcattccaagttctcagtagtgatgtgatagatgctactgtactggacaacacagatgta

SEQ ID NO: 1231 - DNA, 600 bp, Bovine  MMBT17365
tcaaggagtctggcctccactaggccagtcctttccaggatggaataagatggcacctgatcagagtgcactttctgagtggaaaaatcatccataatctatataacgtgactttggggggcagagaaagtcccatgagcccatatttaattctgtattctttgtcttctgctggaaattgcaccattcagtgattcctttctcagcacatcagaaggtgtggtgatatccacagtgtggccaggactctggaaagggcaggaaggtggtgtgtggtagtctgggctggctcagaatggsacccagaccgattacattgcacatcaatataaattcaccttttatgaagtctgttctcagcagccagtggaaccagcactaggctggcatggactgggattgatagtaacctgctgtgtgaccttagggaagtcaccagacttttctgggcttcagaggcctttcagcatcatcattcccatgagggtgggttgatgagggccctcaagtgaaaagagaaagttttcatagaatgagggaggggaatggtaaagaaaggggaaacaagacacttgtgaggacaattcagccacctggtat

SEQ ID NO: 1232 - DNA, 600 bp, Bovine  MMBT17390
gttcatcagmaggaaatacaacattcaattcctcagtcacacctaccacacttcagtgctcattagccacttgcagctggcgagggccatgctggacagggaggatccagaactttcctgttattgcagttctgttgggcagcgctggtgaagacctttgkgggagcctagatttctratgtggccaagacctctgcgatctttaaaagagcctctttgcattgaaatgattatatttatgacccatgagttagctctcttgtcaaaattcaaatctaggcctgacatgagaagccttcsctgcctgtgccacgtggtccctggtccctccgtctcctctgccatctgatgcctgcaggggggccccttgctgtggttgtctcgctgtgctgcttgccacgctgtgtggttgcaccctttgtgtgttctccagcacctaacgaggggtctggcacatactaagcatttggcttaggctgggtgaccctgaagcaaagtcagggcatttttgtgcaagtcagttattggggaggtgctcctaggagagggagtgatggaaggatgtgtgggtgggtcaagctgagtaaggtggtggtctca

SEQ ID NO: 1233 - DNA, 600 bp, Bovine  MMBT18015
cccgcccgattcttttcctcagaatccctttccctttctctagcttgatttctccaacctcaaggctgactgctaccggcccggtctcctcagagtgaaatcatgaaggtggtgaacctgaagcaagccattttgcaagcttggaaggagcgatggagtgactaccagtgggcagtcaacatgaagaaattctttcccaaaggarccacctgggacattctcaacctagcaggtcttaagtgaagtaggaaggaaggatgggagggctaaacccagaaatgttgtaacactgaggcttcstttgttattctccttgcagaagcactactggagcaggccatgattggaccttcccccaatcctctcatcctgtcttacctgaagtatgccattagttcscaggtaaactcttctatctattccagacaaggtttgaaggtgaaaggcttggaatacagttgtcagctcaaatttttaggtgaatttgtttgaacacatcatttccctgagcctcagttttcttgtgaaaataataatactccagtggttatgatgaatattacattaatttgctctatcaataaatactcacatatgccc

SEQ ID NO: 1234 - DNA, 600 bp, Bovine  MMBT17442
cagcctcctttttgtctaccccaccccgccgggacattgttattgaaatagaggacaccaagccattactagcttcaaaggtaggcttagaattgatcgttcattgaatgatgttggctttatcttccaggtatctaagcattagttgaattcagtcgaacaaccattcaatgcgactaaagataacaaacgaacttatcacggtaaagaacctggctcttacattcatcagtagctttggtgacattgtgtgaactcctgtcctctcccctcagtcaccaaggatacttaaaataatasttggaaccgtgctgcactctgcacgagggaggggaatctagacagcartaagttttaaaatctccccaagtgawtctaacgtgcaggcaggtgtgagaaccgttgatgtggatggtctgagtggtatcatttgcaagagcaatctcaggaccgaatatacaagcatcacaacattcagaagagagattcatggactaactcaccagttcttttccccctaaatgaaacagaggagtcatggatttttaatgactctatttgtcagtgtatgggatatccctgacttttatattcactgtg

SEQ ID NO: 1235 - DNA, 600 bp, Bovine  MMBT15473
agctcacatcaggtggccaaagtattggagcttcagcttcagcatcagtccttccaatgagtattcaggattgatttcctttcggattgactggtttgatctctttgcaattcagcttcattatcagtccttcttgacatctgagtcaagggtaygcaaaaaatatccrtaagataaacttgatatgtggtcacattgaggggacagaaaagtgtgtggtcttttgaaccctggctgtggtccatgatgtatctgaaactgccctgcagctctgaatgggagatgctgttaccattgggsaaagtcttaaagtgaattcaattgcaaggtccacatcctgcctccaaggaccccctagagtcatgcagacagtttcatatgtggttctgaggcataatggatgggcattagagtgtggttggcagtgcttctcagaagcaagggtgtcttttcttctctctacttttacagcatgttgacacatgtccactctcatcaataaatgttcccatctccactgatctgtttggaagaggcaagaaattcatgttggggggacaactcatttgtctttagaaattgaaaargcgagtgcttcag

SEQ ID NO: 1236 - DNA, 600 bp, Bovine  MMBT17837
gagagctccctttgctcctgcagtccctctgctcctgcggttactgcctttgcacacaactgcatgggaaccgcgagggaccacccccgtccctttaaaacctaagggggatgtaggaagcacagacatgagatgcagtactggctttaaaaaaaattttttttaagagagtctctgcaggttggtttgctttcaaggtttggacaccatggtactcattggaatgatctacattcttacccartacagtgggcgaaaacctgccctacccaaattccggccacattctcactaaccccsgaaactaagcgtccaaatataggagcagcatcgactcagccaagaagcaccatctcagagggagggaaggggtggtttgctaacatctagtccaactaggactttcaacatggaaccatccccacagaacccaaagcagccattgcctctgtatgtgttctgtgtgtgggtgtagggatctgagtaagaaataacctgtttatagtgtaagaattcataacgtaatcaaatgaaacctttactgcaattgactgcagatagtaatagcttaaaattctttagtctaaacaccatgtaaaa

SEQ ID NO: 1237 - DNA, 598 bp, Bovine  MMBT16951
  misc_feature (1)..(109): n is a, c, g, or t
nnnnnnnnnnnnnnnnnnnnnnnnnnnnnnnnnnnnnnnnnnnnnnnnnnnnnnnnnnnnnnnnnnnnnnnnnnnnnnnnnnnnnnnnnnnnnnnnnnnnnnnnnnnnntgtcaatgtcaatgaaatgattacagttcatgtgaaaacattccccacttcaaagtttaaatccccacttcaaagtttatcactgtgcctttaaaacacttgtttgtttttgaaggttgctctcactagttcttttaatgcaggtttgacatcttatatggaccagacatcaagtacatcgttgttcatgstgtcttactacactctccggaaccaagayggctttggttctggcctctaacttcccaggtagaaaaaaattgccagtaatactaaacacctttataatctgaaacagcagacagaccatcttgtctaatttaaggttaaacagaaacaggagctgtagatatatctgttctttcagggacctatgataggatcttgagraagacaaagagtttggccttcatctttgcaactgggataagaactcacaatatttataaggaacagctaataaaagcagaaaatgttgtagtttttagg

SEQ ID NO: 1238 - DNA, 600 bp, Bovine  MMBT14648
tcctcaaagcacaggagaactttggagatgtaatcacttcattcaacataaagatcagcttctgaggcctcttcctcacagcacagctgcagggggcaacacagggcactcacaacacatacacaaataacagacctcgataacgcgggggaagagccctggccctggaatcgtaacacccgggttcaagacctccatctgtcacttactcgccccgtgaatttctgtaacacagtaactacacccaaaaatgagaatcccatctaactcacaggattgttacggggatatgaacactasttgacaagaatttctctttttaaaagcagaagatgagatcaggcgttgagctccattatgtgtcaccgtttggaaactctttccgtgcaacagaagggaagaagtgaagtgatgtcactcagtcgtgtccgactctttgtgaccccatggactgtagcctaccaggctcctccgtccatagtattttccaggcaacaatactggagtgggttgccatttccttctccaggagatctttccgacccagggactgaacccgggtctcccccattgtaggtaaacgctttaccgtctgagcca

SEQ ID NO: 1239 - DNA, 574 bp, Bovine  MMBT15541
gatttaggctctctgctatatgcttgacccactgaagggagttaagagataacgatggacgaagattactgattaatcattcatgatgttattttcgtgagcacagaaagatgtgtaaggcaacagaaaagactgtccccccccgtcttctgacagaagaagaataccggctacaaggagaggtggagacccgaaaggctttagagcagcttagagaatactgcaacagtccagactgctcagcttggaagactgtttctcgaattcagtctccaaagaggtaaacaaactcttggccasaagtaccaggcatctgtcagggtaatcatgaccctagagttttaatagagactatatttctataatcattttgtatttgtggctttgttttcttgttcttctaggagtagtcaagggaaggttacatatatcatatgtttagccgtagccattttctgattcctcaaggaactatttactctaactttgattgtagcattgaaatgagaagattctagtacaatattaagtttctcctcttacaattttgtgttgctctctgaatgtttaatat

SEQ ID NO: 1240 - DNA, 600 bp, Bovine  MMBT15482
gtatttttytctcatatctaaaatctattttactgactcttatttagggtttgaagcatgattataaaatatattttccctttagtgatacagatataaatattacagcttagaaaaaawttttttgtaataatggaaaattaytcaggctatattaatacttttatttaaaatactgttttaaatacttaaaaattcaaaaacatccatgaaaattataccagatcaaatttcagtcctatgcaccttgacagagtccctgtttctgtttagagcttggttttcattcctcaagtctgstctttaagaaattcktttttgtccttacttgttctcttttttctaccataatccaaatatgttttatgctcatkatagtaaaaataggtcatgctgtgatttcaaatcattttggcttcagctagtactagcttcaaccttttctatttactattggtatttaatagctatttgatcataaatacatacttaaaaagaatatgatgtaatatttaaagttcttcctttcagtcatttttcaggtacatcagtttttttttcttttgtgtagcagagttttattaaaatgcaaagggacag

SEQ ID NO: 1241 - DNA, 600 bp, Bovine  MMBT17018
ataaaaagtggaatgatacataaaaatctgcccctgcccagcacagcagactgcccgcacttaattccagctgtattctagactcagcattattgtagcccaccaaaaagtgtcctatgttttggatgggaggagtctgcaattgattttaaccaccaaatgaaccttttcagtacattctcagataatattaatgctaagattacttaaaaatcttagacctgggattacttggtaagcttaaataatcttaggatcttaaagtactttctttttcctcttaagtattattggtgagtsttygaaacattatgaaactttactaaaggtttgatttctcggctttatttttgtaaattgttataatattgccaccacacactgatcatattaaaatagttatacttaaggaaatttcttaagtaaactygtgttagggttacactcttcatgatgtcaggaatgcacccccaataattgtcaatttcttattttggggacagctcagtgaggagactaggagaattaatctgtaacttaatatttttaagagtgtcttattaggtgtttaaaaaatcttatgttgttgctatcattgtg

SEQ ID NO: 1242 - DNA, 600 bp, Bovine  MMBT14646
tttaccactggagaattcttacagtctagaagaccatgagcacagggctggggatgaggcggggtaccagcacaggaaaggcacaactgcaagccgccatgctgagcttaaaaccatcatcaaagggggctttgggagctcaccrgctgcaaaggttttgtattaggctgtgagtccactgggagsatgggagcccctaaataatgatgtcaaaagagtttttacatgcccaagaagctatttcaagctaacaaaaatctacatttgtttctaatggaggttaaggcctttagggattasagctagagagtgtagatggccattatctaaataaacttattattcccagtacaagacagtartatattcctaaaaaggaatatataatattttcactgtaaagcttcaaagaaatgtcagaaaaaaagcttcattttgaaaattattatgaaagtgaatttaagaattaaaaagtgactactggaaaattcccagaagaatttcattaatggaacactgctgcatcatagttgaaagctttttttattacagaggttataaccatgattagttccatataattttgataaagtgaaatta

SEQ ID NO: 1243 - DNA, 600 bp, Bovine  MMBT17915
aacagtatgtttttgtggtttaatcactaagtcatgtcagattccttgcgaccccatggactgtagcacaccaggctccattgtccatggaatttcccaggcaaggatactggagtgggctgccatatccttctccaggggatcttctcaacgaagggatggaacccatgtctcttgcattggcaggcagattctttaccactgagccaccagggaagcccccaatcaaaatagaatagtagttaccaatttgctactactgtattaaacaaacaaaacgaagggaacaaaataagtccscgatggatcatattttgagattccaaatagtagtgattactatttctgttagtattactgagatcacttactgattagctactatttgccaaaccctttcgtgtgataattttaatccttacgacaggactcaatgaaattgatagtttgtccctgtttggcagatatgaaaactggaggctcaaggttattaaatgatgaggtccaaagaaactgagcaaagctagagatcaaaactaagcctgaaagtttcctaaaaccatgctttgccagctactctatctgagcttaaggattcac

SEQ ID NO: 1244 - DNA, 600 bp, Bovine  MMBT17909
acagagatccaaatgtactggctcccaattctgtgctcttcctactgtttaccactgtctctgttcaacacattctggatttcatccttgctatatttcagtcctcttattggtttattttaggtttaactgataaaagaataacatgtcagaagtgttaagactgatgggtgtcattacttacatttataaatcacctgacgaatataccagctctcctaggatgtagctggtatgtcagatatgaggatgattgtaatcacttggctttatgattatggtatgttttagaaaatgcastaatccttgctgatgtatttttgcttatctcagaaagtgaaacttttgttgtaatggtrcacatcagactgtaatcagtgttacaaaatcaatattctatggagaatgaaaaaataaagcactacctggaggcttttgctactttaataaagcaaaattgtttgttatgcatacagaagtaagaaaacaatgtactcttcccgcaagacagacactgtacctttgcttaccaagctggtagcttgcctgtcatgtaagctgattttgtttgtccccagggaagagaccaattttaaattc

SEQ ID NO: 1245 - DNA, 598 bp, Bovine  MMBT17013
  misc_feature (1)..(196): n is a, c, g, or t
nnnnnnnnnnnnnnnnnnnnnnnnnnnnnnnnnnnnnnnnnnnnnnnnnnnnnnnnnnnnnnnnnnnnnnnnnnnnnnnnnnnnnnnnnnnnnnnnnnnnnnnnnnnnnnnnnnnnnnnnnnnnnnnnnnnnnnnnnnnnnnnnnnnnnnnnnnnnnnnnnnnnnnnnnnnnnnnnnnnnnnnnnnnnnnnnnnnnatttctaaataaaatttaaaagaatttgctcatgaaaatgtctgggatctatgcctttaatgggttatttcttggtttacatttyccccccgtaactgtcaagstactcaaatgcactaattctattctggtcatttatattttcccagaaaactgtgtatttcagattcttaatgataaaatatttttattttgtattcttacaatattttaataataccaatgatattaatactacttctagtaagtagtaatggaactagcactactactaagtaaatctttactatctgcttcttatgcatcagtctctagtctaacagttgtattaaatattacatcatttgatcttcatagatcaaataccccatacctatgagataggtactattctttttacca

SEQ ID NO: 1246 - DNA, 600 bp, Bovine  MMBT17581
catggacagaggagcctggcaggctggagtccatggggtcccagagtgggacacgactgatgcgacttggcatgcacatacatgtggagctgattcactttgctgtacagcagaaactaacacagcattgtaaagcaactctactccaacaaaaattaattaaaaaaaagaatctgtggcttcactaaggagggaagtaaggccagtggaaccttcctgactaatacttgtagcttcaggaaattgaggggcatgggggagagggtcaccttattaaggagcttaaaaaataaacayacsaaatcgcaataattggcttttacatgggggattaggaatactgatttttgcattataaaactgtgtgtttgttcctatggtagctggctgaagcagtgtggggaagacgagaagacagagaagtgatgaagacagttcggtttggaacayagggacggacgggcaggacgagaggacragaagagatgaagcctggtgatgggcaagacacccacttgggaagcaagataaatgrgagcagagaaaaagagaaaacacagtgtcccttgtcacggggaaccgtaaagccaagtggcagca

SEQ ID NO: 1247 - DNA, 600 bp, Bovine  MMBT18364
ccaactagaactaacaatataataaaaaactgaaaggaatgcaaatatccaaattcaaatctcattttaaaaacttctaccctttcactgcttcagggcatggtcagagttagaaaatatgagctggttggagccaagtggtattttagtgaggccaaacaaaatacacttctctctttacacaattctttttttaagtttctattattttaagaaaagaaaaagccatcagtatttgtgaagaaataccaacctcaggctcaacaaatctaagtcacagaagtttgaaattgtttccasttaacattttgccaaaccaggaatccatattaaaagaccatgtaaacaaaataaaacaaaaagcacttgtaactatgctacagaaagacatcaratcttctttctttccctaaaagaacgacagtttaaagattagacgtgctacatactgaatctgttctaacttctactttatcaactctataaaatattaaaatgctcaaaaaagttaattgtaatctaatttctataaagactttaatttactcacacattctctcccttctaaaatataaatctcctctcagctcctggtcccct

SEQ ID NO: 1248 - DNA, 600 bp, Bovine  MMBT17093
cacagatctcaaatctcttgatccttccccctgtcaatacacttggggcctcacatcctttccccacccagttgagactccatgactgatcacgtaaagtaagattccctgtctccttacccacttagcctatgtacccccaacatgaaaaaaaaaaaaaaaaaaaaaatcctcatttcactgccctacttggcttaaggagaaaaagtggctggtacaaataccaattcatgctttccagccatgttctttcaacatttgtctttccttcttttacactatttctattgtaccatctcscagtctcctaaaatattccaaattattgaggttacccttatcaatgttaggaagttatttcagcaagcaaacaggatgcagtagaaaatgccctcggcttcaagtggagcttgatcacacatatcctatgttctttttccctttcastctcagaccagtggagtgccctccagttgcaactcctgccctgactgcctgatttttgtcccctccagcccccatctacaacattactactcgttggcctttccctcagactatagacacttaaacctcttttctcataaaaaacagacaagc

SEQ ID NO: 1249 - DNA, 600 bp, Bovine  MMBT17321
agttccttaaagatgatgatttccggggatgggcctgtgaagaggagggcacgtttgagcagcaggatgcagggaggtggccgtgatgaaaacgtgcayggtacaaggcatgtcagcattcccctagtgctctccctcctgtgtcctccactcttcccgacccacagggctgccccaaaatcaatatgcactctgtgcaggcagagtaactgccccaagacgtccatgtcctagatcccagagccttaactatgtgaccttacrtggcaaaagggactctgcagataggaccaagttaasaagctttagatggcaaaattattctgcattacataggtgggctcacatgagagtccttgtaaggaagaaagggatacaggaaaattagaattgagaaaaaaatatgtgatgatggaagcagagatcatagagatggagggagatttgaagaatcagtgctgctggctttgaagacggaagaagggaccatgagctaagagatgcacgtggcctcgagaacttaaaaaggcaaggaatctgagccttcggaagraaagtagccctgctaacccatttcgagttctagaastgtaagaataa

SEQ ID NO: 1250 - DNA, 600 bp, Bovine  MMBT16604
ttatcttggctcagatggtaaagaatctgcctgcaatgcaagagacctgggttcgatacctaggtcgggaagatcccctggagacaggaatggcaacccactccagtattcttgcctgggaaatcccatgaacagaggaacctggcgggctacagtccatgtggttgcaaagagtcggacacgactgagcaactaacactttcatatttaatatcagatatttatgtgaaaattatggaaatattttgagacttaaatgatattagtttcctccagaaatgatttatagtttctttttcscataagggtaggatcagtctcagacctccttaacgtaactgtgaaattgagatgactggcagctggactttagcaaaagagtmtmtttatttttgctttgcttttcccttactcctaggacttaactttttggagcaccttccaagacctgtgaacttatcagtacctttctcccaaatggtaagctctaacgtcagttttcagcctctgagtctattgaggttgttgatttatttgttcaatttctcatcctctcagtttcctctttcagaaaaattgcactaccagactcacctatct

SEQ ID NO: 1251 - DNA, 600 bp, Bovine  MMBT15626
cctttttctggtacaagaggatgtctgcatatcctttcaccacatagaaaaatttaagatcaagacagttacctagcaagaaagcttgttttgaagtgtctaataatcggggttccaggtttaatgggcaattagctcacatgctaaagaactagacaattgaatgtgaggagacagtagaaataagtacctcttagagaaacaagatctaccccacattaaaaggaagagataggatgtgaatggtaacagaaggatgaggtaagtataaggggccctcagaagtctggaaacagtccsagggaagttgtccaagaaagataaagggccacagtctcataaaagttgagcaggtgtaattaatggactttaagaaaactacttcctttgcattttatctctgtaaaacaagtattatatttccctttmataaayactccttaaaagttttcctgaaaatatatgaatataagactagaggaaaattttcttattccactctactattcaattttcccctcttctccctaaaatgaaaagggagcaattgtgagaggacataacaaactgaagaccctgtccaattatggcaaatatttt

SEQ ID NO: 1252 - DNA, 600 bp, Bovine  MMBT17629
caccctttcttcctctcctcctaccaacggaatagatactcttacccctgggagtcaggggtccatctcagtgctgaatctcatctcttcctgtcttcagaggaaacttgctccatctagtatcctctcaaactcagttttcaacttctttctagttattccttcctgtctctctgataacctagatggctgggatgaggggagagtgaagagaggtccaggagggaggggtatacatgcatacatttagctgattcactttgttgtacagcagaaaataatacarcattgkaaagcaastataacccaataaaacaggaaaagagtaaacatgcttacatttcttcattaacccacttcctcttctagctcttgtgttattgtccccctttcttttttagagccamatttctttaagatatgatgtgttttcactctttatttcttcatgtcagctgttctccttaagccacttcagtctagattttttatcccatgtccctttcttttttgatatataaatttatttattttaattggaggctaagtactttacaatattgtactggttttgccatacatcaacatgaatccgccacg

SEQ ID NO: 1253 - DNA, 600 bp, Bovine  MMBT17023
taatagaaaggggttttaacacctgatttacatcaatggacagatgacagtgaaaaaatcaataagtaaacacaggctttagataacacactagatcaagtggaataactgtgttgataaatatacactccatcagtggtatatgaaaatacttgaaaattttgtactattttagtaagatcttctaacttgaggatatataacaatttaatgtttaacctttccctttgcaaagacatctagaagaagtttctagtaaagaaagtttaagatttacacttacaacctaacttcaaggascattccttgtgttattaagakattggtgaggtcataatactttcactgtaggatattcaagaaaacagcactgctgcagggcaaccaagaacttctctacccaaataaaaatctttactacactttgaaccaaacaatagtctcagtttgttccactgtgactaatctgttacaagcagaaatatttttgttgttttttaactaaaattaaatcagacaaaatagtttaaaggtagctggaacagaatgtacctggcacacaataggattgggggctagcaggttgacctcaattcaatt

SEQ ID NO: 1254 - DNA, 600 bp, Bovine  MMBT11985
cgaaaactgagcttaaaaaaacaaacagtactaagaaaaaaaatgataccctatttccttaccaaattcccagactggttgggaggaacgtggatttcccaccacatgtggaatgaagccccagacaattttatttgaatcttgaaagacagctctcctcatctgacatctggttgttcagtctgtctgtacctgtgagtttatgtatgtatgtatttgcatatgcattgacgcaaagcttgaatgagacatttgaaactatctggaatgactatttcaggaggaagagggtattggagsaggagtttcatttttattttataatcagttttaaaaattcctgaagaacatgtattgcttttgtagtaactttagatccacacagtagatacattctgttctggaaagtaccttttcggttttgtggcaacgtctggatgtggatttcattgtggaatgactcctcattgtcctcactctctgcccagtaaaggaaaggaagagcagaggggagtccagctgttggattttcaattgtctgctcatgggtggctttctttttacaaactgagatgccttatctttaaaaagacagcccta

SEQ ID NO: 1255 - DNA, 600 bp, Bovine  MMBT11623
gcaggttgtgacagtaatggtagtctcatgtcagtgagaaatgagaaatttgctctaggctaccagtttcacagaagtctacgaagtttcacaaaagtccatgactagagactgagttagacttcctgatcctttgctgttatgtcataacttgttctcttgtttctctctcttggaatcctttaaatccattctatacctagagtttcttaaaatattatacaaactggtgccagagcctctttgtgcataaatgattaacatcgcaatccctaacacctcctatctgacccttccctscaaaaaaaaaaaaagtttgctgtatctggagcttgtggttgcagatgataatatmgtttctggcttmctgaaaaagtaagcaagtgatcaaaagattgaaccatggactcaaaatatgtcagctcggaaagttacgttttaaagcctatattgtgtcctgcagacccctgctctaatttttaaagctccagcatagctgtcgcccaggattgagttgtaacaaaaccgtttgttgtttccctgaaataatcaaagaaattatttagagaaaggatagaaagaaccgtaaataccttgatg

SEQ ID NO: 1256 - DNA, 598 bp, Bovine  MMBT15356
  misc_feature (1)..(240): n is a, c, g, or t
nnnnnnnnnnnnnnnnnnnnnnnnnnnnnnnnnnnnnnnnnnnnnnnnnnnnnnnnnnnnnnnnnnnnnnnnnnnnnnnnnnnnnnnnnnnnnnnnnnnnnnnnnnnnnnnnnnnnnnnnnnnnnnnnnnnnnnnnnnnnnnnnnnnnnnnnnnnnnnnnnnnnnnnnnnnnnnnnnnnnnnnnnnnnnnnnnnnnnnnnnnnnnnnnnnnnnnnnnnnnnnnnnnnnnnnnnnnnnnnnttcagcccatctctcaccccagctactgctgcagagaccagttccaagagggcattaacyatcctgcaccgagccttgcttcaggtccatgctacattcttccttctgttgccatccatgtgatggcatggaactgccagtaaacgcccttggcactcaggcatccataacctgaagtgtgtgtggaggggttacttacgggacagatraaccacagggacagaagcaccctcagaaggtcttgtgcrgagggtgccatgtggcagcgttgaacttaataaaaacctattgtcttacygactttttatccttctctgtttcactccacctgtccttccctcctgcttcctgagatcac

SEQ ID NO: 1257 - DNA, 598 bp, Bovine  MMBT17337
  misc_feature (1)..(73): n is a, c, g, or t
nnnnnnnnnnnnnnnnnnnnnnnnnnnnnnnnnnnnnnnnnnnnnnnnnnnnnnnnnnnnnnnnnnnnnnnnncaggtttggagaccccgcatacagacggttcagcagtggtggggcctaccccaacatccccctctcttcccccttgccgggagtacccaagcctgtttttgctacagttgacggacaagaaaagtttgaaaccaaagttaccacactggacaatggactccgtgtggcatcccagaataagtttggacagttctgtacagtcgggagtgagtactgttggtggtgtygggggtggtcctgtttgttgcaaaaygcacacacctcagtcgactgtgagttgtaattagggcatagttaataaactgtgtcctgagtgaaaaagcacattatagaatctgaaggtttagcagctgcagaatgaacggtagctgtctcggtggtgggtttgttttccctctttctacctttctgttactctaaaaattttctacggcgagcataaagtgaagaatcctrtaaatactgacgtgtgtgtacccgtgaagtgctcagaattgagacagtggacatgctcatcactctcac

SEQ ID NO: 1258 - DNA, 507 bp, Bovine  MMBT16070
actgtctgtgtatttgcagagtcggacatgactgagcgacttaccctccacctggggtccgtgtggcagccacagcacacccagcaccggcttcctggagacgtacctcgtctgtcctcgtctcagcttgggtaacagtcctcagggcagctgaagacacactcagttcgagagttgggccgaaagtgactgtgcagcacggcagccgtaggccggcgaggagtccaatggcctccgggaatcagactcagagcaagtagactcggagctgcagtctgcctttctttggcttgtgcttcyggaagatcacagagcctctgagactcactttctcgactgcaaaagtggagtaaaaatttcagtcttgatgacagtctccatcacatcgcacaaggggatgccattcacgtcgtactcgaggcgggtggtactcgctgaagttgcagggtacacgacctgtgcagctttccatggcagctctgcgtggctcaaaggccctggcgcatg

SEQ ID NO: 1259 - DNA, 600 bp, Bovine  MMBT18200
tttgtgggaattgtgtacagttggaccatcaaccttaggtgcatgtgctcagttgctcagtcgtgtctgactctgagaccccttggactgtagcccaccaggcttctctgaccatgagatttcccaggcaagaacactggagtgggttgccctttcctcctctagggcatcttcccgactcagggatcaaacccatatctcccacatctcctcatctcctgtgttgcagacagatgtattaccactgagcccttgggaaagccatcaaccctagacttgaagctattctaggcttctgaygccaattatgtcacactgaggaacatcagcttggctgggagtttgatcatgacgttgcattctacttgatccatggaagacagcacagtcccctcacgcccctggccaagcctttcttattccttacagaggaatagcttccatcaaatgttgaattgtgctattgttctgttctctgctggctctgcagtgcctagaacagtgcctggcaccttgcagacaatgaataaatgaatactcaccgtaataggcttcccgggtggcgctagtggtaaagaacccacctgccaatgcaggaga

SEQ ID NO: 1260 - DNA, 600 bp, Bovine  MMBT16238
tgagctcaagaagatgcagttgcagtaatcattctgcattcaacctagctgtcaatatcctccctacaatctttataggataggtgtcaatgttattcccattttacagatgaggagactgaggtgcagaggtgatgtgacctttgataagtgacctggcagagagcctgcactcttccgtgatgtcgtgggagacaaaggtttcctgggagatctgtgagagacatttggaatatttaagttggtgctggaaaggcccgtctctgctccctggaaatgcaagtctgttgttactatttygagtgcagatgtgtgtcctcccagagtcccagggctgaaggagaggagatgaaagggaaactttaacctgtgacagaggtaggaagtgcatgtaaaaccagtctcatttctctgaaagtgattttccaatatgtattgagagccttcacatgtccacatgtgtcaatccactacttcggttgttacaaatcagcctaagagaataaccaaagtttaagaagatttttctaacaatatagaaaccacagattctccatattttcaaattatacaggaaattttcaaaataacctacacaat

SEQ ID NO: 1261 - DNA, 600 bp, Bovine  MMBT15902
caacagccccgccccggccaggtaagacacgagaccttggctcactcggcgtctctccagctggactgacgcgtcacaagataaagtacagatgctcacaggtggcttacaactcattcttgaaacatttccagaatgttgatcttgatgttaactttctttcagtgatctttgaaaacgtgtgtcgcatcagacacttgaagagaggaagtgcttatctcatgaagaaagtgtcagtcctgtgtggcagctgctgtgtatggaatgttgagtctctttgtgacagttgcatggggtttytgtgttcagtgttaaggaacaatgcgtactggttgcttgagtttggtagtatcacggtcaggacagagtgaggtgtcacagaggtgcctgagggagattggacgcagcaagggcttcacaggatggaaaccctcaaggggtctctstgtttcgaaagtcatttctaaactttgattatatttttttctacgtcagagatgataatctccaaagaactgattcaaggtaacccacttkgtgggaggctgaagcttaaatcagaaaacccsttctttaatacagagtgagaagtggaatctc

SEQ ID NO: 1262 - DNA, 600 bp, Bovine  MMBT17745
actctcaaatagcccttggggagttgaattgctgggtagcaaacagattaaagtttgcattgaaagaaaaattgaattcagaggtaatcaatagcataataggggcagtgagtggtgcctgctgcctgaaatgaaattaccatatttttaatcttaattttccactctgtttatctgacagtgtggatgtgcaatccaaacagataatgagagagtgggatattgacactgctgtcctctggagtgcttgttttcagtgattaaatgctgtgatctgtgattactttgtgcaaagatgtyggggctgctggccagaaccatgggaggggcactcactccgcagctgcagctcccgactctcccaggtcctaatgtctgaaattcatcttccaccggcaatatagaaaaatacaggttgcctatttatgtgtatatttcagctgcacaaattacaataattaatcccgttattattcttgtcctgctcaaaaacrtccaattagattaatatggagtgaaccctctaagttttctattaatgaacccacaaacttgcttcttacaggaagatgtgggtcgcaggaaatgataggctgggag

SEQ ID NO: 1263 - DNA, 600 bp, Bovine  MMBT17299
gtgtacccttaagacaattcattttcttaatttcacgttaatggaaagaatggaagaggtttatttctggatcagaaacaacatgctgtggtaaagttgcacaggccttaaaatcaaactcaggtttgaatccagcaggctcactggcaatgaccttggcataacctccttcaatctcagtttcttgatctgtaaaattagaatcatccccctttccactcaagtgtgtcataaacgctcattgatatgacctgtgtcagtttccttgcacggttgcagaattttaggtggaccrtaaayagacaaagagagaccacaccctctctmaatttatgttcctggcttatttagcccagcatatggaagccgggtatcagccagcaaagcagatgcagcagatgactcttgtctttagctcctggggtccctaatgaggggtgmtcagctgcctgtgacactagtcaggtctcactggctcaagaagcttaattttgtgctgccccatagcccagttataattggggctgacatcaccactcgcgaagaacttacagaaacattctctgtccttaataagaaatacaggcctcgaccctgtat

SEQ ID NO: 1264 - DNA, 601 bp, Bovine  MMBT14563
  misc_feature (1)..(1): n is a, c, g, or t
natacatgcttagaattaagagtgaggttttcagaaagtttggaatatraaatgtgaaggagctcacatttagtggaagtcaattcaagataatgtcccatatgtgactgtggtacttttggagcaggaaggctccggacaactctgtgaggagcctccaagaagagattggtagaagaaacctctggaccatggtctatagtttgaccaaatcaacagcagtgtgattcttgggctgttcagtatgagaatcgtactggtgtgtggtgctttctgggcagtcaagctctacatcctgtcycagcttccctgagagcagacacgaccagactacacagttagggcctaggaagaaaaactaggtgacttcgagtcagcttagaagtctgacatgtctttgaggttctgtgtccatctggtgatgcagggaccacagactgtatgagcatcctgtatgacagataagaagtaacttctcaagataagtgtcccttatcccttaaggatgaaggtccttaagttcacaggggcctgaaaccctccttggtctctgaaggtcttatcttcagggagctgcaccctgccggtaggctgctcacaa

SEQ ID NO: 1265 - DNA, 600 bp, Bovine  MMBT17490
tggctcacttaaaaaacattttacttacaatcagtttattaaaggatatgataaggaatacagatgaacagcagatgaagagatatacagaggaagcctgggaaggtcccaagcacaggagcttctctctctgtgcagctggggtgcatcaccctcccagtaggtggatgtttgaacaacctggaagttctccgaatcccatactttggggatttttatggtggcttcttcatgtaggcatgatcaatcattaactaaactgttagcccttctcccttttcaagagaatagcagataaaygctgaaagttccaagcttctaatcatggcttggtccttctcctcatccaggaaccatccaggagtcccccaagagtcacctcatcagaacaaaacactcctaccacccaggaagttacaaaggtttcaggagccctgtggcaggaacccaggatcaaagatcaaatattagaacaaaagatgtctctagtatattttgacttaggaattacaagggtttcagaagctctgtgccaggaactagcggcagagaccactttgttgttcagttgctcagtcatgtccaattctttgcaacctc

SEQ ID NO: 1266 - DNA, 600 bp, Bovine  MMBT15081
tcttttaaattagtgaaggctagagaagaagaatcccattctctcgcataataaatatgcatggaactggggagccacgtgcattctaataaagccgagtcctggctggttaatgcgttataggtccacaacaataaaacacaataattactagttaaagagatgccagtgttggccttttaccaacatccctgaacatataattcataataaatttagtaaggctgaagtcggcctgttaattaacccattttctacaatgattgggatggaggaagccacgatgtaatccgccaaggygccctcccaaaggtgcacagctctcgctggttggactctgcagtttggacccatgcrcatcaccacaggatccttgcttgtgctcagacaggtgggaacactgggggraaagcgctaaaggaatatcttactctgtaactaccatatttgagaaatgaaattgcaggacagtatacacactgactggtgggtttccggggccttttttagaaccaacaatttaggcaaggaaagctgaggagaggggcttagcaactcagggactggagtaagatggtggacagaagacatacgtttttc

SEQ ID NO: 1267 - DNA, 600 bp, Bovine  MMBT17011
tctctgctcccacccgattaggaaaatctgagaacagaatttagtcatttgcggaggggcaccaggttgggggagatgggtcatatgggaaatgaactgaaaatgtcatgctggtccaacagggatgcaaggacaaaaatccaggtgggctgtgactctaaaacctgtgttctacacttctctggtacccaaaccagaaatgaaagagtcatccttgattctgccttcctcacatttctcatcagttccttaataaatccccttgggtcaacttccacagtagatcccagatttgtctaytttcttccactcccactgtctctcgttaygctatccaataaaccatcatctctccccaggcccaaaacagcctccttcttcatccctctgcccccatatttaccatctaagatccttcctcctcaggacagccagcatgatattttcaagacacagatcgaatggaaacagtcttctcctcaaaaacctattcacagcttcccattcctctcaagttgaatccttacctctttggccatctacaaaactctgagagggcagaaaccatatcagcttgttctcagsgtgtactcacagctc

SEQ ID NO: 1268 - DNA, 600 bp, Bovine  MMBT15606
tgggaagtcccatgtacagaggagcctggtgggctgcaacccatggggtcgcaaaagagtgggacacgactgagtgactggaccacccaccaccacacctactgacgggcaggtcttgtccttgtaggttgagcatcccatcacagaatgcatcactggcctggacctggtccaagaaatgatacgtgttgccaagggttaccctctcaggcacaaacaagccgatattcccatcaacggctgggcggtcgaatgtcgagtttatgccgaggtaaagygaacactgggaggagggatgaygggaggaagggtggtgtttgtgtcccgagtcatgggaccacgtataactaaacaacaaggtaaagtcagcgtcctgtaacttggggtcaagtatttgattatgtaattcagagctgaaccagaaaaagaaaggttagatcattttgacataactcaaaatagttttaaaggattgagtttaattaattttcatgtgttgtttctggatggaagaatagcttctaatcagtttaaggagcgagaaagaattagtttaatattcttgtgcttgaatggaccgtgggttttgttttgtttgct

SEQ ID NO: 1269 - DNA, 600 bp, Bovine  MMBT17246
cttgtcaggaagtccactttttaagcattctattgtcatttctgtccctgttcatggtgggtttacctaggacagaggctgcaacttcaacagtaaagtgtcaagacacaggcttctacattctatagcaaattcagttgatgccatctcagcacaccgacactgctcgcttcctaagggcatggttggcagacacttttattagcaatcaactctgccaccttctgcttatctacagatttaaggccacataatcatcctctgcgtcacagagagggtggggtggaaactaagagtctytaaatccctyctaacacttgcttcttccctaccagcaagattaaagcagtcaacagctgttggcatatgtgcccagaacagacaggctggactgggctgtccagagcctgaggaaggccagttctcagggcaatgctggggaccccaggtctgctggtccaggcctttctctctgagacagtagagggcacatgaccaactcctaggggcagtgagcaggctagggacccgaccacggccaggagggcaaagccagggctcccattcctccagctatgctgaaacagactgagaggagac

SEQ ID NO: 1270 - DNA, 600 bp, Bovine  MMBT17441
ctggtacatacatacccaataaatatttttcaataaaggaaaatatattgttacagggataaccagccatgactttcagaaagtatttgtgggagggaaaaaaaaacccacaactcttgggaggtttgaccaataaaatgacatttagcaagagtgatggaaaacaatgctctgaataattctgtattctgggtacaagagagaattagtacctgygccctgccctactcagtccactatctgcttttttctgctctattctgtgtaccaggaggctgatccctagggattgtattatcytcttcctctgaactctcccttagaccatgtggcttctggttgggtttggtcaatggaaattagcaagggagaggagaaagragtcarggtatttcttccccgctcctattctgcattagaaccctggttctggtagagattccacccctctgagtctgtggctcccaccagctccctccaagaagtctcttacattccctgatctccactracactggtccctcttcttccccctttaggcccagaggtggtgatgaatgcccactgctgctagtctctggtgcctcaactttcctcatg

SEQ ID NO: 1271 - DNA, 600 bp, Bovine  MMBT17895
ccaagggtccacagcatgtaagaacaaaaatcaatcttccccaaaatatctgaaagtcccagaaggcttacctagtagctcattatgaaatccagcctggttcaacttgctcagttggccggagaggtaacagagaccagagaaggggggagtgagcatcagctaactaaataagaacctcaaagccaaggggagggcagaaggcagcgctccacggtgattggtaccttcgggaagaggaacactcacacatgttatttcaatgctcccttggtgtttaacacaggcctgtggtttccygcaaaaatggtttctgctgctttgcagagacctacacggaggagagagctccgaagggctattccacaggtgagaatccagccaccagctgcatcctgttacccaaaggaaacggaactgtgagctgccaggacgcccagatagaggagagcaagaccgtaaattcaggagtgctgacaatcttatcactatggtaataagaataaactttaaatttagaaaacttcgcacacacacacagctgggttttatgtaaattaacctcagcaggggttaaaagagacatcctgtaaagagact

SEQ ID NO: 1272 - DNA, 602 bp, Bovine  MMBT16541
  misc_feature (1)..(2): n is a, c, g, or t
nngctatgtcgcagatgttcttccaaggagcaagctgcagtctatgatgggaaagagtaatttgttacggatctgaatcgtcaggtccagtcatttggcttgaaggattcagttgactccactgaaagcacatggcaagtatagctcctaaatgacagtaagaastccctcatttatattctctcatgtctctatctcatctaaccctgtcgggtgaacccctgctgccctttaaatgcaaattccatccattcccccatctgcatggagctgacaacccatcttccatgatgcttcrgcaytctgtatgtacttctgttagggcccctgcatgcatatcagagatttgtgtttccattcttgtgtccctcactggagaattacgtccttgaaaggagaacctcatttcactgtcgtttgattccccaaagtgaactgtgttcctacctgtggagtaatgtgttttgcacatttgctgaattgaatcagaatttcaggtttggaaggaaactttcccatcattctaggaagcctagaacagtagaaccaataacatctgtggcccgtccacccctcatttagtcgatggggttacagggctg

SEQ ID NO: 1273 - DNA, 600 bp, Bovine  MMBT17238
aacaggacgtaattaggggcaaaattccatgctttctcctgctctgtgaccccctgactgagaagttcttgccaaatttcttggctgctctatcaaccttctgacccccatgcagtcagcaggatgaggcagaaacatcgggggtgaataaaactcttccactgctccctgaccacggcccactgggcaagtggcttcatctttcagacctcagatggcccatctggaaagggggataagaagtcattgcccgcccagctcagtgatccaacatgtaaagtgagagtaccttcccaaaaygcgtttgcctggctcctcggctggcaggtgatagaatgcccattcgaaagagtctaggcagggacttccctggtggtccagtggctgggattctgctttcccagtgcagggggcccaggttcgattcctggtcaggggactagatcccacatttggcaactaagagttcagatgccgcaaataaaaggtcctgcatactacaactgagatcagagatcccacgtgccgagacagaggcccagagcagccaaagaaaacagatacttaaaagcaaacaaacaaaaacagaacaagaaaacc

SEQ ID NO: 1274 - DNA, 600 bp, Bovine  MMBT15604
gaagaaccttctagaaatggaaaacaggagccctggaggagtccaggccgatggtcccatgtctgggtctaatgtggagatggtagcccagaggactctactcgctccaggcggggacccaccaactacagaaacgacaggtgttctggaatcacattcacgtttgtttgtggtatatatatttccaggttagggtctcattccttccttcattccacaaatatttattgctctatgtcaggtgctgagtgaagggcttgckaactaaaagatgagaaaacataggctctgctgcctccyttccggaagcctgcaatctagtgttgaagacagatactagctaaacagcgacacagacaaatgtttaattacaaatcatggagcgggttctggagaaggctgagaggaggaggagggagagcgttagaatggagacgggtggcaagcgagggctctgaagaagtgacgtatttaaacggagacctgaaggatgagaaggagcttggcaagggagtgggggctgaaatgtgtgtgcatgtgcgtgtgtgtgtgtgtgtgtgtgtgcatgtgtgtgtggagggggagaatccaacatgagag

SEQ ID NO: 1275 - DNA, 598 bp, Bovine  MMBT17470
  misc_feature (1)..(84): n is a, c, g, or t
nnnnnnnnnnnnnnnnnnnnnnnnnnnnnnnnnnnnnnnnnnnnnnnnnnnnnnnnnnnnnnnnnnnnnnnnnnnnnnnnnnnngcagcaccattcttgctaggtcatgttgctcatacccttcccagcctgccaggaaacccctgacgatgtgctgggcttgcagtaaggtgagtgagtgacaactctgataacaaatgccaccagctgctaaacattcctgtaggccaggcactgttcagatccgagaccaaaagtaacaattttgttaagacctttcttggcctttagcgtcaacayagacccgggtctgggtgcagartttgtctctgctcctttctagcagtggtcagtcatcacagagatactgaacacatctaggccttagtttgccatctgtagagaacgggctgtgcctaccttttccagacaggattctcaaatgggttcatggagatgaggtatggaaggagcttaacaagattgacatggcagaggaagctgtcaggaagtggagctctgagaaaacgatcaatcctcccaacaatgatatgagcttactcttatccccattgtgcagataaggaatctgaggcct

SEQ ID NO: 1276 - DNA, 602 bp, Bovine  MMBT17222
  misc_feature (1)..(2): n is a, c, g, or t
nngtatattaatattagagactgaaatccaaaatgattatcagccaagagattgttcttataatgatttattcaagtctttttttttttttttttttggtcttgtagggcttttaatgcacagtcaatcttttaaattagacattggccaagtgttagctcacaatctatattactaagtactaaaagctggcccagaattctggcaagaaggatgaactgtgaacagtgaggcctgacaaccaaaatggtatgaagtgcttagatcaccttgtggggaaatcttggcactaatactaatcygtatttcccagaagattcctctaagtgtcacacagtgaggaaaccattagcagacacactgtgagaggattttgattgctttgatacgtacgtgctgcatcttctggatatttttttactgctttcattacattaacttctctaaatagttattgaaaacttagactctataaagttatatagtcacattccttgctctatttaccccataagatatggatagaagcagccctggacattattaattgcgagagactatgaaaagcactacacaaagggtatgaacagtgctcagagttt

SEQ ID NO: 1277 - DNA, 600 bp, Bovine  MMBT17815
tgggattccccttccatgcagacaggctctttcacttcatttacttcccaaatttcactccccatccccaggcaacaaggtaattaataccactgctctggggagatgcacaggccttccaggggcccctgtgggcaagggatttggggcatggcttgagcaaccctgagtctagtctcctggtaggggagtggagtcactgaagggtgggtgggtgccctgacagctgggtgccagatgcaagttctcaaacagtcctgagcttcccctgtggtcatcaggttgaaggagaggaaaacygtggcagggagggccttcagggccagaagggaagcaagtgggggaaaatacctgtggtcactggctggccagaacgctgtacagttccaccctctcttgctgtgggtgtcccccaggaaagctcccagggatggtccacctgccacttcccaagtcacgtaataatcaggcactcttcacagtactttccatgtgttaactcagataatcttcaaggcccatttcacagatggggaatttgaggcagagaaaggctacaaaattagcccaagttcttacggttgtacaaggtagccgtcc

SEQ ID NO: 1278 - DNA, 600 bp, Bovine  MMBT15738
tatcattcgaaaaggagatcaaagtatatgcagccccctcgcccccgcaaaaaaaggaagggaaagaaagtgttatagatgtggttcaggcagctaattagtaaaagtattatgttaatttgtatatttagtggtgtctgtctattttccaggttttttaaatctgccgtttcttttctgaatactattgtaactgtctttgtgttcagattttgaagtaattttcttagagaaggacccctaaaccgtatactgttggagcccagaaaacctgtaacttcagaccaaccagaggtcacygggggtcagactgagatgtgatgctccagccgccaagctcaggctcagagcctgtcagggactccagctgaactaacaaggctctgacggtgggatggcagttctgggggcctctgcagcccgtccgctcattaatattccccggctcaaatctatgaagtcgacgcctcccacccggagctctgtcctggagccaaaataacatgctctaagctcggatacagttgaaagtgaaaccgcatgttttctaaaggtttaaaggctcttttgaagaagggcatagggtcaggaaagaaggag

SEQ ID NO: 1279 - DNA, 600 bp, Bovine  MMBT18374
tccctccccaaaacacagtgcagaagccacacaagcgagtagtaaaaggtacttaataagtaataagggcaaacactgagcacttactatatcgtatcactgctctagttactgcacrcatagtgaccaattgataccttacaacagtcctacagggaagcgtttgttattttcatcctcattttgcagagtgggaaactgaagcacagagaggtcaagtarctggcccaaggtcaccctgcacgaagtggcagaactggatttgaacccaggcagctgggcttgagcatcagtcccttyaycacgactctggtgcatctttacatttacaacagacaaaccagaygttgttgttgttcagtcgcaaagtcatgtccaactctttgtgaccccaccaactgtagctcaccaggctcctctgtccataggatttctcaggcaagaatttccttctcctggggatcctctggacccagggattgaacccgtgtctcctgcattggcaggctgagtctttaccactgagccacccaggaagcctcaaattaaatgacttcggtgggtaacagagttggggcaaatcccctgtttaatgaagcc

SEQ ID NO: 1280 - DNA, 600 bp, Bovine  MMBT14635
cacagaaactggaggagttgtttaaactggaacaatggcctttagttagaactttctactggtttgctggcctctcaatcagctggtgataagctgatgttttgttttgttttgttttagactcacggaaagagacaaaagcaagagattacgtgctaggtgcaaagctggagctgaataaatactggttaatcaatgtagctctgttaatttgaagtctcatttctcagcctattgataaaatgcagacaggggctgtgtggagagcaagaagcacccaccagcagagggaaagaggayggcggggagagaaacccatccagttaacccaggggggcaactgactgggagcctaggatttagaaaaggcagaggaaccagagaycaaattgccaacatctgctgaatcatagaaaaaagcaagagaaaacagaaaaaacttctgcttcattgactacaataaagccgactgtacagatcacaataaactgtggaaaattcttaaagagatgggaatgccagaccaccttacctgcctycaatgaaacctgtatgcaggtcaagaaccaacagttagaactgaacatggaacagtgggct

SEQ ID NO: 1281 - DNA, 598 bp, Bovine  MMBT14657
  misc_feature (1)..(91): n is a, c, g, or t
nnnnnnnnnnnnnnnnnnnnnnnnnnnnnnnnnnnnnnnnnnnnnnnnnnnnnnnnnnnnnnnnnnnnnnnnnnnnnnnnnnnnnnnnnnncccgcatcccccggctcctcaccccagtcacccaggcaacgtaactcaaggggtcagcagttcaagcaaagtggggaggggtcgctaaagcacaaccctccttgggcaggtgactgccaggccctcacacacctggacccggggtcctgctgtggcaacttaccttcttgagtttcttggttttgacctccacctcttgctgcagggaygtgtaggtgccccggagctccatggtctcctcatcccggagcatcatctcttgctgcatttcccgctcacggcgtttctaggccagggcaggggacagggctcagaggagcagcacatactggcaagacccaagggagctctgcctgtcatggaacctggctccgtcgtggccacaggagccaggaggacacagagagtttctyacagcccaggtccatcactcccaccccatcctcagtggaggcctctctgaaccttcttctcagctcacagggccgtgcttttgcaggcactgcc

SEQ ID NO: 1282 - DNA, 600 bp, Bovine  MMBT18404
taagtggcccagaataatggcttagcatggataatgtcttggtttaattggtattgtgaaagccgatagtttctagcgtggaatcccttgtctctgcctttcgaacaatccctcccaggctccctgaatcaatacagccgtcacgtggggctggcgaggagcctgctttgggatggccaccacactgggaagcagctgtcccacgggactgcccagatccctgggttccagctccctgcagcacggggttcatgtgagtgttcctgtggaaggacgggctagagactttctgttgccaaytgacccctgcgagagtctctcccggttaagttggaggggtggagacggaactgacaaaggcgagcagaaagtgaccccttttacagaagcagagccccaacaaggccctgaggtggggatgctgctagaayggaggacggcctttgcagaggaaggtgacatttatatctctaagaaaaacgagcctagatgatcctaattcccattacggcatttctttccaaggtcacgatatttctcttaagtcttcctaaatcttttgaccttaaacatatttcgctcctgtccttttttaaggtg

SEQ ID NO: 1283 - DNA, 600 bp, Bovine  MMBT15753
aggtgaactcttgcacattcttcaagatccagctcataggtcacctcctccaggaagttttccwtgccctccaggcagagtcagcccctttcccwtgctagctgtgtagaagtatacgctacttctcccagcctgtaattatctgcttgctggcctgggctccaccgtcctgttgttcacagatattccctcctcctctctggagaaggaaactacttccctgactcactggcctcactcaggcttgaccatgtgacttgccctgggctgtgaagtggaactcatgagtcagtgaggaayagaagcttccaaggctaagtatggttcaccatgctctcttttccctttgctgcaaaggatggcaatgccccatccagaaaccgcgctgccagcctggcactggagtaaaggaaagtggaactgactcatgacatacatgaagcgtgagagagaaatgaacttgactgtgatgcatgaggcctctgggaccatggaatcatgtgttactgcagcataaccagctgatcttggcttctccaacctttgcctctctgccccagctttaccagcacaaaatcaggaatctcatcttactcacat

SEQ ID NO: 1284 - DNA, 600 bp, Bovine  MMBT17271
acttgccttgggtgatctctgccttgagctcatgttcagtgaagtagatgtctttgggtaggttgaagaaccaattctgtgtccttgaaagagtcaagttccctcaaagggttgtagagttctagggtaagcccatagcttgtagaccaagctgaattagaaccttgccttaagagatgcatgacttccaagttaatcaccattactgaggttccatttactcccctgcaagaggaagaaatagggcttccatttggctcagtggtaaagaatccacctgccaatgcaggagacatgggytcaatcacctatctgagaaaatcccacatgctacggagcaactaaccccactggccataattattgagcctgtgttctaaagccttggagtcacaactactgaaycccatgtgccctagagctggtgctctgttctttgttaagaacccactgcartgagaagcccatcatcaaaactacagaaaagcccatgcagcaatgaagacccaacacaaccaaaaataaaataaacaaataaaattatttttaaaatgaagaaataatattctaatgattaatgccaggtaattaccatttttt

SEQ ID NO: 1285 - DNA, 600 bp, Bovine  MMBT16209
tgcttgctatggagcagcttcccctctgaagttcactgaaatattcaccagagatggtgggaggcagtgaggcagttggagggccccagagatcagccagctcaggactgtccccaaccacagggttagagggggwagccagggccagacagggagagactctctgggtcaaggaggccccaccagagtctgcatggactctgagccactggactcccaggcctgyacctgtyctgctaaactgggcagcccggacctctgcagggccttcccatcctgtctcacctcatcaagctgggyggaaacatacagtctgcgtcctaggtcatcaccttgacattycaygtatgaaaaacaggtggaaaaggaaaagtggctcatgccagaccacagctggtacctgacctrgcaggtttggggtccctttgcctagggctcacttcaccacatgcctgggtctccctaaggaaatgccccgagtctcagcccaagccaccccctcgtttccctcctggaagatgtgcagagcatccaaaggctaacccagaagacccctgcattgccatccctagccctggaggctgaatgtctttaccttca

SEQ ID NO: 1286 - DNA, 600 bp, Bovine  MMBT17922
gacaaacaatgagtaattttttttttttttttttttagctcaagaatgtcttgggcaaggctgataatatatcacaagtctgcaacattcgggatattacttgctgtttatctgaaattcaaatttaactgggcgtcttgtgtttttatttgctacagctggcaactccactaaggcctctctctgcccctgaattcaccccatttcagctccatcttggcagcagcagaagcaaagggcatatccagggccagaacccagccaagggcagagagccaggctctgggcacaaggaaggcytctcatgtccccagcctcagtttccccgtctttgtaactcagcaggaaaaatcttggctgctcgggccttttgcaaggatgaatcgtgtgatgtgtgtgtatgtgggaaacatgttttgaaagtgaaaaaggtgttgtagaaacattagttaccagaactcattgttatgaataacacaggtcagccagtggaggcggcttctggcagctgggttctttttttgaaaattcgtttttcgaaaccagcaattgctgtttgttcttaaaaatgttagaagtggaaagtagcaaaagcagaag

SEQ ID NO: 1287 - DNA, 598 bp, Bovine  MMBT17982
  misc_feature (1)..(83): n is a, c, g, or t
nnnnnnnnnnnnnnnnnnnnnnnnnnnnnnnnnnnnnnnnnnnnnnnnnnnnnnnnnnnnnnnnnnnnnnnnnnnnnnnnnnncactcagctcatctgcatccctggcttccttctgccctgtaaaggcatttgaccacgagaaagccacttttgccctccctcacatcagcacctggccattctgcttgagcttggggtggggttctcggtggaggcatttgaggtggtttggtgggaggtaccagggcccccatgggcaggagtgaggggcatggggtacacagcactctccaaggcytgactgcttgtgaggtttgcaagagagtctttccttcctctcttcccaactctccaggaccttaaagaacacccyagaactgccactggctcatgtggtctctaacagctgttactgacctctgaggcctggagagactggagtaactgcccgtctgagatctcctggagggaaacagagatgaagaaggatctgtaacagtgctggttatttacacatatgatactcctctaaactcctacctacttctgagatttctctcattctgagaacaagctacggataaattctgatagaa

SEQ ID NO: 1288 - DNA, 600 bp, Bovine  MMBT17131
atgccttctgcacgtggacctcagggctcaggtagccactaaggcacaggctattcttcccatcccacagaaggagagaggaaggtcctttccacagtgggcaggaccaacaagtgcaggcatgtacgtgacaagccagtcaaaagctgcctgccaatctcgctgtggacaaagtccggcgctggttctggctcccccagagtccaggcctcccaccagcctgcctcagtctcctaattgtgccctgggagaggactgtgggtaaacacgcagaccggacattgatggagagcagggcayggggatagggaggtgggcaacatgaggatatcttggcaagaggataaacacaagtgcatttgatccagaaactccacttccaggaatttatcctgtggatgccctggcactttcataaaacggctcacgtacaagcatagttaatgtggcattttttcctgtaacagcagaggattgggaaaacaacttatatgttcatcaatatgggactattattaactcaatgagggtgtgctgtgtagccataaagaatgaaaatcttttatacactgataaggaattctttcagagaaagcactg

SEQ ID NO: 1289 - DNA, 600 bp, Bovine  MMBT17019
cctctgccaccacccgggccttccgaagtagtgctgactcccctctggcctaagactggtccccacctggctcaggttcctgcctcgttcaaggccgagcaaggtggtgggatgagggtcgccctgtcacctcacccctgccccggtgtggtcctcagccagcagagcggtggatgaaggcacaggatgtcacagcctccctggtccagacgccactcctctggcaactctggaccccagaagctggggctgtagggagctcttgtcctaagagagtgttcggggcggctggtgaacacygtctgcytctgcagggctgagccggatcctgaagacccgtggggagctggtgaagaacaggactgtggactgggctctggcggagtacatggcttttggctccctactgaaggagggcatccatatccggctgagcggccaggatgtggagcggggcacttttaggtaatggccttggtgttcttgtgggcccttcagagtggaggagacacaaaagaagggctgtggtgtttgtcttccagaagaaaatcactgccaggaagcagtcattagatcccattgtctcaggcccagaagcac

SEQ ID NO: 1290 - DNA, 600 bp, Bovine  MMBT17769
ggagatgagcgctggggagggcagggatgcacactttgcattttctcttggatgccattggcagtgaggagcaaggcagggtaatgatgggggccacccaatgacgagggggcctgtctatggctgtggtacccaggctggcctggctctgcgcctgagaatcaggtagctcctccctccctgaggtcaattctaagtgatactcattgctacaccacagcctcccagacctctgatggggcgtgtgtgtgtgtgcacgagtgcacrtgtgtgtatgtctgtcccactgttttcatgcaygaaaatgcgttctccacatcctgggggtggtgatgctacattcactgtacatgtggaacattccttytgtgtgtgttgtattcgttttaaacactgagcacatcgaatgtgtggtatgaatgtgctgcatctttcatggctgttgtctggtttgcatcgtctgtctayctttgcttgacggtgcctgtgccctgcgtgtgggttattgttcatgtatgtcatgggtgctacactcctrttgaatgtatatggggtatgtattccacatattcttgggtaccgcatggatgttatatgcac

SEQ ID NO: 1291 - DNA, 579 bp, Bovine  MMBT17749
aggagaagyttaactctacccttgtattaactgttattttctgagtcctatattgtttcctcctgtgtatttcttattttgtttaaagccgttagtcattggatccctgctggaaaccgtggtggcttgttccagtagacagacagactgttgtacctgatggtgtctggtgtggggcttctaaatacaagtttcgctctgatgacctaggtcggcttgtattgccattagtgtcagcatggaagctgagaaaaagctgacaaataatctagtgcagagaagaatttcttaaatagatayataattattaaccctttctctctcttttttttttttttactgaaggccattgaacacccagttcgaaccaatcagattccacgtcagattcctgaacagtctttctacacaaagccattacctggtattatcatgggagggattttgccctttgggtgcatctttatacagcttttcttcatcctgaatagtatttggtaagctgagcactaagtcctcttattctcgttcccattgtatgtactactagctttctcttttgtttatagggcttactgt

SEQ ID NO: 1292 - DNA, 601 bp, Bovine  MMBT17924
  misc_feature (1)..(1): n is a, c, g, or t
ncaagctaataaatgacaaagtgaaagcgttagttgctcagtcgtgtccaactctttggtgacctcatggactgagcccaccaagctcctctgtccctgggattctccaggcaaaaatgctggagtgggttgccactcccttctccagagaatcttcccaacccagggattgaacccagtctcctgcattgcaggcagattctttaccatctgagccatcaatgctgaaggagagaagcaaatccaggtgggctggctcctaacctccatcttcagtatcagaaactaagctaaataaatygtttcctctttgctytttgttatagtctgactcattcttctaaatgactactatcatattgttttgtagggtttactatattttattaagtcttcttccttttgataggcattcagaatggttctcagcctctctctgtctcattctctcatctgcttctgtgtccttctacaaatgaacctttgtacaacttttatttctgraataggtacttccagaaaagaattgctggccctaatggtaaaaatatattgaattctaataaatattgctagaattatattgcaaaagacctatgca

SEQ ID NO: 1293 - DNA, 584 bp, Bovine  MMBT15265
aatcgagctttgtgtaaaatttcagcttctcttaagacatcactttctttcactaaagaaaaaaaaaagcataattactttcaaaataatgaaaaatacacaattatcatgcccataataaattaattctggatttttccattcattcattagcttttgatctcatgtaaattaggcaacttttcttagtttcttcatatttaaaggagggataatctctaccttacatattccataggtctgtttagagaccaaaataacatataaaccactgacagaaagaagtgctacacatagatyaaaactgtacttttcctaggaaaggcaaagaacacaatgtttgtttataaagtctatttgtattaaaaygataggtgcttgaaccaattacataagtttctgttgtattaaaatgataaaattttattagactgttacattaaattttacggttgcatatcatgtaaaaattttctaaatatcctgaatattaaaacacttaaatgttgtagattttaatgactagatgataatagtcgcataagggtcaataatactcagaaattataggctggaactcagga

SEQ ID NO: 1294 - DNA, 600 bp, Bovine  MMBT17683
ttcccctattttaatttctttacaaatcttgaggtaaaaagttagctaactgcttcaaccatcagtccaaagagaattagggattttagaaaataaatattactataaagttgcattaaaggataatgcgattgttgatactaagaatttgtcagataagtatggcgtcttaaaacattactcaaaaaaaacattactcagctaatggaagtagcacagttttataggttaacacaatgtaatattgtcagagagtttttaagagcaaatgatagagataacagttccgtacattatagytcattttacttgtatgctcatgtttagatttatctactcttaaataatggtcggtaaggaatttagtaacttcagattaatgtagcctgttggcagaaatcccgcttttttggtatgaagtgataatgtgtaggatcatctgtccctcccccctcaggaatgtaagctccagtggtggccaggttcgcatctgttttacttgttggcgtttctcagccgtcctccgagaggtgcctcactcagagagatgctcagagaaaggtggtttctccactgaaagactgcacagtgatactttat

SEQ ID NO: 1295 - DNA, 598 bp, Bovine  MMBT14982
  misc_feature (1)..(27): n is a, c, g, or t
nnnnnnnnnnnnnnnnnnnnnnnnnnncagtacttaccagtatgtggctcataccgttattatcctttttcttgtttccattatctctgacaagtgactctttactggaactctaaatgagagctgatttctaccaaaaaatttgcagtagcctgttgagttactattgaaatgcaacagactgtggctaaatctrctgtctttgtgtctgtgggaaatggagtttcctgaagctcataaagttaacattactcgcagtaagatgatttccccagagattatgcttcaatatggaatacyctagatttatggcacagttccaatctaggttttggattctttctacagataccctcataaatttatgaatcaaaacacacatttagaaattaatggaagcatgaatctgaagataacaattccaaaagtcagcttggcttttagtgtygtgcagaaaaaataaattactctcaatkggaatttagtttaatttactgctyaaatattcaattgtaagcattaagtatactttaaatggattctttcaaaagtagttcataaaaaatttgttgggatattgctaagaaaaattgataaa

SEQ ID NO: 1296 - DNA, 578 bp, Bovine  MMBT17722
acttttactttaattgcatttatttttcaataagcagggctgtcacattgttgaaaatgtgaaaaatattcagtaaagtctccccgacacrcacattccccaagcattcatgccctgtctatggaagccatcaatattagcaatttcttacatattcctctggagatattctatgcttttatctaagaaaatatgtttctttatattattcctcctactttacaaaaacaaaagctatcatttcataacactgttctctttatttcacttagcaagactcactatgtaatgagacataayagtgtttcctccctttttaaaagcagcagcatagtccaggccacggacgcacaattattttattcacccagtaaatggaatgcttctgattttactctctttctcctcaaaagaggaggagtaagaattagttgattcattcattggcctgagaaagcctgttctctactctgcacatttgggatcatcattctccaaggtctaagtctgggcaggaggagcatcacctaagtatgtcatatcagtaatggtgttgctgccattcacgatcttcttat

SEQ ID NO: 1297 - DNA, 600 bp, Bovine  MMBT16952
agaaagggattcaattttctgttttgactgggtagcaactgaggaatcacacgcaggcttggggaaggccaggggcccacagagctgccctggtttcttattggcccttccttttctccctcctcaagcatcactattacccccaagtacgctcctgacccccctaaattcccatccagacaattttgattgcccacattcttgcctaattgaatgttttgccgttttctccgaggttgagttctacaatccgagtctgacaataaacacaaatttgctacctggaacttatttcagtgyttgcagagttcacaaatcttaaaatcaaatctgtctgaagggcagacaacaatggaactgcagaggtaacgccatcccacctgtatgttatttttcatttacaataaccacgaaagctaatacttaacaagctggcctctatcaggaaaaagcaaataagctgttccttcctggttacactcgccaaggtactggagaccgcggctgacggttcaacttccctctaaaccacaggcgctttggaatcaggccggtgttttcccaccagcttgtgatccgaactcggagatgggtgacagt

SEQ ID NO: 1298 - DNA, 600 bp, Bovine  MMBT16334
ataaaaacgatacaaatgaacttatttgcaaaacagaaacagactcctaggcagagaaaacaactttatgattcaccagagrgggagaggaagaggaataaattaggagtatgaaattaacagatacacactrccataaataaaatcaacaacaaggatttactatagagcacagggaactatatttaatatcttgtaataacctataatgaaaagaatatagatataaacttataaatacatgtaaccaaatcacttttctgtacacctgaaactaacacaatactgtaaataaactayacttcaatctaaaaaaaagtcagctatatgccatcamatgcactctttgaacaaatcatttgcccaagacttttgccctctgtctaaccatactttactcaaagcatattttcccatagataatattcttagatgtgtcttgtgacaaccgcttacactgtctaaagttccaaagcttatctaggttgggcaaatacagcaattgagaacattatttgcaatatgttgaaagattgtcaaagcattaccccaaagacattattattctatcatcaaaatgctcacaattagaggaggttt

SEQ ID NO: 1299 - DNA, 600 bp, Bovine  MMBT16941
tccaaaatataaactaattttatcaaatttgcacaagagaaaaataaaatgatactggtacagccgtatgacacccaaatgtcaaacacagcaaagtatctcactcaaagcaagagatcactgccctgcctgctttatttttctaatatatggtccactcagtacttctaaaaaagtatataaactcttctttccaactgttatttacaaaatatatatatatgtatatacttggagtaagattaataaatccttkaaagtatatatatatwttttcatgatttaaaggaccttaacaaygccctagtcaatgcagttacttgtgctgttgctgaatctcactttatgatcctctcatataaattgttcatgaggggacttcctcttataggctcttgaaacaagaatgtatcttgtacatttatgttacgggtttatgatgatagattgttcttgccacagaactggaaactaccaagccagtttataaaatctgttgataaaaatagtgctcacactaaagcagactcatttaccaagcaacccaagccttctcaacaaatattcaatttcccaaataaaattagaaatgttctgcta

SEQ ID NO: 1300 - DNA, 600 bp, Bovine  MMBT17245
taatgacattggctccaccaatccatccacctaactgtgcaatacctatcattcagcattgctttccaccaggggcaggtaattgcaagcagagatctagggacacaggagcccacaggtatctaccctcaatgggcttgcatctgagtcaagaaccagtactcatcaacacagtgttggcagacgaagagtcaggagtgacaaaactgctcttcatcttaaaataagtgatcacttattttaacactgagaatgagtcagtgatttgaaaaccaaaaagatagtcctaaactgcaatcygtctatgatgtgcaatactcagtgtgcctaaatatttatctacttcacaactggtttgcccaactctttttcagggacaagactccacatgtggtgaaaaccaccagctaagacttgtcaggaaagctgtcagtggaaactcagtgagggcagggccagtgtcttattcgttttggggctctagagattaaggttggtgatcagaacataagagactaataataaatatttgctcaatggccttggatcacaactttcctttgtctacgtctttctacttttatgaaacagttctacata

SEQ ID NO: 1301 - DNA, 600 bp, Bovine  MMBT16169
aaatctccatactttctggattaaagtcaaggtggaatatcatgagattgccaaaaaagcgctgaaaagtctgctttcatttccaacatcctatctttgtgaagcagggttttctgcagcgacagcaatcaaaatgaaattacagagtagactggacatcggcaacacactttgggtatcactttctcccactgcccccggatgggaccaactagctgcagaaaaacaagtttaaggctcaccaatcctgcattgtagtgagttgtataattgtctcattatatatcacaatgcgataayagcagaamtaaagtgcacagtaactgtaccttgygtaaataatccccaaaccatctccaccccagtccaaggaagaattgtcttccttgaaatcagtccctgctcccaaaatggatggggactgctgcgtttgaygatcataaagagaggtcaagatggcagttgaacacgtgtggagggtcaggactgttgacatgactttcatcatcatagacatgtagattccactggaagtcacagtgccagatgaggtcctctgtggagaggatgcagacgaggactgtggagggatgcccactt

SEQ ID NO: 1302 - DNA, 600 bp, Bovine  MMBT17253
gaaataggagaacttctcatgaaggaacctacacaccaatcatatttcattttgacaactggaatcataaaacttcaattttaaataataaatcaaattgttgacattttacctaaatcaataatcttctcatttcaaagaaaaaatagatatgcccttaaatgaaattaaacaatttattgcttaaaaagaagagcaacaataaaaaagaaatgtcgaaatttctatattttataattaccctcatatattatgtctttatatttctgacccaggtttctaatttcattagattctgaytttcaaatttcattgtaggaaatgaattgcttccatgtacttatttttaaaaattcaatacatttgagccactttatgttttctttgccaaacttttagactaattgaaatgcactttagacattcataagttgtatttcatgcaaaatgtgattcggccacacagcatatggcagtcacatttacagtggtaagcatttaaatttttatattttatgtttaaaagagacaagtatcttgaaatatatatttaacaattttttgcccatagtgttgcttctataatcatgcttcttataa

SEQ ID NO: 1303 - DNA, 600 bp, Bovine  MMBT16970
cacttgtttaccaacatagcaattgggatgtttaagaaagcaaaatagaaattccaaatcctctaataagttcacagctaaaaacaaatgagatgttagaatcttcagcatatatttagcacattacactgaacactgtaactcactttgaacagtatttatcctcttaagtaaatttgaatctgctgttgtatctctgcatggaaaaaaaatgaaggcacaagggtttgggtttctatggaaacctgtactttgattactgatggatttcaagtgtataatttttcgtcccactggtayaatgttcgggggaaataaagggaaagaagactgcaaaattatcaggaatatttcctyagatgctaatattttcagaaccatagattgaaagatgctggaagacacttcaaattaatttttaactttaatcaataaatagttattgagttcctattagatgccaagaacwgtcccagtggctattgcagttaataaaasagataaaatttcataaaaaagctttrgatataactttaccaagaaacttgagcaataattaggtgtttgagttttgagttatttgaattttgttattttttc

SEQ ID NO: 1304 - DNA, 600 bp, Bovine  MMBT16321
ctgaaatctctgtgctttcataaaagcctatggtgatcttaaaaatttgctataaggcagcatgaaccccatatttagggattgggggagctgaagtaatattatttgtttctcagataagggaattaagccatgcacaagacaaattataggcaacataaacctatatttgtctcaaatctctacacattttacatgaaaatttttttttttcagcaaaatttgtcagggaaatttycaggtttgccgaattttggaagtcactgcctttggcaacacttgcttcaagtactctttaaytgatatttcataagatgatgtgcatatatcctgttgattaaaatcacttaatttcttctttatgtttctggaccactgccaaaaataataattactaaatttaataagccacatataagacttgcagtaactggtagaacaagttgagatcctatacaacgtgacttggatagaacagattatagtgggttgtaccctcttctccatttaagaaataaaaactataaacagaagataaataggacaatagcatatatagaagtgggagccagtatgaagacttaactcaaggaactaaat

SEQ ID NO: 1305 - DNA, 598 bp, Bovine  MMBT17742
  misc_feature (1)..(174): n is a, c, g, or t
nnnnnnnnnnnnnnnnnnnnnnnnnnnnnnnnnnnnnnnnnnnnnnnnnnnnnnnnnnnnnnnnnnnnnnnnnnnnnnnnnnnnnnnnnnnnnnnnnnnnnnnnnnnnnnnnnnnnnnnnnnnnnnnnnnnnnnnnnnnnnnnnnnnnnnnnnnnnnnnnnnnnnnnnnnnnnnaactgcagcatgtaaggcttccctgacctcaccaactcccagagcttgctcaaattcattccaccaagtcagtgatgtcatccaaccatctcatcctctgctgttcccttctctaagtgtaaagtyatctcatggttcattgccccttatgtcagtattagagaaaaacttgagcttacagtgattcagaaagtatcagatgaccggttttatttattaactgatttttttgtagtaaatgtgttttgtacacaaacaagaagagggaaaaaatcaaatatactccattcttaaaattatgtttttttatgagtgaggactattagtgaatgtaaatagtaagctatgcaaactcaacagtaaatattcattaattgataagtaccaagtgcaatatatcttgtatatatagttgtacgtttca

SEQ ID NO: 1306 - DNA, 600 bp, Bovine  MMBT16868
acctgaacataaaagcactgaaaaaataatgggaattgtttgcaaagtccaartacaaagsaggtaaagcagttttggagaaaagcctgagagttgaaagcgttttcaagttgttgtaactgtcggatatagttctcacaatgactttaaataggactaggctcacaaatgggttgataataatctaaccatttgaaggagagactaatggttttattttttggcaaaactacaattaggttgaaaactgcttgatgaatcagatgccgcaaagcaacaggtaacggggtagtttgttgygatatttaaaatcctgggccctgattgggcttttattcatgcactagtttatatacgagaggcttgtataaactgaaacaaatacaaaaaattaataagcatgttgtttagatggaaagtattactgccttctgtaggtgttgtcagattctattagccatccctgtcttaatgcagaaagcaagtaaatttgaccatcttccactctgaggctcttgtgcaactgtttcccctttggaaaccctcccccttttcccattcatctgctactttatgctgaaaacaacttctttcaaatcc

SEQ ID NO: 1307 - DNA, 600 bp, Bovine  MMBT16900
ctttgacaattttatttaagagtccatttaagtaaatatcagcttctcttttttctatagccagagaaaacctatcctgttaaatttaatggcaacacttcaaattaatgagccatcattcctctgatgtgaactcactgtaatatgccactggaccttcctaggagcttgcactcagaactgcagaaccaatctctcctcrctaaaatatatgcaggttctgcactggggaacgaaggcagtggaatggattaagcggtatctgaaggctgctggagatttagagagcaaacacaacaygtgtcctggtgtcccttttcttcaggtaaagttgcaagcttgtctgaaaaattgraattgcttctgtaggttacataattaaaagtaagctggggataacaaagtttgccttgaaagagctagaaaaacccatagaataaaaggctggtaactgataggaagtatgaaatcaccccgagagtccaactaatgaaaaggaaagaggttttttagattggagccaggttctaaaacttggattcaaagccactattcaactgaaatgtggccatctaactgtggaccaaccatttctccctc

SEQ ID NO: 1308 - DNA, 600 bp, Bovine  MMBT16737
tcatgtatttatattctctgataaaattaagtctgatataccatagatattaattctactattgaagaataaggaaagcttttttcacaaataagaaaagaatttttaagaatatatatgaaagtatagtttttttcagtttttattgggttcctttgsataagtatttctagactataatcctctagtcactagtgaaaggactctagtttgtgctctggtgccatcagtctgcccataattctttactccaaacacacgagcagatttctcccttaattctacaaaactttgcttagyccaagttgtaattctaaaccaaactttagtgaaagcttggagatagcaagaagaaattatagctctgaaaagaaaatgttagcaacagacaggggccataaattctcctggacaccaaaaacgatgggtcttcacacagtgagtatttttggctctttcttgccttattgcccattctcctactgtcagatggcaagggccagtttatttccctcaatggtgatgtttgaacctgaattctaccttcatcttctcagattatggcggtgatggaggaaaatattattttccactcccagg

SEQ ID NO: 1309 - DNA, 600 bp, Bovine  MMBT16079
ttccctgcccagttcaaatgtaattgcttccgtgaagccatcctcaccctgttccccagaaataattaatcaagctctccactgcttcaatagcactctataattcttctgttagagtacccatcccatattacagttgcaacagggatcaactaggagctttctaagggaaagtactatctcttaaatcctcaggggctgagtagcactctgtcaaccaccatcaattcttcataaaacactgggtaagcagacagaaagataaacagaatctgctaagaaaaattctctaaggaataycctggtggtccagtggttaggactgtgcactttcactgtctagagcccagattcaatctccctggtcagggaactaaaatcccgaaagttgcacagtgcggccaaaaggaatatagttcttaaaaagaagaaaagaaaaaatctttcaacaataaaaaggttctttcttattcttgctcattatgaaggaaaaaaaaaaatcagaaaaaaggcaaggtaggacaaaagcactgggaactagtaagaattaactttgacaattcagactccttaatggagctctgtgtcaggtaggccagg

SEQ ID NO: 1310 - DNA, 600 bp, Bovine  MMBT16901
tcagtgctttgtaaaggctcttttttatttgtgtaaaaaaaaagtagcaacatgaagaagactttttataagtgtgaagaacaaaaattgcactccttgtatcaaaattaagttactgaaaaatgtttttgtgactctttctgctcattctcaaccatttcaagaagggacggtcctagtatataagcatcgtattcaaagtattttgtcaccttgcatattatgttactaagagctatgctgttagttaatttatttctgttttagtcacatagcagccagtctcttctgctcatttayscaatgaataaggtttctcttgtactcctctttcattttagaagataaagtaaatgtggcagatttcaaaaaactggagtggcttttcccagaaacaacagccaattttgataaattattgattcagtatcggggattttgtgcttacacttttgctacaacagatggtcttctccttccaggtacgtcattggaaataatactgttctcccttctcgaatttttttttatttaaatgaaatgtgcttattgtcactcattcactttgtaaaactttatggaatctaatgttgaactaag

SEQ ID NO: 1311 - DNA, 600 bp, Bovine  MMBT16410
aactagcaagataatactgctatattttcgtacaaactycccttctcctaactctgtcctgaggagtgggctaccataacttcacctgggagatcacaccaccactttgtattatatgtaaaaccaartcatgcttcataattagaatgatgtgattattaaaatggcaattgtttaaaaatatccttttataacaatgccatggctcaattcttactatatcagaatcccttataaactctgttatatattaaaatgtgttactggtttcaaagatgcttctttgagaagatgtagacyttactctaacagtgctactcatgatcaaagtgtctttggattcttgttgtaactgcctagtttatttattgaagtatagttaatttagtgttgtgttaatttctgctgcacaccaaagtgattcagttatgcatatatatatatgtatatatattgattttttggtaatccttccattatgctttttttgtgggatactgaatacagatctctgtgctctatgctaggaccttgctgtgtatccgctctgcatccagtagctgacacctgctgaccccagcgcccagtccctgacccctc

SEQ ID NO: 1312 - DNA, 600 bp, Bovine  MMBT16206
cttttggactctgtgggagagggagggaggatgatttggggaaatggcattgaaacatgtaattagcctctaattaaaataaataaattttaaaaaagaaatgatagctgtatatagaatagatggaaatgaaaagtagaatttttcccaccttgcaagaaagtgtgatcctgtggtgactgtatcaagggtaagtgtgactctctatcaaaggtaagaggggtcaaagtttttaaatatatttttataatattcagtttttcaaaaacttgaaaatcattgcatttccatttgatcctyatttcttatatccgttataggtagattctgaacagaaatctctagcctctagagtttattgtttatatttattagttattagtttatattctattatatgaacagaagtctctaacctctagttatcaatttataaacagtatatattcaggatcaggtcataaaatattggctctggcctttgcttctaatttcttttccttctgtcatccatcatcttttctagttctcattcttcaaccatttcaccagagacaagttgaaagttaaatctaccttaagatatacctcttttacaat

SEQ ID NO: 1313 - DNA, 600 bp, Bovine  MMBT15087
ctmtgttactgccgctgacctgagtgatcccagtgatgagaattctcctaggccctggccagaccgtggattttgagtcctaattgtatttgggagtgtgtacagggtcttaattggattctaactacatgtgtgatttatacaatgagatatatactgatattactatttcccagatacaccacttatgtggcttaaatatgtgtcctggaccaggtgctatgaggaatttaaaagaaggaacggcctcaggacatttagaatttaaagtgttcctgggacaaatacataaatgaccayttatattagtgtatagttctgaaatgtatcaactttaatttttagtttcatgaagtcagaaatgaatttattttctctaatatctaacccatggttagatagtattacatatttcttttctagaaaatgtagaatatttcaagtcccttgcagataattttttcaagtaagaatattaaatatattaaatatttttcataaaatccaaaaatattaccatacatttttttaattaagaaaaaaacagtattctgactactgtcaaatttggcaatgaaataaaagcaaataatgtatatt

SEQ ID NO: 1314 - DNA, 600 bp, Bovine  MMBT16118
tttttttggcatgaactgtgctcttcaaattcatggaatttactctcatatcactgccaagttggacagattcttgtcagagccagatcaagttttgagtcaagtccaaggccagttatctcttggatggtagcccatctcctccctttttacccatcatgacctccatccatcttcctgagggtctgggggtgatagtgacatgctgcccctcaccaccctctgaatggtgactttgccataattggatttttcttttcttttctttggttattatattccagttcgaagtgaaaatgygatggagtaaacatgttctggatattttctcctttcacttacccccacccctcattttggattaatttcttttcatagctgttcatattagcatgattttcagtaacctaatatttcctaacataaytgaagcagtcagaacaacaaatgccatagtgggtgtgatttgaaagacacttacctgagcatggtgagagtagtcaacatgcctccacaccaaagaaactgtgaagccaggcagaaggattgtccytttttatccccaaagctaggggttcctggaagggaggttctgggtac

SEQ ID NO: 1315 - DNA, 598 bp, Bovine  MMBT16280
  misc_feature (1)..(84): n is a, c, g, or t
nnnnnnnnnnnnnnnnnnnnnnnnnnnnnnnnnnnnnnnnnnnnnnnnnnnnnnnnnnnnnnnnnnnnnnnnnnnnnnnnnnnncaggttcagcgtaaaaacaaataactgctagtatcttgttaaaaccatgctctcaaagtttaaaaatgattatttccccaaatgaactagtcactttgtaaggcattcaagatgctgccttaaatttgtttgtttttaaatttgcagtataatttacactgaataagaatacaagttaccaattttaagagtacaatttgatgaattttgacaaaygtacacacaagcaccactgaaataatgaagcagaaggtttccatcacmccaaaaaggacctgtgtgcccctctctggtcaatgccttcctctgagccccaggccctggcaacaactgatctgcattccgtccttgtagctttgcttcttttctgatgtccttcatttagcatgatgcaattgagattcctccatgttgtggtacatatcagctgtttgttttactgctgagtgtcactgtatgaatgcacttcattttgttgattcattcatcagctgatggactttcggttatttcc

SEQ ID NO: 1316 - DNA, 600 bp, Bovine  MMBT14429
caaatccagacagacatttgtacaaataagttgtgaagttgccagtgaacctgaaaatcatgtctaagaagaaaccaatacccaaaactcataaaacagtgcgagtgtgaataacagcattagccctaactggtcacagcgaggttggtcaatactgatgaaggacacctcaggtcttaagacactcgccaaaggcaaagtsaccataccgccctgtgtgctctggaaagtccctggaatgtgtyttcaacattgtcagccacgctcagacagcctaaactgatgaagagaaaagcagcygaagataagataaattggctagttcctaattttgctgtgggaaaatcttcttccttctctggtttttgatagctgaagaattcaacaaatatcttttgtaagacatcagagggcaaagaagttcatccaaagtgaaatgaatggtttgcttctctttttccagtctgttcttacttcttcagtgaagagactggattattgctgaaaagagttgtgggaggagaaactcttttataaactgaaggatttttgtatgatttcttggtagaaaatatctgatcagttgtcttcagcctccgt

SEQ ID NO: 1317 - DNA, 600 bp, Bovine  MMBT16905
tgtaattataataccagtttacttgaattctgaaaatatccttcttctaaacccacgctgcactgaaaatgacgtgcctttctcatccctcctcccgaccccagcagaccagatgagcagaagtgcacttccacagtgttcctctgcggtggtaatgtggacaaacatatgcagcaaggttcttttcaagaagattaagtgaagggggaagtttaacacagaagctcagcagttctgccaggatctcacttgcaaacagtcattaaaaaaaaaaaaaaaaaaaactaygtaggagggaaygggttgatgcttgctgtttgctacagggcatctcagaaatagcaaaggaaaccacagaccaggccaaggattgctgtgtcttaactagcttccctggggaaagcagcccccgatattatctgggaactggatggaaaatggcaagcacatgacactcctttctaggtatagagtgtttttcatattcaaagctctttaatgcttccctcaggagccttgtgagataagaggggaagtgattatatcctcagtttgtgaaagggagaatcaaagctgaagggtcaagcaatttgcacagaa

SEQ ID NO: 1318 - DNA, 600 bp, Bovine  MMBT17135
gtcttcactttcacttttcactttcatgctttggagaaggaaatggcaacctactccagtgtccttgcctggagaatcccagggacggtggagcctggtgggctgccatctctggggtcacacagagtctgacatgactgaagcgacttagcagcagcagcagcaggctgataggaaaataattttaattagtatgaggcatcaagaggcaacttgatgcatcgaaaagttgaattgactttttagccaggtttttatacagtagaaaaggacttcaccccaggtggagaatgagtgagygagactattccagtggaaggtgtaacaggtagaaaaacataaaatgaaagagtattcacagactgtgcagggcagactgatgaaaggttagttggctggataataaatatctttccatacgttgctaagaaatttgaatctgatctaaattcaccaagacatgttctacatgctagtggaaaccagacacatgagttctcggattggctttactgtcaagtatacaaattctgacctatcctttaattctgcacatcctctaaattctgggatgtcaagatgacatgaggataaatatca

SEQ ID NO: 1319 - DNA, 600 bp, Bovine  MMBT17817
aatagcccagggctctagtctttctcctagaatgttcctctcccagatatccatgtaacttgctccctcatttccttcggggctctgctcaaaatgccattttatcagagaggccttctgtgaccaccctacataaagtggaactaaccacccccagcactccctatatgctctaagctgctgtttaagttttctctgtaacactgttactggacatattacatatatatatatatttaaactttttttcccctattcactctccagtatatatgcataaaattcttttcctcttcccayccaataaaatgtaactcacatgaaggtagggacagggtcttttttgatcagtgctgtgctcctttccctgggacagtgcccaacacatagtagacattcaataaatatttgtttaatgaatacatggatgaaatcatttttattttactctcccacagtcagcaggatcccaggcagccaacttttaatgttggaaggggcccagcagacaagcaagaaatgccataaatgaattcctcagggcagttatgtgattctagtgtgtgtgaacacttaaacggtctgactagacggcagtgg

SEQ ID NO: 1320 - DNA, 600 bp, Bovine  MMBT14647
gaaagtgcttttgttttttaacaatctgatttttggttttccttggtggctcagacgattaagaatctgcctgcaatgcaggatgggttcaatctctgggtcaggaagatcccctggagaaggaaattgcaaaccactcccagtattcttacctggagaattttaaagaagcctggtgggctacagtccatggggttacaaagagtcggacgcaactgagcaactaacactttcactttcatctatattttgttatcatcttcaaccattttttcctcctacgtgactgagatacctacytaaatggtggaagaaatggtctcacactttttatgcagagaaaaatgcaatgttaggggcatgactcagaaatcagtgaccctagtgtaaatcctggctttgtccctcctggctgtgaaactctgggcaagtcagttagcctaagactcagtttctacttccataccatggaactaggaatataatttttcagttttgtrcatcagtatagcacctaactcatgggaagctctcaataaatgtgagttctaataattattataattgtgaattttkcaaggagacattaaagaaatgtat

SEQ ID NO: 1321 - DNA, 600 bp, Bovine  MMBT16065
atcagtgggccagtggggtcctaagagagctccctgaggtgtgttgaagtaaaggggtgcatgacagcagtcctgggggccatgaggacatgacctggtcagggagggcttccctgcagaggagacatttaggctgagactagaatgctgagagggaccaaccaggtgcagggacaggtagaaagggcagcaatggtggctcaggctgcaggatggcttgtgtgaggctccaagttgggaaggagccttgcaggttaggtaaaggcccagaaagttcttattgctgctgaaacaaatacygtkaactcagtgtcttagagcaacacagatttagtcccttcagtttagttcagttcaggtgctcagtcatgtccarctctttgcaaccgcatggactgcagcataccaggcttccctgtccatcaccaactcccagagctttctcaaactcatgtccattgagttggtgatgtcatccaaccatctcatcctctattgtccccttctcctcctgccttcaatctttcccagcatcaaagagtcagttctttgcatcaggtggccaaagtaatggagtttcagcttcagcatcagtccttc

SEQ ID NO: 1322 - DNA, 598 bp, Bovine  MMBT17227
  misc_feature (1)..(92): n is a, c, g, or t
nnnnnnnnnnnnnnnnnnnnnnnnnnnnnnnnnnnnnnnnnnnnnnnnnnnnnnnnnnnnnnnnnnnnnnnnnnnnnnnnnnnnnnnnnnnnctatcaactgatgggcttataaagtagataaagttgctaacagttggaacattgatacagaaaattagaatccctttccctgtgatggaatctattttttgtcaattatcttttattgtttaaggaatacatattcggtgtctttaaatggtctaagtgccttaacagtagtttctaaatcttccactttaaaattgtgttgagcacygaataagatccaagtaaattctcatccataaatgattccttatcctcttttattttctcactttacctcttattcctgaaatgtgattttgatgtgggacaggcatgctgattttgaaatagttgcaaccctgaacatagcagtttacacagaatccatagaaaatatctctttaaatagagatacacaaatgtgataaatttgtgtattcatacttaaaaccracaaattactcttcttaacataatcctaagggggttaatactagcgaatattatggcaatctcaatgcctgtaa

SEQ ID NO: 1323 - DNA, 418 bp, Bovine  MMBT17680
ttccaggcaagaatattggaacgggttgccacttcctactccaggagatcttctggatccagagatcgaatcctcatcttctgcgtctctgcattggcaggtggattctttaccactgcgccacyaagaagacccagggaggtactaggacatgcttaaattagggacttgctgagtacatcagccctgactcgggcattcaactttgctgccagcctaaggaaggcaaacagacatgaggacaggcgacctcaagaccactgacttaaacaaccaaaaaaaaaccatccccaagaggcygagactttgcaccattttgctgtttatttcaagtttacagagaagcttaaacatttgtggaaaaacactgaaggcttattttttaaattcatgtacttttcaggataaatacacagta

SEQ ID NO: 1324 - DNA, 600 bp, Bovine  MMBT17203
gtgggattaaaaattcctgctttacatgaaaacaaaaagatgtgagaatgaagttatttgggataatgtgagagaacagagagcctgtgaacttttgagcaatgtctgtaacagcataagtgataattatgaattgcaatgaatatctgattacaagtaaaatgtatgccatcagaagaatttttaatcccagagacatgggacttagataacatacgtaactgagtgtttaaagtgaaaaggcacagatatgactcaaagaaaatgctacctattttctrcatataagaccaagcttayatgatcaatttagaaagcatctcttaaatttaaaatatagttacatttccatgattttttwaaaaaggacgtcaaagtaagaacctgtaaaatatagtaaaaaataagaaatatatcagatcattaaagcaaatcagacaaaataccaaaattcaaggcatagaagatcccaaaaatattatattaagacactgaaatagaccttatgaaggagttgtgtaactactattttctttcccagmtccwtatttcttatgttggataatagcaaaaccctcttcccttctaccagggctccaa

SEQ ID NO: 1325 - DNA, 600 bp, Bovine  MMBT15054
caggctgaggcagtggctcccttccagtgggatataggtgtgcaggggctcctctggccaggacttggagagcgggttaagaaatctctgaggccacatgcccatgggtaccagcctgcgtggtggtgtggcactgcaggaagctcttgacctgtccccagaggccarctgggacttggcgttcacctggggcttcagagaattctgggaggactgagacttgaatgcagtccccagaaaagacagcggcttccttccrgatgacaagttggggagcgcctgagaggctgggcgggagaygggagagggccgagggtgcagcatggccttggtcctcaggctgcacccgcagaggcagggctcagagacgtgggccgcagaggggcagggccgaccccccaggctgcgctctgcctcccatccgaactccctggggtgctggcctttcctaaaagggggaaatgtcagatcagttgagaagagactcagagaaagatttttttttttttaatgcaaggacagtgcttccctgcctcagtacaatacttactcagcctctttctggggcaagttctcttcctgcaggatcgaggacttaga

SEQ ID NO: 1326 - DNA, 598 bp, Bovine  MMBT15806
  misc_feature (1)..(57): n is a, c, g, or t
nnnnnnnnnnnnnnnnnnnnnnnnnnnnnnnnnnnnnnnnnnnnnnnnnnnnnnnnnaaaccgcttacagggtctttctgaatctcccttagtttggctttcaggcatatcacattaaaatacattagacagaagtaaccgaggggataagaaaatatggttccttttttacgaccttggcctccctgagtcagtcttcataatgaccttcctaacagcagacgagacggttgcaccactctcgttcaattcacagaggagagacgtggctgactggggggcccgtcgggtcccatctgyrgaacctgggccagaaggcagctcccgctcctccacatctctgtccaccagaccagccaagccccttccgtggccggcacgtccagagtcacatcagtaggtgctgaaataccagacctgaggaggcttcctttcatctctctctytaatcatgctgtcattcaacttataaagcaaagggctacaaaggacatgaacgggtgaactgacaacactggagtatgaacgcaggttggacagatttcagtgtcaatatgaagtttrctgaagttgaatactgtatcattgcaatggaaaa

SEQ ID NO: 1327 - DNA, 598 bp, Bovine  MMBT14550
  misc_feature (1)..(120): n is a, c, g, or t
nnnnnnnnnnnnnnnnnnnnnnnnnnnnnnnnnnnnnnnnnnnnnnnnnnnnnnnnnnnnnnnnnnnnnnnnnnnnnnnnnnnnnnnnnnnnnnnnnnnnnnnnnnnnnnnnnnnnnnnnccctgacctatactctggggtttcagatccatcaactatgacgaaaaggacccctttcctgtgcaacgcctgtggcttctgtaaatacgctcgcttcgacttcatgctctacgccaagccctgctgcgcagtggaccccattgagaatgaggaggacaggaagaaggtgaggccgagtcygtgcgaggcccacgccgagctctgttyggagcttgggggccgagctggtgtgggcagcgtgcttttccttctcacccaagtcttcttggctcagcgtgttttcagggctaagcttttgagtggcaacaaataagatggattggaacacgtgttttgggtagaattttggagacgtgttggtaatggaagtagagtatctcaaggggcaagtgacgtggtggggctggagatgggaggacagggcagaggggtctgtcagaacagtcaccagcagcagcagcccagcaaagcggagtgg

SEQ ID NO: 1328 - DNA, 534 bp, Bovine  MMBT18341
tttccttagcctctcatatgagaagctcttctgtgggtaagatgggaaagtggcaagagagagggggaagtgctaaaatggatcaaacattgttcagaggatgatgttttgtcaccttccatgtaatttcatcagatggcatctcaaaccagagctaacatgctcttttctacctcgcagcaaacaaatcttgggagaaattcttctggctragcgcttctccaaggcatccttctttaaggggagaatgtgtaaacaatttgatgttgattttcagtctggctgccatttggtaactgyctgggtcaccaagcgaagaaacataatgtgtcacctgttccgaatataaatatcacctgattgtaactgctcagtgagctccgaggtcaaaggagaggttagcaccagtggaaaagtatcactttcaacacaggatgtgctgtgcatattagcaacatgtaccgcattaagcaatttgtgcaggtttccatgaacttgccagcctggtctatgtaaacttcacaatgatatcca

SEQ ID NO: 1329 - DNA, 600 bp, Bovine  MMBT16837
agcaaattccagggtgagatccagacccctgatctggtgggggcgcctgttcctgcccttggacaagatttctcaggacctgggagggagacagtaagggtgagaggggcctggaggcacggcgagacgggcgcctggatccagtgacagctcgttagcccctctgctgctgtagccaccgcacctgcaagtcggtgagctctcctcaccaggaacatgtcacatacagttatggctgcccttggtggcacgggtgattccctggcaggcagtgttagtgactaaaagatgctccttgtygtgtgagggttggaattcctccttctgctgacttgttctttccctgtggtctttctcattcttgacaatgtcaggaaccgttgtctccaaaygtggggctgttcacatgtggcgcgtacagaggactgtgtgtgtacgcgagtattaccagtcttaaccacgcaccagcaagcatcactcagttgtcagttggggacgaggcgagcatcctcgtttagtttccacggtcctgagatcgccacctcacgctttgacatgttgccttgagattaagcaggtgggctttgcatattgcccacg

SEQ ID NO: 1330 - DNA, 601 bp, Bovine  MMBT18343
  misc_feature (1)..(1): n is a, c, g, or t
nctggctgatgacagtgttcagaaataacagggttaaccctccagtcatatcccagaataaaggtgagggttggtgtatcccygccctgtcgcttctccatggcrtctttgtctagtatttatgtggaccaccacctcagaacaatgtactcctccagcgagcaaagcctgycctctttctctcagcatctaggcccccttggcctgatgggcccttcttcctctggttamgtgtggggaagagttacaccaaaggctccmtggtccccaaaggttctcatccctcagaactcttgatgtyatctccacaagaggctacacgttggggttgaaatcacgccagtatggtgaaagcatctgtcaaatgcatacatttaaaatccatgacagtttttaaaaacagctgtgttggaatataatctgtatatcttaaaggtcaccttttccaagtgaaggtggttcagtgggttcttgcatttgtggagttgtgcagtcatcaccacaatctaattttaaaacattttcattacttcaaatagaaaccttgaactcattgagagtcactcttcattcctccaaaggcaactaataatctaccttc

SEQ ID NO: 1331 - DNA, 600 bp, Bovine  MMBT18317
tttgtcctgcatgcatgtcagatgatgggaggtaaccgcacccaggcagagggctccgaccgttctcttccaaaagaccaatgtttgtcatgcagtgccccctgccatggatgtgggcatgactggcagcgccagctggctgctcatggtctccttccttcttccttcctccccctctcctcccttccctcccccatccccctccagattcgggtggtgaaagcgttccgtagctccctctacgaaggcctggagaaaccagaatccaagacctccatccataacttcatggcgacrccygagtttctgatcaatgactacacccacaacatcccgctgattgacgacacggacgtggatgagaacgaggaacgcctgcgagccccaccgccgccctcccccaaccagaataacaatgccatagacagcggcgtctacctgaccacgcacggcaccaagtcagctacctcttcactgttttcttccagacccgggagcccgctccacagcgtggagacgtccctctaagcaggactgctctgggcacacgcaccatgcacacacgcacacttggacgggcggggtcacgggcagtgagga

SEQ ID NO: 1332 - DNA, 600 bp, Bovine  MMBT16829
cctatacactggtagaagtccagcgtgagtcacggcccccggtacagggtgccctccagaaaaagtcccagcctcacatccctccagcgacggaggcggggtctgtttctccacctcgtcctcaaggctgaagactcggagttaaatgatgctgtcgggtgggggcattgatactttttctctctttttttccttttctccgcgtgcctctcttcctgtgggtacctgagaaaattctcagcctgtttgactgtggcctgagccaagaaggagcgctagctctgggaagaaaaggtttaytttcagtctcacgtgactgtccgtccatccatctatccgtccgtccatccatccatccccccatttcacagtgtttgcccctcattccttccagccaggcactgtgtgctgggtgccagctctttctgagagagcccagcacgacccagcaggggcagagccggcccaagtccaggctcggtcccgtcccagggattcagagagtaggtagagccgtggagggacccgtggccttctgtctgcacgtggggcgtgcaggggacccacaggggtgtctgggccattcgtcacccgcctcct

SEQ ID NO: 1333 - DNA, 600 bp, Bovine  MMBT15714
tgagtgttttggaaaaattaactgtattgttttttcgaccctggattaaacttttctctgtgcttccactggtcccataggtcacagtgccagatttccacatggatgtttacaggggtcacttacttttmcctttgcttctcttacatgtgcttgaagatgcacagagagctgtcttctttaatcttttaaaaagtctcccaggaatttcaatcttgcctcaaaccaaygggcagagagattgagtggaaagagccagagcgtggccaccaaggaacctggacttgagtttctgtgttycccccaaaactgactatgacctcagatatggccccttaccctctctgagccgcagtctgtgaaatgagagaatgggactgaggcagctgtcaccagccaactggcctgctgctgactggtttggcccacgtgttgttttttttttaattaagtgtgtatttctttgggctgtgcagggtcttcgttgctgtgccggctttctctgcttgtggtgagcgggggctactcttcgctgcagtgctcgggcttttctttgtggtggctcctcttgctgtggcttgagggctctagagggcgcag

SEQ ID NO: 1334 - DNA, 598 bp, Bovine  MMBT16434
  misc_feature (1)..(3): n is a, c, g, or t
nnnttggaaacattggaccaaatgtgactttttttgtttccagtgaggataggtttgtatgtctggagaccagtcttagctcttgctgtataaggtcttagaatgctttgtaattaaaaaaaaaaaaaacaaaacgctagaccttagatagcttttaaagaaaaggttctaggttgtcgtcctttgctccacttgcttttggtgtcctgaggttgatgctgtccatttacagcaacatctttatccataggtagcaaagggggccatacagggaaaaacgccagctgatgcacttggagyattgattgtaatctcgtcggctgttgtggcgcctgcacagatktcctgkgacatagaagtttctccctgtttagatgcagtgtgctcagtttcattctaaaaggttatatacgtggggtcaggtagtagattagcaaggaggcaaatagagaagaatagcccttttcatgtcttaaggtgcatttgaaagtaaatggatctcagagacagtctaattccaggagaataagttggttggatttctcgttttatggtccttatgtgtctgcacaaaagttgggcttaatcttcattgtac

SEQ ID NO: 1335 - DNA, 598 bp, Bovine  MMBT17533
  misc_feature (1)..(34): n is a, c, g, or t
nnnnnnnnnnnnnnnnnnnnnnnnnnnnnnnnnngaaccctgtcagaatcatggctcttgtactcacacccaaccaataagaaacggagggtcgacctaggcatctacctcaaccagagccccttggaggctgcctgctggtcccgcccctggatcttgcactgcgggccctgtgggtactctgatttggctgctctggagaatgagggcttgtttgggtgtttgtttgaatgtgggaccaagcaggagtgtgagcagattgccttccgcctgtttacagaccgagagatcctgagccaygtgcaaggggactgctccacccctggtatgaactctgagccaagtaaaaagtaattcgcttaggacccaactttgcatagaaggctaccgtagaaggcagtcacagccaggacagtggaggccaggataacagaggttactgaagtctgcagagaaacaaaacacctaatattctgctccctacctgttttcacttctcattctccagagaacaaaatgaacatcttgccatagctactgcattcaaaagagcactgaacggtgagctgagagactatgatgtcatcttggctcttcc

SEQ ID NO: 1336 - DNA, 600 bp, Bovine  MMBT18281
atttgccctcatgtgatactaatatagccactccagctttcttttggttagtgtgaacatggtatccttttccatcttcttacttttaacttattcatgtctttatacttaaaagtgtttcttgtgggcagtatagagttgcattctttaatcctcaaactctgctcagatccctgggaccttcaagaactctcttaattctccaggctacccatctccttataggaggctgtgataattagagcatcattcctcataatgagagccccrcctgccttctatcacttccctgccctgcgycccccaggaatagcagtgaattgtttccacttccccaggacagtttttcagaaaacatggacatccaaacctatggcaaatccttaggcagtgccagatccagccacactggatcaagcaggcccatggaagattacccaaggctacttaagaagtaccaaaggctaccttggaaaaagtaagtgtgggggagaaggaaatagaaaactaatttctaagaggaaggattttattgactgaaaaaaaaaaaaaaactcacatgtattttttacatttccagaaagtgtttcaactaagatg

SEQ ID NO: 1337 - DNA, 600 bp, Bovine  MMBT14691
aaagtagaaactgtacatgtgctattgcccttcatattttcaaagagaaaactctttacagtcccctttatagctccgtggaaactacctttttccccctgggcacagatgtaacctatttgtagagtgtgttccatcctgcttatttcatcagcatattcctccgtttctgggtgcctttttctacagcctgatttctgaataatkctttaatttcagatttctctgcattttctaacctagcagcctggttgacggaagagttttgtcatatctgtccttttcatcctaacactattyttagtccttcacacttatcaaccagcttaaaaawttttttwaaattattttgtactggagtatagctgagtaggcctcctctggtggctcagacagtaaagaatgcacctgcagtgcaagagaccctggttcaatccctgggtcagaaagattccctggagaagggaatggctacacactccagtactcttgcctggagaaagaagtccatggacagaggagcttggcaagctatagtccatgcggtcacaaagagtcagatatgactgagcaacactttcactttttttcatagttgat

SEQ ID NO: 1338 - DNA, 600 bp, Bovine  MMBT17363
agtccagattttgaaccatccctgtgagtgaagacaggaaaggcaccctccacccccagaggaggaaagtggttaatatatatactgagctcctaaagtttgaattcaggtactgtgtgtacaattttatcaacatctcgacccatgaaacttacatgttgtgccaagaagctgttggttctcataaggtacccatgtccagcatttgcagattcaggtatcaagaagcagagctgtctcgtaagtagcactttactaccaactcagcatctgtacacagtgtctacatcaaatgacatyggtccactaacagagtatcacatattaccctcacaaccgtctgatgtaaactcgtgcaattttccatcaagtatattttgcttaacattttaaagtacctgatgagggtgttaattttttttccctaacctgcttagacaamaattgcaaaaaaaaaaaattgacaagcaaggtgattgaaggrtgtgatgactgctatagctctctgcrttcagttgatatgaaataaaccaatttatttcttgtggagtaggtttggtcagttagcaattaccaaatgacttgccaatataactggtg

SEQ ID NO: 1339 - DNA, 600 bp, Bovine  MMBT17751
aatagtgttatcttagagatactagagaggaggccaaaatcggacctagtcatcaaaaaagactgctattttaacagttttaaaagaataaaattatttctgatgtaactgaaattttctaagttcaagaaacattcagatcatgagtcagacgatctttattactaaagttttatagaagcccctcactttacaagtaaaacacatagaaaaattttcaacatctagttatagatgataattcagtatcagggcatgttatatgcttataggattttttccaattaatttctcttttaygtgaccttacttttgtatccattcactggttctagtttcatggggtatggatggatgtctatccatggatgtctgtgagtgcacgtggaatacaaggaatccatacaaatagattttaagtctgtactttgaaactctctaatatgcaaatcaatcagcaatgcacaaatatgattatacaagttaaaatgtgggcaagtgataaaaatgtacgaactgcagagtataaattatttgtacaatgtgcacgttatagtatgtaatatatttacaaatgttaggctagatagaatatgattt

SEQ ID NO: 1340 - DNA, 600 bp, Bovine  MMBT18292
atttggaagatctgcataactcagtaaaccagtattttccaaatgaccaatataagatatttcagaatcatgtgaaggtaaaaaagatccatcctaaataccaatatacaccaatggatttttacagagtaccaaaatttcattgatatggtttcagattccacattgtgccttatcttttaagaaacctccacctgctgagttctgatgtaatatcaaagaataccatggttatttgaaaaggccattaaagtacctcccttttccaactgcctgtttatgagaggtcagattttcttyagatatktacttcagacagcatatctaaacagactgaatggagaagcaagtgagaatccaattaaattctgttaagctagacattcaacttgcaaaatatgtgtgtgtgtatatatatatatatatatatgaaatgatacttgcaacttttattttggaaaattgtttttttcattaaaatgctattcatgttcatgtgtaataagtttattatacttttagtggttttaacttcagatatagtaatactgataaatatagcctatataaacaaaagttctttggagtccttaatcattt

SEQ ID NO: 1341 - DNA, 600 bp, Bovine  MMBT18336
caagaaaatcaataaaatgatgccatttatattatctttatttactagcgatgtctattccaaatgaagccttggctcctatgaataaaagtaaatcattttggcagaatgtacctttctcctaaagtaagagagaggaaggagcagggagagagggaaggtgggaaggaggcagggaagagcataacttctagaagatggttgcaactgcagattgtgaataactataaacttttcattaagaagttccttaaatcaattaaaacaatttaactcaatcccatacttggaaaccacatytgactcaatccaacaagattaaagaaagaacattcagctttttgtcatttatagtacattcacaaattaatatgcatccctaacttgtaaaggagatcagacctgggatttctttggaaggaatgatgctaragctgaaactccagtattttggccgcctcatgcaaagagttgactcattggaaaaggctctgatgctgggagggattgggggcaggaggagaaggggacgacagaggatgagatggctggatggcatcactgactcgatggacgtgagtctcagtgaactccaggagt

SEQ ID NO: 1342 - DNA, 600 bp, Bovine  MMBT17185
ctcttcttggagctcccttatacttagaagtaaagtttgaagggaaactaaaccaagatggcctccatctgtagccacttcagttgtaagaatcagcaatgccctgacrtttaaaatccactcaggatgacaaaagtagggatgtggcagtcaggcttctggttctgttatcaccaacaaaggatgacccctctactgcctaattttctcattattcatgctgaaggaaagggggctttaaaaaatagactaatttgggatcagcttcccttgtggcttagtggtaaagaatctgcttayaatgcaagaagacttgggttcgattcctgggtcaagaagactccccgggagaagaaaatggcaacccactccaatattcttatctgggaaattccatggacagaagagtctggtgggctacagtccatggggtgcaaaggatcagacacgacttaatgagtaaaccaccaccaccratttgggatcactgggaagctttctttctttttttttaacctaggtagttttgtgactcactcaagataactttgtgtttcatcagacccttgaaactaaagactgaaaggattaaagaaaacc

SEQ ID NO: 1343 - DNA, 601 bp, Bovine  MMBT17564
  misc_feature (1)..(1): n is a, c, g, or t
ntgcaattcttctgtgaatgcagtctgacctatgttcacagtgaattttctaactacaggtctctatatatagagataatgagtgaagcatataccagggagctatatatagatttatctagctccagagagcaagggatattagaacagagctcttacacaactaaaaaaagattacaccactttctacatttttaattgctctaataaaatcatttttttaagaagaaacattttacaagattgtctcaactttaagtaccactcttccatctgaagatatgttagttttcatttttgyttaatatcttaacctcaagggcaaaatctgccagactctaacgactgctgcttcctcctaagcttctgccaaatggaagataactgactataaatcaaacttcgggacaactttagtagaaacctaacagtttccccaactgtcattatttcaagctactataaagaacaagcaaaaacacccagatgtgttagtgacatttttctgttatgaaagattaaaattgagttctttctatgtttggttcccactgtaattagtctttcctttataaaacatcattgctctattactcctctg

SEQ ID NO: 1344 - DNA, 600 bp, Bovine  MMBT17385
aggagggtagcattgccttcttgcaaagctgtgtaacttttaaagctaaaccatagcagtagtccccactccaggtcaatgaggtatgtcaggtactcatgatttgagaacaaagacaagaaagaataagaaatcacaggcatttttctaaatgcttagctcagattttaaagctgaaatttctacattcaaaacaaagtagagattgtgtgtgtcatactcatcaaactgcatgcattgtagtgtgcaccatttttgtatataaattatacctcagcaaagctgtcgaaacaaagtgaygatcctaatagtatgtttcactttgagtgttactgagaagaaaagggagaaacaaaaacgacagcaacagttttcattagaatcagaaactgttttaaagtctaattggctccagaggaaatacttggggtgagatagcaggagtaggtttcttaggagcaggtggtcacctttaagaaattcttcagcctggaaattctccaagtgccagaaggcccacatgcgctgcccaactcttttaaggtccacacayctaaagttttggtgtcgttgcaagatttacagtctgaacatggtaca

SEQ ID NO: 1345 - DNA, 470 bp, Bovine  MMBT15235
gtaagatttacatgctgcctttgaagaagagagttgatttatatatttaacgtgatgtcatttaaaatattaggtgactagacaygaaacacaaagacattaaattaacatacttcactggattatgcaaaacattgaacagtgacaaaagcgtttcagagcaggatttgattattgtggccaaatccagtaatgtatcctggaaaatttgattccaaagatatgcaaaacatgataaactttgcactctgttttatctccagaacaagatatagcagtaayagttgattgtaccttgaygatattggcaagtcacattctggaatgcagacagcagtgctgtccaaatagaaggaattaccaaaaggcaayggaaaaaaatctgaamatataatcttcctcttacataatcttttggataatatatgcaattctaaggtcatgaggaggacacaaggagctgcagaagt

SEQ ID NO: 1346 - DNA, 600 bp, Bovine  MMBT15486
agatactattatctgaaactgagatcagaatcatttctatgcataattttgggccacataattattttgaaaaggttaggtacatttcaaatacaatttttgcaaacaaagtgacactgtcattgtgtgtagaaattttatctttctaggcttgttttaattcatattttacttgggtgattaagtaaaaagattttgtgtttcaaagaacattgtcttgtggttttattttacaaactacatttttaaattaaagcacaacagatggaagcttcgttgcttaaayaagcatctatactytaatgcaaaaactcagaattaaagttttgacaaataacttaggaatcttccaaaaaatcttgattttcttcttagccacaatgtactcacattgacagatttttctttctacaataaaatgaagcaagagattcctaatatctgcatccaacctatctttacttccttctaatgtaagggcaaaaccatatgtctcttcagcttcaaatgattattcaacctatcagctatgtcacagattttaacagatgctggtggtagaatttttgttccagtttctcaatcarttttactataatc

SEQ ID NO: 1347 - DNA, 600 bp, Bovine  MMBT15961
ggtctccagcctttcacctgcggcagaatctgtgatatttaccaattttcctttgaataacaagtttagtgtagattgtcaagtttctgggggggatcaacgcaaaattatacccccctcaagtctatcagttatgttttgtggaacttccttttcccactgggtagctggctccatyagctatgtgtattatcagtctgattctaaaacatttcatcatttgagttatcaaaacagattctcttcagttattaagattaagctctgctcaatttaaaatttcaatcttatatttgatcygaagctttcctcgttgcctctaatgcaaacaaggccctaagctttagacgatctggggggaggggaggggagggtagacttggtcttctctttctctctcctctccctccctatgcttatgcttctggttgtggaggaagaagaagaaaagccaaaggtgaatatgcctctttgtgattgctggtggcaggtccgttgctccctgtggctgaccaagtgctcctgagtctgctctgggacagtgccaggcagcttcaggtggtccaagaaggaccgtgtggcttccttttccagtcaagc

SEQ ID NO: 1348 - DNA, 600 bp, Bovine  MMBT14755
tgacagatggaagtgcttcaggcagcaattgccttacacgttcctccatccgcacctccatctgtcagcagaagtatgttactattttgggactcaatttatccctttggtgaatcattttcaggcttgtttctaaggttaaaatgaagtctgtaactcattaggcctttcccttttcccttctcgttttcattagaagtaagaactattggggtgaggagataaatatacatggggaaagggtgtgcttaragaggatggtaggatattaaaatttgacaccaatgcagaataagtcaytgaaaagaggattgactatatcatgccttcttcagggaacatattatactaatttgaaaatgtaatttaagaataatccatgagtaggagagtccagattcaaaactaaaggatccattttcaccatatttataaagtcattgtgaacctaattcctgaacttaaaaggaatatttaatgagtgaatttttaaccaaatgacccctttttcctcttaaacctgaagagcctagaagttagaccagccattgtctaatttcagtagaaagagatgaacaaaataatgttttgtctgcaccc

SEQ ID NO: 1349 - DNA, 600 bp, Bovine  MMBT18272
cacagtgttcactttgtaacaagtttcattttgacctcactgaaggcttcgagattttagctccagttactgtactttcctcacttctttagctcctctcatttctgttcacaaatcggaatgcactgtaattcaagggagaatttaatccacaagaggatagttgcaaatatgctctctctggactttgctaccaacattattacttatgtaaattgaaaggtgagcttggactacatcagctgacaggtggatatatgaaaatttgaacacaccatgtgatttgaataaactgtctgyatagaatacacagaattttgtattgggctgtactgtatgttcacctacttggtaagaagagcaacrttatttttagagtctaaataagtcaataaataagttgggtggaataaatctaggaaatgcatgaaaacaacactagagtcctctctcccatcctcttccctataaaacattaaaataacaaaatcaaagactgtgataatgattattttgtatcccttagattgagataatgagcacacccaccacctgcaaaacatcctcctgcccatttatagtctttctcaccaaactttc

SEQ ID NO: 1350 - DNA, 600 bp, Bovine  MMBT18342
gactttagtatcaagccatcttacgtgcttttgcttttgattttcagtacttgcactcttcttctgccatttgcccttagcctacttttttcatgaaatttgattatagtcactttgaatagctaccacctctaaattattttaactataacttattagatacccattaacgttatatttgtgggtaattttttggtttcatcttttgctgtcattctgtcttcatcaggaatgtaacttctgttttgtaatttcctggaagacctctaatacagtatctttactatgatgtctatgtaytaagtcactgtctgatgggatattatcttacctaattatccttccagtttcttgaaggtgttgtttttctttgaagctgtactttatggtcgtctttgggttggtgcattggtaaatttccctgtgattcttggaagttttattttcagagttgagctgttaagtcatgaggatttgtttaatttccattttatctagrtaggtcacctgtgcattaagatgttctttattatcagattctgaataaaggtcagcaaaggctttatgatcccagggtgttggctccctcattcaatcctg

SEQ ID NO: 1351 - DNA, 600 bp, Bovine  MMBT18340
agaacattatatataatgaatctgagatagcaaatgaaatcactcaaaataaccactttgcatactacagtgattttcttgttcttttctgtataatttttataaagttaaagttgtatggtaggtatgcatctgtgtacaaagacacaatatttgttttttaaaatctaacatgaatacaacagttttcccatgctttcaaataatcaccaccaatattaactataagcagttaataatagttctttccctactaatagacattttagtgatttccaatttgtcacaaatacaagtgcyttgaagtgcttcatgaytgtttgaacctatattttttaaccacttatgtatattgtcagaaaataagaataatgtggcctggtataaaaaaaaaatccataggtaaatgatccttttggcctcactgtagcatgtagggtcttagttccctgaccacaaatttaacctgcaccctctgcagtggaactgcagagtttttaatcacttcagggaagtcccacaggtaaatgattcttaatggagcacttttaaagagttatatctgagctttccatatattggttatattggtttgtactc

SEQ ID NO: 1352 - DNA, 598 bp, Bovine  MMBT16828
  misc_feature (1)..(17): n is a, c, g, or t
nnnnnnnnnnnnnnnnnctgctcaatttgccttgctttatcttagagaacatgttatatttttattttattttttaacacccaaaacatgagaacacattatatgtttaatgtctctttctgggaattattatttgatttatagggaaattaattttatccctggataaagacacttatgaagaaactggacttcagggccgtccctctcagtattctggcaggaaaaccatgagattcagtaagtatggtgctctctccatcaatttctaacaaaaggtagtggtcttctgtagcagtycgaatttacatgtttgaactgcttctgttctccttgtgtagaagcagtgtggcttagtctcgtctttaaaattcctcatcagagaggatgagatcctgctgtgcagccaggtgactttcgcgactgcrtctcataaaggtcgtagatgtggacctggtctgttagaaacctatgtttcgggtcacgggttcgaagtaatgaacccaacttggtcttcgttttttaagttttgcgttgaagcgtggtggatgcgcggtgtgtgtagttgctgctgtgcggcagagtgactcggttatgc

SEQ ID NO: 1353 - DNA, 600 bp, Bovine  MMBT17097
agtgtggaacccctagtccttcactttgggaaaactatttttggaggagggcagggcttatttttttttaagattttattattttggccactccatgcagcatgtgggatcttagttccccaacctgggatcaaacctgagccccctgcactggtgtagcacagaatctacagggattctggaccagggaaatccctgggaaacatttttggcctgcaaaacttttaccggtctgatgggtcagtaacaataagcattaaaagatagtgttcaagttgtgggtcttatttttattagccytttcactttccagaaagctttatttcttttagacctggataaatccctcggggtccacagacttgttctgatttgcatagctgtccttcgctctggggccgagttgtagcaatgatytctgtaacctacaaaaaagcaattggaatatgggcttccatctgccaccaatttgtgttttgggtaagcgatgccaagaggkatactctgcacctgatatctacctcctttcatcagaaataccccagtaggttcctgctaactttattccgtgcagyatcgcctaccttgggtagcacggag

SEQ ID NO: 1354 - DNA, 598 bp, Bovine  MMBT15927
  misc_feature (1)..(60): n is a, c, g, or t
nnnnnnnnnnnnnnnnnnnnnnnnnnnnnnnnnnnnnnnnnnnnnnnnnnnnnnnnnnnnttcggataatctaccctggttgattcatagcagtgatgtcttatctttaaggagcagtaattaaatgtatataatttaactaacaaacatggtgcttactatgaaatagtacttaaagttctggttgttgttgaaatattcgttgccattcaccctccaataaggacctattacttacattttaacaaaatcagtgaaggtgatgttatgaccatcgaagaactgaatttagatacccaygtagctcttcattatgtctactattcctaagaagctcactctcaaggtagcagttttaattttgttacaagtaataaatgtgaatttattcttataagtatcaattattacatttagggttaaaatccttttcttaattataaaaaatatgtttgttgcaaaaaaaaatttttttttatatagaaagtcaaagaattttagaaatcacttgtggtcccacaactccttgattaccactgttgacatcttgtttttaccactttgttttcaataatgccagatttacaatgaagaaatc

SEQ ID NO: 1355 - DNA, 600 bp, Bovine  MMBT13654
tgtccatgggattctccaggcaaggaatactggagggggtagcctctcccttctccaggggatcttcccaacccagggattgaacccaggtctcccacattgctgaacacaaaattactttatgttttcatgcctgagcagcatggatagtcagtttgggtgtggttttgtttttgcctatatgccttgtggggctttgagatcatcacggatcagctgcagcccagctcccatgctcttgtcactccaggacccagctgacggggcagcttcttctggggccactgtggcttaatggcrgagagacaggaggtgcaggaaaagcaccttggtgctcagggcttgtgttcccaagtgatgctttccacttcccccaccttggccagagcaagcccctgtccccgacatccctgtccagtaggrcaggaatgtataacatatgtccatacagggtcatcacagggaggtgaaggcaccatttgttttggaaacagaaatatcacagtagggttaacacgaagaaggatcagatttgacagaaaagaagcaagatacctaagacttactaatttatgacatatcaacagtagtggaaataga

SEQ ID NO: 1356 - DNA, 600 bp, Bovine  MMBT11762
gtttcgtttgtttgtgtggttaaatgcaatgatagcttttctcttgggtgactctgtcattctcctgatgactgtgacctagcttcagctcttgttggcagtggtttccctggttttggctaagcttccgatttgctcattttcttagactctcttatgaacattctgctacagatttcctcatcttctttttgcaataatcttattagagagctcactagctagaatactcagctattttttgcattcttcctgggacctgctgggagttttcatcctcaacgtacctggcataggccraaacacagcatcctgattctgtttgctttatgttaatgtaaggccttcttcaagatggtctccttatagagtctcaaatgggagtgatgacacagaaccctctgcttttggcttctctggcctctctgggatcttcctatcattttcccttagagttggccccagtgcagaaggtaccttggaaacagagcaggagacaggaggacactcatgaataacctctcattcctttctctctctactcgatcctttccttttggccagaagggctttattcttagtcctcttgtcttgctttag

SEQ ID NO: 1357 - DNA, 598 bp, Bovine  MMBT17316
  misc_feature (1)..(170): n is a, c, g, or t
nnnnnnnnnnnnnnnnnnnnnnnnnnnnnnnnnnnnnnnnnnnnnnnnnnnnnnnnnnnnnnnnnnnnnnnnnnnnnnnnnnnnnnnnnnnnnnnnnnnnnnnnnnnnnnnnnnnnnnnnnnnnnnnnnnnnnnnnnnnnnnnnnnnnnnnnnnnnnnnnnnnnnnnnnnagatgacatacatcactgagaccgaagatgtgttctacacctacaagggctccctgtcccctaaagacagtgattccgaggtctctcagaaccgaagcccgcaccgaggagtaagaaacttgtgctcctrtctttcctgtgtcccttggttggggctgttgaggaatttgcacaggycccatggccatttaagaggaggcagaggctagagccagcagccagctccctggggtgctctctgccaggctgagaacatcagtccactcccttcccccaagagctgtgtgcctggggtcattagctcgccctgcttttttgtcagtgacagcaacctaccgtccacacacccrttagctctcctgaatggtgttttctccagttgatgagcaaaackcagtttaaaccattccatacaccagaggttgagg

SEQ ID NO: 1358 - DNA, 598 bp, Bovine  MMBT16061
  misc_feature (1)..(151): n is a, c, g, or t
nnnnnnnnnnnnnnnnnnnnnnnnnnnnnnnnnnnnnnnnnnnnnnnnnnnnnnnnnnnnnnnnnnnnnnnnnnnnnnnnnnnnnnnnnnnnnnnnnnnnnnnnnnnnnnnnnnnnnnnnnnnnnnnnnnnnnnnnnnnnnnnnnnnnnnncaaagagatagggcagagatgatgctcacgaaggtgtgcccataaccagagcaagaccaatgagtggccgcatgcttccaggccagtccacttctcgagggttctgatgggcagagtaggtctgggagggaggtccagaccccagggargtcrgaggggaggggccacctgggatggacagcagacagtctgtgctttgcgggacagagtatgccaggctcccagggaggggagctgggaccccacagagcctgatggtcttggagtctcgatgccatcaagcctcctccaaccccaagaccctcaggcagaaccccacagcctgagtacccctgcctctcacctgggcctgctgacggttacgcaaagctgggaggacctaataatgcacctaaacagacccctttcctcgtggtgtgttttttatttaattttccaacgaacaca

SEQ ID NO: 1359 - DNA, 600 bp, Bovine  MMBT13832
tgtaccaagtgatcaccaagtccactaatgaccagagcctctcawgggggcctatctcattartgccctgggtctgccctaaaagcctagtgaggagtggagatatttgtcctcagcaaacttggcaggcacttgagtcctccgtgtgtttgtgggcgggcctttctcaggctgctgcagatctgatcctgctggggatcagactggttgacctctaagactacttccaaatagaagaggcagtgatgctctcayactctggagacattttcaaggacagcccaaaggaacaactgggargtttccagctgttccactccctgtccctggctctgcaactctcccgcccacagcttgcccacagcttgcccaagcctgtccacagstcagggtcctcaayccctggcctttgtttgtgcaaatagtgaaagctggtgagatatttagatctgtaagtgccctgggcatttccatgtatggctgtaccctctgaagtcctagcccagagctcmaagggttttcaagagttgacaaggaagtcggaacaatcctctgtatgagagggtgccaagtgcatggatgctgacaggaacagaggga

SEQ ID NO: 1360 - DNA, 600 bp, Bovine  MMBT15770
agctgatgtttggtaattgatgtgttgagtgaagatcgtggtgggagggggctccaggcggcgatgagccttttgtgtgtggcctgctggggggccttcctcactgactcagccctgccagacggggtaatggctcctcagcgcagcgtgtctgagcgccgctatatgccgggcgcggccccacgcgtcctgtgcatgctcacttgtttgatctgccaggccccgacagagcaggttctggcctttcccccactgtacatgtgttggtactgaggctctggaacatcacttgccagaggrcattcaccagggaccgagctgtggtttggacccgaagcccggctgtggcttcatgggcttgacccatgtgtgatgcctgcatgacttttccctcaccattcaggcctccaagcagccaggtgccttgcccctaatgctgttctctgctctcttccagaccatcatggagcagttcaaccccagcctgcggaacttcatcgccatgggcaagaactacgagaaggcactggcaggtgaggctggggtccctggcctgcgggtgggagtgaggatgcccaagcaggtagactgcttcacggg

SEQ ID NO: 1361 - DNA, 600 bp, Bovine  MMBT18124
gagtgtgggctctagactgcgtgggctcagtagtaatgacactcaggcttaggtggcccacaccatgtggggtcttcccagaccagggattgaacccatgtcccctgcattggcgggtagattcttatccaatggaccaccggggcagtccaggtattttccactttcaattggctgcttctctgaaaattcccctcaccaagcattagtagggacctccctgttccccctttcctagtaaagactgcccatgaccggccaaatggcccatggataggtaggcttgcaaaattgagcaartaaaattacaggatgcccagttagaactgattgccaaatattgcaatgtttgtaatctatttacactagaaaaaaaaaaatagtcgtttatctgaaattcgaatttcactgggtgtccagtattttatctggcaattctatcctgggagcctcttgtagaaaccatcaagggtggcaggtctgctcagtgggccctttaggccaccaatcgggacagtccatcaaggactgcctgagctcacacagatgcctaaggccacatctcagggttggttttgcctgtagcatggggggcggacc

SEQ ID NO: 1362 - DNA, 600 bp, Bovine  MMBT15732
agtcccaacaatcaccactgtttatgcagaatctctggcaaacggcttccaactcagcgagttttgaaatacgcatcacccccaccacaatattctttccccacactatttccagctagtggattttgtttagagtcattttcatgatttgcactcattttttaagcaatgtgaggaccaactccaaaagaaaagctaatcagggctctacccagagaccctgcaatcggaatcagatgtgctgaaggagaaattaatggaaacacagagagggcagggctcgtggctgatttcacagcrgagaggaggggctgacaggagggaatctgcgctgaacggagggtctgggggaattccagctgtgcaatcgcccattgtgtttatcacgcatgaggcaacatctgcagagagccggaacattcctgggccccaaacatcacggtaaagagagggtgtttggggaaggggggtgagatagcaaaatggtttgtgctgcccacaaatcgcggtgaataacgcctcaaatagggggggagaggagacactgacatccagctttgcgcctttcaagcagctctgtcgagcacagcaggtttaagg

SEQ ID NO: 1363 - DNA, 600 bp, Bovine  MMBT18282
aaaaggctggcacaaggcatggtttgtggtccctgagaacgaacccttggtgctgtacatctacggagcccctcaggtatgtatcctactcctggtcctttcagccacctggcaaagccaggctactctcctttcctctcagtccttcacctctccttggccttggaggatagtgtgaacctaaggggaaatcagaagcccccacccttatgagtacaaagacaggctcgagtacaaggagtgattatggatcaacgtatgtaaggataagtcgggtgagttatgggggaaggaagctgragtggagacgagatactgcttaatccaatttggagtgagcaagatggagaagagggcaaaggcctgaaaacattataggctctaaactagcctagctggcttggggtgtggaaggaaagaggtatttgaatcagcctgcagttctagccccagttcattttcctattgctcagttaaaccatttaaggttcttgagcagggaaagaaaaagaggggtttagaagatgtaaaaccagtgagaagcccaaccccaaggtgaccctagctctgtccctgtcccccaggatgtgaaagcgcagc

SEQ ID NO: 1364 - DNA, 598 bp, Bovine  MMBT16717
  misc_feature (1)..(237): n is a, c, g, or t
nnnnnnnnnnnnnnnnnnnnnnnnnnnnnnnnnnnnnnnnnnnnnnnnnnnnnnnnnnnnnnnnnnnnnnnnnnnnnnnnnnnnnnnnnnnnnnnnnnnnnnnnnnnnnnnnnnnnnnnnnnnnnnnnnnnnnnnnnnnnnnnnnnnnnnnnnnnnnnnnnnnnnnnnnnnnnnnnnnnnnnnnnnnnnnnnnnnnnnnnnnnnnnnnnnnnnnnnnnnnnnnnnnnnnnnnnnnnnaacaaaaagaggagcctcaggagtcaacatgaccacatcgggactgcatataacagaagcagrtacaaaggccctgtgtcggggcccctcagaccaccctcaggtctggtgattttctatggggactcagagcattcagcatatgtcttactkgtgtccatgatttattacagtgaaaagatacaaaacaaaatcagcaaaaaaraaaaggcgcatggggcaaagtccagagaaaaccaggtgcacgattccaagagtcgtttcctaggggagtcacacaggatgtgcttagttctcccagcaacgagctgtgacaacatgtgttaaacatcgaccagcgaagctcgttagagaagcagtg

SEQ ID NO: 1365 - DNA, 598 bp, Bovine  MMBT18236
  misc_feature (1)..(84): n is a, c, g, or t
nnnnnnnnnnnnnnnnnnnnnnnnnnnnnnnnnnnnnnnnnnnnnnnnnnnnnnnnnnnnnnnnnnnnnnnnnnnnnnnnnnnncctcacagcccttgcttcacaagtcagggaagccccttgagcaagtcggcccttagagccagtcctgggccagcatccccaaattcccagagtctcatgacctctggggtgttttctgggccttgagcaagtgtctgactcccaaggcctctgctgggcatttggcgaggttgaggatgctctgtttcaccgcctggccactggggtctcagctcrggagtcactgtatggaggccacgtggcatcattaggacagggctggacctggatgaagccrygatgaccaggaatgagggggtcaaggtgcctgagaaccagacagacagaagttagctgaacctgtgccagtgagtctcagatggaggagagagaaaggcagcgtgattactgagggttctcagaggagctagggtctggggaagaacttggtgggcaggtggctggacttcaggggcatgtccaggtcstgtgcacagatgccgagggcaagtcctgggctttygggtctccctgc

SEQ ID NO: 1366 - DNA, 600 bp, Bovine  MMBT14603
acatgtgttcttatttatgagctgcatcagatgccgtcggcagcctacctttggcccttcaaggccagcttcgtgcgtgttctttgttccctcaagtctcaccgagtgaaatattaactgctggtgggacagagggccrgggagcctctgaaggcagggttggtgaagaaggatacctggagggagggttgttcactgacctggaattttccattcctgtgaagctcatatgaccagggcagtgttttctgcaagccacatagcgaagctgggtgccaagtggccggtgcttaggcaccrgatggtgggcgaccacagctgtttatagcaccatggtcactggtcacatcttgcccatgcagggggtcatggaaaggatcagacccaagagccgggagacccgggttcagccttggctctgcctctgggacagcctggggagtcttgtgggagaggctaatcgtctcagggcttcttttcccttggatgtaaaaagagagatcagaagagaagcacaaaatctcctttctgactcattttctgccctggatgctgagacycatgaactccacttagagctaactgtggtaacacattcca

SEQ ID NO: 1367 - DNA, 600 bp, Bovine  MMBT17498
taatgtctggctgccgtatggggaaaagtgaggagctatagacatgggagagttcagtcttcagaagttgtcccactgcctctctagttaggggactattccagattgaactaggttttggtttaaagaggcccatatttgaacacacagatttctgacccaggacaacgtggggacagctattgagttactttgtatttcctgaatccatgctgcatgccctctgctctctcaccttcttaagttgcttctcactcagtgaaggttggctgcacatcttctttatacaaggtaaagaaragaagagttctcagatagcaaattagtcaaaaaagagaaagcatgtatataatcagataatgctaggaatctggaggttggtgtgtgtgtatgtgtgttcagctgcgtccaactcttcgtgaccccaatgactatagccctccaggtgcctctgtccatgggattctccgggaaagaatactggagcaagctgccatttcctactccagaggatcctactgacccagggaccgaacctgagtctcttgcgtatcctgcattggcaggagggttctttaccatggyatcacctgggaagtt

SEQ ID NO: 1368 - DNA, 600 bp, Bovine  MMBT14379
cgttacactatgctgtatctttaactgtttgattaactcagaaacaattttatgcatacatattaagaaagcattcatgaatctggatttcactaagaaaatgatgcaatatgggggccccagtaaataggggctcctatagagtatatttgttggaaaatcatgcatataaggatgactggatgttcaagcaatttagattccagcctactcagatttaaaatacaagaacagtaaaagcttcatcagctcgaaattactttttaaatgatgtgagggcgtttcaagtcaatttgaaargattaggggataatatggatttgccaagtactttgacgtaccaaggaactgtkagggcacttgaaagattacacaagatatttaacagctttaaatcttcaagtttttaattctttgccttatttttttccccagcatttcaccttctttattgacttgtgcctgcagtccttctggttagccatttagccaggtaatacctacagtgaaaattaacattaatacagtgccaatacatttattatgagctgtcctcttacatcaatattttccattggctgtcttttttaaaattaatta

SEQ ID NO: 1369 - DNA, 600 bp, Bovine  MMBT13649
acatggatggtttctgtgaaagttcatattttgtctttgtaaatgtcactatagggcagtgatttttcaagcagaagtgatttttctctcctctcccctcagggacatttgatgtagacatttttgatgaatgattaggagtagtattggcatcttgtgggtagaagcaaggaataccgctaaatgttttaaaatgcatagacagtagcccccacccccaatgaagaattatccagcaaaaatgttaatagtgctatggttgagaaacccttatataaagcaagcagttgcatcttgcargaaccataatatttaaagtgttattttgttcattctctatattatttcatctagagccacaaattactgatgcagttgttgcaaaaacatagtaggcagaaactggaagaaagtctattttatgttaagttaaatagtagttaagtaaagaattgttcatctttcaggatttagattgagacttagatttttaaggataccgaggaccaaacatttgttctttgtaaaatttgtatcaatcaaactgttaattgcaacaaccactctactaaatacatatgtttgctgtatattaggctc

SEQ ID NO: 1370 - DNA, 582 bp, Bovine  MMBT12846
atatctaaaccagtggggtacatccccctaaaaaatcattttaaacatgtacttgaatttatactgaataatttgatttatatatcacatttggtgtcacacagctctcaaacggacttagcataaaaaactggaacataacttggaaatcaataggttagtataaaagctgtaagcattaacaaactcaaaattttcagtttgagtggaatcttcctccccatgcatgacaacttgtaaatggccaaagtatacatacaattgccaataattaataataatgccaaaaataatgtgcarcttgattttactttactggctatggtgattaactctgtcaacttgatggagtcgtaggatgcccagatatttggtcacacataatttgggtgtttgctgtgggtatttttagatgagtttaacatttatatctgtaaactaagtaaagttctccctaatatgggtgggccaatcacttgaagacccaaataaaacaaaaggttgaccctcccaccaagtaagaaatgaatcttctgtgtaacagctttacactaaaccggctctttagattccacacaagtc

SEQ ID NO: 1371 - DNA, 600 bp, Bovine  MMBT17511
tatttgaagaaagttgttggggaatcggactaaactggaaagaaaaataaatggtttctgttaaggtatctggatgccagacatgctatgaagaattaaagaatgattagacataataagctaaaggtttggggcagggtctgagtgaataattagaaggttagggttaatggaatggagaacttacaggaatgattgtaaaagaaagaacacagttgacctggkagatctgtaaattcagttgattttggtgttaaaagaatataggaatatgcgtaattattctyaagtttttaaatrttagaaagaaagcagtagaaaatgttagtcactcagtcatatccaacactttgcaaccccttggactgtgcccaacaggctcctttgaccatggcattctccagcaagaatattggagtgggttgccattccttctccaggggatcttcccaacccagggattgaacccgggtctaaatgttcattgtgcataaagttgttttaatgcagtggaaataagtgaagatcctgactgctgtctgaatttgaaatgttcatgtaattagtaattcatatttagtaggccaagttaaacttaac

SEQ ID NO: 1372 - DNA, 600 bp, Bovine  MMBT09221
gaaagtggggatgggataaattgggagattggaattgacatatatacactattgatactatgtataaaacagataactaatgagaacctattttatagcacagggaactctactcaatgctctgtggtgacctaaatgggaagaaaattwwaaaaaacccgagaggatatatgtaaacatatagctgattcactttgctttacagtagaaactaacacaaccttgtaaaacaactattgttgttgttatttagtccctaagttgtctccaactcttgcagccccatggactaacctgccrggctcatctgtcctatactccaataaaaacattttctaaaaagctgtaaaatttagtgtactacataatgaagctagtccacttgtaggaacctacgttaatgaaataatttagaatgtgcacartgattttatcaaaagcatatttgttgcagcattaaacctaaatgctcaagaaaaaagagtaaaatacattctgaaacatctttatacatactacacagacgtcaaaacaaagcccagttttgggaaagcaaatttcttgtcaaagaaagatgctcatgatatattatttcatgtg

SEQ ID NO: 1373 - DNA, 600 bp, Bovine  MMBT12652
tgaccaatagatcaatgaaggtttgcagaggtttttcccaccaggagtcctcaagagccaaaggcctgaattctaacagacacatttttacccagagctgtctcctgtgctacccaaacaggagcatccttgagatgttcttatccaagctgaggagttgaagatgcaagacgtgccataaggggaccgtttccctccttctggcacttcaccttgggactgtccccacagcatgggggtgactttgagtaagcagagcacactttaggcctaatctggacttgacacaatgtatatacrccacatttcatcctcctatagcgtaaagtgcctacccagctgtctgatgyggtcatggctaaactctaaggaagggatttgggaaggtttttcccaaactctgagcatgatataactgccagtttccaccagggtcatcataaacatataacaattcctaacatcagattttaacagcaaactcatcttaaactaccaaccccactccatactacagagttaaaaatggggggaaggggagagttaagggagtctgggatagacacgtacacgctgctgtatttaaaatgggtaactaac

SEQ ID NO: 1374 - DNA, 600 bp, Bovine  MMBT11887
agtgagtttcactttcactttcacaaccatggataggatcctgcaaagcacatcaaaagcccagctgtaactttacataattttttactgaaggcctgaggaagagaggatactataccaccctcccctcccccacccctaccccccacaaaaacaaaccaaccatacaactgggcattggactctggcttctagagtctattgcccatgggcttgtttggaggctgccccgagtcctacctccctggcgctgacctgtcccaagttgccagcaccatcttacctcccctagatgggagrgattcttggacaaggtccccttgcctgagtccagaccccacctccaaaacacaacaatcaacgcaaatgcagcttggcccctagagaagatagggttactcataattgaccacatgatcctttcaacccttttaatccaagagggaagattttgtttcatgtggccaggaagctcatcaaaatgttgcttcttccatcgccctgaacaagcgctgttaaaatgaattaaaaatttattgataatgtcaaacaccagtttcccctacttctatccatgaagatactaaaatgttgggattt

SEQ ID NO: 1375 - DNA, 600 bp, Bovine  MMBT18328
gttgtcagggctgggggcctgtggaggggcgctgtggtacacagcctgaggtctgaggtgggctggccccgggagaatgggaggctgctgtggagagttcggtttctatacacactttgttttcccacccggggaattcaggctgtgtcctgttctctgctcgagtatattgaagtgtttattctcttaacatgtaacgtggactgaacacctgacacgcccagcgttctaataccacagacaacccttctgaggatacaggcagcctgtccaggaacctaaawgtgtctcgagtgcacrgtgccacgtgcagcgcagtttcccggaagccagcgtcccccaagcggtcttgcgagctgcgctgcttcccgcaccggggtgggcggctgagggttgcggcccacggmttcgtcttgtcccctctgaggggtccccgccctcgcctcatgagccccagctgtgctctggttttgttggggagactgtattggtttttagacacagaagaaaattcactctggtttaaattggcagaatggcttgaaattattttctcattcccagaagatttttaaaacaattttcacaaaattttaggaa

SEQ ID NO: 1376 - DNA, 600 bp, Bovine  MMBT14251
tctgcctcctgaggccccgccccctgaggcccttctgtcctcctcacagaaggcgtgtggcatcccaacgctgctccctcgagtttctggaagacacrgtgggatgtccctcgggtcaaaggtaaggaccccgcctctctcctggggccaggatgggtctgggaggggcagagtgacctgcttttcacctgcagaaccaaacacatatccggatccccgagacacaagggcctgaaaaagacacacttcatcaagaacatgcggcagtacgacaccaggaacagcaggtatgggcgcgcrgcccaccatgtcctccctccagccctgtgggacctcgtcctgcctgtgtcagcagccctgtcctccttcagctcaggggactcgtccccacagcccgtcccttgtccccttggaagtgagccctccttccctcccacccacctccgttcatattccctgagcgccggagtccacagcacgtcctgggcgaggggccgcccagtagactctggtcttgagtagaaatgctgaacgttgagaacacagtggggacgggcaaagtggtggggtggccaggagagaaggaaacacagagggtac

SEQ ID NO: 1377 - DNA, 600 bp, Bovine  MMBT15673
tctggtggtgccagcaagaacctttcaagaggttgagcaagtctaaatcccagtcatgtgctttggtggttgtgttatttaaccttgtgatcctcgttttcttctctgtctcaggggtagcagcgcctccctcatggagtgctatgcctgacacattgaaatcttccgcaaatgatagggagaaaggcttggcaactgcatccttcccttgaatggaggaggaaagggtcgggttccttttcattgtcctgtcaaagttgtgcagagggccacaacgacacaatgttgaacgtcaacaaraggtgcatggcaaggctgaaacacacctgccrtaagagtctcatgtcttcagcagagtcaagcaacaactcgcttcaaagatccatgaattatcttgataataaaagcttcctctttccagcaatggaaactttacatggtgacaatttaagataaatttcctgtatttttcttttatcctgactttttctttttaaagaaatttttttttgatgaggatcatttttaaagtctctattayatttgttataatattgcttctgttttggtctttttgctatgacgcacgtgggatcttag

SEQ ID NO: 1378 - DNA, 598 bp, Bovine  MMBT17638
  misc_feature (1)..(22): n is a, c, g, or t
nnnnnnnnnnnnnnnnnnnnnnccccattctttggtatttcctcactttgtaggccccggcagcaggatcgctgagcagacgattgaagaggtagaagagggaaagctggaaaagcagggcttccattttgagatcatgggccagccggtgcagcatcttgaccacacagtggttggtgtgggcgctgttctgcttgtagctccgcagcagcagcaggtaggctcggaggacggttgagtttgcgaagctgcaccgagacaaggagcgagaggatgcaggcatgagaaagatatagctcrtccgcatggcaccccggtctgcaccctgacaccaactccatcctctgggcgcgcaccgtttcaggtagtccaaaaagttaaattctctctccgacacctggaccacttctaactcttcctcctcctcctcttcttcgtcttcttcctccgccccttgttcctccagaccctgctggcctacagaaagagtgaggattaccgggtatctgtgacgttggcrctagagaagcatgggaaggagagtgatgagaaggaaatggagactcacggggaagcggggccaagaggatttgcttca

SEQ ID NO: 1379 - DNA, 600 bp, Bovine  MMBT17106
cacaaatctccaggtatcctgcctcatcctcagtgggctatcatgttctgtggtacatcttggtagcccttaaaactggtggcatggtctcagatagattcttgcaggagagacagatttatggattccatcagcttcttccaggggagccgcccgatcgccaggagggcacaggtgagatgcttgttgaggttctctcagcctgtctaccagggtcaaacagcagtttccaggtcctcatggccaatgatcttataattctggcggctttccaggtaggcagccaagtctgggtccccrgcctgttgggctctgtcttgaggtgtcttaccctgtaggtaacagtgaagaggaaagagacacgaacacttgggaaacatttttaaaaaaatcatagaaacagagcagctcaaagataactcactaaaactgatctttccatgttttctgtttgagttgatgagatactttctaaatctattattgcatcaaacgtatgagatatgcaagttcaaaagagatgatcacttttcagaggtggggcttccatcaaaggaaagggaggttctagagtaactagttagcagcaaatcgtgtagc

SEQ ID NO: 1380 - DNA, 598 bp, Bovine  MMBT14791
  misc_feature (1)..(12): n is a, c, g, or t
nnnnnnnnnnnnatttttttaaaagtttttcccaaattcatggatgaatcataaattatgccaggtatgatataaagaatattgaccttttttttttggtcacaacacacagcttgctaaatcttagttccctgatcagaaattgaacttggaccatggcagtgaaaacaccaattcctaaccactgaaccatcagaaaattccctaaaactgactttaaaaataaaatatgttgtgaatgccctaarcaagttgattagttgggtttttaaaaatttaatgtatatgtaaatctgcatrtataaatatacattcaatgtgtatgtttgtatgttctttattcaactgctccagatgatatgatatgggtccctctaagatttttttctgtgatgatcaaattgagccaataaatgtttgattaattcctatggtgagccccataaaggccagtcacagatagaaaggatagttaaggagggaactgctagttaaggagattttttaaggcttagagtagagcctgaartcaaatagaacagaaaaggattagcatcaaaagagagtgaaaacccaaaagtactggtctcagtctcta

SEQ ID NO: 1381 - DNA, 600 bp, Bovine  MMBT12638
gtcaataaacagtcctcgttcaagagacttttgccacttctgggtcagtagcttgatctttgtctactgccakaaataaaagtgattgcttaaatgtccttgtcaccagaacaaaatgactttccctacatttaaaaacaagtgctgacaactccaaaaacagattatttctaacaataatagttgagcttytccacatacgcactgtgtcctgggcactctgctacctacttaatcctcagtgttttcaatattcccattttatagatcagaaaactcagagcttgaatggcttgcctraggagttgcaattagtctcttgtggagcaaagattagtgcccacgtctgtcttcaactacagtgaaagcttttaactatctcgctaaacsaagtctaaaaataaatcaattaatccaaatgaaggggctggagaacattaagaagttttccctgttctcaaattctaagattacttgaaaaacatgttctgaaatattatgtaatatattctgaagtcaaagaaccatgcctttgtttaacagccactgttctggaagctccattccttagcaccccatctagccagccaaatactcaag

SEQ ID NO: 1382 - DNA, 604 bp, Bovine  MMBT16333
  misc_feature (1)..(4): n is a, c, g, or t
nnnnaaggaaatattctataggagaaacacggatgcagcaaaaattgttaaacaagtaagttagaactaacaattaacaataaaaatccacagaagttcacatgtccttggatttgtttgagtcaactcaagtataaaacattttttaaggaattatttttgaagctggtctttttaactcaaaaatgtataactaactgatgccagttttctctctctacactctctctctcttttttttttaagtcaaataaactgcatttaaaacctgaggcaatatatagcagaaaccaatgcaatattrtaaagcaatttcttccaattaaaaataaataattttttaaattgaggcrttctacttgatgttacttttttttaacgtgaaagatatttagtttttgtgactgctttggttcaatattttacttartgaaaataagattaagtggaactgctttcaactggttttaggtgatgtgattaactcctgaatcaaggtgctaagtggcattttgaattagagagacagtgtcagatgtggcagaatgaaccaagatatcgagcttttttgtttccagttctggctccactttctggaagggtg

SEQ ID NO: 1383 - DNA, 600 bp, Bovine  MMBT17534
gggggctgtggaaggcttcagggtgaagacatgactgagttttacgagaccaggctggtggtgcasagatgtggatccagggcccaaggcagggaccctgggggctaaataaccagaagctagrcatcgcttagtgtggggaagcatcttgtgttacaggacacatgtcagatccctttgtccccacagctttctgtcccacaagggttccatcagagctccgctccttactctctctgggagggcagctcccataactcgttagaggctgggactgagagcgcgccttggtgacagggygcatggrgccrcccctgcctcccctctggttgctcccgcctgaaggccggggggaaggtggactggctgtcaggctcccgcacagaacccggctcctcagcctcctgccctgtgacctgggcaagtcacccttcgccccagctccaggggagccttgatatcttcacctgtcacacaggatgaaaggtggctgggagggcgggcaaggcctggaatgggacctgctgggcaccgggaggccccgtttgctgagtgtcttccctcgccacaccctgagccctggggcyatgtccccagccc

SEQ ID NO: 1384 - DNA, 600 bp, Bovine  MMBT17575
acagactcagctgagctgagtsaagaactggtggagggggacaagaattctgaacacctcccgtccatggctggcttgcttaagcaccaacaagatgccagtccacggagtgcgcactgtcagcctagggcagtgagggtgccctagaccccccttcagacagattgcaggggagttgtatgttggttcagaactggttttaaaaaataaaaataaaaaacccttcactacccacagtgggggcttcaagccagaccaggtgggttggccctgcagagagccaggggtccaagcccccarcttggccacatcccccctccactccacttctcttgttcccctgggcctatggaaggacaagctgttcccactgagccctaccagggctgcgctttaacccctacaatccatgctaatcctcagctccacccactccagctgctctctcccctgagccctggcagtgctgcctgccagcttcagccctgcgctcacccttcccagggcaccctctcctctccctgagaagagctgggagctggcccagggccctccagagcacaagtcacgggctgggcacctgctactcagatgcggagc

SEQ ID NO: 1385 - DNA, 600 bp, Bovine  MMBT09694
ctctcgtgttcccagggggacacacagagggcctgacaccatgtagaacgtctttctttctctctcctcactccctctgctgttccagtttgcatctctaacctgatcccggccacccagccaggtgccacctgtgccctggaggaagaggcaagaaacagtctgttaacattttcttgaggtgccagaggagatgctagagggtctgacgagggccttggagcgtgccagtggcaggtgttgggtcacagacacggtgccctttgcacagcatctgtcctctccctgccagggcaggcrgggctctctgtgcccctggatgtggggcatttacrctcactggcacccctgttctgctttggtgcagagcctgccctggcctgcaatgtgtgtgaggctgaagtcttgggaaatcctggagcyggggtctgaggcaccccgtcattttctaggaacaggaataactggaggtgctggttgcccgagtggtcccgcctgtcatgggtaagcgggaatgcccgctggtggggtgactcagaggtccccatgaggcactttggagtccttttctcctttaatggcagtctgcagacagtgggg

SEQ ID NO: 1386 - DNA, 600 bp, Bovine  MMBT18357
tgaatctctctccttgaatgtttgcggagttgtgttgtgattgaaaatgattacacaatgactataaaattctgtgaagaggatggaggttaaaatggaaaggattttgctgtacgaccacacttacataaccttttggtgagtgatattcaaacttactacacgctccacactgcatggggtgcagaggtgcagaaaaggcgggcggagggatgtgtgctccttgtcatttaggggctyccagtcaagtgagtgatggctataatggagtcacgaaaagggccctacggggaaaggccytcttcccatgaggggcacttgacacttgtctgaagaatgaggaggagtttgctgattatggtacatggagggttaaaaggtattctagctacacgtttagctgtgagaaaagataccatgttcaaacacagtatgtacttagtatgttagagctcaaggcaaacatgagctggtggccagagatattacggaagggtaggcaggggttggctcttcaaagtcttcattgaatttgttacaatattctttctgttgaatgtttttgggtttttggcttggaggcatgtgagatcttagctc

SEQ ID NO: 1387 - DNA, 598 bp, Bovine  MMBT17263
  misc_feature (1)..(112): n is a, c, g, or t
nnnnnnnnnnnnnnnnnnnnnnnnnnnnnnnnnnnnnnnnnnnnnnnnnnnnnnnnnnnnnnnnnnnnnnnnnnnnnnnnnnnnnnnnnnnnnnnnnnnnnnnnnnnnnnnnttataggagctgggaagccctagatcaaggtgacagcccacatggtgctggtgaagccctgcttcctaagtttgctgatgggctgtcatctccttgtagcttcacttggtggagagcagagagaaagcaagccctctggtctgtcttcttagaaggacactcgtcccattcatgagggccccacccaytcttatgatctcctaaaggtcccacctccagatgccatacactcaaagttaagatttcagtatgtcagtttggagcaggagacacaaacattcagtccataacagagtaatataaaggacacttgtatacccaccactcagtgtaagagtatatggcaacattgcctatacatgagttacattcacctccttccctgtttctactaagtaatctaaggaataagaagatgaaactatcttgagggtgaagccctttattaagttctttcaccttacactaaaattctacatggaaatt

SEQ ID NO: 1388 - DNA, 600 bp, Bovine  MMBT14437
atattgcttcttacttgggggcatctcagcttccctgatcacctgtcttactgacaggaggcaacaaggaggagaactgcagacctcccagggagcagcttttgggcatttgattgaggcaccaagacatccagaggacaactgagtattgacgatggatagctttgaatggcttttcttttttaaagatttatgtgtttttatttatttttggctgcactagatctccgttgctgtgcrggattttcactagttgcagtgcatggacttctcattgggtrgcttctcttgttgccaagygtgggctctaagtgcacaggctgcagtagttgtgtgctgtagagcgctagatcagttgctstgctgcatgtgggatcttcctggaccagggctcgaacccrtgtcctctgcattggcaggcagattcttaaccactagaccaccagagaagcacctgaatggcttttattaccatgttgtgaactgactttggttcttaagagtggctccatgtcggttcactcttaatctcagtactgagacatcactccaagctttcctaaatggtaggacttgcaagatgcatgttagttagtgcct

SEQ ID NO: 1389 - DNA, 600 bp, Bovine  MMBT17624
tagagctaatcaatgaatatagtaaagttgcagtatayaaaattaatagaaagacatcccttgcattcctataaactaacaatgaaaaatcagaaagagaaattaagaaaataatcccattcaccattgcaatgaaaagaatataatacttaggaataaatttacctaaagaaacaaaagacctgtttacagaaaattataaaacactgatgaaagaaatcaaagatgacacaaatagatgaagaactatatcatgttcttggactgtaagaatcaatatagtgaaaataagtatactayccaaagcaatctatagattcagtgcgattcctatcaaactaccaatgatatttttcacagaactaaaacaaataatttcgtttgtatggaaatacaaataatttgtatggaaacaaaaaagaccccgaatagtcaaggcaatcttgagaaagaagaatggaactggaaaaatcaacccttcctaacttcagactatactacaaaagctatagttatcaagacaatatggtactggcacaaagacagaaatatagatcaatggaacaaaatagaaagtccagagataaatccataccccta

SEQ ID NO: 1390 - DNA, 600 bp, Bovine  MMBT17190
tgttttattttactaaattcctctgtctccatctctagagtctcttgagtggaagagtgtccacatccttacaaacagctatttctcctataattccatttacatttaattttaattttactcccagtttccctcctcggttctctgctataccaattccctcttttgattacctattcttacaaaatcccacgtggactcatcaccaggaagcaaagagatctgtgtgtgaactaacaaatacacaatgacaaatccctgacagactttgaaagaggtgacctgatygtcaggaacgtytgttaattaggtagagatytgtggactgaaaaaccagtagcaaagcttggactttatgaaattactcacagttaatatatgtggtaaaactgaaatttgactttttctgttggggggattggtgtcatttaacttaggattggcaaatgaaattctgatagtagaggtatgcgaaacaagaattatctgtgctaggtcaatggaccatacacacacatacaaaaacaaagtaaatattgtttaaaattctattcaaacaaacaaacaaatatgccaaggcataaaaatgcaaagcttgaa

SEQ ID NO: 1391 - DNA, 600 bp, Bovine  MMBT18018
gtatatgcctgggtatctgagtttttttgtgtctactgtgtatgtgtttggtgtgtgcctggcctccgcgtgtatgttttcctatggtttggatgattgtaagtttgtgaatgtgtgccattggtgtgcaggtgagtgtgtatctttctgcttgtttctgtgatttgtaactacctgtaagtttatgggctrtgtgtctgcctactagtctgtgtactagtatttccatgtatgtgtgtaaatatgaaatttacttcactatatgagctataaggtatatgaccccttttaaaaattttytgaaaaatcaaatgtaatcattgatgagcctcaccccatcctgaaaagatggtgggaaagtctatctaatcacccttgggagccccttccttcccgccctccagacttgtacaaagagcctaaggagcccgagacaattgggggggggtcctctggttttcagtccccactgtcacttgctgacatgctcattgttcaggcacatggtcccyatgagggggtcaatctgcagttgttctcatcactgggggccctgcaggccactctcccctgaaatcctgtcccgccccgccacccacc

SEQ ID NO: 1392 - DNA, 600 bp, Bovine  MMBT16261
gatgctggggatatggcctggtgagaattttaatcttgaaaaactaattatgaaatatttcaagtatgaagcatagaaaatgatttcataaacactcataaagtaccactcagctttcccaaatcttaacatttggtcaaaatggttcagatctttttgaaaaacacaaaatactttagagttgtgtttcactccttttccttgtcacggaggtaaacacggtgccaattttggtgttgtcattctcagaagttcccttttgataaatctgtatgcatctctaaacatattttgaaatayggaccttattattatttaaatatggtgacaatattagccgctcagtcgtgtctctttgagaccccatgggccatcaggctcctctgtccatggaattctccaggcaagaatactgragtgagttgccattgcctcctctaggggatcttcccaacccagggattgaacctgggtctcctgcattgcaggcagattctttatcgtctgaaccaccagggaagccatgggtcttattattattcaagtatggtgaagccatgttatattcacagctcccaagagaaagggggcctgtgagga

SEQ ID NO: 1393 - DNA, 600 bp, Bovine  MMBT17196
acaatttttaccttgaaagcctaacctctaccatccccataaaattaaactccactaaattataagcacttaaattggggtcttttacatcttggtgtggtcacatgtcataaagacatgggaaaacttagaagtcagtgtatcttctagagataatcagccaacacctcccttaagcaattccctttggctataaagcaaaacttattgaattagcacacatttatcaaaaattggtactacttagtctcactaatgagtttgaaatttcaaatacagacttggtggaatgattccatygtgctgtaagtatgctagattttgccaagtgctgattacgtatttggcacagtttcagtactaagtggaattatgtatttattacttaaattatgtaagctatccgtacttactataaaaagaaaggaataggtatatacttaagaaaaagaagaaagtatatacacaagaagaaggtatatacttaagcaaaaaaaaaaaaaaagaaatacaattcaacaatccaaagatagagcttattaacattttacactgtaattgttcacatttttttcagtatgtgtatggtgtgtgtccttt

SEQ ID NO: 1394 - DNA, 600 bp, Bovine  MMBT17020
aaacattcccaaagcatcatggggcaggagggccattgtatgcctagggttggctggccatggactccttccaaagactgacccaaagataacttgatacctcctgtaccttctgctcatttctttatagatccagctcctgtttcctgtatttcctaattacccacaacactcattctgaaaacgtcattcctgaagcttttggagaaaaagaaacctgctaaatgtgcagataagagaatttcatgtaaaagaattttacattttgtaaaattttacaatttgcatttggtagcaaaygggttgaagaagttttaataaaatgaaggatcatgctcactctcaccgaatgaaaggaggcagaaattctttgatgtcttgattacagaccaggattagagcctgtgattcagctagggtcatctcagcctcacaaggagactcactcagtcccttctccgctcccccaccgcctctggagtctctctttctaattctccaaggtccaagacttcaagtcttccacgtgaaggagttagaaagcgtgggtgtgtttgttttgttaaacagagacacttccttttctggaaaaaaatatca

SEQ ID NO: 1395 - DNA, 602 bp, Bovine  MMBT17372
  misc_feature (1)..(2): n is a, c, g, or t
nngcatgcaccacgagataagccactacaatgagaagcctgtgcaccacaaggaagagtagcccgcacttgctgcaactagagaaagaccatgtgcagcaacaaagacccagtgcagccaaaaaataaatcaataaaaatttaaaaaataaatctttttttttttttaagtcatgcaaattactgtctgttgtggccagaagaatgtgcctctcagattttctagggcaggaggtaaaattggcctccagtcgtggctgctgacatgctggcagccaggttaatcttcctacaggctgcacyggccagtgaccaggcacgttaggggtttcactcctgggagaaaggggctgttctgatggaggaccttggctcaaaagccccttccagattggttgaaattttcttagaaccacagagcagcccatggcattcctcagcacttttattcctcctcccactccatctcccttccctctctccttcatgggcgccagacctgcctcrgggtctgctggctctcctgcctcctcctgctccttccccatcatccctcactggtgtttccccagtacatctcttatccatctcatccctgcttgg

SEQ ID NO: 1396 - DNA, 600 bp, Bovine  MMBT17177
tttatcacaaaaaaacatctcaatgattaagacaggcatttctggtgataaaaaagaagggtcaagacttaaaaaaaaaaatcaagaaatctggccaaagattactagtttatattttaatgttaccttccaaacattcataggacattttgagatgtttactaccactactttatttcaaaatgaatttatgtaagcttttagaaattcatgctttcaaatggacatgaaatatgtcaaatgatgctaaagaatggctgtaattaccatatctgaaaacagactaggacattaaatttycaaatgctacgttcaaaatataaagtgctttaaatctaaaaacacacatgaaatgatattaccaattargaacatctgtgcaggagctgtatacttatttatttgcaaaagtaacttgaaatgtgagagtttatggaaaaataattatgctattcatttcatcctaacaagaatayatagtatgggaaaacatcttccataaaatgttaatgattaacacagacattattaaaacttaaatattattttgcttccaatatttcagcaccactaactttaaaaaaaaaaatgtgtacttgc

SEQ ID NO: 1397 - DNA, 600 bp, Bovine  MMBT16732
atgccaatactgtcacgtatttgtctacctataggaagagccttgtgatgcaggcagccgcagaaatatacatgctacttactccctggttcacgtttttcatttttctctaaccaggggtgcgtcagctcgaaatcatgtgctgctttggctgcatgtcggttctcgccaactactttgtgttcatgactttcttcccagcttgtgtgtccttggttctggaggtaagagctgttcttatttatggcactagtagaagaagaagatttctcattacgttagttcacctaaagacaatcrgcaccttctaacgtaacactgacttcctttgtagctttctcgggaaagccgcgagggccgtccaatctggcagctcagccattttgcccgagtcttagaagaagaagaaaataagccaaatcctgttactcagagggttaaagatgattatggtaattacatgatttcttttcattatctttggttccaatatcatattctgcttttcagttttttttttccccttcttgtctttctacaacttttggctcttgcatggatattcctcttcctttttcccccccctcttatctttttcct

SEQ ID NO: 1398 - DNA, 600 bp, Bovine  MMBT18193
cagcagctggcaggaacctgcctaaataaatgcaaagagaccccccctctggaagctgctcttgccgcgtccccatccaaatgttaattttgccagggccttgataaatcttcctgtcgcctccacccacctgagacatagatttcatcttattgagaggtgacacttctgccctttggtaccagctatcaatttcaggcggcgcccagagtggagagagatgaagaaccaggttctgctaaaccgccttcagccaccccatcctttccttaaacccccatggggccagcccacctgagrcattgtcacctacccttccagaagaagtactgggaccccaccactattgcstggctgtcagcaattccatgctcacctgcctgactttcaactgccaacacctgaacctcttttttttttttttaaagatatgtgttttgttcatatttttaatatttatttatctggctgcaccaagtcttggggcatgtgagatatttgtctgtgggctgcgaactcttggttgcagaatgtgggacctagttccctgaacagggatcaaatccgggccccctgcattgagagggaggagtcttagcc

SEQ ID NO: 1399 - DNA, 600 bp, Bovine  MMBT16736
taatgcaacattgcaaagcaattatacttcaattaaaaaaaaacttaaaaaacgaattgtaccaggaaaccaaaagtataccagagaggtgggtatgacacggagcaaggactcgatgaggtgatctgcgccagagccaggtgcattaggtcccagaaaaagcagcgagcccagggtgagcgctttccagatcagaagtgtgaggcctctcacagccccagcaaagccacggcctctgcttggcttgcatcccactaccgactgggggaaactagggatggtcccacattgcccactatrtccatcatctctcagagaccgctcacacactgcgagcgcactcagacctaggatggggttctcgtaagggactgtgggctagtctcttagcttccgaagcctccgtttcctcatctaaagatggcattatctgctttcataggattactgtgaacagcaaattagacaatgcctgtgaaacacttagcccagctccaggcacaaagcgttcattgagcaccagctatcattgctacatcatcatcatcattatcctcattttcattaggatactttgaaggtgagtgagtgcaatgtgac

SEQ ID NO: 1400 - DNA, 600 bp, Bovine  MMBT17942
gatttaaaatagcattgtgaagtaactatgctccaataaaaattaattaattaaaaaaaacaacactgtactcagattttgtcctgttgtattactccaggttagttacttaaatttgctgagcattagcttcctttcgtgaagtatggctcctatcccaaagggtgttgtgagaatcctgagagtctaagcacacacactgcattgtaaagagtgcctggcattctgtaaatgcccgttaccgttgccaaaatacggtgggcttggggggcagatgtcctggggagcagctggagaacraagcttgagccagttgtctagtactctgagagttggtcttcctcgtgttgcatcttccctttgggctgcagataaggccttgactcagctttgctgcactaggtcctggaagcacctagtctcagggtcttttgtgtctgtcacaaggtaattatttagtacctgtgatttactcaccaaatagtggctagttgatttacttcaaagtctccaatcctgtcctagatcaatcagatcaacattttcaagagggttcaaaaatcctaattcttaggtaaagctttcaaaagtgaacaaaam

SEQ ID NO: 1401 - DNA, 600 bp, Bovine  MMBT16471
atgacttcaggcaacarccatctcgatctctcagcttcctccagtcaggtgctggcctggctcagcttattctctgccagagggcttcccaggcggatcaaggtgccagccaggctggggtcctcctctgggttcaccactgctggctgctgtggacggaggccctggctcctttctggctgtccatgggggcctccctcatggccccactttctcacagcccaggaacacaccctcctgctgctgtgaccaggtctgatcagagaagtgattgccccaccacccctctgccatgtaatrcaaccccatcaagggagcagcttccctgttgaaccacaggctctgcccattttcaagggaaggagatcacctgggctgtgtgcccctggggacagccgtcccgagacgtctcagaattctgcccgctgtagcctgcaggtgtctcggcattcctgagggcttccgatcaacagccctgaactcttcattaattatgaattttgcctagcaaccattgccaagcaacaactcttcagaaagaaatgttcaaagaatttgttggttgctgcgtggtggagatgaggaaatgagtgtcagcgg

SEQ ID NO: 1402 - DNA, 600 bp, Bovine  MMBT16404
caggccatgacacaagtaactaaggaaatgaggtcataagggtgggactctattcccataagaccaacgacctcacaagaagagacaggaaaggggcgctctgtctcactcaggggtgaagacgcagcaggaaggtggctgtccacgggtcaggaagagagctcccaccagaacccggccctgcaggccccccgatcgtggaccttcagcctccagagccgcaattaaaaataaatatcatctggagaactttgctacagctccagacacaacagctgggtccagtccgcagtcagtaartatgtgtgacgtcgatgaacagtcatcctacggcccctagtgaggccaggagcaagctttcataacacaaacggtacgttaatcggattagggatgcagagtcagacctggaaccgactcttcctacctcaaaaaccgaccgggagagcaccgccccacaggactgtctgctctgggggtgagtcctctgcgatggccggtacagtagccatgagccacacgcatctgctgagcacatgacatgtgcccgggatggcagagcaacggatttttactttgattcctgttttttcatatatt

SEQ ID NO: 1403 - DNA, 600 bp, Bovine  MMBT14358
gcaacttcaggcttgtgaatgggccagacaagaagctggttcccttgtctagaggcacaagagctcctccattcatcctcattcaggctttctctaattccttctcatttcctcattgggaacctggggctaaagagggcttgtgactagatcctgagaggaataactaagtactttacatacttaattgcaccaaaggtaaattaataacatacttgaagagggtgaaatgagctctttcacagtagctagattcagaaggactcaagaaagacagtgatgaggtcttstgcctgcttrrgtctgtttgaattcagcttttgctcgtggtctaccaggcccattggagaactctctgtgagctgagggagcctcctcaaacatggcctcccacaaagttcatcccaggggctgtggatgagcttttaactgtggagttaaaaaatactgacccaggtataggttttcagtgtgtaagagcaccacagctatccacctggaaagaacctttccaaaarcctagggcaggagatgatagccttccaaggagcctaaatatcagggaaaaggatgaaatgaagcagcaagatcagactaaaa

SEQ ID NO: 1404 - DNA, 598 bp, Bovine  MMBT17144
  misc_feature (1)..(52): n is a, c, g, or t
nnnnnnnnnnnnnnnnnnnnnnnnnnnnnnnnnnnnnnnnnnnnnnnnnnnnccgcacagtgcaggatgtagggccttagttcctcactgagggactgaacctgtgcctctgcatgggaagtacagagtcgtaactactaaaaggtgaattttaaataaaaaggctcagagcacargcctcaaattgcggaacccatgcttgtacctggttgtgcactggtccccagtatttcttccattactgtggctctaagatctagagaaaragggacatgatgacattgttttcccaccaactcrtcctgtgttccccatctgtatctctccacatagccagccctctaggtctaacctctgtaatctgtttctacctctctgtcctcttgtgccagagaaaatagttctttttcatttaaaccttagaatatgacttctacatgagatacccctgtgaaactgttttcccaacccggtgtagcttcctgccctttgtttgaagagtgaaacaacacggactttactttttgacctttgagcattcatgagggagacagaggagcaggcagcaaggaggcctgggagaacgcaggcccataaa

SEQ ID NO: 1405 - DNA, 600 bp, Bovine  MMBT14357
agctggcaaggaccaatggacctgcattgatctcagcttattttaaagaatgtgtggttaagaattttatctgagttgtctcacctctccctaccttatcaccctcaagcaaactgtcaggttgaaccaaggcttcctgaagcactttgttgaagatcggccagtagggtttcccagatttttcttctctcaacatgtcactccatgttcagcaacaggagttggtcttgctgaattactaatgaggggatgtctcaagacttggctccacagtgttcctctcctttcctttcctttcartaaatatctgttaagtacctattgtgtgccaagaactctcttgggtccatggaggatgcaaagatgaatgagacaagtctcattagtaggttaaataatcagcttgaatataaggtaagtgaaataagtgttaaaccgaagtataagcaatatgttgtgggaacacaggtgaaaaaaagggagacaggaactcactaaacactcagctatgttgtcaattcctgtaacatacgttatcataaagattaattctgactgggggaatctgaaaagtattcatgcactaggacatttaattgg

SEQ ID NO: 1406 - DNA, 598 bp, Bovine  MMBT18219
  misc_feature (1)..(118): n is a, c, g, or t
nnnnnnnnnnnnnnnnnnnnnnnnnnnnnnnnnnnnnnnnnnnnnnnnnnnnnnnnnnnnnnnnnnnnnnnnnnnnnnnnnnnnnnnnnnnnnnnnnnnnnnnnnnnnnnnnnnnnnnttttctctgttaataagcatgtggtctctaatgtgagtgtcccttgaaaataacttatgcttttatctgtatcttgccattctaaggctcaaagatacgggatgatttcaggctgacgtaaggtgtcctagcttaatgatgagaggaatcacatttgagaatgccgtttctttggctgtccrcagcctttagtatgcccgtcacgtctctcctgaagagtgtccggacatcccrcacattgttcttccatttcaatccctctccagcttctgaagggaagtcacatgggtctctcactgtgccctggatccagctcctgtggcactggctgcctgttcctctggtgctgaaacggtcttcacattgcccatgattctccttgtcctggggagagcattcctctcccagccagctgacaggctttcttcatggagaacagagcattcatcctcactccaaggagtctgtctctctcagttg

SEQ ID NO: 1407 - DNA, 600 bp, Bovine  MMBT14467
aggaatgagaggccaggaatgttggagaactgaggctgaggactggggacagggattggaggggtgtttagaaccttttctaggaggagggctgagggatgcatcagtgagctttcccgacagtcccctggtggaggggccgctggaagaaggtactgctcagcccccgtagcagccctctgtccctctgcccgcctctctcccatagcaacgtccaaggagacagccagaccagcatctgcatcaccattgagcctgggctgctcttgaagggagacatcttggtgagtcgctcctccrtctcaagctctcccctgcccccaaccgtttatttttttctttcttttttcatcgtgctcccctcctgtctctttggataagtgtgtccctcctggtgggccaccagccttgggggcgttgactggctctcaggggccctgcaaggccttccagcctggaaggtccttgtccatccacttcctcacagtgggatatgccttgcctgggctttcctcttgttctggagcacctccagggaaatacggctctgtgtgagctgttacctccaggcttcccgctggtgactgggactgcctcaat

SEQ ID NO: 1408 - DNA, 600 bp, Bovine  MMBT16615
tcttgcctggagaatcccacggacagagcagcttggtgggcttcagtccacgaggttgcaaagagttggacatgactgagcttgcacgtagttcagccattctggtgagtcactcagtctttctgggtctctccatgtatacaggttattcaaattctatttgtttttcttctgttagtcctgcctcatatcaatttaattcttagaccagccagaagaacctacaagggagaggaaagttcttctccttccccacagaggtacccggcggtgcagcttcccttggcttcacagaccacrgtgctctgacatctcagtgcagcagagacggtccctgactatggttccactcagggctgtaactttacgatggcgcagaagggatatacgttcaatagagaccactcttccgattttgaattctgatcttttcccaggctggtgatatgcagtacgatcctctcttgtgatgctcagccctttactgaaaacacttatgagcaattgctctaaagaattcacaagaagagggcttccctggtggctcaatggtaaagaacccgcctgccaatgcaggagacaggggttcaatccttgatc

SEQ ID NO: 1409 - DNA, 600 bp, Bovine  MMBT14486
ccagagaaagtggtcatttccaactgggctgttcttgtattgctgtggtgtgtggtgtgtgatcatagtagggacaaatccaggtggtcacttctatcatgatgctccatggatagttgccaggattcttattttagggcttgattctttggccccatgactgcaacgtgtgtccaccaatatgtttggctgaatcttcttaaccgtgttgggaactggtctggcctggcctcctgtagggccctctttctgtggccaaagatgccaatacaagtagtttcctacatgcttgtggcctcractcccttggacgacaggctggccatgcagtgacagacctgcctctcagtgggagttttcaggatgtctaatcggatggaaatctgatctggatgcacgactggccttggcagttggatggtgcagaaacccaaatctgccctggctttactagctcataaaatgaccaccgccatcagtcctgctttgtgggcccattgtcttctggttggatggcttgggttggatccatttctcaggaacctaaaaaagggaagcagtgctaccaggatgtcatgtggaggcacaaacctggagctc

SEQ ID NO: 1410 - DNA, 600 bp, Bovine  MMBT16800
cttgaccctacggagagcctgacccttgcacctgccggtctccttcagaaccttaagcgagtggcggaggtgtggatggacgagtacgcagagcacatctaccagcgccgtcccggagtaccgccacctctccgctggggacgtgactgcccagaaaaagctccgtagctccctgaactgcaagagtttcaagtggtttatgaccaagatcgcctgggatctgccccaattctacccacccgtggagcccccgggctgcagcctggggtgaggtgagtgtgaaggctagggcccrmcacrtaagtaggtctcaagtcaaaatgcacgtgcagggtccacaatttagagaaaaagtggtggtaacacaacactgtaaatcaactacatttcaataaaaattaataataaawaaaaaaaaagcttagcatcatctagaaagtgccagtagaggtataacatataaaactttctcctttccttcgctggtctctcttagccttggggtggtggtttttgtttgttcactatttaatgttacaagtagaaaaaaattaaaactttaaattattagcatgaattttactattcatctttatgttc

SEQ ID NO: 1411 - DNA, 600 bp, Bovine  MMBT18263
caaggccccaggagccccggtctctccagctaaagaccagagaaaccaggctgctgcttagaacccatgttggccccctgcctgccctcacgaggctccatcaccatttgtaagatcaccacccccaacccccagctttgctcctcttccgatgaactggagctgtgggagcaccgtccccacacagactcccagctgggaatcctccaggggagtggaagcagctcgggtggtttgtaggagtttgggtgatcctgagagatgctgagagagcagagactgagggtggggagaaaagcrgtctgcgaaggagtctcaaccaagaccccagacagattctggggctgcagctctttgccaaggaggggcgatggccaaccccatccccttctcccaggcctgtgaagatgcagcggggaagagcagagggaggggcttgaggtcgcctcttgcacctgcagcagcatccgctcaccaccaggcgtgaacagccacggggaagtttgttctccatgtagagaacctccctggccgtttgtaatggtggccatcaacctgcgatttcaaatctgaaagttaaatcatagccaattgtcacag

SEQ ID NO: 1412 - DNA, 598 bp, Bovine  MMBT16420
  misc_feature (1)..(140): n is a, c, g, or t
nnnnnnnnnnnnnnnnnnnnnnnnnnnnnnnnnnnnnnnnnnnnnnnnnnnnnnnnnnnnnnnnnnnnnnnnnnnnnnnnnnnnnnnnnnnnnnnnnnnnnnnnnnnnnnnnnnnnnnnnnnnnnnnnnnnnnnnnnnnnccgccttgagaacagaacagtaactgtgggccctgcagtctggcctcctgatgcctgtcccgggctccccagcctcaccgacatcaagactatttggcacaaacctattatgggccagtgctgttcaggaggacttaaaaattgacagaattgaccagaragggtaacagcctctggttcatgcccygaggcaataaggtccatccggtcctatgtgctccccagactcccaggaggacccctgccttgcttggcccagagcctcggtcactcacttgccatggggcctgccccagtaccactcgccctcgtaggtggcctggcagaagcggccctctgcacggaaggtgtatgctccacagcggcaggtggggggttcagaagrctccargcccgctcccagcaccgggaagtccttcttcccacgcaaggcctggcacacagcctgggtaaccttc

SEQ ID NO: 1413 - DNA, 600 bp, Bovine  MMBT18137
tttctgaggattatctcctctggtcctgcgtgggccctggtgtcacccagatgataacagatgtgagaacttgcctgtggcgggtgggaagtgacgggtcaggattggaatccaagcacttggactcgtggaaaatgagaagcatagtccttatgaagggcgagagaatgaggcatggactgtgacttctgggtggctggagctctgtgaggcccagaaataggaagcctggttggcattcaaacactggcttgcccgtgaaccagcttagccgaatagtaaggaatgtctgaaatgtcrgaggaagaattaagtggttggaaaagtggtaactttctcctgagctgttgtcagcctttctcaggtttgttttgtcttttccaccacagtgggcagctcctgtaagagagcttgcctaggccctgactgaccaagcgtgtgtgcgtgcttagtcgctcagtcgtgtccaactctttgcgacaccatgaactgcagcccgccaggctcctctgtccctgggattctccaggcaaggaaactggagtgagttgccatgctctcctccaggggatcttcccaacccagggatggaaccctggt

SEQ ID NO: 1414 - DNA, 600 bp, Bovine  MMBT16789
catcatttcattcctttttatgggtgggtagtattccattctatacatctgccacatcttcttatctgttcttctgtcaatggatatttaggttgtttcgatttcttttgactattgtgaacagggaacattggtatcatctgtcttggtatcacttcgaggcttcccatttctttggcagattttccctgacaaagagacaagagggccactaacagttctcatggtttcaaatccagaaagaaaaaaatctctcatcacaacagtccaatacagaaattggttctcagacttcactgrgtcccgggcccattcctggatcaacacatcacttgggcttggtggcttggatgatctcataggtctgtctagggtcacaggttcatcactggacgcagggttggtgtctgtctaycccgaatcctgggacctgagattaggggagggctgggttctaaagaaaaactgaggtcctgttaccagaataaggggtaatggctgccaaacagctatctcccttggggtagaaaagacgaagagcatttgagcctgagtgaacctggcggggtgggggggggggggcacaaatgggagtctgca

SEQ ID NO: 1415 - DNA, 600 bp, Bovine  MMBT17996
ccgaccagggatcgagcccgtgtctcctgcattggcaggcggaatctttaccattgccaccagggaagcactccctgactcactagggaccctcaaatcaggtctgaggtccccttgggcaccttgaactcaacatgtccaacctgtctgagcccccagcacttgcagaaaggggtccttgcagctcaccacccaaaggttaattctcagtcccaccccctgtgccttcttggcgggtgctctgggctggggattctgcagtaaacggctcccttgcagctgaacaagtcaagttctaartgggcccacctggagcataaggtcctgtcttgctcccattttgcagatctggagactgagggtaggaagctcacttggggtcacagagctgggaagcaggaccaccacgggccttggggcctctgctcagagcccccactgcacggccctcaccctggggtgaacctcactgaaccctctctctagaatgaatggaccgcctactacgaggagattgtgtatgtccttggaggagatcgactacatgatcaggaaactccctgagtgggctgctgacgagcctgtgggagaagacccccc

SEQ ID NO: 1416 - DNA, 600 bp, Bovine  MMBT16667
tacaacactctttaatgtcaatatccactttttcagtttttgtgaagtttggcctaattttttttttttctttcagtggtgggcttttaagtaatttctctggaattgtattttcaaatatttaggaattcattacatttcaaaacttataaaaataagaaaagcattaatagatcattgctttgggtggtgtgaagctgccactggaaagaggagcaggtgggaagcagtaggcaatttgtagctgggaaggcttcctgtaggtggctcccatggtccacactgacagacggacactcraggctgagatgcagaggtccagatgttagctcgtgacygmtgttgctattatgtattgatacatatttatctggaagaacaaacttactcccaataccgcagcaaagtagaatattaaaatttcctttttccagtgcaactttaagttcaatttcaactttgcacaccatgagctatctcagcacagacccaggcatccctccagacccgyactgaacatggcagtggggaaaatttgccccaaccccagtgagagcccaagacacacggaagccaactccagcctgaaactgcttgtaa

SEQ ID NO: 1417 - DNA, 600 bp, Bovine  MMBT17943
tctgtgaccttatggatggtagcccaccagtctcctctgtccctgggattatccaggcaagaatactggaktgggtagtcctttcctcctccagggaatcttcccaacctagggattgaarccaagtgtcctgcattgcaagcggatgctttaccttctgagctactagggaagcgctctcctcttcccaagtcataattcagggacaaagaaggactcatttcagtcatgctttcatctgacttagtctcccggcccagggaggggaaggacccgatgtagaattaaacatgtgcagarmccagaccagctctttaaaatgctttagacaaaagcccaaacagaacagaaaccgtctaatccttgagcttatcctctcccactggccttgtcctctttcgaggagagagtcatttataaaattcagttcaatgaggtttccagctaattgaggctttcctgaatatcctatttggtgcattgattaagcacctctctgtgctttgtgccatggagggctgggaggtaaaatagcgaacaagacgaggcctgtgccctccaggtgctgacaactccagcggggagggagacagacacaca

SEQ ID NO: 1418 - DNA, 600 bp, Bovine  MMBT17314
tattttaagagaagcccccagtscatatcagaacagcagaggtgtctaytccacattaragtccttttcccttcggcgtcttcttggctccctgacagttgtgaacccttttttgtatagtgtctgtccctggtggcttctgggcagtcctcagctgctctgttactgcccagggcagcagcaagcayagaaatagcgttttcaaaggaagagaagaraaaaataggataaatcgcaggtacagaaaagcaagcctgaatgctgagggctgttacaaaggtccacctgttgactaagccrtgtccagggaggcaggggttggggtgtcctccactttttcttttcctctgactccatggactccatttccccttttcactctgcttttctgtctgggttttcttagcgagttggtaaagtactttatttatttatttattttttggccacgcagcatgcagaatcttccggatcagggatcaaacctggtcttaaccactggaccactagggaaggtcctgggagagcactatagttcctataattctgtctcactgagccctcaggacagtggtgtgcagatagatgtttaacaacaga

SEQ ID NO: 1419 - DNA, 598 bp, Bovine  MMBT16835
  misc_feature (1)..(173): n is a, c, g, or t
nnnnnnnnnnnnnnnnnnnnnnnnnnnnnnnnnnnnnnnnnnnnnnnnnnnnnnnnnnnnnnnnnnnnnnnnnnnnnnnnnnnnnnnnnnnnnnnnnnnnnnnnnnnnnnnnnnnnnnnnnnnnnnnnnnnnnnnnnnnnnnnnnnnnnnnnnnnnnnnnnnnnnnnnnnnnnatgatgggtgtaaaatgaaaaactggaacagggcaggttttttcctccacctcaacccccarcacctctcatttatcagcaggatgatcactattctccttctaggtaccactcatggggagcatcragaccttacagaaacttgcagaatgaacaattgttggcatctccttgggaagaagagaaaaaagccaaagctttgatagattttaaactgtagccctcctgggatgccccaaatggctcataaatacagctagtagaatattgcctatgtgtattttccacttacactcacctttgagttctgctctggccccttgagaatcaatacacacaataacagaattgctgatgtattaatcttttctgctgatctaagcactttttttttttttcctaccaaagtgggaatacggctgggg

SEQ ID NO: 1420 - DNA, 571 bp, Bovine  MMBT14349
cagcatcacatctccaaaattagaaggcacactaaccctcagcctctaaaacagatactcaaacacatttatgtctctgggacttagtacatagggtaatacagaggtaatacaatgtgcaacccacattgtagttgtcatcaaatatctaaggagagacttagtgacagcaaaaggaaagaaaatagacagagaatacatgggaaaagagagtatcttcctggtttcatcctcagcagtatgtggtctctctgtgccagtagtcttgactctatgacctgtgaactttaattgggaagrtactacgcaagtggttgattgtaccatcatgagtcccaacgccacatctgtggaagtccatggcctggctgttagtgctaatggagattctcttagaaacccaatgagaacacattggttttgactgggtgcttctctccaaaactttgcatatttttcaacatttccaaagttgactttccctaatgccttaataatggaagatacaaggcccattccattactcatttttttgctgaaataaggttcacccttatctgcatatgagttt

SEQ ID NO: 1421 - DNA, 600 bp, Bovine  MMBT18245
cctctagcactgggttgtagcaacaattaaacgtgaatagtgagaaccgcgcctgacacatggctttgacgctgagcccttaacaaatgtcacttgatcctcacaacaaccccatgagcagacactgttactatccccattttacagatgtggaaactgaggctcagagaggtgaggtcactcgtctgaggctgcgcggataataagggggcggggaagaagccccatgtctacccacggtccataccttgctgatggcaatgcaggtagacaatctcctccaggcggatggtcatggcrtagtcccagtagacactggaaggggcgggagggtcaggcttgcaggatgcctgtcccactcgtcatggcgaagccccacccacaggctccttcaccctcctcaccaggaccacctaacccccaacttccttgtcccgacttcccagactctatctccccttcttctgggtccagtatcccagttttccagctttccctacacacacatgtctttaacctcagtccatgtggctgaggctgacctctcctaccctcccccttcaggactccaggaatgggcacctgaccctggcttggctg

SEQ ID NO: 1422 - DNA, 600 bp, Bovine  MMBT18227
ataaaacatctaagtcctgcgtgcctgggggctcactgtaatgtttgtaataagtagaatgaatgctgctgcttgttggaactcaggcctttgagcccagggtccttggcatcctctacgtctgaaagtgttcttgaacttcagtactgtttcacttgcaccaacagaacttgtctgggaaaatatctaataagccatggtaagaaacatctcactacagctgtaccgcctgccttctctcggccccaagttatccgatcttgctcttgtcagtgaggygtgtcgatgaagtcaaacccragtgtgtgctttgctttcgagccccaactgakgacagccgtgcccagttgatttaatgagctgggggcagataaaggcgaggatttgcaatgttcgaagtgtcttcccaggtgagaagacaaagattgctgacatgcctctttctcacagcccgggtgcccaacccgggcctggaagcacatcaaaggccacacttmccttctttttatgctctgggtctgatctctccctctctgattgcatgcctgcgctcctcacgagttgaacaatggaggtattatgctcttgggagaagaagga

SEQ ID NO: 1423 - DNA, 600 bp, Bovine  MMBT17536
gtggtgtttttgctttggttccgtctcttcattctttctggaattgtttcttcattgatccccagtagtatatggggcacctatcgacctggagagtttgtcattcagtatcctatctttttgccttttcatactgttcatggggttctcagggcaagaatactgaagtggtttgccattcccttctcaagtggaccatattttgtcatgcctagttgtagatgattagggtttcatgcctgggaaataaaataaggacctcgtaaccagatactggtgtatggggatggttttcaggartaaagcagaattgaggcaggtaataggtgtcaaaatgggcagcttagcctttaatgcctagtgtttctggtttgaggaggagtaggaaggtagaaatgtttcatgtttctccttaaagtctgaacagggcagagcctaggagctggatatgaaggtggtagttatgtgactccagctttggagagacaagggatgtagtggctaggacaccgggagagcttgatacctagagggaggcatgcactatttatagaaggaacactctgcatatgaatcgtttctgtcttttctttttcagct

SEQ ID NO: 1424 - DNA, 600 bp, Bovine  MMBT15928
ttaccagctacctgaacaaattgaagttctgttagcaagtacaaaggagaggggagtggctgttaggcaactgtcagtatctaccaataaactcaacaaagactagtttagagaaacaagtagcctgctccaattttgatgtggaagacctgagaccaagagatttccagagcgagccattttctcagtgcccacacagttgcacctaagggtcctcrtctctcatttgaaaggtcaggtggattatatgggccctctcagtttggctttttctcagcataaaggaagagtctggtggcrtgtgggccctctcaatttggctttttcttagctgaaaggaagactctggtggagtatggtaaggtctcattctgttactgccatgcaagtagtttctccctgtggctctacttcaaggcttgaggtgggagtgaatggtcggcctgtttctccatggcggaaatcattcctgcctttggatctttgattttcttatatggtttctgaagtagttctgaaattgaattcacttccagaggaaaaatatccagaagaagaaatttccaaaagtaagttatacaaagcactattaattacttg

SEQ ID NO: 1425 - DNA, 600 bp, Bovine  MMBT15369
ctttgggaggcaaaccacaggtttgtggaaagttcactaacaattcctaggtatcaaaattaactgccaatcaagtggtacaggaattacaaaaacaaatagcagaaacaaagaacacttcacaaaggaattatgtcccctcaagtgggggacatcttcagacaaaggcgaggaggccaagatgtgcatggcatgattggacagtggggagtaaagcccagacacgacacacacacaccccctcagcaccttgtattcgactcctctcttcacaggcccgggatgcrgggagctgagccrcacacacaggaactctgggggccaggctgcagaagaggctctctaaacctgagtgggaatcactgacactcaagcccccaacccaaacatcatctccagcttcgtgtttgctctaaacaactatttaagcaagctgtcatccacagaagctgcacgtgtgaacccagttcgagatccaacaagcattttgaaagaccccaaatcacactggttaaaattccaaaactgtaaggaytgtgggattatcttgggtaatcttacattctccaacccctcatctctcctctttttaaaatgaaa

SEQ ID NO: 1426 - DNA, 598 bp, Bovine  MMBT15387
  misc_feature (1)..(41): n is a, c, g, or t
nnnnnnnnnnnnnnnnnnnnnnnnnnnnnnnnnnnnnnnnnggttgttttcttctttgaaccagggtacctgaaagattcttctacagatgaagaaactgtgactcaacacactgtgatttactcaaggccgcattactaagagcaaatggtcacaggattagaatcaagatcttttacacttctaattcagagaaattttccttatgcccttccatctagtagctgtcacattgcacacttttccatatactacatgaaatcctgaaaggcaagaggatgggctatgggtgtctttggraaactccttaccaatactttttctgagtagagctgactgcaggtttttggggagtgtttagattaacaggcctgaggacccaggctgaggccaccagtcccgttagctgttgagtttttcagagtgacaycctggcttcgtttcctaaatgcatgcaacttgaggtattattattgtttaaaattaattgacaaaagaacacacttctgatcatctgcattgcctgggggagaataatagagcagagatttctactccctattcctttggattgcactaaatggagcatgcattcaaa

SEQ ID NO: 1427 - DNA, 598 bp, Bovine  MMBT16540
  misc_feature (1)..(130): n is a, c, g, or t
nnnnnnnnnnnnnnnnnnnnnnnnnnnnnnnnnnnnnnnnnnnnnnnnnnnnnnnnnnnnnnnnnnnnnnnnnnnnnnnnnnnnnnnnnnnnnnnnnnnnnnnnnnnnnnnnnnnnnnnnnnnnnnnnnncagttcagtcttcaggagtctacttgcttcctccagtaacctcaacaattctcaaaggtaaaacacactgtcaattctgtgtgactgattcaaaaactatttcagacctgtattacttagtaagaaaaatcaaaataacagcaagcattgtattttaactaagtattccrtaagcaactgccctatgcccagcactgtgctaaaaagtgartgctctctcattcaggacacgaacaaacctaggtaagcagggttatttccttttgacagatgaggaagttgcaatgcagttgggtcaagaaacaataagacttaaccrtagagtcataatcctgactttcttacttcagcccagttcttcttccatttttgccctctttttcatgaccctggggttgaaacattattagttatacgtgagggcttcggaaccatagcaatctggtagatttacacacctagccaagt

SEQ ID NO: 1428 - DNA, 600 bp, Bovine  MMBT15771
cgttgggcagctccttcccgtatcctgtgtttgatgttttctttttcatgaggagagaactgcgggaagaagtgttgtaagaaatctgaacagggacatccctggcggtcccggggttaagactccacacttccactgcagggagcatgggtttgatcactggttggggaactaagatccctcgtgccataaggtgtggccaaaaaaaagaaaatctgaacaaagcagagattgcatttttagcagttagatatacattaactatccccattaaatatgtcatttctttcattgtgaacractgcattattaccagatgaaaggggccacctcctgttttcttaaatcagcctgtaggttgcgactaaggggtcagttagttggttcgggatacctgagcctcacctctgctcccgtcctcggcaggttcacctctgtctagtcagcctgtcttaatcgcygtgcagcgaccactgccaccgacgatcaagcctgtcacctacactgtcgccgcccctgtgacgacctcgacttcccagcagcccgtggtgcagacggttcacgtcgtccaccagatcccagcggtgtccgtcaccagcg

SEQ ID NO: 1429 - DNA, 600 bp, Bovine  MMBT17247
aagttgtgttgctgctgcaaagtcacacattaccttaagctttcatgtcactgctctcatatcaggctgctttctcaaggggagaaggcagaagagaaaagattttttgatacctatcatgttttaggtagtaagctttatattgaaatttaatgcctgtaataaatgtacctgtgttgtcagataaggaaattgagattccaaggttaagacacatgccaaattcatcattctctggggtcacacacctagggaagactcaaactggaattcaatgcaagtaaggatgactattccacrctatcacctgtataatttttttaaaacaaagaaaatattrgaagagcctggaatttctaaagtattaacacatagaaatattgatcaggcagtacacatgatatgaaaacatcacataaaactgccatttctgttaggatgctcacttagactgctggtagagaccaaatgatacaagctttccccccctaaaaaaagagagagagaaagggagacttgcactaagtaagaaaaaaaatctagcaggaggtttgctgactaatattcttcatcttcaaccaaattctggcccatcagccc

SEQ ID NO: 1430 - DNA, 600 bp, Bovine  MMBT17963
gatatgggagagagagggaaaaaacacagtcatttgaataaaaaagtcatatcttttatgtactttatgctatattctgtgtacttgggaaatggctgcatctgtccagagaatggtggaaaattgaatactatgcttcatagtgtgcttcttgtagtgtttccttaaccaaagaggagcagctgttgggtagcagagaaagcactgttaccagcctgagcatatggaactccgaagctttggctgatacggatgtctgggcaacggttgcagaaagactgtcataattgtttgctgtgrttttaggtccacactccaatgttggaagggaaaactttttatagaggcttactttttttttttatatggctttgaagggaattgtattttacttctgacgcttattgtattgtaaaatctctagtctctgatacttaaaggtggaaacttttaactttcttaaaaatccaactctagggactttttagtagtatagcctctcaaataatcttaaagctttgaaaaatgaaatactttcttttatgaagcagttttgggggtcagttttttcccctaaaatgtatgcttttatgttgggta

SEQ ID NO: 1431 - DNA, 600 bp, Bovine  MMBT11464
tggatcaaagggacaggttatacactttaaacttacacaatgttgcatstcaaatgtattcaatttttttaaaaatagcaacaacccataaaataaatgggtaaagcttctatctttggttttctttgaaagtttaatttgccatgcatccaaatatgggttctgttgyactctttggagaaaattgatggaccctctgtcctggaaggagcacaggttggtggttaaggagaggcccattcatttccctccatgacaggaggccaaccacaatggtagctgcaaccatgcttgctcctrttgctatgaacatttgggacactaaaataaattgactgcacaaaaagattctttactttccccaccacatcatcttaatggggaattcataccactttgagctgcatttactgccggaatggaataatggcttctaaaattactttagcacataatgaattgtayctaagtttactgggttatcggacaacattttggttctagtgaaggccattttccagaaggccttggactctgaatcaattattcattcattgaattcagagatgtgaatctttcctttagcttgaaatctccatc

SEQ ID NO: 1432 - DNA, 600 bp, Bovine  MMBT16734
ccctggctttcctggtgaaaaacaacatgctcacattgagtgctccttgtgggacactgaaatgccagccccaggtaaaggtaggaaggggcgaagctggtgtaactttctgtaaggccccaggttgaaaaacaaaacaagtaagccaaaaccaaaaaaaaaaagcctgtctctaagatgggcaaatgttaagaaaatgtttgagtttctttttaatacaggtcgtaataaaagctaagatttattgaagagttaacacgttccttgcactgttctgcacatttcctgtgatttagtacrttcaaacccatctctgtttcactgatgaagggagaagctgaaggagagaggaataaaagggagtgctgtcaaaccgcacagaaagcagtggagtcaggatgcagactccagtgatctgacaccagagcctgcccacttgattacggctccaccctgcgggagcccgtactgaagtaaagtatgaagtgctgctttcacagtttccgccagcacagcagtgacattgaaagcttcttggcccttattcctctatcaaaacacatcattcaaagtgatttgacggcatttgtctgaggatat

SEQ ID NO: 1433 - DNA, 600 bp, Bovine  MMBT16440
ctgataaaacttttatctacccttaagttttactgcttagttttctccatcaaaattccattctcactgtaagcataccataatacaaattatctgacttctgtgatgctaattgccattctggaacaattactcaatcttttagacttttcctgcttgcattccatgaccctgttcattaagacatatgggtatttgattttgatctggaactttcaattatggtaataatgccagttctgtttttatatctgtaaatcatttttagttctcaactctatttggaagcatgctcctctrcctgcctgtaaacacttgaccctattcccaaatcagacccctggttatatactcactcctgttttagtccatctgccaactgtcataaaaccctgagctttatattcaarcagatctggcatagggtttcctaatgtttactaattcaagaggctttttccaagtgaagagacaacgattttgtgaaagataaaggatgggtagaaaactaggcaagtaattggcttatatatctttgtttcagtatgtgcttactgaaaaggactgcttacccatttacagaataataggccatagatt

SEQ ID NO: 1434 - DNA, 598 bp, Bovine  MMBT16430
  misc_feature (1)..(86): n is a, c, g, or t
nnnnnnnnnnnnnnnnnnnnnnnnnnnnnnnnnnnnnnnnnnnnnnnnnnnnnnnnnnnnnnnnnnnnnnnnnnnnnnnnnnnnnntaatacttccttaagttagggctacctttcaaactttccccatttattaaaaattctttaaggccattactatgattccatagtattttgagggggaaaagaaagcccaggtttttttcagatcaataatacaggagaggtccagatccctgacttggctctgattaagtgaacaaggtgcttgttttctcgcaaataaaaatgtggtctttgratacaattctttcttcagtcccaggaatatggcttcagtctcctattgaaaatctaaagtgttccagtcagaacaacagtagacttttctcttccttgagtttggacaatgattgttctccttccagaaacagagagagaaaagggaacttggaaattcagccaggtgttagccaacctccttggggggttctcttctgccaggtcctgaaatcccaggcctggaacaggccccactgactttttccaaagtttggcctttattagagaggttgaggccagggatttttccatgcaca

SEQ ID NO: 1435 - DNA, 600 bp, Bovine  MMBT15154
gacacgactgagcgacttcactttcacttttctctttcatgcattggagaaggaaatggcaacccactccagtattcttgcctggagaatcccagggatggtggagcctagtgggctgctgtctatggggtcgcacagagtcggacacgactgaagcgacttagcatagcatagcataaggactcaaatgaaggcaacttcctcttcactaagggacagtttggggtaaagaaaaccctgccatgtatcccagcatgtgtcctcacaacttgatrgttgagtcaattaacataatttgargtgatttttttcaagccttcattactgttgtattttaaattgaacactgtcttccccaacacacttaggggaaaaaagtatgttctatctccccttccaaatgttcaaaagcaagtaagacagtagtcaaaggccttgtaagagatacagaaaaggaaaagaagaggattctcggtttccccagaaatattctcattactttttactaagtttatgaagcctaaggtcctgtcctttagatgtttcttaacttgaagaatcatagagcatgaatgctactttacatcatttggtccaagg

SEQ ID NO: 1436 - DNA, 600 bp, Bovine  MMBT16816
ggttcagcaaatgactgaaatgagcaaatcagagtctttcttaggatttttgtaactataactggagaaagagacctagttcctctgtgattacaaagctggaacacgtgatgaacacgagtaagtggtcatgctttcagttgtgtggctcaagccgctataacggaatggatcagaaccattttctagaagggtaaatggcatctagcttaatttaagcaatcaaacaaccgattattgggaccttcctacatgcctaagagaagacacagaccacagctgccagcaatccagttaggragacaaaattaagatatatgaaagaaaagaaaagatatggcatacaattaaatgctaattggtatgggtcatatagtcattgctatgaaaattctaaagaggaagaaagcgcttcaagctgaatcaggagggctgagggataccatttggctttggaaggatgcgtatatttgatgaaatcaacgagagggaaaagagtctttgcgttgagggaagcaaaggcaagaaggcagaaatagaatagtgtgtggggctkgtgagagggctctgggaacgtggtgtatgagggtttggggacat

SEQ ID NO: 1437 - DNA, 600 bp, Bovine  MMBT15307
ccgagcgccataccttcccttccttgggcctcagttttaactttgttattactatttaaaccctgcctactttccaagagaggttttatattttctaattacttcctttattgaatggatactatcgtgacagttacaacagaagtaaagaaagtcacaggagagtcctactacctaaaaactttttttcttggggcctagtttggaccttatgtatctattatatctcttaagggggaaaataaataaatatatgaatgacattaaataagttgaatgcaatcaaatagccaaatgtarctggtgtacagtccaggatgagagcactgatgttaggggtcgggcagatctgcttttgagtctctacccagactcatctctgagctgtaattttctttttcctcttctgaaaayggggagtaatgcctcatggggttgttgtgaaaattaagtgaaataatgaaggtaaagcacttggcaaaatgcctgacaagtagtaactcttccgaaagtggtagctattatcttcatactagaaataagaaaatatattagccaatggaatcagtagatgtactgtaattgartgcccaatttagt

SEQ ID NO: 1438 - DNA, 600 bp, Bovine  MMBT16817
tatgagagaaagaaaggtttcctccttctacatcatctgtgtgactgaatttcccccaggtggagtggggtgaggaggctagaaatattatgagagttacagaataaattttttttttttaggagaggagcatgttatctgaatattgtgctaggttctagccttctggcactgcagcccccttgactacttagaaaagggccaacagtatcttcaagctcctgggaatgtgcctgggcggggcctggctaggctgggtgttccagtgtgtactctcccctaacctatcactagaagacrtagactaaggcatctcacactgccaggaatgtttatttctccagaatcacagaatttaagaggctraaaacaccctgaagaccaagtcactatttttaatatttatttttaagctacagaaccctttgtgttatatayataaacataacaagctgaaaaaatattgtcttgacatttgacatcttaatacctcttagggaggaaactatcattgtttggaaaataccttggtaaatgacttggctgtgacatcagcatgatacgacatacttgggatatgacatcagcaggagccaagac

SEQ ID NO: 1439 - DNA, 600 bp, Bovine  MMBT13605
atatgactgggcttttttcagagccagtcagtctggtttaatcattttgtgctgccgaatacacaccatagactataaacataggtttagattcttacctgtaaggtttccaataaggtacatagataatttttagttaaaaaccgtgtggcctcagatactcatttattcagcaaatatttattaagaaatgagtatgtcattcaatatgcaatattaattttctttcatttttaacatggaagacagctctaccctaattttttttaaatgtcaggaacacggttacttatccaagtrtaaattctacactgcagtaaagctgatgatctcatattaaatagatttaagcaatcttttcttaagtaagcagtcttttcctgatgtattcctgtttgacaaatatagcacatatgctaatttactttagcaacctgacaaaccaagaaaactggtttgatcaatttttwaaatattccactagttctttgtgaactgccatgccaaagggaaataacaagaactgtcttattaaagtaacaccaaggtgatatattaacatgtttaagcaaataaaaatgccctttccttggttcaact

SEQ ID NO: 1440 - DNA, 600 bp, Bovine  MMBT14552
accaactcgatggacgtgagtctgagtgaactccaggagttggtgatagacagggaggcctggcgttctgcaattcatggggtcacaaagagtcggacacgactgagcgactgaactgaactgactaatatagtatatgcagtaacatattttacttgcagttagtagtaaggcatttatagtgtttctaccagaaaagatggatttcttgctttcttttgtctcttcattgtagtcgccttcgtttctctcactgcttgccagcagttgaattatgagaactagtggatggtgctgttratgagaccatatgttcgttattaaatgttagatcctcttcatgttccctgttgttgtcctaaaaaaagtatgtgattgtgtttttcattccatagcctcttttgctttcttgttagtcttttctcctttactcttgttctttagttttaaawtttattrtatamtgttaatagtgctaattttagttaagagtgtcctcaagtattttaaagctttttgtggatgaagaaaagattctaaatgccttgttacgttttttaacgtatattgtttctctcattagtaaactgattttaggaa

SEQ ID NO: 1441 - DNA, 600 bp, Bovine  MMBT11731
ataaaactataatagaaaagatactttgtatgatatcaatcttttaatctattgagacttaatctgtgagccaacataaaaagtccactttccatatgcccctccaggcataaagatggtgatagctcccccaacatacttcaccatcccttactggttcttttaatcctgcccacacctttgtaaatagtttccttattaaattctattcaggtctcctttgggtgtgccaactggttttctgccagaactctgactgcttcatcactgttcatgttctccctttactgtatttattcrtttcaagaattttattctcattttagcagagtttctagaggcaacagaaataagtgccatatgttcaatctgctgtatttagctgttaaatattctttttttccaatatcttttcctatgcagaagtatctgactcttgctttctttgatataacatactgattatctccagtgcccaaagcaaagactggaggcttgatctacaaactgaaaagacaggttccaattcagggacaagcacagaggtaggcaaagcagaagcatcatactgtaaagaatgacaaagtccatatggtgcag

SEQ ID NO: 1442 - DNA, 600 bp, Bovine  MMBT17186
atatatccgttctcccgcatacttccctcccatccaggctgccacataacattgcctgtgactgtttattgaaagaactcttggcttagggtgtttgtgtgagggtgtgtgtagtcagtttacaaagtgccaaggcaaggaatatcttctccttcctttggattcctttaatacctagaatatgtcatgtaggctaaaatataccaccttgtttaccattcaaatgtctattcaatttttgaactaaaaaaaaattttttttgtagattttgagtctttttctttgtcctttgtgttttraagttataacttgtagctctggtggccccagtgggaattctcttggatttggattcagagtaatcttccacctcatctacagactccctggcagtgggatcataggtcagctgttctgttggtcagtaacatgggtagtacctgcctggcagggtgataggggccattagatgagatcatatgtataaagaaccaagtgcagccccacacccgagaggagctttaaaaatggtacagatcagaagtagcagcagaaagtagtgagggggtataaaagtacatttatacgaaaggaagaag

SEQ ID NO: 1443 - DNA, 600 bp, Bovine  MMBT14347
ttagagggaaatccaaacacagaagcaagcggtctcttcaattaggtaatagtttctaggattcaggaggcaaggaagaggagtataaaatctcaagttgctgtcttcaccccaaaccttctagatcctcagaagacggactagtggtcaaaacatactgatatttggcatcagaactgtttttataaagtgagacactcataaataggggaagaagacttaaagtacaatgctgaaggyaaggaatagaatctacagattgggtagagcacttgggttgagcactttcagatttaacartatttgtttactataaatccttttctaatttcttgggcaaacctgatctatctgtacctttgctgtcacctgcatgtacaggactgggcaatcataccctcatactccttgtacaagatactcccatttgcctcaatcagaaggatgctaatgggaacatacttataagggacacaggaaggctgagggacactctgatccaccagctcattgacaaggttctggatgatggcatgattgggagaattgagaccatagtgtagtacccgaggacatactcccttacagtagtttgggggt

SEQ ID NO: 1444 - DNA, 600 bp, Bovine  MMBT16413
tactaaagagacttggtagattaactatgttagagtgaaaggcaccaagaatttgtagttgctatgacatctccttgctgtataactttgagtcatcacttaacttctctggatatcaattacctcacctgtaagaacaaggtgttagaaaagacagtgaccaatctctctcaggtgacagggcaccctgaagcctcctgcagggtcagtggagctcttagtcygagcaggggttaaacagaccaggccacacacaagggctccttaagttgaacrctcctctttgatttatttacaacrttaaagagaattgtgtctggagaaagggctccaatgataaaagtctggacaagatgtctccaagggccattgtgactctgctgttctgtacaaacagctattaaaaggagaattacaccagaacaggatcacttgtgaagtaaggttgataacacagtcagacccatagttacagagcaattagtagcagctctgtctgaaagacttacagcaaagcatggtctcccattgatttctgtagctattagaactagctctctaaagtaccatgtctggcaatcacgattagagctgaataac

SEQ ID NO: 1445 - DNA, 600 bp, Bovine  MMBT12438
gagggcaggaagagaaggggatgaaggaggatgagatggctggatggcatcactgactcgatggacgtgagtctgagtgaactccgggagttggtaatggacagggaggcctggcgtgctgcgattcatggggtcgcaaagagtcggacacgaccgagcaactgaactgaacagaactgaacccttgattaagtaaaaacctgtgtttcacagagtattttatgtttgtttgaaaataatttttaacaagatgcatagccataaaacattcacatttcaggtatacattaytggtttctrgagtgaaattaggatggcagcctttaaaaaaaattcatatcctgattgtagcagagattctttcttttaattaagaagctcaccagacacttgcaaaaaccatcccctaactaggtcccttgtgtctcagaattgcttgtactatgaatgaggggaatcgcttaatacaagcttattagacaaccgagcggcttggaggttccccactagacctttcaataaggcttaatcaaccaagtaagaccctgatgaggctggcaattagacttactgtatttttaaacggagttgctgagtttt

SEQ ID NO: 1446 - DNA, 600 bp, Bovine  MMBT16788
atgaggtagagtctatatccatcttttctatggatgagggaacaagttgcctgaaaattatcttgcctgtgtgtgtgtcatagaagactggggctaaaaggactttagaaatcatttgacttgatgcttcactttacagatgaggaaagtgagttcagagaggttaagtcctatgcccataatcacatagcctggaagtggcagagctgatacccgatacaagattccttccatgttggaactatactatctaccatttggggttaatacacatcaccttggcctctctgtgagtctgargcccagtcttttgtgatttgagaatttgtgccatctccaagtgtgctgtcatcatgcaaccaaatatgattcaaaacaaggctgggggcgggtgggggtggggggcgttttgttctctctgtgcatcagattgatgatgaagtcaaacttcatgactcagaatacgcagaagctctccagcccttaacaactttccccacaggaaaactgccaggtgcttggttaccttttgagttctttgtgggtggcagagaacgcctctaaaaaatagattcgtcctcaactctcccagaagaggct

SEQ ID NO: 1447 - DNA, 598 bp, Bovine  MMBT18285
  misc_feature (1)..(36): n is a, c, g, or t
nnnnnnnnnnnnnnnnnnnnnnnnnnnnnnnnnnnnatagcttaaagatggaagcaatcttagtgacctcaatggatgaacagataaaaaacaatatactaagtgaaataaaccagttacaaaaggacaaaatactatatgattccactgatataaggtgcctaaaggagtcaaactcacagaaacaaagtagaatgatggttgcctaggaggaggggacaatgaggagctactgtttaatgggtccagagtttcaacttgagaggatgaagacattcaagtgaatagtgatgatggttrcacattcttaatgccactgcagtgtatacctaaaaatagttagagtggtaaataatgttatatatattttaccacatgaaaaaattaaaaagcagataatgactctttcatctatatcttagctactatagtaccatrccaagtagttgatgcttagacatagtccagagaaatcttggtttaatacattcaggttcaaatgtaaaatagtgaagctataaaaagcacacaaaacacttggcatcatcacaatgctatttgagaaaatcatttacttagttatcaagccccaatgcat

SEQ ID NO: 1448 - DNA, 600 bp, Bovine  MMBT13717
acaggaaggagtcgacataggctaatattaacttaaaagagagtcaagaaagttaaatgagtttgtgatgatgaaataatacatggaagcaatattgtaataaacattttcaagattagctaatagaaagattaatagggaaagggaaatgaaaataaaaagtgtcatcttaacactacragaataattatacagtcattattgcagccaaattcccactggtttcagtgggggctttggagagaactagaagacatatgcttcagtagcgtacctagaattgcaaagtttatttaaggrataaatgtagaaaaatctaggaggtaataattgatagattttwaaaaaaatacgccatgcctgtattttttagaaagcaaccttttaaaagaactgatacagagatcttatttcacaattggcatgtttaagctgagtacatttgtatgtatcmctaacttttatcaattcatcaggagtctgggtctctcagcacaattcctccatccatctttgctgtgaaactggaaatggatttgtttaaattattgggcttttaatttgccacattttgtctcctgtctgagaagcctgtttatt

SEQ ID NO: 1449 - DNA, 600 bp, Bovine  MMBT16791
cgggctacagtccatggggttgctaagagtcagacacgactgagactgagtgacttcactttcacttttcacttttctgcattggagaaggaaatggcaacccactccagtgttcttgcctggagaatcccagggacgggggagcctgatgggctgccatctatggggtcgcacagagtcggacacgactgaagtgacttagcagcagcagcagcatacagaggaactgaaatcaggatcttgaaragatatttgccctctcatgtacattgcagcattatacaaaataggcagracatraatgcaacttaatgtccactgacagatgaatggatttttagaaagtgcacaccctggaatattattcagtcataaaaaaattgtaatatactacaaaacgagtgaactttaaagacattatgttaagtgaaataaggacagagagaacaaatattgcatgatttcactaatataaagtatctaaagtagctaaactcatagaagcagaaaataaaacactggttgccatgtactgagtgggaaaagtggagagaagctctgcaatgtgcatcaagtttcagtcatgggggatgtaaatgt

SEQ ID NO: 1450 - DNA, 600 bp, Bovine  MMBT13721
tttccttgaaagacacaattttgcaagaactaattcttagaatgatgttccaatgaatcactggactcataatagcatttttctctgaaaatcttttgccaacatcaagactatgagccaggatataaaaaagtgagtcttaatgttaagggacatttatagtcaagaaagagagtttgattattgaaatgcattatgatgcttcaccctgaaatcattgaattaaagtttcatttatttggaaaatctatataattgtcctcactttctatctgaatattaccactgtgtagaataccrttttaggtcatactgaataaatggtcacacggcataaaaatgctgttctcgcccatgttgtctgggtgagaatgcactgaacccgtttgaagagatttgattgtccctataggggaggagccatctcccttggttatatgttgtcaggaactggccagggaccaagatgaagctcagtcaagggtgatgttagtcccccacatgcatcatctatccctttgactctaagactgagattttaataaccaaacatttccatcaacttctaaattgtttcttaactgggattcttgtcttctg

SEQ ID NO: 1451 - DNA, 600 bp, Bovine  MMBT16537
tctctctgcctctatccttctgactctgtctctctcattctccttcctgccttccttttcttcttggaatgccagtcagttccttttgcagaatcaaccttggaattagtgtactgaaacccttaggcaccctcttctcagcctagattttacatgctatccagagacaaattctccagcagattaaagctgtctgaagccttcttgagttttatgcctcagttattcagagcttgggaccgctcaagttctgtattttaaaatacactttttgggagaatggcattgaaacatgtatartatcatatatgaaacgagtcaccagtccaggttcsatgcaygatactggatgcttggggctrgtgcactgggacgacccagagggatggtacggggagggaggagggaagagggttcagaatggggaacacgtgtatacctgtggcggattcatgtttatatatggcaaaaccgatacaatattgtgaagttaaaaaataaaaaaaaaacttttctgtgctaatttagataattagaagatacaaaaagtttgcatttaatttatgaatgagaaatctagttcagtaatcaaacagaaca

SEQ ID NO: 1452 - DNA, 600 bp, Bovine  MMBT18294
agtttactaaattagggaggggttaagttcttcaaaatgtacatgggcagtattttttttaacctacagacagaatgggattccttttcaataagagcctgatttggtaattcctagtaaaactgaagcttctgaaaagcagtttaagaataaatatagtgtagtgcataatcacaatcacctgtgaggccaaggtttcctgtttagaaactaaagtgtgggcaaaggtggcctttgtatttcaaggggcaaagtcaaaaattcacagctgccaacaatatgcattaggattagctgctrctggccagagctcaaaatcgatcaaaaactgggagtaaacaagcatctggcaataatgatcaggtactaacacacagttgagacaaatgaaattagctggtctcccactcatgattcacacagtaattaagttcagtcacaccataattagataactgtcatggttgtgttggtcacaggaaacaggcaagagacaagcacgtcttcaacaaaagggtattttatgactacaaaacttactttggtttggttttaccacaaattatgccatataaagtataagaactttaatgacgtaaa

SEQ ID NO: 1453 - DNA, 600 bp, Bovine  MMBT17352
aggctcaggattttaaaaagatagacaaattaacagcaaatgtagcaaataaaatactatgtaaggatttgtgttgatgatgagctcagtacaagtctacaataggctgccatgtaaaagctatctcagactaaataatgcattaaagtgggtggactctactgcatgcccatcaaatcatactttagtactatgttcatatcacactttatgactttgtcaatcatgagtagactccaagcaattcctcatgtatggaagatcaagcaagttcaagaaaacattaagctcagggrgacrtgagaactacctgaaaaataactgaaggggaacaatccaagaagggtcaagattttgattaataacaaagagctttccactgattagagttatcaaaattggaagaacagcattgcttactgtagcttaytggtacatttgaattgtggtgctggagaagactcttgagagtcccttggagatcaaaccagtccatcctaaaggaaatcgaccttgaatattcattggaaggattgatgctgaagctgaagctccaatacttggccatctgatgtgaagagcacactcattggaaaagac

SEQ ID NO: 1454 - DNA, 600 bp, Bovine  MMBT16668
accctcctccacggctgtggctgtctccgtccccaactatggcatccccctccacggctgtggctgcccccgtccccaactaaaggaccccctgcatggctggtccttcaggagcgtgggatggactctgattccattttggtaaaattaaatctatgtaaaactctattctagcatcttaaatgcaaatatttccaaacttgaccaagatgttattttaagggcgtagttgacccctcaccatttcaaactatctgtaggcattcggttgccaaatagaaatcacaaagtcacattacrttccagtttgatggccttttgcttaaaaatgtatatagttgatcacttataaaacttaaaaatactaacttaaaaacaacattgggagaatgtgattatgcaaattacactgttaacaaaatttacacataaatgagaacatttttttcccatcatagtttttattaaaacaaaaccctgggaagtaaattatttgcgggagaatacagtataaaaatgtattaaaagctctaagaaccaaattgaaatgtcaaatatagttatttatattaaaacccaacaaaatagrtgatgggcctt

SEQ ID NO: 1455 - DNA, 600 bp, Bovine  MMBT12549
gtttcactatatagaattcatctctctctctgtctctctctgcctctgtctctctcacacacacacaatacatgtatagataaacttttcactttttcctgaatatgttctctttatttccattttattgtattttcctgttttgtttcattcgttcaaaatacctctttattttaccctgccaactccttttttagaatctgtttcatccttacttataatccaaacaagtttttttcatgaacatttctcacttgtttccagctggatgttaatgtgagatgaatcagcgtagtgtarttgtcaagaaagcttrttggatccattctgcttaagttcatctctcactttggcatttcttacctgtaagaggtagcacaagttgcttaacctcttttccagtttccttatcagtaaaatcaggacagtaaatagtatattctataagaataaaattaaaagaacatgtaaatttcctaacatggtgactggtaggtaacaaatgccccaaagctatatttattaacttctgcaacacaaaactctctctatccaaaacactatttgtggagaaaatatttgaagcctgagactacaaaa

SEQ ID NO: 1456 - DNA, 600 bp, Bovine  MMBT16847
tatatagtcttttctatgaacatgtaatatttttatatattttttaaactatgaaacctctttaaaagaagatcatcaatggtggaaaggatgaagcaccaacatttggtcaacaaataccatccaaatgctacctctgggcatgtgtgaacagtgatggccacaaagatggtaggtcgtcgtctcccgacttgagagagcttactgcccaacagggaaaggagcacaccaacagtaaaagtacaacgggaaaacttctttcattcagtcaccaaacactttctgaaagactgtctactrtatctctggcaccgtgggaaaggctggagaaacacggtcagagttttagaaaaagatagaaaagctgttggcatggagctagtaattcaaaaagagaggtgggctatattcaaaacatcatacaagttaactgcaaacttacaactctgtgaaatgctgagagagtaaatgaaagataactaaataataaggaaacggaaaccaagagacaggactgtcgagggtgcacagagcagtcagcatagactgagacagcgtaatggtgaagccaagattcgggggacaactatgacggaagtg

SEQ ID NO: 1457 - DNA, 600 bp, Bovine  MMBT16124
caacttgccttaattataaagttacatctattcactacatgtggattatattacttttctcaatcttgtggtttttgtgttataaagagccctattggttattagtcacattgttctttagcacataatgtaatacaattactacactagcactaatttctagtgtgcaagtatcttgtgaagttgcatgttgtcacaaagtgattctaatagctttgatcatttctcttaacagttcactaagtattactctcttgggaagtgtctagagaaatatctcagatgttaaaggtacaaagrcacattaaacctgcaaattcttgatttactcagaactcagactattacaacagtcagctcatactctatacttttgcttctgacctccrtaagcatcttcaggacctttcttagcattgtctcagctcagattgtaaatgagaatgttttgcttaactaacaccgtggcttgtatgcttttgaatcaggagaggggagctgaygrtttagcatcaaggtcagcctctcactttgctagaaatggttggtgcttacattctatcatccgagaatagtaggaagctaagtgtccactctaaa

SEQ ID NO: 1458 - DNA, 600 bp, Bovine  MMBT16686
atcattaaatactttcacttaataaaatgctcattggaatgaaataaataacactattttgtggcagataatgttcattgtcaagacataatggatagaactcaaatataatgcgttgtgaacaggtttttcctgttcagaaagcaaaatagaatggaagaatatgtggaagattaaaagactgtagctattgtagcaaaattgaaagataatttaagataacactgactcatatattaaccatttcaattcttagtagtaaataaaagtaaattacaggattgaaagttgaaaactagrggaacgtttcactattttagaagagtccaagaaggagaatcttagaattaatctttgaaatgttctgtatatggttcatttgtgtgcatatgtataaaattaatcaattactctatgtaataattgttattctccctggaaaacattgtataataagctctttctttttccaaattattgccattaattcttcctattatttcaatgcattatttcacccatgtataataaacacatatagactggaaacagacatttatattaatataattcaatatttcccctattagctctttttat

SEQ ID NO: 1459 - DNA, 601 bp, Bovine  MMBT13757
  misc_feature (1)..(1): n is a, c, g, or t
naatgaagaagtggcactggtgattggcattctgtccctggctgccagccgcccactgggcacgcacacaggcagtgccatcgatttgtatgcagtgctaagtcattctttcgcccagctggctctgtggcagaggtgcctgaccacagccytgatagcagccaggaaggaatcctttgttgaactgttcactcaagtgcttgacttttygactctgtttgctcacagatctgctgtaaaaactatctaaagccattcctctttctaaattcttcattatgatctcttcaggctactttcrgacatttgattttccktctctaacagacaagtgtttgatgttttgcttatttgtttgtttgtttktttttggtttgtttgyttgacaggaacccaaagatgagttacatgttttaaaactaccatccttcatattgcttaaagtttctacagtttatgaaggtcagcttgatattacctaaatactggaagtaaaccaagggacggatattggaatttatacttaacctctatacaagattttcagcacatgctcatgagaaaaagtataatataagactaataaagatacatcaacaca

SEQ ID NO: 1460 - DNA, 600 bp, Bovine  MMBT11877
tttcaatggatacacatgtcgttgatatctttaatgctctgccataacaaactacccactcgttttcactgcattatgctgagcatcattttcagttggtatgtaaacaccagtgccttgtctgactcctccaactattctattttcttaataacaacagctgctgtcgctatcagcagcctgatatttgctaggcacagtattagtgctgcacatgctttctatcttaaatctttaacaaaaatcctcctcagtacatatcctcaccatcattctattaaggcaaagatgttcagtgargtcacatagcacattaagtggtggaactggcttcgggagcacaaaaccaaggctctcttccttttcagcctcaccctcagaccctaacacatgttcagcttcctctgagttcttaataaacacagtgactgaccaaacgaaacaacaggttaaagcatcattaacaaaacatcgttaatgtgactgtgagtgtaaaaacagataaatcatcacattagccactttgctctggagtcacttacacaaatacgcactcttagacctcattacctgcctgggactttaacaggcagagtctga

SEQ ID NO: 1461 - DNA, 600 bp, Bovine  MMBT17133
catggggttgcaagagttggacacgacctagcgactaaactaactacagacttaaaatattacactaaagaaaatgaaatgactgcaccttagaatcctcagcagctgatctgatcatatttttttcaggtgctgttcagacctagcagctctatactgcaggctgcatgccaccaggctcttggcatttggacagcccagaggaacaatggccctatgtaagagaaaggttgattccaaagctgacctcatcacaacctgtcctgagttaacagacaagagcaaggatgtgaagaccarctaataaaaacaaaccagagaatattgattccagcccagaaacatagtgtttaatttattaataaaaggcagctctttggaaaatcctgtcttctgttgtcaaacaagcattgggacctttctatctttccaatcattcaattagagcagagacaagagaatgacactcttggctttcaagcaagcctgagggcacagggtgaatacaggatttggatgcactattctttcagattgccagttttaatttctgattaaaaaaagaggtcctttcttctcatacattcagctatttttcac

SEQ ID NO: 1462 - DNA, 600 bp, Bovine  MMBT17148
atttgtcacctggatgctgagcagtacagctaattcatctcttttgacacagtcatttcctgcattgtatcacctcagctggcttatttctttacttgggatgaagcaaggagacatcaagccttctcctttctatgattttgcactgcaaatctgctcttatctagattccacttgacatgtgatggaggaattaaagtggattcatatagttccctctcaccccgacctggcattagtgtctaaatggccagagtactgtatcttgtgaatggagtaaatgctttctatcttgtgctrttattactccagrgcttcccattgtgtaacttgctttccaaagagatataactactgagttttcgatctctctcattgattcctattatcatcttaaatgctgtaatctttgtgcaccattggctctgagggacagtctgctgtaactgcgtgtaattttccctgtaacatttctattttaaagagtcatccagtctttaataaatattctatagccatccacaaaaagtatgtatgcaagtcactctccacctagtctgcatccatacggggaacataggatttcagcaaagtacttct

SEQ ID NO: 1463 - DNA, 600 bp, Bovine  MMBT13022
ccatggactctagccaatcttggaattccccaggcaagaatactggagggggtagccattcctttctcgaggggttcttcccgacccagggatcaaatccaggtctcctgtaacacaggcagattctctttaccatctgagccaccagggaagcccaggagagggtaggggtactgtaatgatccaggcaggagaaggcaagggcttgacttgggcaaagaccatggggatggagaggcaggaatgggtaaggaccagggtaggaagattccccactgtctcctgtaaaatggttggggraagaaagataagtaagagctatgttatacaggtaatattctcttttcaaattttccttcttggcaccagaaaaagacagaaaagcaaaaagagaaagagggggtgggattctggaaggaaagttagcccatatgttaatgtcactggggaaatggaaccagctcacaacttccttctattatgttacgtgaagatacattttcagctgaaaggaattattttaaaacacgggtgtgaaataaatgagcacatgagaccatgttgtccacaaggcctcagcagaatgttttccttagatag

SEQ ID NO: 1464 - DNA, 600 bp, Bovine  MMBT17158
tttttgtattggattgacggaatctttgttccaaaatcagagtgatgcataatataaagtctcagtaagtatgtcttttgttcttttgtatacacatgatatagttaattccttgtgtcagatttgtaaataactatgaaatatttgcttgttttgttttagtattgtataaataaaacctgcaaagaagttcctttaatgggatataattgtaatgccactataaaatgcagaggaaatggggtaagctacttttgtttttgtaattctaaattttatgttattttttgagtaattcarygtaaaaaatctatcctgtttgggagaaatgaaaatctaagttgctcttttatccaggcttgcctaggaatagctaactaatataaagaaaatcagctgattaccaatcgatcaaaacactatttagtgaactgtactatatgtgtactgaatttattgtaagcactcaaaacttatgaattggtaacacatttaaattaaaaaaaataattttctcatgcaaataaatgcatattttgcttatattgtgggcatatttcttctttctcatactcttcataattaaaatttaaagctata

SEQ ID NO: 1465 - DNA, 600 bp, Bovine  MMBT16592
atgtgagaactcatcatcaatgatgtcaaatacaatagatgggtccaataacgtgaaggttgacagcatgctgctatcggcatatgtgaccaaatgattggtacattcttctgaaagatgcagccaccatactgtgggaagatcaaaacgcagacagaaatttctcattaagtttgttaggttgaaggcaattgtataagtgtgttgtcagcactttttaaaatgctgttgactagagaaggcaaattccttggtagcaaagtagaattttactcccccacaagctatctattaagaatratctctgcattctatgttttttttcagttcacagctagtgttttccagcatagatgaaaacttacaaaaatttattacagacatgaatacgtatattgaccttaatattatttcttccaaaggaattcaccccactggatcatttatagataagatataggtgatatacatgtagatttagtgttatcaaactcttaaaattatatataacaatatataagataaatattaatgttatatattaatttattatacattactgtattattatatatagtaaaaacatacatgtatatgatt

SEQ ID NO: 1466 - DNA, 598 bp, Bovine  MMBT15862
  misc_feature (1)..(120): n is a, c, g, or t
nnnnnnnnnnnnnnnnnnnnnnnnnnnnnnnnnnnnnnnnnnnnnnnnnnnnnnnnnnnnnnnnnnnnnnnnnnnnnnnnnnnnnnnnnnnnnnnnnnnnnnnnnnnnnnnnnnnnnnnncttgcactcgtctattgagtatgtcttagcattatatacatattttattgcttaaaaaatcctgctctctgacaatgcagggttgacacaaatcatcagtttgtaaaaaaacaaatcagtattagagaagcacaataaagcaaagcacaaacgagagaagaaacataaacccaagccaaracttttgcttgtagacggtggtgggaataggattgaacaattaaaaatttctggctgtacctgtttttaaagttttaactttagaaccatgtaagtgttttacacattgttaaaagaaaatgaaatcaaagtgaaaaaccarcccaaaactctctttggcatctccttcagtttccttgctgtctgtgctgacctacacatatattcagagatttggcatttttcttcctccccatcagagctgtaggtacatatacagtgcccagctacttgatggttactccgtaataaaaaataa

SEQ ID NO: 1467 - DNA, 600 bp, Bovine  MMBT16168
actttggagcttaagttgtaagcaaaatgtaagccttgaagacagcattctgcttgcagaaatcttatcttgtgatgaaacactgtgttgggccctgagagctctaaccagccactgacatgctagggagactttcaggcaggatgtgacaattttggcagcactgaaagccctggtatgtttatgtagtcatgtccagtttacctgtgtcagatgagactttgacaggcctaagagaaggaactacatggggtcactagttagccatgccgctggaaacaccactagccctgccagtcraagaaaaacacatgtgcctgccagaagtaacaaagtaatgaactttccatgaaagctatcagttctggacaatttggtatttttagagaaaagacttatgtatagtagggaccatgatcattaagacytgaactgatgtggctcatgtattcagaatgaagrtgagagttgctagtgaagaaatgaagcatcaatgcagaggatttgtgttctcgaaggagcagtaaagcacaaatagggaagtagacaagaacctacactttaaagcgtctagtgtcagagtccaaggattcttcatgg

SEQ ID NO: 1468 - DNA, 600 bp, Bovine  MMBT13197
tgctgcagtccatgaggttgcgaagagttggatatgactgagtgaacaacagcagaattgactcagatcttaaagatttgttttaaggatatgataaattatttaactaaaaggctttagttaaataatttatatttatattaaataatatattaatttagtaattaatatatcgaatattaaataatatgtattacctactttatttagctaaaggttttaattaaaatactatttacatagtgaaaagttaggagtatatagccttatgtaggaagtgagttctgtaacattgggggrataatgatgctttagacctttgcattatgtgaaacaatttagacctctgcatttgcatctctctgcttgatcttcctggtcttaatctttgtgatgtgacaaggatcaggaaaaagacagagtgtaaatatttgctgtctgtgccacaggcctgatcctttgtcagccataatagagcataaaaatgcatgaatgtcctccactcctccttagctaatgtcccatttgtatctaatgttatagacaccattgtaaattacccttaaattaagaatttcaatctctcaataacagggtcaa

SEQ ID NO: 1469 - DNA, 600 bp, Bovine  MMBT13650
cttttgtagcaacaacctataccttttttcgccatcatattatgcttacctggtatgctttcccaagctcagctgatagggtaatcaattttaatatagtcatttctttttttcatttatttatcagctttttaagcatccataatatacacaatccttgctatttactgtggaaaaattaaaaaagaaaacttcacaaacccacttcacttcatcctgaaggatcttacagtcaaactgaataagacagayataatacagatakaattgtattggtgatggacaggggagsctgatgcrgtgcagtccatggggtcacaaagagtcggacatgactgagtsactgaaatgaactgaactgaatacagataaatataaaaccttaaagtatgtaataagttctataaaatgattaaagcagacaackcaaacacttttaagtagtaagtgatatttcacctagagacatcatgaaatgcttcatgaagttatggcataaaagtccatgtattaatggtgataacattatccattctagtttctaaatgtatatttttaagatgtcagcttacctgcagtgttatacgaatttaagtgctt

SEQ ID NO: 1470 - DNA, 600 bp, Bovine  MMBT14378
ttttcagagtgagctgcacttgcctcctgcctcttggggagaccctccaagaccagcaggtgggtcttacccaagctcctactcaattatggcttttgccctgggttccagagcttgtgagattctgtgtgagctcttttgtgaagtctctattttccccaatctaatgtcatgtttctgtctcagcttccttgccccctgcccccaaatgtaaagccccttttggctgaactctatatgcttcatctctcttttctaggtcagacttgctttcattatttatacaaaattctgactcartagtagcattccaggatcctgaaccaaactctaaactctctggaatataacctaggaaaaagaatctatttcattattatgtgagctttaagctcttgcacacttttgctttctcagccaggactagctcatctccacaccatccttttaagtctgagtcagcagtagtgtagaacattaactcattaacaatgaaatcctctttcctaactcttgccaggctaaggttgttttcaattagcaaatttggagagagaggttttttccccccctttattgcacagcccttccttttacagg

SEQ ID NO: 1471 - DNA, 600 bp, Bovine  MMBT13162
tggcttctcatgcattcaaaatgaatttggttacaaactgggtaaacagatttataaccatagggaccacactgataaattgaaattgtgccaaagcaacttgagaagtgggaggacaaaatggaatagaaaatccaagtaaataactttctggcaagagstcaccatagaaatgtacacattcattttcaaattatattttatttgcaaatgagtatgatgggtttgtcactatgtaaacacaaacatcacaaatgaatccttcaaacagacttgacagtggtgagtgcttggggctgrtgaaatactcaaagtattttgtgctgccaggaattctatttatgatttatactaatctttgttttttactttatccctatttataagatgtataatgacttaatctatgttctagtgattgcttgttcaaccattttggtatctggccaatgtgattagtactggtgaaagatgtttcagatcagttattttccgtatagcagggggtactctggcctttgtttgtactggtagtcagaggtgggggtaggggcccggttaaattgttcactgcagagtctctttagttaacagctcttt

SEQ ID NO: 1472 - DNA, 601 bp, Bovine  MMBT11535
  misc_feature (1)..(12): n is a, c, g, or t
nnnnnnnnnnnnaatcttaatctttatgtaatcgagaaacatcaactttttatgtaaagaagcacgatgcttatttcagttcagttgctcaatcctgtctgactctttgtgaccccacggactgcagcccgccaggcttcatttaaattgctcaaaatatgaatggaagacatatgctgcggaaataagcccttaatcttctttgacatttgattctaaaactaatatttatagttattgattgatgagtatttgctacatcttattgctctacacaatctatgctgtaccattttaagggaratcttctgtttttttaagcaaagtaaaatagcctaggtaaagttacataagcaataggattggaattaattttcaaagttttcactctttactaccagacactccatatgccatctgtggcttgcttagagacaagtattcaaaagtttttattggaacacgagatgcggattctttgacaattactttccataataatttttgtatatctccaaataaatacacctacttaaacacccgccaataaaaaatcttcctaaacaatttaataaaggacactggtttcagcagagccact

SEQ ID NO: 1473 - DNA, 600 bp, Bovine  MMBT13118
aattatatttccttaggaattttcatagaaccatcttcctctgttatctgtatcttctcatggcattctgtatgtgtgtgtccaaatttccctcttataaggccatgagtcatttaaaattagggatctaatggccacattttaactttattatgtatctacagactttacttctaaatgaagtcacattcacacatcctaggcattcagacttcaatatattttaaagagagaagggaacactgttcaagccataataagaatatacctgggttaacatcattgcataatggcatagtrgckgtgtttctggtatttggaggaaaatcttttcatctggacaaagcacagggttggataatatgagagaaatgggtaagtgttctgagtattcttttgtttctctagatccattctcagctcttctctgtgcccttgawgctgagttccatacaaggcattatctggaaatcacatgacttctgtcttccagtgaggttcaaacaacaggagttasagtgttgagaaactggattagttattactgttcttcctgcatgtcagtgcttcasttttattactaaagcttacaaatgctgt

SEQ ID NO: 1474 - DNA, 600 bp, Bovine  MMBT17311
tcgcagtgcctagagggaacatctaatacagcaattattatcctgctgtttagtgtcyttcattctctatatgtttgtgattttggcctctaatttactgggaagtggaagtgattactagtaccatctcatatttatatgcagtattttctcctstattccctttccaaaacctataaagattacataatttgatagctatatgtgagaagtcttataaatcatttttatcaaaatagggtattccaaaaatcttagtgcagttttaagttataacaacttcagaagataatgtcacaracttagaaaaatcatcacccaaaacttgaagattcttttatacccatttacttttttctttctttcttcctttgggccataccacacagcttgtgggattttagtttcctgaccagggattgaacccatgccctttgcagtgaaagtgyrgagtcttaaccactgaactaaaaagtcagatatgtcctaataagatttgtgttgatattttgaaattttaaataattagctttttaatgttagacagtattatatgtaagtttaggatcttgcctgatactttggtgttagatattaata

SEQ ID NO: 1475 - DNA, 600 bp, Bovine  MMBT11605
tgtgccagattaagtrctttatatacaattatctcatttcattctaatctacaaccctatgaaattagtatattttctcttttatgaatcagaaaattgaatctcagagggtcaagtaacttccaatggttgctctaatcatttwagtggtaaagccatatttgaaaccaagttgcttattaaagcaaagcctatgcattcagcctttttgctatcccacttccaaatgccatagtgcaccaacctatgcttgagagaattaacttgcaaaggtgrgatgctggaagtggatttagagcrttggtcctactttaaactccataaagggatattttcaggtaagagctttcctggtggctcaggtgtaaagaaggcacctgcagtgcaggagacaagggttcaatccttgggctgagaagatcccctggagaagggaatggcagcccactccagtattcttgtctgaaaagtcccatggacagagaagcctggggggctacagtccatggggtcccaaacagtcagacacaactcagcatgtacacatggtacttattattcatagatacatgttattcataggttttctagttttgagtt

SEQ ID NO: 1476 - DNA, 598 bp, Bovine  MMBT13795
  misc_feature (1)..(61): n is a, c, g, or t
nnnnnnnnnnnnnnnnnnnnnnnnnnnnnnnnnnnnnnnnnnnnnnnnnnnnnnnnnnnnntgtttcttagatggtgttttactctggctatgctgcatatatatatgcttgtatatatactgtgcttgctttccccctgttgtctatttcccgtcgtccttctactgtactctgatattgtcaaggttgacaatatttactttctgttttataatctatcttaagtcattaatgttttatgaataagttgagtctaaagttggaaaaccaatgaatagcatttataggatataaccatrtaaatccagttcactgaagaaccatgtggtatgttgggaccctagaactttctctatgcctgcaggtatctcacttctgtgacactgaaaggagtatgttctttgtactctcgcattctattttcttttactacaagtgctctaaaatcatgccacatttagttggtaaactgacatttaagtacacattaagaaagatcagaagtggtggcacagttgcataggggatattcaataaatgaatggcctgtgtgacactattarggagaaaaaagacaagaggaaaatgaaggaaagc

SEQ ID NO: 1477 - DNA, 600 bp, Bovine  MMBT11452
atgagaggctgagatgaggagcctcctaaggaccgggcttcagcgctaacgtctaaaagccacgcacgcacccgttcccatcacccaaccctttccgccagatgcgccaccatggacttacctgccacccagcccatggtgttgatgataagaggggactctcgcttgtaggagctgaaaacatactttattacctcaatatagttttcaaagttgtttttacaagaagttttcccataatagaccattttctggggtgtcctctggtgggtgaaaggtggtcctaagaagataaaggtragagtcattaatccatgagaacataagaggtggcaagggttatggtctagccatgatccctgacaaagctgctcaggaaatctgagcccatcggaccactaggaatagctgtgctctcacttttggaaatctaagctttcaacttcaaacacagacatgcctgcatttatacacggttaatccaaactatgtcctaatatggccattcattcaacaaacatctacccggacgtctgctgcatgctgggcattgttctagatacttaggacacatctgtgaacagaaaaaacacccccaca

SEQ ID NO: 1478 - DNA, 598 bp, Bovine  MMBT15825
  misc_feature (1)..(202): n is a, c, g, or t
nnnnnnnnnnnnnnnnnnnnnnnnnnnnnnnnnnnnnnnnnnnnnnnnnnnnnnnnnnnnnnnnnnnnnnnnnnnnnnnnnnnnnnnnnnnnnnnnnnnnnnnnnnnnnnnnnnnnnnnnnnnnnnnnnnnnnnnnnnnnnnnnnnnnnnnnnnnnnnnnnnnnnnnnnnnnnnnnnnnnnnnnnnnnnnnnnnnnnnnnnncctcctcctcctccccctcctaagatccttctatggtcatcctggctcctttaacattggttctgatccagccgtggaactggagattccttcatagratccaccactggagatatgaatcatacccatttgacagatgtggaaactgaggctcagaaaaatgaagtcacatgcctgagaaataacctagccaggatcagaaatggtggctcagagtttgaatattatgtacatgtgcaagtgttcrcatgcatgtgcaaagccctgagcacccgtgttgacaggcacacgtatggtagcccccacactctgctgggctttgcctgccccayctcaccctctctagggtgggcgggggacttgggttaggcacctgaggccggctgtgtttggtgc

SEQ ID NO: 1479 - DNA, 598 bp, Bovine  MMBT17973
  misc_feature (1)..(15): n is a, c, g, or t
nnnnnnnnnnnnnnngaaacagtatctagagagtctctaaggtaggccttcaattaccctgaggtcccttccctgtaatttctaagattggatgtgattcttttgcttcttcccttttcatcgacatttgatggatgcttaaaacattccacaaagtgaaagcgagggtcatatcaccaatcccaattagacattacaaaagccccataaatctgggtgagtatgttacagggaattgaaagctgaaactgtatggccattgctctaaagaacagagcaatcactcttgtaaagccctcrtgtaatttttttccgtctgctagcagtgcgtgtctatcaataattggtgtgttattgatttcctaaccctgaataatgcagctaatgggccttctttcccagccagggtgaaatgaatgggccacgacgcgctgaatgatggctacttgcctggttatgtgggagcgtgttaacacacagctccgatgacctgcacagaagctgggtgtctctggcattgagaatggaattgagtattgatttctataccatcttcttattgtttaattaaacaaaccacagtccctgagtatgtgct

SEQ ID NO: 1480 - DNA, 600 bp, Bovine  MMBT17457
aggaaatgaacttacggttgctaggaggaagggatagttagggagctgaggacagacgtgtacacactgctatattcaaaatggaaaaccaacaggggcctactgtatagcacagggaactccactccatgttatgtggcagcccagagaggagtgggtttgggagagaatgaatgcgtgtatatgtatggctgagtcctttagctggtcatctgaaactatcacaatgttattcggctataccccagtacaaaataaaaagttcaaaataaaaaaaaaaaagtgacagaaaaagagatraagagtacttcatacttacccaaatattttgtctgttacttgcaaagaagatgagttagactggtacatttttataacttgcaagcaatataaggaaaacccttgttcaaagcaatattcattgtacagtttttgtcgctgtcagcttacacgttcctgttttttttttttttttcattattgaagtatagctaatttacaatgctgtgctagtttctagggcacagagttcatcttagatttttacacttcaccagggggcagggactattcctcggagcataacagcgttgtataagg

SEQ ID NO: 1481 - DNA, 600 bp, Bovine  MMBT16663
caatttgaggtgattcattatttatcttttttatgattttaatgaatacaagtgtctcttattcattaaaaatagaacaacaaaaatattcatctagtcattagcctcttgattaatcttccccattaagctaaagatccaagcagagcacctgaaagcaccttaattcttcttcagagatcatcatcacactaaaattatttgcttctggaaatcattaatttctttttatggatatgagatttttttttttctggattgcagtatattaacattcgttttcattcaccccattctarraattcttggtaataaagcagaactaaatggcacacattaaacattattcatttaatcttgggggaagttagttacaaggaaagtttgaagagtgagttgagaatagttcttcaatctcattgttggatatttcattttatttgccagtaaatacatagctatatatgttactaatacatatcaagaggttaaaaaatgatcacataattaattactcatcattattatatgctagaaactcttgagtttggcacatgagccccttgctcaccttctgaggcgtctcctggcttcaggagt

SEQ ID NO: 1482 - DNA, 600 bp, Bovine  MMBT18295
taatgcaggagacattaagagacatgggttcgatccctgggtcaggaagatcccctggaggagggcatggcaacccacttgcttagaggatgctgtggacagaggagcctggtgggctatagtccatatgattgcagagagtcggacatgactgaagtgactaagcagaatagcacatggaagatgatagtagtttggactaaggtagatgtagtaaatatgaatggagtcaagatatactctgaagacagaattgacggactttctgacagactggatgtgtaggactagaggaggaarattaaggataacttccaggtttctagcttaagcaactgagtgggtggaggtgccattttctaaaatgagtaaaattggaggaaggaacagtcccagagtgtgcgtgtcactggttaacaggttttatttgaaatgtctgtgagacctggaagtgcaaatgtcaagtaggcagttgaatttattaaatgtggagctttctaatgggaaacctaggrcaaggtcacttgtgataagagcctaagtaacaacaaacttatatgttcaaaggaaattcttatctggctaggttaatcagaggaa

SEQ ID NO: 1483 - DNA, 355 bp, Bovine  MMBT14466
tagtgtcacataaagccatgwgaaacagaaggtttaaataagatccagagtcttataatacaaaaatgtccagatttcaactgaagatcactcatcatacaaaaatccaagaagatctcaaactgaatgaaaaacgacaagagatgtcaacactgagataatagagatgttaaaattatctgacacaatgaatataaaaatcaactcaaaatggttcacagagtttaatgtgacatataaaactataatacttttagcaaaagagaaaaaaacctaggagataaccttcagaatataggrctagacwaaaagagttcttaaactgacatcaaaagcagatccatcaaaggaaaaa

SEQ ID NO: 1484 - DNA, 600 bp, Bovine  MMBT17428
ttgtcagctccaccgcaggggttctccacctgtggcaccctgtagaatcacatggagtgctgagaagtcagttctcttgtacagccctccctgcccctcacagactcattaaaacaaaatctatggaggtaagctgtggacctaggcatcttatttttaaaaattcatctagatgattccaactgcagccgaggttgagaagcactgggctgtggaaatctttgccccactacaaagatgggatttaatggagtcatttacaaagctgccagctgttccttgtaggctgtgccaacagaragaacaagcttatagttttttatttttatgcaatatggtgaataatcctaacagtaagcaagggaaggttcttaaagccacatgctgcaggagaaattcagaggggtgggaaaattccctttttgtagaggaaaggggctggtcaaacatttcagacacttttaccttctttgtttgggaaggaaactggagtgtgcagtggggagagggtacagcgggcaacagggtaggaggaaggggacctaaggaagagcatcacccttgaaatttgtagttaaaggatgaattaagccttaggtg

SEQ ID NO: 1485 - DNA, 600 bp, Bovine  MMBT17906
agtcggtggtttatatcaagatcctcttgaaatagtactagaaatatctgtaccctgccttttttgcactaccrataccaacrttttttatacactgagatctatattaggatgtctttttcttgggtcttttgaaatgtgtccctcccttgaagctttaatcaattattgattgtttcttagtgcattttgtgactgctatatttgtttttataagaaatacaggtatcttagagtctggagactcttgttcctgcctgaaatatttatcatgatattagatgtatatttttaatcccrtaaaatgtraagaaacagtaatattgtattttagccaaaatatttgggagagaaaacctctcttaacatagtatacctatccacttgtagtgacataaaatttgtatatattttgtgatctttaaactgtagattgttagattattgatattcatagatcataaatttagttattttaaatccttctactaacagctatttcttttcataaactgatataagaatgatgaggtttaaaayatggttagttatacgttattctaaacatttgcttctctttggaaaatcagtgaattcttt

SEQ ID NO: 1486 - DNA, 601 bp, Bovine  MMBT11781
  misc_feature (1)..(1): n is a, c, g, or t
ntaaaacatgttctataaattagtcattgtccccaaagtcactaatataatgaacagttaaaagaaaaatagaaaatagataagaaaacacaatataagacaaatgaaagagtcaacttagtaggtaataaaaggtagaagggaagagaagaaagtacaacatgaaaattatctacacatacacaaataaaacaaggaaaaacaaacccttagacaaaagaaagggaggtcaaagagaaagaataattcacacaaggatcctgaacatttagagataaatgaaaataagcaaaccatcacrcagttggaactgagaatgtaccatatttggagctctttattctcagtgtctagcatgatgcctggcacatagtgtgcactcaatgagtaaagtcaggattctaaactatgccattttcataccaaatcaatgtgttaagtccaatttgagaagtcattgcatttttatttccttgttgttgttttatcaagttgttggatactttatatattatgaggaacacaaaacaaaagacaacgaaacgacaatggaaattttgtgatgttacatctgcaaatgcaataaaaatctaagggtttg

SEQ ID NO: 1487 - DNA, 598 bp, Bovine  MMBT15175
  misc_feature (1)..(87): n is a, c, g, or t
nnnnnnnnnnnnnnnnnnnnnnnnnnnnnnnnnnnnnnnnnnnnnnnnnnnnnnnnnnnnnnnnnnnnnnnnnnnnnnnnnnnnnnntattatttttatacagaaggtgacttttgctagagagctgttcctacctcttcatctactgggacagacaagtcactcaaatggctgattcgtccatctcttcctatttcgtgaacgacaaagtcagagtatctgaggaaaagaaaatcagagcattattattttkctgcctattaattttaggagaaagtttgtcaacagtaagccttattrttgtgcaaacaggtattaaaaataaaaastctcagtgcaaagtcatgtagttattttttctggtttcgtgatgaagtctaatccacaccttggcctggtaccaggtacagaaaagaccttctgagcttctagaatactcttccagaaaaatgcctaggtcaaagcttattaatgttgccctatgattacatagttcattctaaagtgaatcatgaaacacagcaaatttaactaaattggaagctagtgtatctaccttgagccaccctgaagcttacctttatgctaaatactttac

SEQ ID NO: 1488 - DNA, 598 bp, Bovine  MMBT14610
  misc_feature (1)..(124): n is a, c, g, or t
nnnnnnnnnnnnnnnnnnnnnnnnnnnnnnnnnnnnnnnnnnnnnnnnnnnnnnnnnnnnnnnnnnnnnnnnnnnnnnnnnnnnnnnnnnnnnnnnnnnnnnnnnnnnnnnnnnnnnnnnnnnnttggacacgactgtgtgactgaagtgaactgaacttgattaatggtgataacaaatatgaactcaaggtcatttcaattacgataattgttaccgttctagggaatcctgctatgtgttaaggtctatagtgggtgtgtcacacataccacattgcttcatccttctgtcatggcrtatgtgttatttttctattttacataagaatgagctatgttttagagcaagaggtcatccagctcagacatccatcaactacatgtggatggcctctcaaagctggttgcctagtccatactcctgtagttcctcttatccaacccttatccctgagatatatacatgcagaatttgccaagactctaaatccaaaaagagactttactgccagcagggcaatctcaagatttagagaaaatgaaaataacccttttgttccccaccataaaaataaataagattcaacatacctaat

SEQ ID NO: 1489 - DNA, 600 bp, Bovine  MMBT17265
taacatttgtttagtctttcagttactttatatcacacccatgaggaaaatgccccaggaataaaccaagaattagcatattaattataaataaagcattatagaacaacagcaattaacagttcaaactagttttttagtgctattaatcatgctgagccactaataaaaaaaagtaacaggaatgacagaagacagtataaccaataaattgtctgtctgtctggatgtcttctatctccctacctacaatcttagttatattatctcagggttgtttttttaatcctgattctgcarctttctacctctgaaatgctatgcaattaatttaaattctccaattttctatattctctacaaggatgatgtctaatgtacaacagcagtgttgctaacttctgtctgtatattgttctctgtcttcgttttggttcccatttcctctgacttgtaataaaaatggcatactttgaaaatcacatataatcgtctacttccgttcagacggaaatagccaaaacctgcagcctaagatatttaggctaggtaagtgggtgaattttacaacagtaaacatttaaaaataaagtaaggatt

SEQ ID NO: 1490 - DNA, 558 bp, Bovine  MMBT16915
gctctgtggtgagaccctgtcatgaccaagacagacaaggttcttaccctcatggaacatgatttagtgggaagaaatagacagtacttataaacaaagaaatatgttgtgtgatgtcaaaaaatgaaaggaaaaaaattaagcaggacaaagagatggaagtggtcagggaaggcttctctgaggactcttaaatgaaggggaggcagccaaatggaggcctgcagggagaacatttccacagagagaagcaaatgcaaaggcccagaggtagaaaccatcttggtaagttgatgaacrgaggaggtgtggctggagcagagaaaaagaggggaagaacagaaaaagataatgctagaataggcagagtcagatcatgttgagttttgaaggccttgggtagcyattgaagagttttgagccaaaggcatggcatgaagtaatagaagctttgaaaggatcatctggctgatgtggagagtaagcttcagggtgggtaatgggaagaggcagggagactagataggaagtgattataatcacctagattaaggaaaa

SEQ ID NO: 1491 - DNA, 600 bp, Bovine  MMBT17684
gcacgtggagcccctcacggccctggtggtgatggaggggtcccctggggcaatatcactgccaatggctgagatctcagggtctgatgtgtggtttaaaaaaaccatgcgattctacacaaatgttcacagcagcactaggcacaagagctcataggtggaaacaacccaagcatccgtcaacgaacggacaaatggataaacagaatgtggcatgtccatacagaggactaccacttagtcataaaaagggatgaagtgttgacacaggctaggacgtggatgaacctcgaccgtatratgctgagaggaagaactcagatacaaaagggcattcattgtatgattcaattcatggaaaagtcccaaacaggcaaatccacggtgacagaaagcggactggtggatgctggaggttggcagggcttggggggtggggggtggggagtggcctgtaatgggtacggggtttccatatggggtgatgaaaagttctagaataatggttgcaccatactgggaatgtacttaatgccactgaatcgtacgcgttaagatggttaaaacggtagatctgatgttatgtgtgtttcaccaaaa

SEQ ID NO: 1492 - DNA, 600 bp, Bovine  MMBT15494
taggctggaaagcaatcagaattggattttcttgaagggagggtggtgaaagagacaaattaagccttcacccctactccgagggttgggtttgtaggaaaaagrgaatgggctggacttgggggggggtccctyccaggggggatccytccctcttcttggacaccagcaactgagggaagacggtccttcctgctgctgagggaacaatgaggggctggtagccgaggtgggctgggacctagcaagactcacagccttctccacrgggagtcaccagagccgctggccctcctcacrgtgggatctagttcccaaggagggtgccaggcagaccttctgcccctgcaaaaacaaagctgcctaattgccttttaatctggggatgtcggtctgctggtgtcggtactgaattgtaaggggagatagtatctttccctttgagtgagaagttatttgatctctgcgtcagaggaaggcctgtgcccagggaagaggtgggacggaagggaaggtggaaggagagagaagagtgagggcctggctcccggccgacctgaggctttatttctccccataacaatcataaataaagggaaa

SEQ ID NO: 1493 - DNA, 600 bp, Bovine  MMBT17627
agcattgcatgaatgtctacaattctgtcttcaactgagtaattagcatctttatatctttacaaaatattagtagtgtaattttaacccctgaaatgctaactctggctcttttgtgatctatgttaggtcagacaggctacacagatcaacagactaagcaaagaactagaactttggaactcttttctttcatttactgtattggattatatgacaagcacttctggcctctatcccttgttatcctatgcatgaccaggtactgtgctctaccgtcttatgggagggcctgtaggrtcccctggttctagggaactcccccaaatatttctagtatcaattcatttcttgctcttattgctcagagccccaacagagtatgtggtctgtgggaatttcttaatcactgaaatattttcttaaaactttttctcccagatctatagtggttttttttggtaaacatttggaattctcccatctgttcttatattattaaaaattccactggggttttatgctctaagaatgtggaggccgtgatttccccgtgatacctgtgaagctcccatagaaagtcagaaatccctagaaatt

SEQ ID NO: 1494 - DNA, 404 bp, Bovine  MMBT17076
aaaatgtctccatggcctctgggtggagggcaaataggactcaagctatattttaacagaaaagcaaaacaagatgggagaaaagcagctgggcagggaaggtttacattcaatttatgtcaaaatcaaatatactgggttttttacagggaaaggaatgtaactagcaactctaagaatgaaatgggcagaatcaacttggcaagaaacaaaacagcaaggggattaagtagccctgagggtggtttacacccccaaacaacacaagagtgaggcaaactccagcaaaccacctcctcrtttactctgagagatagggtaagatacaccaccaggaacaaagtctcaacccagaattcaggtgctctggttctctctttctccctccctccttccctccctca

SEQ ID NO: 1495 - DNA, 600 bp, Bovine  MMBT16359
ctgttacaccgaataaggctctccataaattctgcgtgagcctgtcagtggctaagcccatatgtaacgcgtcaatacagcgcctgcgtctgcctgctggtgtctccaacaacccagcctgtggccgcctctccaagccccgaagcatgtgtatacacgccccaacccaatcaaaaacccagggcctgagatgctgtgcgtgctcagaaacggacacctcccattctcacggaggatgtgcgtgtgtatgtgtgtttccagcaagacattgtgttttttagactgtgacggaatcaaacrtgacgcwaccacrcgttctgggtcttgacgacctgatggggggatgggaaggggatgaaaagagtatggccacagcaatttcaggccatgcrgcactgtgacctcctcactctgtccgcttacaaaacagaagaggggagatacgtgccaggcagtgttcaaggtacagagaactgtcagtgtcattagttataatcaaagggcaggggccagagggtgaatgccttctggtctgcctccttaagtcacctgaggagagaacacaaacctggggagagactctgcttccctgagaccttt

SEQ ID NO: 1496 - DNA, 600 bp, Bovine  MMBT15681
cagaaacaccccagggcaagtcattctctgacagccccctgaagggtcctacctgtccaractgcatggtctgctcctgtaaacgtatgcttttggttttttcctgtcaaaaaatcatgctaaaatcattattttaaccagtgttcaaacagcaagctcatgtcaactcttggctggaggcttctgcttagaggaaaccaaagacaccagaacatccatttgcctcaccctgtcatgtgtggaaaattttaatttgcctagttaatcgtgtgggacatgggagacagacaggcagaaggrcatgacagcaaagagcacrgttcagaagcagcctccgccgttcaaatcctatatccgcagtyagtactcgggtgaccagtcctagaccaggagcacctgaaacctcctgttcaccttgaggctttcatgccagyacctgtggctttctgcgggctccaaggtgaagcacaagatcygcccccctacctttcaagacctccacatgcatcccttccccctctccagtccactttgtcttctcagaaaaaacctccatctgtgtggtctcttgtggcaacccactcagtattctcgcctgga

SEQ ID NO: 1497 - DNA, 600 bp, Bovine  MMBT15207
ctgggtgttgtcagtgtcacagggtgggtggctgagggtcttcaggttaggactcagcactagggctgggagggtctgagaaaggctagaaactcacagggaccacacaggtgaggggcatgggaacaggtaagatctggagatgtccatcacagttggcagttaggaatgtgcagagccagagcctggtagggaggcgaggccccatgtcctgaagtcaaggtaagaaagtgacttagagacttgggagtgaccacatggttggtatctgggtctaaaatattatttgccccacgaaaraaggaacttgtgtctctttttctctgctgtaatctgcactgcttagaacacagcctggaatgaaagtcacactatctcattgagagccagttatggctcttgaaggtcagggctgatggtggccctttgagtcccaggagacagagcagtctaatgagagaacgaccagacatttttaaaaaagtttatttactaggcttaatacctacatgaagcactgatggtaaaaagtcatgaggaataaacttgtaaacagtcatggtcctgcttcctaggtggcgctagtggtaaaaaccctgg

SEQ ID NO: 1498 - DNA, 600 bp, Bovine  MMBT17112
ttcttgcctggagaatccccatggacagaggagcctggtgggctacagtccacagggttgcagagtccgacatgactgagtgactaaggacagcacaggaagcaagcacactgagatagagagtatatgctaggggctgccaacctgctacctgctccaggggccttggtccctgagaatggggaaaggaagacagagaaaccgacaagagccagcggggggatgcgtgtcctgactgagagaggcaaccttgtggggtctgggaaggctcccaggtcatgcagacagcaagggttgggragctgacggtgtgccagttgcaaataatgcagggtgcagagaagtttggacttgatcctgaccaattttttttttaaactgtccacgggagggacatggtcagaaatgcatttcaccgaaaacagtgccagaatacagagaatcgactggttgagggggtgagttgggagagacgggcatggcttcaaatgctttatcgggtaaagcaactctggtgtgctggcctctgtatcagaccgccatatataaccttgtttctgggagaaaacgtgctcccagttccaacttttgaaactatct

SEQ ID NO: 1499 - DNA, 600 bp, Bovine  MMBT17874
tgtaagaaagcacaaggaaagaaatgggscgtcartaacactgcagctgggctctttgaggtgccccaagtcagagagagggaaacaagcattccattcaacactaaaatgcatgkgctgccctccagagcaaagctgcctgtcctcagcattcaccttgataatgttgccacaaacactgaaattttggtggtcgttacacatctctggggtggcaaagcaagaagtcagactgcccagggcaaggccaggtctcccacagagcctggatgagagggaggtcagatggatggtaaatarattggcaagaagaagcctgaggggacttccctggcggtccagtggttaagactgaaccttccaatgcagggggtttgggtttgatccctggttggggcgttaagatctcacatgcctcgccrccaaaaaaacaaaacataaaactgaattagtattgtaacaaattcaawaaagactttaaaaatggtccacattgaaaatatatgttaaaaaagagggatactaaagtcaatccacagagtcaccaccaacctgcttaccttatctcatactacaaactttttgaattccaaygatctc

SEQ ID NO: 1500 - DNA, 600 bp, Bovine  MMBT17030
ttagtatacacacactagttaagtcactgtgcttgactagactttcccggtggctcagtggtaaagaatccacctgccaatgcaggagatgcaggttcaatccctgggtcaggaaggtcccctggagaggaaatggcaacccacttcagtattcttgcctgaaacatcccatggacagaggaacctggtgggctacagcccagggggttacaaagagttggacattactgagcacatacatacatacatacataagtcactgtgctggtcgagagtgacattcacatagaaagtcccatrgtcatccttaggcctcagaaccttccattcaggcctggtgatgccctagacccgatttygcaagcaggaactgtggacctgtctgcagagaggccacttctgaggaaagaggttatctgccatcaccacccttcccctttscaaggtctcagygtagrgcatccttggtgscagcagagctgggacacgagctgagaagcagggtcctgctgccgctggggaggctcagcaaactgccctttgccttccagacagtcacggcgatgtgatccggcctctgcggaagcaggtggagctgct

SEQ ID NO: 1501 - DNA, 600 bp, Bovine  MMBT17639
ggtgggacttcaagtcctggaaaacaccttggaatctttcttgacaggggatctccccttcacactgagagaagaaataaatacaaaagaaatctgggtggtacctctgtcccacacacgtgccttcacacactggcggcagcaacaacgctctctgtcttggtgacgtccaggatcactgtctgcagcctgtctgatgtctggttcctcagttgcttggtcccccactccatcagacacacagccaggaccctcaagcctcgtaggtagagctgcctggccagctggttcctgttcccragtcacagcccgtgatgaagacgaacttgtcctggaggcggctcaccacctgcctctcctggtaccagcgcaggaggtagtataagcccatgaggaatgccatgtatagccacatggcttcgaagggaacagacacacacagagtgaggtgaaatagagtctggctagtaaacagacaggaggaattaggaacatgcatgatgatgcttggccaaccaggttccaggctctctggcatggagttaccaagyttttccagttcactgtcttcagtgagtatgactgactctgacctcawtg

SEQ ID NO: 1502 - DNA, 600 bp, Bovine  MMBT15201
taaaagcatgaatgcttcagcagcaaaaaaatagaggaggaaaagaatatcagaaaaaaggacagttcttccccacaaagtaaacctaaaaatcccccctctctctctctcgcacccacccacccacatcacacccacctacacccacctttacccccgcccccatcaccacccccactgtgctgaatttactttatccattctctgtggatctcactttgggctgactcaggcgggttggtagattgggctttgggaaccacagctctatgagggaggggttaggtatcattaacagcrtacatgttttacagatcactatgcctggtgagacaaaagtgccaagggacaacgttcaactcttctgttttcacctgtaggggtgagggggtgggtggtcatcactgcaccaaaacaggattttgtatttaccccggactctcttattaaatgaaggaggagagcagagacaggctcacatgttttaaaaattaagagaaattaagcacacaaagattcagctgtcaagattttatcttcaagttgtaagtataaaattttttacaatacaaaattaacacaaaactcaaacgtactaaa

SEQ ID NO: 1503 - DNA, 600 bp, Bovine  MMBT14063
aatatagtaaaactttctcaccagtgctcacaggagaaattaatccgaccctttaaaaagtcatttggaggactgtgtgtggggtttttagaatatttataactttggcccagaaattgtatttctgggactttgtgctatgaaaatgatccacaaaatgggaaaaactccttgtagaacgatgtccatggtaaggctgtttgtattatttaaaatgaaatcaatataaatatctgatagcatagataacacaaaatggaataggacattttttaaattaatgcttctgattgtagaacrtggcaaatacttggtaaagcaagatataaaatagtaggcacacatttatatgtctgcagtggtacttttatttttatatatgagcattcatgaggacaagaaaatgcagtagtggttgtgttaaagtagcaagaaaactttttcttgaacctctgtttttcaagaacacagtttatattacttaatgaaaaaaayacacagctttttactttaaaggaacataaaagaaaacaaagaggtgggttagatatgtatttcccaggtttttcaatccagatcaattaaattaaggaaaaaaac

SEQ ID NO: 1504 - DNA, 600 bp, Bovine  MMBT12689
cttatccataaagtaatcatgacaaagctgttttgttgatttcttgattaaaaatttaggtcacccactggtttttataggacactcccaaagattgttaaaggagacattttgagtacaggcgtgtctgagatgctggtgtagtccacttcgtagtgcatttctggtgacctttgaattttctgttacttggagaagaggggtctttatttttatttcagtcacaataaactcagtgagagatacctcatggtcactgactgtcaacagtagtaagatcagataagaaattcacctgcrccttttaggaacttgtgtataaagggcactgtgttaccatgaaacacttgggctcttttataaggccctggggtgttcacacagaagaggactcctgtggagaaggagaaggctaatttgtggagaaggcttattttatcttaattgtttaatgtttttcctagacagatgacttgaagtcagatgttcacctttagggaatacaagaagatacatagcartgactggtctgtaggcagcggggtggtagttctatctttgctttggtagttttgtggacaggttatttgaagacacttg

SEQ ID NO: 1505 - DNA, 600 bp, Bovine  MMBT16243
gacgaactccttttcctatttggaaccagtctgttgttccatgtccagttctaactgttgcttcctgacctgcatacaaatttctcaagaggcagatcaggtggtctggtattcccatctctttcagaattttccacagtttattgtgatccacacagtcaaaggctttggcatagtttgttattttaaaatcaaagaagacacaccataaaaggagattattacaaagttcaaaagcaatccaggtattattctttctctacccatgacagataatatttctcacatatcttcattatratatattggcattctgatactamtgactaaagaaacaaagctaaagtaatctggattttgcacctgattttctaattagctttctttcattatataattattaaaaagaaaactgttctttattatcctagatctagccaacagcaatactgatgcagaattacaaacatatacatatttcacatgcatatttattcaccattcttctctgttattaaaagctggcattcttctaggatacgagtccttaagagtacaagccagctgtcaggtcacatgtatagaaacaaaacacctcaa

SEQ ID NO: 1506 - DNA, 600 bp, Bovine  MMBT16214
taggaaggaaaccaaaaaagaagggatatatgtacacaaatagctgaytcactttgctgtacagcagaaactaacacaatattgtaaagcaactatattccaataaaatttaatttaaaaacagaaaaagtctgcctaaactagaatcccaactttcccctaagggctcatgacatcctagaactacaatgattcccttccaaatgctgtaacataaccgagaatgatcatgctatcatattcatcaagtaaaaaattatagcagacaaaagaaaatcctcaccatcacagccacaaatrttactcagcaatattgctgagtctttaccggagacagaactcctgaatagtctttgttcctctaagaaaagctggaccattattgtttgatgtgagaaccactactctcaccattcatggaatttttattagaaggtaggaaattctgagtgtgcacatatcattctggtgcctccccactgacaggaatcatcatgctactcttctctgttctccagattgagagccgacccctggaaattgccaagaggacagacgtctcagctgccagcagggaatcacccaaaatgtcactgcagt

SEQ ID NO: 1507 - DNA, 600 bp, Bovine  MMBT14052
gaaatagaaaagctgtatatattagttaatctgcaatgtatacatttcaaagtctgcaaatgacctgagactaaaactcctcactgccactttctgatattgcttggagaaaaattacaggaatcactgatcgcaagccccacaacagtgtgattcttgtttcccctgtgtctcacaagtgtgtgttgcttcccttcccctccagcagggcttccactctgctagttatctgctgtgctggtgcccctgacttgtttcctgaaccatgtctttttttcttttgaccacaagcagcaacarttttctttctgcatggcaagtgagaacaasgggacttctggagttgttttcctgatctaagtaggaactgaatctcctttagcagaatagaaataaaataacaggccaggtgcaattttatcttccaggaaatcctcatattttacatcttaacaacctattcatagccagtggtgtactctcatctgggcttaattctatctttggctacaggaaaaccatcaatattcactcatattcaaaacatttaacaactgggcatcccttggtagttcagataacaaagaatccacctgcatt

SEQ ID NO: 1508 - DNA, 600 bp, Bovine  MMBT14075
gcctggagtcccctgtgttaattctgttctcccattccaataccattcctcttcatcttccatctgcccgggctgatgtggctcttctcctttccaggcccacaggtaggctagaggagtacctgggaagcatggccaagattcagaaggctgtggagtatttccaggacaatagcccagacagcccagagctcaacaaagtggtaaggggccagcagagtgatgtgagagattggcagacaccaatccctgcccgggtctcattactgacactgaaccagctaaaagataatatagtcraataaaragaagtatrtaatactatgcacatactatagacattaaaatctctgtttcaggaattacaggtatacattttgattgcattttaataatttagctaaattataagttgttgtttagttgctgagttctgtctgactcttttgcaaccccatgaactgtagtctgccaggctcctctgtccatgggattctccaggcaagaatactggagtgggttgccatgcccttttccaggggatcttccttgaccccggaatcgaacctgtagctactgccttgcaggcagatttttttt

SEQ ID NO: 1509 - DNA, 600 bp, Bovine  MMBT13312
tgcggccccatgaaggtggctcatgggtaaactgcctgacttctgggcagcctctcctaaatgccaactaacaatgaaaaatagatatgcaaaactccatcagcacctttagccattatacatcactcacctttagaatgcaattaagaaaattctgaagctttcctcctgggttctgtttaaatattccagggatagttttctgtgacatcagtacaacatttggcctgatgttccacatagagagtccgaactgaagagaaaaagtccatgctggaaaagatttttgatctgtgttcrttattttctaagggagaccctccccttgaagggtcatctttggtgatatttctgaaatgacctggcacagtatttccaccagctcttacctttggtattaattccagtaccagccgttcctatctgaaatgtcttttataattatgtaattacacacctcatttatccaattgttaagcccagagactgattaaatattaacaactgcttggttctcgtggcgtcattagttggaacacaaccctgcaatctcaggtaacatgcgacggtaattatccttcacatccacgcacagctgaa

SEQ ID NO: 1510 - DNA, 598 bp, Bovine  MMBT12692
  misc_feature (1)..(129): n is a, c, g, or t
nnnnnnnnnnnnnnnnnnnnnnnnnnnnnnnnnnnnnnnnnnnnnnnnnnnnnnnnnnnnnnnnnnnnnnnnnnnnnnnnnnnnnnnnnnnnnnnnnnnnnnnnnnnnnnnnnnnnnnnnnnnnnnnnntctaaggtgtgaccatgagcttgagctgttgacaccttataagtctttggagctgaggatgtaaaaaaaaaaaaaaaaatccagaatgtctaaatgccatgaacacagatttctacttttagaatgcaaattcacattttagtttatgagttagcatttctatgactaaartataacacataaacacatacctcattgagtgtcaacatatcttctactttggtagcaccggtttcaggcagggaaattaacaatgttttggctatctcctttagaactgcatcaatatgcatttcacacaagtcattgatctaccaatgagaaaacatatgtagaagaaacctcctttttcatccaaaaagcacttgagttataaactaacctggagggctatatctggaaacttgcatcctgagccaagcataatttggtaggaattttaggagtaaatcttttcttgatgtggaat

SEQ ID NO: 1511 - DNA, 600 bp, Bovine  MMBT16997
ggtttttatcatttgttatgaagttttattttgtttgtttgtttgtttttccagatttccctactacctttacccaaaactgtctgcttactactggagttttatctcttcccattcctttttggtcatggtgtcctttctgaaagggtgaccctgccaaactgtggttagttgttgatattttaaatggcattaggaaaatttgttggtagtgtggctatctttttctccattccaagaagtaaaaacttccccccagttctgtaaaggagaacagtcttacttaacagacattatacrgtctgtggctttaaggtttgaaacattagatccttatataacatgtttattaagaaacaggataaaatactgttaatgagattggtaagttgtatgttgctacaaaaaatgtatctctggctttacaaatgattcgtattcttatttccaactccaaactatgatcaaagatgcagtgttgataktaatttgtatccctgttgatgttgaggattaactgtatcttttgttttatttttaccatttttttgttgagatattattcacataatgaaaaattcactgttttcaggtgataat

SEQ ID NO: 1512 - DNA, 598 bp, Bovine  MMBT13319
  misc_feature (1)..(10): n is a, c, g, or t
nnnnnnnnnncctagaaaacccccatggacagaggagcctggaggctgcagtccatggggtctcaaagagttggacacgactgagcgacctcacttttgcttttttaaaattacctgtcttcacgtcaagaaagaactctgagaagaatcagcctttatataaaaccagaaaggaaaaagggattcacttctaatttctaaaatatgcctcccagttgtgtgtgtgtkttttttaaatctaaagtaagtggaatttacattaattttwaattattgattgttgaaaccaatatttgaacrtatagggagtgaaagatatgaagtgaaagtagttatagataattacrtcatagaatcagtgaatgtacactccagtggcccaggaaagcctcatgcatttggttaaaccctgtctttgtacataacaacatatttcttttctctcrtattaatacagcatagtaaatgttgtactaactataaaaagaccaaaaacttatttgaagaatataatatatatgtattgtatgcacaggattgttgttcaaatttgacatgttatatcctgatggtgtacaaaaatgcattgaacttgata

SEQ ID NO: 1513 - DNA, 600 bp, Bovine  MMBT16178
ttatatgtttaataaatactgtgtggatacagctggtagagtaattaatttcccatggggagaatgtaagttaccaaaaaaagaaatagtgcataagaagtgtggaggacttgaagcaggattaggaagtgagagtgaagaggtcattccaggcagaagaagtgatgcaaacaaatcactgatatagtagatgtctggtttgaaaaatagtaatcttgagtggtaaagaataaggtaagtggaggggctggagtttagcctgcagtaataagcaaagggtatatcattgcagcctttgtrtataataggctaaaamttttcaattygctgttttggrtaatgaggaagtatcataaaatatttttaagttgtggggtgatttgaccagacttatccttagatgataactgttaaaactgtaggaaagcctaggaggcaggaagcatagtaaggaggcaaccgctgagatactgaggtgacagtggaagtggagagaagagacatccacaaggagcttcsrcatcagtgttgacaggaactgttgcccactggacatgggaaataaggaaggtataaagacgacaccgggcttctttaagt

SEQ ID NO: 1514 - DNA, 600 bp, Bovine  MMBT17727
caggcaggttctttatcactggcgygtcctgggaagccccagagtttgatttctgtgttctaatacaatttaaggataatatttgcttgtgtgctaatagttattcaaatactgatatagaataactattctaagattgagaaaagggcatattactcaattatgacttcttccccagagaatcaatttatatgggaaaagcaaagtattaaaacaggaaactctgtacataaaaagttttctggatttcagggaatcaaaaactcattgaaaattttgccttcttaattgttatttctrctctgaaccatagattaatttttcctacaggtataaaaaaatccatagaaaaaaagaattaattattcaaatatttattcacatacattttcagcaatagtttcaaggcttaattataattttcaccttgtgcttaattgttcagttgtgtctcctgcattagctctttgctgcctcatggactgtagcctataacacgcctctgttcttgggacttttcaggcaagaataatggagtggtttgccatttcctcctctggaggttttcctgatctggagatcaaacccacatctcttcta

SEQ ID NO: 1515 - DNA, 600 bp, Bovine  MMBT17730
cgtgtctgactgtrtgcgaccccatagatggcagcccaccaggctctccrtccctgggattctccaggcaagaacactggagtaggttgccatttccttctccaatgcatgaaagtgaaaagtgaaagtgaagtcrctcagttgcgtccaactcttagcgaccccatggactgcagcccaccaggctcctccatccatgggattttccaggcaagagtactggagtggggtgccattgccttctccaggctaatcctagctcaccttaatctcaagggatgggtcattctagaaacaacrtggaatttggaatcagcagacctgagatgaagctccagctctgccacttacaagctttataactttactaaagtagcttcacctatctctgagattaagacagtaatagccaaattattccttcatttttactttattttctcatatggatcctctttcagaacatttgaagcagattatgaaaaattatatgtataataatcacctgaggctgatgaaacagaaatagaaaagcagaacaaagaaaacggagaaagcatttctaactctaaaggttgatataatagccataaatataca

SEQ ID NO: 1516 - DNA, 600 bp, Bovine  MMBT17734
ttatctccagtgttgcaaggtaaggggttaagaacatgcttaaaatcacacatctagtaagagagctgagagttgagccaaatctaattttaaaacattagtctttatcctatattgtgttgcttaggggagtagaactgagaagcttaatcttctcaggtaacatgacaataatcccgggaattatgtatggcatgtctttttcctaagtgctagtttttccagactacggaaatgttaatcagtgttctgtgaaaacccttggcccgacaaagaatgatctaagaattttgttgtctrtatcttgagactcatgtattaaggtttaaagggaaagtggtaatgatagttttcatttaatagtacttgtataagtttaccatggttgctatgacagatgaccacaaactgtgtgacttaaaacaacagaaatgcatttccttagttctggagacagaagtccaacatcaaggtgttagcagcaccatgcttctgaaggctctaggggagaatccttttcttggctcttccaacttctggggtctgctagcattccttggcttgtagccacatctctrctctgtctcaayataacsttat

SEQ ID NO: 1517 - DNA, 600 bp, Bovine  MMBT17735
aaaaagcagagagtaaacgaaaaggtcatctcacactcgtggccttctgagtttggggttttcctttttcctttggccactaccttgccagtcatttccatgttgtttttcttgtttaatcaagaaaaacaggcaagacaaaagggattattttccagaagctctgcttgtttagcgtcataggaatttgaggttgttatctagtatatttgggatgattcttcaggggtaacagcgaagtctacagtgtttatgaatttatttcctagtgtgatatttccaccaccttttactcttccrgatgggtttcaactgcatctgtttgcttttcctgttgcttgtgaaagtacacctcgtgatcactatccacagctgctttgtatgagcctcagagaattctatgagcagggaaattttaaaacatacgagaccagagtttttcataaagtcttattaatcatattttgaaagggataaacgtcttgccaaatttgtctgaatttctggtcaagtaaaaggcagrtcttcaaaccatcagacaaaatgtattcagtttatatctagtgtgtccagaactacacccagctaccacatgggatg

SEQ ID NO: 1518 - DNA, 600 bp, Bovine  MMBT17736
aaacacaaaatcatttgtccgcacaaaattaagaaccaccaataatttacaggccatgctttccaaaacagtagtataaatactgtatcaagtgtagaaatatatatttacaaagaaaaaaggaaaaaaggaaagaaagraaggaaaaaaaaacactttcacgcaagatgttaaagtacctggaattgacatctccatgtccgagctgcccatgttgcccgtacccaaatgtgtagacgtcgccattttccattaaaaccactgaaatcaaatttcagagctttattttttcattatacrcattttatatttctatcacaagtatactgaaagcagttcaagtttcactatttttaaaattttaaaaatttgtagagccattaagaataggcaatagaagcaaagacatttatatttaatgagaaacaatataattttagttctctaaaatatttttgttgttataaaaatacataatgtttttaaaacatacactttaaacttataaatgccatttaataacactaacatttaataaaacagtggtctgagtcaactgttaagtctttttataatgagtaactacatacaaaatactct

SEQ ID NO: 1519 - DNA, 601 bp, Bovine  MMBT12643
  misc_feature (1)..(1): n is a, c, g, or t
ncagaagacttgggttcactccctgggtcaagaagatcccctagagaaggaaatggcaacccactccagttttcttgcctgggaaatcccatggacagaggagcctggtgggctacagtccatggggtcacaaagagttggacacaactcagcaactaaaacagcaattttatgtatacacacactcacgtataagtgtacaaatcacacacatatattaatgatttgtttcacagatttaattttaacattttgtaattcatatgaatattatatttgcatatgggcatgtrattttacrtctgtgtatacctgtacacataatgtgaactgagttaaagaaaaaacaatttcaaagtaacttgacagctttccattttaaaaagttaaaattgaattgagtttcttggcaaacagattattcacagaagtgaataagtgtaaacagtgtggtaaactgaatagaataaatagaaacagtgttttaaatggygcttaggttctcrgatggtctttagcagctttgaaccgccaatgaagagccagaaggtaacagtaacagcaactgatgcyagtgctagcttgaaactagtacacaaag

SEQ ID NO: 1520 - DNA, 600 bp, Bovine  MMBT11903
ctaggggatcttcctgacccagggattgaacctgggtctgctgcagattctttaccgactgagctaccagggaagcccatcgttctttccatagaratatctaatattttaggcattcttaaaaagwgttttataatcattaattatggaaatcatatcattcattgactttttctacagcgttgaagaaaatatttattttttaaaataaggaacataagatttaaagaaaataaaaagttgctcgtgatgtcaacaaattaaaataggtttaattttttctattccttcccatatttragtccatgtttcatttcaccttaatttttgaacaaggtttgaatcctagagtaatwtttttttccccctctgtggatatccaattgctctagcactattttttgcaaacattatctccccgctactgagttgctttcgcacctttgtcaaaaaatcagttgagcatatttgtgtgactctaattctggggtcttttctgttccactgatctttgtgtctgtccttccaccaacaacagcacagtcttgattatggtagctatacaataaatcttggaattgggtagactaatcccttcta

SEQ ID NO: 1521 - DNA, 600 bp, Bovine  MMBT16305
aaactcaaaagcatgcacatttttaaccaaattaacatctatgggcctcatttcaatcaaccccaattaaagatcattaagtggctgcagataaaggacaatgactagtctataattactggctctttcatgctgaaaatccaattctcccatgagcatacgcacatctgcatgatttaaaaatgtacatagaaaataatttgctttttgaaacccatagaaggaaaaactgtaatttttgcttcaaggggtttgctaattacatggagatggaaaaaaagaaacatctacaaaacaacrtatttttaactctcatattcctgccactcaaaactcaaaggccttcaggtaacctagcaacaaaaaagaatcacacaaagatgaagtattccattacagccaggycactcacccccaactgctgctcagatgctttttcactgctgttttcatcacaagtctaatacttgtgaaaaatgaagtctttggcatttatataatcaattacacaccttaaaacatagttttgaacatgtcaagagaattacaacccaggacaaaacccatttcttccctaagtgtattgctattacattaata

SEQ ID NO: 1522 - DNA, 600 bp, Bovine  MMBT18344
aggtataatgttaaatatgtgagagcttagggaacaccaatattctcactaatgaacatcccaggttatttaaaacttctgtggaaaacctatctgtttatatttgttctgaaacatattaatccaatttgaaatactagtacaaatagtataacaacagaaattaaatctttggtaattggggctctcttattgtctcagaccattcattgtgggcacaaattctcacatacagaattgaaaacatagataagtctgtatcagagatggaatttagtgtgtattagactaagaccaaarasctataaatttccttttttgggggaataaatatgtaataatattaaaataggtagcaaaattttaaattaaggttttagttgggaggtctgggtctggcttatttataatctttcaaatgtgtgtagatgttctatggatatgtggatatatgcctaaggcagtcaactatatttatatgtatgctaaatttctattctaaacatccttgtttaaaaaaagatgtatccacatttattctgtttaggaaagaagatatgcactggatatgttttccccatgctcctattataattaatt

SEQ ID NO: 1523 - DNA, 600 bp, Bovine  MMBT17105
atctcaggaatggcatcgcattgcttctaccacattaattggccaaagtaaatcacagggcttgcccagattccaaggacagagaagtagactccatctcttgattggaagacttcaaaagatatggatataaggaaaggaagcactgtgaccagggataataactcagagtaagaggctaattttaaaaaatgagtctatttaattacatttmagtaaaattatttagtgaataatattaaaagtggtgtgtggatgtggcagaagtataaggttgtaatatgaattgttaaagtttgraaacacttttctactctyacattattttcacttttatagcatccctttgtcattgtcctcataaactatctttgattgttccaatggccacttctacttgaagcagggcattttttttgaaaatgtgtggcctactctgttcttcatggtagtgtggtattctgattgagccctgcattagttaagttagatgtaccatgcccagcttcttaactgtatcccaccacatctagatatcagttcagttcmgtcactcagttgtgtctttgtgacctttatggactgcagcacaccaggctt

SEQ ID NO: 1524 - DNA, 600 bp, Bovine  MMBT17662
cattgacttccccaagggatcttctaaccaatttataaatgtttcctcaagaaatcccacactgggagagccagttaattctgtctagagctataaatccctatgcagatatctctcttgatttattaagatgatgttgctccctgctagttcacatcattcagttattatatgagaaattataaaagtccattgtctacactgtgggtaactattgggtttaggtactggagcacatatgctatagtttgccatagttcagaaaaagaagatataaaaatgtatggaatgtcccaattrggataaactctccatgtgctgtataattcctgacattataaagagaatacttggtactaagcatcctaactggcagaaactaagagaactagagggcattaaatactaatgttttctagggtacctgtctttggcagctttctattttcattcttttccctcttggtttttagtatccaactcatactatattacctagcaactctctgctgatatctgtatcaagtctttaacaattattttaaataggaaatgtaaaatctgcatgtggtttgaatctctctcctgagctccagatct

SEQ ID NO: 1525 - DNA, 600 bp, Bovine  MMBT17104
aaagtatcctttgctaatcataataaagcaacaaaaagccagggtatgatcagggaggaagactaagagggaataagttaggataataaaaagaagagacaattaggagttcaggracctggatcctgtacagctctgtcactatttctgtctccttatattgcatcatttgcttgggtggcaccttacttaccagaaaaatgagtgaggcagaatgatctctaaagtatcaccagcttcaataaataaagattctatgattatatgaataatttatatcctgagattgttgagaaaacrtaccacagacctcactgaggaaarctttacaaagaataagtgtgaacaaagccrtagtgaataaatagtgmctacttactgaaatagttatyttgctagcttctctgtttctaaggggaacgaacttaagtgagatcaacaaaattttcctgcttagaatagaccaagtaataaaatgtgaatttataatctataatacaagtaatgcttgccatctgttgggttgatattctgtgctgggcactttatgtctttacctcctgtgatccttaaacaaccttgcaaagtagactccatcac

SEQ ID NO: 1526 - DNA, 600 bp, Bovine  MMBT12779
caacagaagacagaactgagctgcctcagggcaatgaggggtgaacatcaagagcagtaaggacagcagagtggaactgcttgtttgaaagcttacctgagctgctttggttaggaaatcaagacgtgaaatctcaaggtaaaaaagctagcttgtgacaaagccagagtgtcttggctttagcgggaaagatcatagaagaagcttttcttgcaaacaacctggttctcttacacagtatgcaggtaygtgtaaaaaaagccaatggaacctctcaaagacgtcttaagtcttaaagarttaaaaaaaaaaaattacatggagggaagtgggttctagtgtttcacatgaaacyctttctagcagatccaagttatgccatgcaatactttaggacagaagtagagaaaaacaaaaaacaagcaacaacaacaaaagcaccccctccccaccaaaaaaaaaccctaaatgccaaatccagattttaagatatgagactaactggaatggaaattcttattgctatatttattaaatatgaaatttgagaaatcaaagactcagaaaagtaaagagaatgtagtgggacctctgtctgct

SEQ ID NO: 1527 - DNA, 600 bp, Bovine  MMBT17005
ttttgattttttcaagtattgcattaaatattatttatcttgattactgagtcttttggcagtcttagattttacatccaaggcaggtgcctcaattgcttctgttaatcctgactctattaagtaatatgattcttgcaccagtgctattaamtgactctgtactactgctagtyaaatactctgctccctcaaattctggatgcaagagaaatatacaatataggcaaatacaatgcttgccctgattgttcagtgccttaatataccaagtcattgatataccttaaaaacatacarggtgttgtaatctattaaccacatgctaatcacaatccaatttagmataataggaaaatattggttttagcaggtttagaaaggttttcagccacatttctccaataagataaaagtttataattataatttgattgaatacataacctttgtcaagtctttcatggttaacttaatagaattccccagacttaatgtaaacaagcycaaccaaatagaccatgtacttaagagtggttttgtctatttactataataaagaacaaaatgactttagaaactgaaattaggttcccaaga

SEQ ID NO: 1528 - DNA, 600 bp, Bovine  MMBT14730
ctttcacaaaacagaattctcagaattgatgtgttaatatcattctcttaattacttgacatctgacctaaatagcagtaacaagatgatttcggccacagtgaaagggacagtttaggccgtcattcacatatttttggccacaaaaaaaaaaaaaaaaaaaaccccacagctattgagaaaagaaaaacatcttatgatatcaggcagattgtctacccagctgaagttcactaaataattactttatccaccacttcccttttcctatgtatatcagcgtagatcttcaacaatacraagaatttacttaccatttacagttatcattttggggtgagaagacaatagtttgggaagggagtgtggaatcttcaaagaaaattgtatattagagtgatttgtttatggagatttttttttaagcatgaaacaaaacatatagatataaatattggttaaaaaagaacactaagaagccctgagcggggtgggagtggggggtggaaactccaaataacggaaacttcattaaaagatagaaattataggtctgaaattcaagttaaatcagtaacttctactcatcaaaccaaagtt

SEQ ID NO: 1529 - DNA, 600 bp, Bovine  MMBT12721
ccgtaacaaaaagatcagtagcaagctctcaggtcccaaatctgatgtttctcttgctaagagaaagaagtgggatgctctaccatctttttgagggttgacagcttttatgtaatcaccaaaaccattttgatggactgaggccatatcacgaccaactttcttctaattacattactctttatattttcaaagtacactaaagcctatgatcaaatgcatccccaaatgctgcttttgacttgctaaaaatttactgaaaactactactctagggcagaagtctgcaaactttttctrtaaagagccagatactaaatattttaggctttgaagaccatactgctctrgcttaagtactcaaactctgttgtagtgtgaaagtcaaaagcaaatatgtacattaargggtgtggttgtatttcaataaaactttattcacaaaaacagccctggatccagcctgaggcctgtagtttgcagatctctactctagggtcataactaataagttagtcaactgggtggtaccagcacacaaccaacttattcaactcgaggcgtttgatctaccttaaaaaaaataactaaccataggca

SEQ ID NO: 1530 - DNA, 604 bp, Bovine  MMBT18380
  misc_feature (1)..(4): n is a, c, g, or t
nnnnaaacacttgtagaagaaagttttgccttcatcacagcctggttctcctgggcccttttctgtgttagaaataaccacacagattgatgctgggcattgatttgcaggagaaacaggaagcaattctctcctaatcaaatatcatctctgtgtatatttacaaccaggaacatagatggcaaacaaaaatgttttagtaggataagttttatatatatatatatatataaactatattcaagtatatatgaatgaatattgttagaactgtcactgcttttccatgtaaaagggattcatrcttttagccaaccaacataagataaggaacattcacctcagattctgggcaacatatgcctgcctggaattcatattttctggatacatttcaagtccaaacatacccaggaacccagctgattctccactgcagaagtgagacacatgacctgccttttataggaaccaagtctctcaccaaaattggttttgcctagtgagtgtcactattaacatgcaagccgtgcttacacctacacttggaagctaaaaatggagcagaatgctgagacttagtgtaaaacgtaagctccgccct

SEQ ID NO: 1531 - DNA, 600 bp, Bovine  MMBT14244
ggtttttctttctctgaaaaatagtgacttgttctttctgaaatctgaatgatcagatgcagctgcatttttgttgctatttgagtttagggagagggaggtygagcactctgaagggacacagagattagagtaactgttaggctgacagaaggagaagaatcacctattctttgcctagtttaagatttagagacagtagagtgggtataggtgaaaattgtagaaggaaaataaaccagatggattaagatttttttttttttattraagtgttactacatactgaagaagatgacracgttctaccattagaagcaataaaggaaatcgcagaggaaaaggtcaataggctttgactacttaaaaatttagaactactttaaaactttttattgcttagataatgcatatgtgcttagaaaaccatcggaaaacaatagaaaataaaaattccctcaatcattctcccaattggcagctctattgctataatgacattttacgatcatcctcccacacttaaaaaaatttttatgtaagggaaattaaatgtgcaaacaaataaattggaaaagtggtttccagcacagacaaaga

SEQ ID NO: 1532 - DNA, 600 bp, Bovine  MMBT16311
ggaaattttttaaaaggtttaggaaatagtccttggcattaacacagttccagaaatgttttttattcccataagccaaactggcaagtttatagtttagggtaattgtgtagaaaactcagtagcagggattaattaaccctagatgggaataccaattgggacctgcatagcaaatcataaaagcaacactcaagaaaracaaactatttctgagtaattaaactgcatcctgggcataattcacaaatatttatgtgagtacaaaaatactcagcacccagcaagttaaaattcacratgtctgtcattaaaacaaagattaccaggcatacaaagaagcaggaaaacatgacctgtaacaaggaaaataattaatcaatcaaaaccagcctgcaactgacacagatgttagaattagcaaacaagtacatttaaacagttatagttattctgtatgttcaaacagttaaacagggaaatggaagacataagaaagacccaaactgaacttctagagatgaaaactataaagcttggggtaaaaatcacaatgtacttaatggcaaattacacttgggaaaagagaagtaaactcaa

SEQ ID NO: 1533 - DNA, 600 bp, Bovine  MMBT16318
ctaaacttttatttatttatttatttattttatatcctatacttttaaaatcaaggcaaaaggcacctggctagcaacaaaattcagattacttggacatgacaatgagaataaaggtcccctktccttaatcctacatccatctggaaaaagcctatggaggacttcataactaaaccaragatcactctaagctaactttcagatcattatgggaacccattttacagcatccttcaaaggctttccttcagagccttacttcccaagagtyaggccacttcaagttacattttaacrcatattagttataatgctaccatttatgcttatttactctgtggcaattatttaagcaaacactctaaatttctccatataattgttataattgcaaattcttataattatgttctcaaaagctgcaggactaatctgggaataatttttcactattagttttctagctgccacacttttgctccacattaagtcattcaataaatttttggaaataacagtaaattttggtgaggattagaatgaaactcttagcaataaggcatttcttttcaaccattgagtgcaaattaaaaaggg

SEQ ID NO: 1534 - DNA, 600 bp, Bovine  MMBT14977
tgtggttcactgggcaaacataacttgggcactgactgtatctctgcatgtgtttgcaggctcgcttcttgccttttgacttttaaagcactagttgggggaacaggtttctttctgctaactgaatcttgacagatgaactcctccttgtttggaagtattttaatccttgccaaattaatttacctagttgattgactggagttaaaattcaactgcaaaatgagagcagattgttctcttccttgcgacagattcatgtccgttggagtacatcatcttcaacaaatatgaccracrcaggaggtgactctgaggattaacaaggtttggccatgtttatataactttttaagctcttattggaaaagtgctttggggaccataaaatgttgatcttaatctgtgtacgcttagaatcagaattgscttccataagttcaactttttctccaaaggcagtggggattagtaaatcgtgtttccagaaagttcaacctatatttgagaccagtttaaatgatagctgatgtgaattcagttgytccttagaacagagatcctccaactttaggatgtctcgaatcgcctggagggctg

SEQ ID NO: 1535 - DNA, 600 bp, Bovine  MMBT16392
aaacttactcrgggatttgaatcatgccatttgtttttttattgtttgactttcttctccttcaaattggacccatgtcagcataagcacactggctgacaccggtcctcactggacatttccatgacaaacctaaaagtcacaggcaacataaattgtcaaggttttatgartacagctctgctaagtgcaaagtattttctagacaaaagttwagcgcaaaggtagaagggtcattttagtgtagtaaaaacagaggagtcctggatgcatttttttagaacctcaaattaattatgraatcaggagtgctgccctcctaacccttactttctcatgaaccaaagtgtttttcccagaaatgctcaacctttatttaattaatggaaaaaaaaataagggttttaagtattatgagctgaaaytgaccctgcctaaacatggaaaatattttcactttccaaaccatgaaaactattgatcctggctttaaatatgaaagaaaaataaacctctgacaagaaaaagaaaacaaatgaaccttgcagccaactcttgctttttcaagtttcaaacaccagaagttctttctcaaatatt

SEQ ID NO: 1536 - DNA, 600 bp, Bovine  MMBT17828
atgtggctaagatcacacacagtgtgctctgccttccagcgactgaacttccaggtgagaccagattagacagagaaggtcggaggaaatttaattcttatcatctactgtggaagrctggcaacagcaatccctgcacgaaagaagaggctcctaattatgattaaaaggataattcaggcaaggtgactctagatcagcttcagttagtccttatttttgaatttcatatttaaatccattcccttgacagcaacygaagaagtgaaacacaggaagaaaattgtctayaaaggatarcatcaaacactaatctccatgtaacrgagactctacagaatttcaaaggcatgttggtacttgagtgactgctatgyaccaggcaatgtagggggtgatgggacacaggatacaatgatgctctattcggaggcagttcctgtggtatatgactcctcagtaagccctgcagtgcaggcttgctcatatccatttcacgctatttacgcctgcygaaggcggtgtgcaacatggatgccagtcatccccaktcctagtagccatgcccttatgtcaccattggtgcctgctcagtcactc

SEQ ID NO: 1537 - DNA, 598 bp, Bovine  MMBT16911
  misc_feature (1)..(80): n is a, c, g, or t
nnnnnnnnnnnnnnnnnnnnnnnnnnnnnnnnnnnnnnnnnnnnnnnnnnnnnnnnnnnnnnnnnnnnnnnnnnnnnnnntactgggttaaattggacttaaagttctcttttgagtttagtatgcactgaaatatttctttgtctaaaagcgagttagtggactgggcaatgcacttaaaaatgaggaaaagtgcttataagaatcactgatcatggatataaagttgaaaaaagttagaaagtatgtctaatgatacattattataaaaaataagttaaaagcccaatctcctaaccratatttagtattgatttttctttgttacctagtttagggaacataattatgaaataaatcaaaagaaacagtagttttagggagcattagaaatgacatttaggtactgygcatgacattgaagctcctgaaccctgaggcactcctttatttaatttaaagacaatgtggctaaagctgactagattattttctggtatgtaagaagctgtttgttgttagaaaatttgactaatttgcttcccatttttactaagaacaggataaatyacacataatatacattttattcacttag

SEQ ID NO: 1538 - DNA, 600 bp, Bovine  MMBT12732
tttataataccctgtctttaacttggtatataccaccttttggataaaaagattattggttgtttgagatgagatacaagaacaaaatcattcttgaggttccacctcgaaaaaaagacgatgtttgctcatagcagctagtttgacacccctgttttccttaggctagccttcacacaacgagcatgcatatacagccatggttcactgcatctgttctgaagttgagaactgctgcttattcaagtacagatgcccccatgtgatgtaaggagacagttgaattgcatgtccaccatragaaaaggaaaataaacgatgaaacaaatgcagcaaatataggcagctggcattcagaacacgccaaaaagctaacactcatgaattgtcattataagggtctttctttcctttaaaaaaaaaaaaaaaaagtctttctttgcatattttgaaatttaagggtcccagagaatcatgaagtgccttgtcgtttttgctgctgactcctgatgacctctagctgttttttgcattgctgatagtaagttgaaaggcttttgttttcatctaaaagctttttatgttcctgcaccagacgag

SEQ ID NO: 1539 - DNA, 600 bp, Bovine  MMBT15597
gctaaaccactaccagatgattattggctttgtgttttatttggttataatttgcaaatagatgtttaagtaaggttatttactctctcattgtttctctcccatcctcttcaccccattagtgatgggagggggttggccaaacacacacctcctgacacctgacattgagactgaaagaagggcaagcacagtgcagcaagccgcttgcagaggcatgtgtgctgacactggttgtagtaaccctcagatggaagaaaggaaaaaaaaagaaatctcttaacggagattgagagagcrtttcaacatgtcttttgactgacgtgtttgcagatgtttaagtactttgagcggaactataatttatggaaacatgattttgcatctggttgatttaccttagaaacatcccattgaaatatgacatttgattttgatttttcaagaccacctcaaagacaaactggtttrtgttatctcctaaygctgttgacataaattatgtgctggtcgtgcctatttcagcaagtcttccttcagtaataccatgaattgtaaatgtgttactaaactagtggtaaactctgtgggaatggacca

SEQ ID NO: 1540 - DNA, 598 bp, Bovine  MMBT16933
  misc_feature (1)..(9): n is a, c, g, or t
nnnnnnnnngggtgggatggagggtacctgcacgagccgtcttacctctaaataagtgagacagctaatgcagtttggtagattcctaaaagtctgttcctccagaatttctcccttactcaatggctatggtgaataaaacttttaacactggaagtattgacttttagagaatcctggtgaatggattatatctattttggggccatttagaaatctcaatgtgttagctggaaagtacaacacattgttatgttagtactcattcatcttaaacaatgacttgtttatagggttgaragtttgaaagaacatgattctgaggaaatgagagtaattattcaaacagggacaagagtcataaaacagctataggtaagagtgcaatgcaaaatttactcatgttgaaattttggatagaattgccaagactatttctctatgttattaaytacatgctgttggaagttcttctttcaatttcctttcccttctctcctctccctttccttcctccttcctttcttctctctttcattttacatttatttaaagtagaatcttacatttgaatactccattaaggggtaaaattgaa

SEQ ID NO: 1541 - DNA, 598 bp, Bovine  MMBT11614
  misc_feature (1)..(115): n is a, c, g, or t
nnnnnnnnnnnnnnnnnnnnnnnnnnnnnnnnnnnnnnnnnnnnnnnnnnnnnnnnnnnnnnnnnnnnnnnnnnnnnnnnnnnnnnnnnnnnnnnnnnnnnnnnnnnnnnnnnnnaactttacagtagcagtcactgattggctgactttcgaaaccaggggtgacgactgctttcttacctttcagatgtgcaggtattggactgagactgttattgactggctgatttgcagaggcatggccactggagtgaggctgtcattgattggctgattttcacagcatgtgcactgatccartgttatttctaatkagtgatggttacttattcatgacttgrgacttcgggcaaagaacagtctattcctttactgaacataaaaactaaatatyttaattctcatttcccttcagaataacctacaggagagaccataaaggaatatacagatctatacttctgcargtatgattttcaactagtattgccatataaaagatttaagtgtcagttattgggttggaaaaataaaaaacmtttaactgctgaattttgatattgtattataaatgctaaatacacaatatttagtgcat

SEQ ID NO: 1542 - DNA, 600 bp, Bovine  MMBT16277
ttccacagcagcagcgtctacaaagggcagcacaaaatttgaccgcacagtttaggaaaagtggcctaatagaaggaacacaaactaagaagaacccctctcttgccatagtcagtcatcacaaacagaaagctttttccatgagtctggccaactgcactgaaccaaaatggctcagacaaggccatgtctatctttgaagtgttcttaagggtgattctgttatttaaatagggaacagcaatttcttaggaagtcccttggctgataatacatttgttttgacttgtatagaaatcrtctcatcttagctgtttctaaggcatgccaaaagtaagctgaaaagtgaaaaactagtcaactggacatttctaactatctggatccttaacaacatgmatarcaaacatctatttctccagttagcatatctttcttggagaaaataatggtgtcttgccaccatagatgtttgagtccctgtgaatacatgggtagaaacaacccatccaaactcatctcatatgagatggctagaaggtcttgtcctactctggaactaaaaagctatccttaagcaaaaactgacttttccttcct

SEQ ID NO: 1543 - DNA, 600 bp, Bovine  MMBT15535
atggtacctacttcataagactgtgagaattaaataagaaaatatgttaaatacttagctactattaaattaaaacactaattaaagcactcagcattagtttttaactgataaatcaggtgcaaatattaccaacctttaaattgtacgatttctccattctgagtttttggcaatccctttagacaaacctcactggtaagagctaaggcaataccacagcttcctagcaagaagccaatctgctgccccccagcatcctgtggagaaaagataatgaacatggtaggggagcgaacrtgagcatacccaagcccaaaatctgacacttagtaatgctctggcacttgygcaatacattcatgaaatccccctgatatctggcaactgtcaaaatctagtgacaatatgttcttccaaataactgctacagcacaatgatttcctgagtgcaaaccatgtttcattaatctgacgctgctaacgatgaattccaccagccaaatgtggccattttactcaaaggtcagcaatgctcctcttctaaattaatctcaggaaatgaaataaaagtgaacatggttaagttgtcctgaccta

SEQ ID NO: 1544 - DNA, 598 bp, Bovine  MMBT16270
  misc_feature (1)..(9): n is a, c, g, or t
nnnnnnnnntattgagcaaattactatggcaagtaatttgattgcatgctcctcattgtcagtaacactaataatactccctactaccatgattattgtgaggaccaaatgaagtgtgttcagaaccatgcttgatatagatagcagtgccaggtatcaaatgttgttgccamagaagaggatcagtaactgagtctgattgtttcctgagaagaggagctggcaagagaagctgaaaaagagtggaaagagaggaagtatgaaatgtaggaaatgatagcatcacaaaatctaaaccartaaagaaaatatcagagggaatagtcatacatttcaaatgctgcagagaaagacatacctaagatttaattacatctagattctatttactctactggactttaatagtctttactcccgcagcaggcacttataagctcactttgttacgttgacttgcttttgtacaagccctcagtcatactcatttacataacgtctgcgcaccattttcttctacgtatggtctcctcaaccagactctaaactcttcaaagctagatttgtattttttgccctaaataataaacttcttatt

SEQ ID NO: 1545 - DNA, 600 bp, Bovine  MMBT14990
cttatgctttttgtaacattttcaaattcgttgctgtcttccagatgacaggaaatgcaggtctgccttcctcctgggagatctttattcacagacaagtcaaaaacccctgacaaaaggcaaccaggggaacttgttgaccttttagctgtctggctaacatcagtgcaagtattgttccctgatcaaacaagaaattcaatttaaggggaaatttagaaggcatttgaggcgcgctcattttattttacctcttgggctgtctttcaaaccgagaacaaatgtaaataaacaagagcrgcactctcattccgcacatacaataacaaatatctggcctcacagcttgatgtaaatgagccatggtccccttgtttgtctctccattcagccatttgtagaatttttttttatcctttctctttctccctccctccctctctctccccctccttctctttctctctctcacacacacacacaattattgggaagtgaaagctttcacttcttcagctagacgatttgttttcttttttcccattcatttgttatatcttgaaaagctatgttcttttataaatgaggaaaaaaagaaca

SEQ ID NO: 1546 - DNA, 600 bp, Bovine  MMBT14774
taagagtacacattaaaatcaaatgtctttcaatgtagaaatgcactgaaatgtcaaatgtacattaattatctaggatccactttgatgatgtcctcttgttaattcatttgtcagatagcaaaagttagcagccccagaaggaagccatcaaatgtgtaatagacagggagatttggcaggcaggcagggaaaatttagccaagccaacactaaaccacttacggaaatgtaaaacttaagaatgtccagagtaagtcccggaactcaagacctggcagatataggctccaaggacaraagtatatttttcacttacrtttgcatgaatatgactctttggaaactgacctaatttaaagcaggtttrtatgctkgacagttttctcttcctcgcataaaacatttcatttagtaataggaaatgctctctctggttctggcttgcaggatgcatcacaaataatcctacaaatgcttttttccttttcattaaacacattattttagctacgaagacccttatctaaacaaaatgcacctgccaacaatgacttaatttcccaagttgctggagaaagttgatagagacttgcaaac

SEQ ID NO: 1547 - DNA, 600 bp, Bovine  MMBT16972
tttcatgttagtgtttatcaaaatgttctattcatttaggttgttttgagcaattgtgtaatactactagtcaatgtaatgataacctaatccagaaatcacttagaccctatggttacaggaatttttaaagtgtataaatttaaacttttatacaaatgtttgatagattaaaaatatgatgggatattcagtaaaagatgttcaatcataaacatgacactagcataaaatgttgaaggggaagtagaatgggaataaaatttcaaacatggaaggcatggcagaagtagagggaargcaggaagttacatatagtttttgcttgctaaagagaagcttgtgggtttatttcttaaatggatgatagtggatagcaaactgttacaagatttaaattccatttggatacatttaaaactgatggttttaattagatactgttgtcagctattaattgccataaagataagactaaacctttaaaaaaaaaaaactgatgtaaccatttaattttaaaatgtcaatgtttacaatatgctacaaattatattctttgcacctgtttaaattatgataaaattataaatatcaaatttt

SEQ ID NO: 1548 - DNA, 600 bp, Bovine  MMBT12697
agtttataaatattttcaaattctttcataatttatttaatcttaaagtacaaattgaagcaatttttgactataaactgactgggaaattgagatttccaaggggaataccatcaaatttataaaaacaaaaagatcagtattctagtgattcattttcaatatattctctgcattgttaattatggctgaactcaaagtattttccagtgtaaattatacacaagacttaacaaatagagagacctaaatctgcaactccctttacagaaaccaatgaaaaatctatacacagcgatraaattggcatacaaataaaagaactgtcaagacatgtatccctaaaaataagcctacaataactattttaaaggctgtgtgtggtctcacccatatactttggcaagatgcactttctccaaccacagctagattcatccgaatgcagtggcactggagagcctctgtctcacctgtcaaagctgaagaacgtggttccaaagaccaccatgagtccatggagaaaagccacagcgctacagctgttattgataagcagtctctacaggagaaaacacttcaaacaattatagcaaccca

SEQ ID NO: 1549 - DNA, 600 bp, Bovine  MMBT14763
gaatattcattggaaggatggatgctgaagctgaagctcccgtatttggccacctgatgggaagaactgacttcattggaaaagaccctgatgctgggaaagattgaaggcaggaggagaaggsgatgacagaggatgaaatggttggatggcatcaccaactcgatggacatgaggttgagcaaactccgggatatagtgaaggacagggaagcctggtgtgctgcagtccattgggacacaactgagcgactgaacaacagcagaagatgtctcttgtgcacattatratttaggaarcactggagctggactatcaagtacaaaaacttgccctaagccacagtacttctgactcttttcaccattttatcctctcaagatattgactgtggacaaaaagacaaactcaaaaccctggtttatagcagttttacataaaactgtgttcctagcacacaaagggaagtgagtaagaggacaaagaaaaccagcagcttttgaactttcaccccttctcagaattcttaaaaattcagacagctgtcctctaaaaggcattttctctttggcagttgratctttgtagtctgacttgtg

SEQ ID NO: 1550 - DNA, 600 bp, Bovine  MMBT17695
gagctatctgccacacatttcagtgataatttttgtgagaaagaggcagattgcgagtgatggatgaggtgagctgtgacagtccaggacggggtgagtcagggccaaagaatgtgggcgggtgtgaagtggaatggatgggggaggtttgtcttctctgctcaactctgatcctgtttagggaaatgcgcagaaaggaagggccctaaatgcattgaaatgaagtgtaagtaacttctagacaagagttatcaaaacccagcctctatgggcaagcatacttcttttctgtcctgcctrcggaaatgcagccaattctacaatcaattaatatgaacagggtayattaaccatgaatgtgaacccaacacaccaaatgtaaatccggttacatatgatctgaaataaagggtatgttctgggcttcatttgcatcaccaacataaaacaagcactagaaggtaggtgccacctcatttatttgacatcttattataccagtagccaaaagagcttggaatatagctgtgtataagtctcacccctttgcctttgaaataatcaacttctattttttttaaattttgtttatagcaaata

SEQ ID NO: 1551 - DNA, 606 bp, Bovine  MMBT12632
  misc_feature (1)..(6): n is a, c, g, or t
nnnnnnagtaactctgatttgcttcacccagtagctcttagtacacaccactcttacaatactgattatactctactgcaatgccatcaaataaaaatacacatgccacaagcataattttaaatgccccaatagcctcattaaaaaggcaaaaagaaattggtaatttttaacaatatattttacttaaccagatacatscaaaatattatcatgtcacatgtaatcaatacaaaaaacaagatattctataatttttcatattagttctttgaaatccaatgtatgttttccctttacagcatrttttagacactraggtgttatcaaaaatagttgatctgtatttagttgtcataaaagttacaactgaaaaaagtagattcacacacccaagttgttcyaaatgaacttgagagttttataataactgcatcaaatatcaactttatattttaagttaaaattaacatccaaaatcagttcctcagtcacactagtggctaatggctatgaggttggatcatgtagctctatggtaattatttgcatatacatttgtccttcccactaaatcagactatatctaatttacctatatcctcc

SEQ ID NO: 1552 - DNA, 600 bp, Bovine  MMBT16326
tacctctgttagtttaagagctccttgaaggaggggctgctttcaacagcttattatcccatcctctagggggataatgttcatgtaaaatgcttcattagctgaaatctaaatgtggccacttttttatcattgcaaacagtgtctgttgacattaatattcataagaagaagaaataaagcctaatcagctataaatgaaaacagaaattgaactactcatatatctattcccacttagaatcagattgatagaaccattttctagttctgtttgaaatagaaatctggccttggaaraaaggttctattgattgtgtttttcaagtagtagccatgtatttgaacttaacttacatgctgccaaatgatggagaaattaaaatgtctgtttaaagacaaatatacaagattgtgatttaggtttattttaatgaatggttgcttatattttataatcccagctaacgataaataacaaatcaatgatagtactgaaagtaagcttcttttatctcattttaaaataatttttatgttttattttgactaatctagtatacaatattctatacatcttatgttggaaaccactgatat

SEQ ID NO: 1553 - DNA, 598 bp, Bovine  MMBT15537
  misc_feature (1)..(119): n is a, c, g, or t
nnnnnnnnnnnnnnnnnnnnnnnnnnnnnnnnnnnnnnnnnnnnnnnnnnnnnnnnnnnnnnnnnnnnnnnnnnnnnnnnnnnnnnnnnnnnnnnnnnnnnnnnnnnnnnnnnnnnnnnaacgtccccagagcccacagctaggaagtgtccaagctggcatttaaaccaggccttccgatttggactcccttgcccaggttgctaaatacctgctgcttcaccacgggtgactatgatctgaagattacttggtgccagctgaggccacctgctcctcgcttccccaaggcctctgccmtactyggaaggacaggtgtgggatgtggagatagaaaccagctagcctggtgctgggcaaagacctgcagtggctctggctgtgaagwcaagggcagacccyggakagaacgtggggcgtccagggaggatccaggaacagcagcacagggacagcattcggttctggcaggctccctggaggagttgccaccctcagaggaagttcctctgcccttcttcctgaagttcctaacctctcaggggcctggcgagcctccctgggggtatagacgacatccccaggtctgtactcaatg

SEQ ID NO: 1554 - DNA, 600 bp, Bovine  MMBT14564
aaaaaggaacaagacaagcagacacaattaactgcaaaatatcaatggtcaccactgagagctgccccgggctcaagacattccgtgggggccgaagacgcacgcagtggctgggggctcagccaagccactcagcytgagattctcgttgcggccgggtgggtttgtatggacaggcttgtccatctgtaacttcattaagtgcttctttagtgcttccccttgcagaaccttataagaattcagctggcaaagcagacttgtggtttgcagagtcctactgcctgcatcattaaggcmgattgggaagaagggatatgagtttggaactgaggggcaagaacttagggtttggaactaagggcaagcatttaayaacttgttcgagcaaaccgctaagaaatagggtgttaaaaaatgctgcctcagatctgttttgccgccagtgtttatgtgattttcgtagggtgcacgcatgctaagttgcttcagtcgtgtccgactctttgcaaccctataaaccatagcccgccagtctcctctgtcggtgggattctcaggcaagaatacyggaggagattgctgtgccttcctccaggg

SEQ ID NO: 1555 - DNA, 600 bp, Bovine  MMBT17198
atgtaatgggtctgaacctcagtctgtttttatacaaacacaaagaaaggaattgacatttgcaacagatttcaatttttttgaaaactcatcatttggcataatgattgacattaaaagaatgccatttaactcttggctgaatgaatgatctattattattatagatggctctataaaacattggaaatacacagaatatatgaacacagtrcaatatcagtataggtgagtgtgagtggttcagattctgatttattatcaacaattgttctgttgtttcccagcaacaactatagmctgaactcttgggaaagcrcttgttatacccagtttgacttccaggaaacttactcagtgaaatgatttgagtaactagggcaaaggatataattattggtatatagtaatttgattgacctctggcaccagagtatttgtattaaatattttcarctggagcctgggtttaaatttcttccagtttgtctgcactcttgcccattttgagtgttattaaaaacattgaggataatcaagtggaaataaaattttccctaaagattgatgtcacatttgcttgtttatgytttctcttgt

SEQ ID NO: 1556 - DNA, 600 bp, Bovine  MMBT17807
gtttttggattacattgtagagattcattacacataatggacagcagtaatttgttaattggttgcaaatattattgttcagcttgttttgtttatgataacttycatatttttatataatcaaatctatcaatctttttatagctgctgggtttcatgacttatttacaggatgatacaattctaaatgaaaaagcagaacacaaaattgtactttcaatattctcttaattatgttacaactgttggagagggaaggaagaaagacaggagggagaagggagagttgggaaaagctamaagattacaagtctaggtgatatgttcaycaatgattttttcttttttgtactttctaaatttttttgtaggaattacatattaatttgataaccaggaaaaagtcataagatatgtatttatatattttggctttagtccttttctttagtctctctactctytcaggctataattcccaacaaagatgtgtagggaaagtgatctactggtaggagtggaaacgatttattctggaaaccaggttgctagggcatgttgaaaaaaattgccttacttccttagggaatgtgaacattt

SEQ ID NO: 1557 - DNA, 600 bp, Bovine  MMBT06083
atagcttggtacttagaagccggctcttctttcaagttcatgtatgtgctgtcgagcaccgatgaactcattccaccaatctccatgtaattactgtcgccaatctgaatgccagaactgctgtgtatggtatattttgaagactcatctaattagaaagaaacacacagagattagtagtatatctagactgaaaggaagagaaaaaagtacagcctggtaaaggggcaggactctattccaaatgcttaagtaaaattatttatcctatgccaccacttgaaattttcttctttaaamgttggctgagagggaggagccaagatggcggaggagtaggatggggagaacactttctcccccacaaattcatcaaaagagcatttaaacgtcgagtaaattccacaaaacaacttctgaatgccggcagaggacatcaggaacccagaaaagcaatccaactcttcgaaaggaggtaggaaaaaatataaaagacaaaaaaagagacaaaagagggagggacggagttccgtcccgggaagggagtcttaaaaagagagaagtttccaaacaccaggaaaccttctcactgccgaatct

SEQ ID NO: 1558 - DNA, 600 bp, Bovine  MMBT07928
agtctctgatgttatggatttgactactcgaggcatcgcgcgtgagtggaatcaggcaatacctgtctatgtctggcttctgtcactcagcatcgtgtcctccaggcccactcctgttgtctcgtgttayasaatgtccttccttttcacggctgaatattcctgcactatatgtacacgtcacacgacgtggggcaggaaacagcccacagggggcagcttggtgagaagatgtaaaggggtatcggctgctaaccctcacccggccatcagccacggcggccaaccctggcctgcgcmgagaagactacaggaaaccagagacaggctcagccagcgctccacccgtcctcactaagcaccaccccccacacaagggagagccagggtaggggccgggctgccccggtgccactgtggatgtttctcccgactcttcccctccaggaaaaaaaaaaaaaaacgagttaaaaaaggaaagctaagacacagccctcagaatggcagaaacatgcttcccacacaaatatgcagcaagaccattaatgagacaaccatcagattgacagagcaggttcaaagaacaatgcaagaagctgg

SEQ ID NO: 1559 - DNA, 598 bp, Bovine  MMBT17678
  misc_feature (1)..(211): n is a, c, g, or t
nnnnnnnnnnnnnnnnnnnnnnnnnnnnnnnnnnnnnnnnnnnnnnnnnnnnnnnnnnnnnnnnnnnnnnnnnnnnnnnnnnnnnnnnnnnnnnnnnnnnnnnnnnnnnnnnnnnnnnnnnnnnnnnnnnnnnnnnnnnnnnnnnnnnnnnnnnnnnnnnnnnnnnnnnnnnnnnnnnnnnnnnnnnnnnnnnnnnnnnnnnnnnnnnnnnctgctgtaattcttggcacagggcctggcatttatagttgctcaataactacttactggatggatgagtggacaaacaaattgaacagkgggatggacagaaggaccaattaataaggagcaactggaccatttttttcggtcaccaccagagggcagcaccccacaaccaaatcacccaccttggttaggactgccagccctgagatccttggtccacacaccctgggcactgtcttcccagacaggagggcagaccacagaggaaaggcaamacccacacagctcctggtagccccaggtgcacttctgggcaggaagaagccacaggtgcaggcctagcacatacccagcatgccgatgcccagcatgaaggcgtccatcccgt

SEQ ID NO: 1560 - DNA, 564 bp, Bovine  MMBT18297
aagtggaagacaaaaacaaggaaaagaaattccagttcctcctcgtcaccctcccactccacttttggcttgtatccaggcaaccagctgaaaccagctgccggatatactcctagagcctcatccgaggtcccaatcagctgcaggaggcgggcagaggaaggatgtgtgacaatctggaagatcaccctccaactcttgtcccttcactcactgtccaccccaactgacatctgttttctgaaaagaaatacaggagggaaagaaggagaaaatttgcrtgttggcattcagcttttkcttttgtagactctggatgctgagtgggcttgattggacaagcagatgatgtttggatgatggacttctgagtctccatcacttgctgggcctattgtacaaccagatgcccactcacttgctacagaagattgtaccaagctcaatgccttcgttgtaggctgcagacctgtaaaggtgtttccattatttttctagagaatttgttgttgttgttcagtcgctcagtcatgtctgactctttggaccccaggactgccgcag

SEQ ID NO: 1561 - DNA, 600 bp, Bovine  MMBT17497
aatgcaagattggttgctttcatcttgggcaggtactttccttttctgggtgtgtttttctttatgaataaaataaaagaaatccgtaaggtaatcttcaaggtctcttccacctctgacactttgggtcttgttcataaaattcataaattcacacctttaccctagcatggggttagagaatacttctaagaagacatgatgtttgaggtgggtctttaaggataagcaggaggaagagaaaggctttccaaggagtgggatcaacttgaacaatggcttgcagaaggcatgcaaackgggggcaaagaagggatcaggaggggaacaaagcagtgggagacaaggctgcggggatgtccgaaggttgaggagctgggacttcatcttgtatggcaacagggagcaggaaaggtcttaaagcagagttgggacttgatctgatctgtttccaggagcaaatagctgttcaacaaaggagtcttggagaaatggcagtgggtttgattttgtggctttgtaagatatgaattcagtaagtttgtggttttcagcttgaggcgaggaagttgctgcagccctttgggttcagcacactgg

SEQ ID NO: 1562 - DNA, 600 bp, Bovine  MMBT16826
tattccagacgcagccggcgagggattattggatccagacctgcggctgcttcctaagaccagccctcactggtccccgcccgcccttcaggagcaccgcccccagcccagcctgtaggggctctctcagctggcagccccccacgtctcctcctttcgccgctccaattcccagctctgctgtggaagtcaggcaggacaaccaccatgcaaaccgcaggacacccaagttgatcctactcgacgagatttttagtactttattacgcgggaagccagcctcaggggtaacagactatkaacaatagcaggcgctcggtggggcagctgtacgaggctgagggctcagagatttcccggaggggctgtcgggggagatgacccttcagacgaagctctgtcttacacatcagattgaaagaggagagaggaatggaatccaagacgctgagctacgatgttcagaaatcatgtgcgtgttcccgacacaagtggagggctgaagggagtagctgtaattaagactgtcttctaagcttttaattactattaatgtggagacttataagactgagaatatatatatatatattttttttt

SEQ ID NO: 1563 - DNA, 600 bp, Bovine  MMBT15422
caagggtcgggctgggccgggctggactcctgcccgggggtgtggagaggacacagacggcgccctgctgagtgagcgcccggcaccctcacggggcagcagggagcccggggagggaaagccccagagcgctttgatggaaggcaggcagggcacccagaggggcgggagacacaggctgttcacttacagaccccagaaggcgcctggggcggacgccgagtcgggcagggcagcccctgtcctgggacaggagcgagcagtcattatctctatggtcgctgcagggaaaccaaggtkggggacttgggccacagtcagagcctgttctgatcttgaaggctcagctctgggggtctgagcacctgtgtttaatccgtgtagagtttgtttgcgttccgtgtcatagtatgcttcaagcatagctcagttgcaacgtgtatgagactgtcgtttacaccagggattgcagttagtactaaaccgtagcccgtcgtccaccgtgatcactcacactgcctacacgagagcccttgggcagagcttggcaacaggacggcacactggagaaggccgggcagccgcttggacggccgtgtt

SEQ ID NO: 1564 - DNA, 598 bp, Bovine  MMBT15457
  misc_feature (1)..(138): n is a, c, g, or t
nnnnnnnnnnnnnnnnnnnnnnnnnnnnnnnnnnnnnnnnnnnnnnnnnnnnnnnnnnnnnnnnnnnnnnnnnnnnnnnnnnnnnnnnnnnnnnnnnnnnnnnnnnnnnnnnnnnnnnnnnnnnnnnnnnnnnnnnnnagaggtttgattgcacagaaaccattataaatcagtcacttgcagactcatatcaaaacctggtcagtgcgtggcaagtggcaattaagctgcatccagtggcaggctttgtagtggcaagtgagttgatgtacttcagttgtacgggcatctggtataggkgcacaggtgtcagaacctgacacttattttggtccgtgcaagttccacccattattttacttacctcttctatctgtgcctctgtcccgcaccatgcacttgtctcagtcacagtactggtaagcccacaggttaaccctagacaaaatgagtaagaaataaatgtcaccgggagcttctttgcaaagggggtaagacccagtgagacagcagaagactccccaagactgccaacaaaatgaaacctgcattgaaaagaaaatactgactcctgcttaaactgtggcttcactgcaac

SEQ ID NO: 1565 - DNA, 600 bp, Bovine  MMBT15736
ggactttgttataaatggacttggttttgtttagttggttatgtttttatttggttaaaaaaaaaatcttgcaggatcttaactgaggactccatgttagtccaaacaaaccaagaaagggcagacacgatggacgaagaacctgcctgcccccgcacgtcaggtctgcctgcccctgcacagcaggtctggcttgaggtcctgcttggctgcagagcccttcagtggataggccgtcacagttacccccgtttctggcgtgcctactatgcaccagccctcctggtcagccctctatgktccctcctttctaatcctcccaaaggctgcatgaggcaggaaatgttgttgcatcgttttaaagatgaggaaactgaggccagaaaggtgaaggcactgggtgcaggtcacatagttgggaggtggcagggatgtctttcaaccatgtctcacagccacgcaggctgaagccagatctgcccacaacgtaaccctcacggargctgcttggtcactgagttttctgggacacagaaccccgtgtgtgccagccagcctgcgaagccacccagtgagcgactctcctctggtaccagatag

SEQ ID NO: 1566 - DNA, 592 bp, Bovine  MMBT15562
tctctccccgacatggccccagaggggcggctgtcttccttgtcacaagcccatgaggcaggtcttccctttgagctggagaaggcgtgcatctagttcacttccccgagaagtccatgctgtctcaatagcttgttaagtctctcaatttcttgttcctgttattacaaaagcagacaaataaccgaatttaccttctgagcctccccaggcacgtggcagtcatgcagtgagccccaggcacatactgggccccagagctgaatgaaaaccacgcttctaatggaaatcactcagtckgggcccagcagtgacagcggaagaggagacactggaagagggggttcctggcggagctgcagggcggagcagtgcctgggctgaatctggaaggacaaggaaggcctgtcccaggggagtggggctctgggctaacggccccacgagagcagaggcctggctgggagggaacaatctgtaaacggggtgttttcccaagcgccttcttaccttctcagagcagctgaattcaaggtgctggatcttggtggccagttgtatgtttatctgttttaaccttaacagttgccgt

SEQ ID NO: 1567 - DNA, 600 bp, Bovine  MMBT15106
agcgtgagggcttccctggtggttcagtggtaaaaaaatccacttgcccataaaggaggcatcagttagatccttgatccaggaagatcgcacatgctgcaaagcaactaaccccctgtgccactaccactgagcttgcactccagagctgggagctgcaaccactgagcccatgggccacagctactgaagcctacacatcctagagcccctagtcctcaacaagcaaggccaccacgagaagcctgcgcacagcatctagggagcagcccctgctcttcacagctagagaaaagcccktgtagcaacaaagacccagcacagccaataatgttggctattatattaaaaaaggcaatgtaatgcaaaacgtggctagctgtgcaggtaacagctgtctgcctgtgctgctgactagacgtggaggacaaagggtactggcctgagagcayggaggctgggctcctaccagcagggttrttctgaacgaactccttataacctttctggatctatcctgatttcctcatctacaaaaaggagctgactagaatcaccagggttgatctctaaggttccttccatgtcactaattctata

SEQ ID NO: 1568 - DNA, 600 bp, Bovine  MMBT14138
ccgtttttcttgttgttgccaatttaaagagttgaagctaagactttttgttttgtagtaagaaaagtgttagtttctcagtcctgtccagctctttgcgaccccatggactgtagcccaccaaactcctctgtccttggaattttccaggccagaatgctggagtgggttgccatttcctactccaggggatcttcctgacccagtgattgaactcaggtttctgaactcgggtttcttgcatctcctgcattgcaagcagattctttgctgtctgagccaccagggaagccyctgtaktaagaaaaraggtgttaaaatactttgatcctcaaaaacagtagtgaaaaagtgattcaacaaatcatttgttaaaatgattccgagtgaatctttaaagaatcttcagactaaattaccctttggttctcattatctattattagtattttctttttaaatttctttctagttactttgtgatttgtccaccttggattttctcttttttttagtaaaatgacgaaactggaggaacttgaagagatcgacctcagtgggaataaactgaaggccgtgccgacgaccatcatgaactgc

SEQ ID NO: 1569 - DNA, 600 bp, Bovine  MMBT16286
cctaccaggctccactgtccatggaattctccaccaagaatactgaagtaggtagctatttgcttctccaggggatcttcctgatctggggatccaacccaggtcttctgcattgcaggtggattctttaccatctgagccaccaggtaaacaactaatacagtatattctcagcttcagacacatttccttgattcatcttcgagctgagactgggaccgtaaagacaatttgaagaatcttagaaatatttaaaatgttctttgrgaaytaaaaatgccttacaaatactccttttkkggggaggaatgtattatattttgccattcagtatacagtatggggcctagatgatactctgattagagtatctcaactgcaaacaatrccttatttgttttcttgacaacactcagagttaagagtgtggttaaatawaaccaaacatagccatctttctcaggggtaggcataaagccctggtacaagggaaacataatcaattatcaagtcaggatcccttcaagaaaagcagaactgttcagagcattgttgtttagtcgctgagttgtgtctgactcttctgcgaccccatggatg

SEQ ID NO: 1570 - DNA, 600 bp, Bovine  MMBT17322
tctcattggctgaactcttgccaggaaagaagaggaagtctttcttcttactggactctgctgtcatggtaggacatgagagctcctccttctggtctcctaactctattttaattaacatttttgttaatttttacacctagtttatggcattactattctaagctaatcagtagcaaaatcctccctttaactctgcagcgtctctagattatgcctctccttgctactcccattgctattccctaaataaaggccttcacctcgtatttggagttttttcctaattaatctccttakttctactcttttcccactcccatgcatcatgtatattgacaccaattacatttctgaaatacagatgtgatacttcactaccgagactgcaagctcctaaaggaaagggaatatgtttttttgtttttgtcttcctagcactaagcagagcctacataagcaagctcttgaaaaatatgttgttgagttgaattgtcttgctcaaaagatcttctacagcctcctacatcatcaaaatagagttgaccacagctgattcaaactcctccacaatttgacccatagcttagctgtgtctga

SEQ ID NO: 1571 - DNA, 600 bp, Bovine  MMBT13640
cctgcgtggtggggtcctgaaatggactagggcatatacaccaaggcatcacaaacacagcgaaacagatgaaaacacacacagataccacgaaaaccgtctgttgatttgcttcatcttggttctttcttgcccttctttctcagctcacaccagtgtgcagtatagcacggagatagagaacatggaccgggtcaaactccagytgcaccttggcccagccacttgactgcaggcaattcatttgtctgtctgtcacttgggttctccatctttaaaatgatgacgaataacgataakggccacctagggccactgtggttgtttaaaaaaaggtaatactagtttgggcatcattatggcccaccatttggattctaagattcaaaagarcaaaattttagaagatctcaaagatgatctaactcagatccattttaggaaacaggagcttagagaatttatgtgatgtatccatggttacacagctagttagccatgggatgaaattaaaatccaagtgccctgacccctggaccagtgctttttaggggaggggggagatgggaagaaggatggtgaagaaatatactaataggt

SEQ ID NO: 1572 - DNA, 600 bp, Bovine  MMBT13775
gggcatgtgtatgcctgcagatgagtgtgcatgtgtgtgcatggtgatggcaagtgtgttgaaagtgatctagagtctagctttttcagaaagatttagtcacatgattctgaatactccctaactaggaacactgcattacaatttattaccttactgatgacccttcaaatgtaataaagaacccagtaaatcagaataattgataattcagggtcatttgaagttcagctccacattatgtaataatgtgaaaaaatacatcgaggtaaaatttacctttatacagaatgatgtatktcggcacttcagaagctcccatttacaatcaacarcagaaatactacgtaactggagactggaattcagggctggtattctagcatgattaaaaataattcccacrtttattaaagctgaatctaattgcttatactgtaaaatttagatcgggggatgatatgcattaaaagtaatttatgttccagaactttcactaattcagactgacataacttccagataattcatacttgtgaagttttttaatcaaatactcaaagtaacagcattaccattgtttattaatattgaatgagc

SEQ ID NO: 1573 - DNA, 600 bp, Bovine  MMBT16992
tatgagcaaaattcctgatttaaaacaggttaatttttgccctatttgactcagatctctttatcctcccttcttctttaccatccaggaaatctaacccatcttatggaaacatctctaatcatttcctatcaaaatgatctcttttccaaaactcttttttctcctaattctaatattcaccaattctacattttatctctcatccaggataggtatgagaaaatcatttaatgtaagggaaaatatgtaagtaaagctaaaagtacgggaaaggaaaagttacatggaggagacagkgaccaataataaataatatgcaacatttacaaacattttacttcattctgggcttggctctgaaaattaacttggataaactcatataactctgaaaacaagtccatgaggtaaaaactactggtcccctcattttacaaaatggagaaatttttggaaggtccttaacaccatcaagtctagttcaytacaatgtctgctggggaatgcatctgatggtcaaacagtgaggagtgtgcagggttaaatacaggtgaacaggtcgctttgtggcagaatttagaacccttaaaaaaagag

SEQ ID NO: 1574 - DNA, 597 bp, Bovine  MMBT14023
cattaccatggtgacattctgaatgaggacaaaattcacgttagccttgtttttctttaaacgtcaaactttttattttgtattggggtacagccaatttaacaatgttgtgacagttccggtgaacggggaagggacttagccacacacagacgtgtatccatttcccccccaaacccccatcccatccaggctggcacataacactgggtagagtgccacgtgatacacaataggtctttgttggttatccactttacatcagccttttagcaattagattttgccaagtcaaagtakggaactttyataacttctatcaaagagaaaaaaagtggttctcagggggctggggggaagggaggatgaatgggcagagcacaggggctttggcggcagtgagaatactctgcatggggtcctaatagtgggtacaggtacacattcatgcaaacccacagaatgcacaagagcggggtgaaccctaatgtcaacttgggactccaggtatagatgatctcgtgtatcccgtcaactgtaacaaaggtgccatccgagggggttgctggggggctgtgttgaggcaaggtgtgtgtg

SEQ ID NO: 1575 - DNA, 600 bp, Bovine  MMBT14654
agagttgccatttattggcctaggataggtctgttatgggtctcgacttggagataaatatgttacctccatcaagatatttaccctagaagagagttttgcttctctattcttcttctcagcaagggtctattgctgagaccttggcactttctttttgttcacttctcctgcatagcttcttgctgcaagagtcactccatttcttcatgttctttggcaaattttattaacagggcaaatcacagaaattctactttgccaaagtaatttttcagtataagaactgcctttccacakctcttttttttttttattttcaccacaaatgaatggttttcgatctaatcctttctaaagataacaaaaagctgctcagagaggttaagaagtggttatagtggcacagctaggctgggtggggcatggcctcagacccaagactctcctcttctccaagtcctgcatcttaccccggcagcacatgctgatgttgaaagagcttggccctcgctggattttaaacaggcattattacattaatatctttaagtaccttaattaggtcttacaggaaggaaaagaattatttggtcacca

SEQ ID NO: 1576 - DNA, 600 bp, Bovine  MMBT12619
acatggtacaggtataagattaagagatagaaactactatgtataaaatagataagcaacaaacatatattctatagcacagggaattataaccattattttgcaataacttttaatggagtattatctataaaaatactaaatcactatactctacacttgaagctaatactgtaaatcaactaagtcatttttttaaaagtgtgatctcagaatctcaagaatttaatgccagccgatatatttgacacataagccaaaactgattcaccatttctaactatagaagtttgtcaaagktttgcagaatcttaaggaaagatttctgtcacccatgtagtttccacttaggagaaagtagagacttaggcaattatatacaataagaatagtgactactttaggctttgagcttgctgcagaactcctccattctatattctttacatwattcctcaggagaaatttaaaaatgagatactagrcactacagattaacttctgaggattgtgtactcttaccaaagagtttttattttagctctttagtaatctgaggctaatgattagcttgtagaagccagcctacttcagcaaaag

SEQ ID NO: 1577 - DNA, 600 bp, Bovine  MMBT14658
gtactgagggtaaattcgtcactcagccctgttgaccttggcttccttccaaaagcagactggctctcygactgttgccattggtttgtaatctctgtttacctctttggcttcttggatgactagaggggtatgacctggattagtaggcagttgagtgtctcagtttggttatgttgcctcagaatatttttcacacgagtctgatgaattatgatraattatctaccatgggggcatgtgtagccatgggaggagttctcctgtgagatttgaactatctctccacagacaagaagktcactctggttgccagctagcactctgtggcacacggggttttggtatgatgagtcatcttctgtttatttctgttgaaataacttcaatccacagttgcacagttgacttttaggctgtcctctctttcctatgtgaaaggttcctatatgaaaggatgatgcttggtccttcatgactctttcactaaaacacttcacctaaggctcagagagaaaaatgttagctttgggcatcattcttcaacggacctaaattttattgtatctgacaatgtagtataatgattattctgagtat

SEQ ID NO: 1578 - DNA, 600 bp, Bovine  MMBT14920
agtaaacccttgcatttacaaaattgactgaagtgctaaaatatttcccataaggtttatttaattgaactttctttgtgttgttgagcctcattatttgtacattctggtgagtgaatgtgtgctgtctcaaatttacttgtaaattcaaaatcacttcttacaacagttgcatagccatttagagacatgcacggagctgcaaaaaactggagtttgctgatgcgagcattcaacctgtggttgattaggtggttcttgtcttcttgttttctgctctcataaacaaatgtcctcttkgcactctacttaatgccacattttttgcatttcggtgctttttgttggtgataatattgtttaaaatggcccccaaacatagtgctgaagttttgtctataatgttctgaaatgcaaaaargctgtgatgtgcattatggagaaaatatacatagtrtttttgctcaggcatgaattacagtgcttttggcagtgaacttagtgttaatgaattatcaatatatatcaaataatgtgtctttaaatagaaacacacagaaaacaaggttagatattgatcagttgttgaaaatgttgtga

SEQ ID NO: 1579 - DNA, 598 bp, Bovine  MMBT23168
  misc_feature (1)..(125): n is a, c, g, or t
nnnnnnnnnnnnnnnnnnnnnnnnnnnnnnnnnnnnnnnnnnnnnnnnnnnnnnnnnnnnnnnnnnnnnnnnnnnnnnnnnnnnnnnnnnnnnnnnnnnnnnnnnnnnnnnnnnnnnnnnnnnnnacagggctgtgtgcacaagagtgggaagagcaaacaactgggaaaatcttgtaaatgtctattgtcagtgaccgatgctgagtgaatgaataatggaggtttggagcatgtgtggaacaggaaacagagtgagacagacttgttcaggacatgctgctaaagaggaaaagcaggkgagagatgctcatattggtaccctgtggatgtgtgtaaatatagagaaaaccgtttgcaataaaacacacagaactgccctcagtagttacatctggagagggggaggttagtgctgttctgtacaaagaatatctgacaatatttgtttatttttaaggcagcggcatggatgtgtgtgcatgctaaktcacttcagtcrtgtccaactttgtgcgatcccatgaactgtatgtagccttccagactcctctgtccatcagattttctaggcaagaatactggagtgggttgccaat

SEQ ID NO: 1580 - DNA, 600 bp, Bovine  MMBT15284
ctctcgtgtgtccataaatgttgatcagaaggtttgcaatttatcaaacacaggacctataggcaaagatgtcaaagaggatgaggaggttttaagccactgaactgcttaacgaggaggaagaattcctagtccattcccagcaggccaagaaattgctgatactccctctctactttttaaacttcagccaactgtgtattcttgtacctcaaaacattaaacattacggaagcgtcgtttgtgaccctaggcgtagaagaagttaagcttgaattaaattcaaactcacactggttmaaatgatcagcccgtatgcacgggggattcattctggggggtgggggcacggaggygtgaccgtcactgattcctttgaggtgcgcacacatatgcactgactgggtgtctttgggtctctggcttttttctgttttgggggcattgctggacattctcatgactgcgttggtaaaaggacctgcgtgttttctgatggtgatgctgctgctgtctggaaagcctccagaactcgctccccgggagtgatgacaattaggaagtttcgaccagaagctgggtcagcctggccacgttccc

SEQ ID NO: 1581 - DNA, 600 bp, Bovine  MMBT22355
aaagcaaaaacaaaaaacacctgccacaactcagggcacagtttgggagctgaatctagaggaagggcagaggaagggaagggtgatgaaagaaatgtcagtctcgagaccactgctcaagaggcatcaggacaaagtggcccaggatgatgcctgtgatagggcttgatcagacaccaggagaaggaattctggcttatgaaaggaaggaggacaggaaagacacaggtctgtggaaggattctgccaaaaaagacacatctctgaaccccaaacataaaccaatcccctgcaacatcmgtacctgtgtcaacagggctggtaatagaggatggaaattgccttcaaatctataaacyagcaraagtccttctacaaaagatttgggatccagccatctgtctttggacccaagacaatggataataacatggctagccgctmacagttacatgccatttacagggttcctccatatcacaaactgaattgagtttagaagagataactaaaacatggtgttaaaaatctaaatattcaacagatgattcacatcatctcagagccaaatccaggatctctgctgcttttgcaaaagac

SEQ ID NO: 1582 - DNA, 600 bp, Bovine  MMBT23190
cttccatcattctgatgtttttatcactttaggtgttcatgtgtctaaaaaaaagggaaaagattaaatttcttgtttctaaagtggaggaaattctagtggacattttggtgtccaaatttccagagaagatgttttcaacacatggaaataccatgaagcaggaatttcacggtatttacttaaaagaaaataggcttgctccccctccccaccctgtcaaaccaactgtcccaacagtttctggggctgacagataggagagagacaaaagtgagccctggtagagtgccttttccmagtcccccaagttctctctgctccatccaactctcaagcaggccatatcccctcctcagtaggcatgatggtcatgattcagggtctaccacacctcatctaatggtaaactggctgcagtctagaggttcagttttcatttttcatctccatatagatttacaacagtctctgctcatgctggaattatggtttaaacataaataaaccagctgtcctttctgatttgcagccagagttgccacaaagttggaaaatcatgaggcaggaattttacataaaggtgaagtgggagtttcc

SEQ ID NO: 1583 - DNA, 598 bp, Bovine  MMBT22556
  misc_feature (1)..(11): n is a, c, g, or t
nnnnnnnnnnnttttcaaagacagattagttcaacgtgtattatagtttttttaactacttcctaagctcagatcttacatttgcaaacatttacacaaagtcattagttagcttaatctcttaagcaatcatactttgcttgggccaatagtaaattttctttttattctgtagcccaagaatacgtcgtggccctggataatccatagtaggtaaggtacacacaaatcaagagtctatgcctgtgatgaagccagaggataatttaagttgcaccatttaccaccagccaaagacamgtgtatcttttggaacaataccttttctgagcccataagtggctgcactgttttccttcaaaccagtcagttaagtgagaatcaatggctggatggcctgttggtgacttcacctcatcttgtgagaacgacttgaatgtaagcaataatacaggaagmaagataatttaagaataccaaagaaacaacaagggaaccacaatgctaattgtctcaagaagccacctcaccttcagtttaaagggtgtccaccagtgcaaggcaaatggtacctgaagagaagtttcaggacccttga

SEQ ID NO: 1584 - DNA, 600 bp, Bovine  MMBT21672
gaatttttctctcacttgttcccagtgcctggattagaataatgcctggcagagaagatgtaatcaatgtgtcaaatgattgtggggggaaaaaaaaaaaaatcccagtgttcccctttagggtggatatgagtcctggttgtagagaggggttcaaacagttcaaaactcctatcaaattccggaggagagaggagaatccaggagttctaattcacacaaatgccatgmagctttcacagggcctccctttcccttccgtctacaggaaagtgagtggtattcaataaccaagttctmaaaccacagctyagtggggaaataaatcagagtccatggaaacggagtcarggagaagtcatgtactctagatcagaacaaagagaagctctggatagaacaagatagggggaacaaaactgcagtaaatatccagacgtgctaaggcaacrctcccagataaaaacaaacaaaactaatcaacccttaagagaaaggaacctggcgtgcagaggaatgataaaacccccactcttaaagaaaacataatccaaagcacaaaacagaattcctcagaaggactttgtgctatgaatcaag

SEQ ID NO: 1585 - DNA, 600 bp, Bovine  MMBT21004
acgaaaccaggagatgagtcacaaagatccaagagagaaggagagagccgccaactacctcggatgctgctgagaactctcgggaaaatgggacagagaggagactctgggcttagcaaccctaagtcagccatgaccttcaccaaagtcagaccagagtactagacaggggggaaggtgtatgcgggtggaaggcatcccagagtaggaagaaactggtaatgagacagtcactgagcagaatcagttaagggtggatggttcttttcagacattttggtactagaaggagcagaaaamcaggagtgattggargaggatgggggtcaagggaagtgttttyagtaggagaggcaagtgcatggaaatgatccagtaagtgaaattgttagtgaggagagaggagacaaatggagggctgggatkcttgcaaaggcaaaaggagatggarcacagagaatcagagacctttgactgatacagggaaactgaacctggcctgaggccagcagagccatgttgaggggggttctggaggcagaagagaatgtgtgatacagccttcatggggaagtgagaaagacaacctgctcaggaaac

SEQ ID NO: 1586 - DNA, 434 bp, Bovine  MMBT18844
tgagtttgtgagatctaaaaaaataaaaattaaaaaattaaaacgtgtatcacaaaacaatcaccacctcaacacatttacttctcttttctcamctattatttcyccaaacgttatagatactgcgtcttcagtaagtaaactgaccaaaggtctattccctattgatcacaatcttttcaagatttagatgactccttttagactacaagtaggaaccgacttctaacttcggttcccgagctcaaagctcggtaaagtggatcttcaaggtttagcaaataccctcagctgaactamagggtacagaatctctagcgctccctacagctcagagtttgaacctacctaccacaaaaaaaccccagttatcaaagattggctacctcgctctacttttcttttccgcttaaaaaatcggatggggagggggg

SEQ ID NO: 1587 - DNA, 598 bp, Bovine  MMBT20365
  misc_feature (1)..(131): n is a, c, g, or t
nnnnnnnnnnnnnnnnnnnnnnnnnnnnnnnnnnnnnnnnnnnnnnnnnnnnnnnnnnnnnnnnnnnnnnnnnnnnnnnnnnnnnnnnnnnnnnnnnnnnnnnnnnnnnnnnnnnnnnnnnnnnnnnnnnncctgcctttaatatcttatgatatgcgacttggaaatctatgcagattcgtcattttatcaaataattgtttactgggattatttcagtctgtaattgcttctctcttttcccctgtgaaacacgaagcgtcccgagtcctgtgcccagttctcaggaaggggaaacamcagcatcggccgtccctcggagatgaaaggmgcacacggctcgaggtcctcaccctcgctggagaacgctgccgcctccgtctcccggctgatccctaggatttaaagctctgttttgcgcctgagaccaacacggcgtgctgtgggaagcaacccttctcaactttggagatggaggtcagacaggtagaaaggttcctctgagtctcgaaccctggagctgggagcgcagaaggggaagagccccgggaggcaggatttgggggagactggccaggcctctcrgagcacatggctt

SEQ ID NO: 1588 - DNA, 600 bp, Bovine  MMBT20955
aaggaaatggcaacccactccagtattcttgcctggaaaatcccatggacagaggagcctggcaggctacagtccatggagtcacagaagagttggacaygacttggagaccaagcaacaacaataagcacaaccttggatggatggatgaactaatggatagtcaaaggaagtgttacatttccatttagggtctgcaaaaacctaaagaccatcattttccccctctactgggcttctcttgggtctataatgtgaactcagatctgctcatttactggatttctstttcctcattcmtcctcacaagttcacaagaacatgcttctctattctacatgtgcctcattgccaggttccaagtactsctagcttgcctcctaacttttctttccatgttgccatcttgatattctggaccaaggaggctgaacaagagaggatgtgtttcactgatcaagaaggggtcccgaaagggcaggtctactaagatgtagatttgtgtgggcgtagggtgcactcaactgcagcatgctcagaccacctgctggctcagcacctttccaaataagccatatactgagagcctggagattggaa

SEQ ID NO: 1589 - DNA, 366 bp, Bovine  MMBT19873
aatgataacagccataactgctttccactcttttctgtttccccagctccttccttccaggcttggtcctgaggaccccccaggtttgctccctccgtaagtgctggtgccccctccctcccactggctgcaggcatccttctgctcaggaaggcacaggagaggggacatggaggataccactcttagggatgctgaacagatttcctgcacccctaaacttctcttggaggggtgatggacaggagaagtctggcaagtkgtctcctctctcagctttcagggaggaggcagcagctkctgagcctttagggctagggctgaggatggcccccaataccattgggaccccaagtcagggatggg

SEQ ID NO: 1590 - DNA, 600 bp, Bovine  MMBT18878
ctaactaataaaataagcaatagcttatggggttgtaatacatagaaatggctggatggaggagaagaggagaaggcaaggaaaaataccaacaagtggctcaaattaagaactgctccatttccagaaaacataccaggcagttagtcaaattactttcctaacacctagcactggaaaagaatgccgactgaggcagaagtgagaaygtgctgtaattctgcaatctgcacagacatggcaggcctgtgagaatagctgatagccagagggcaatatatagccaatgaaaggaagagmgctaaggacagattcagcctactgagacatcttgcccaaggctccttgcctgttgcccaatcagtaaggccaggcattttatgcattaggtctccatgcccatgaattcagtgacagtaataaactggtttcagagggacgttgaagctaagctcaagtataaaccacagtggtacacagcagtaatattacatgtttcttgaaacacacctgaaaaggcaggaccctgctttacaaaatcatytgccaaagtatgttcttcaaaacactagttctacaggtgttawaagctcttcttcc

SEQ ID NO: 1591 - DNA, 600 bp, Bovine  MMBT21686
aggcgatgaatttcagagatcgtaactcatgtggttgttcacagtagactggtctgggatggtgctcagatggtcctcaggatggtgcactgtggtttcccaaatgttaacaaaacaattcattggctacctccaaggagctccttgctgtggggcaggaaggaagcctgaggttcatagtgtgatcatacagtgtgttggcttcttgagctaaatcttcattctccccttctcgcctccttgaacctttgacccatcagtcttggttccaatctctaggttctagtagagcaagggtamtccctcttcyacgtgataggtattccaagaaagctatcctgttgactggtcctcctcaaggtacacatccccttccctccaaccattcttcacggatcttgctgttgaagccctttgccaacttggcagtcaccttccttctgacgctttccattgtgtggtggggtccttcctaaaacatgatgaattgcaactggctgtcaccttgacgtcagagataaaggcctgtggagaaggagacacaaactctgtgtttcayrtttataaacrgtaacatgtactcatagaagaatattgaaa

SEQ ID NO: 1592 - DNA, 600 bp, Bovine  MMBT20294
tgactgtcgggactctcaagctgkggggatcatccctgcttcagctaatcccattatgcagatggagaaaatgaggctgggcacaaagagttgcttaaacaaatctaggcctcatgctaatgcagggaatggtgctgagtcagtccagcttcctgctgagtacctgacgggagtggtggggtgaaggcagggtggagggttgggaagtggaactgaagctcctctggccagtgatgacttggatcaggcaaggacaatctcagagacctgggctctccccctcacccagtgcaatgtcamatgcaggcttcctgtgggctgggaccactcaccttccctgsctctcctcccaggtccctattgtgcccacaagtggacatgccaggctcaggtccactgggcgaacatctatctgcctgacgttggscagcattcccatgaggccacagccagatgttacctaactctgcagaaggaagctaggaagccagagcatcctggaaagtagccaggagtggggctaggcagatggtgacccagaggaccaagtttgagctgcagaaatcctggggtgaagggaagggggtactgtccttcagt

SEQ ID NO: 1593 - DNA, 598 bp, Bovine  MMBT19002
  misc_feature (1)..(18): n is a, c, g, or t
nnnnnnnnnnnnnnnnnncgtttgatgtgggcttgaggtctttggtttgaattggctcctttggttagagtcctctgtttctgtcttgtcgagatggtactcatgacaygtaattgctctgtggtttccagggccaagtctgagagaacacctctagattttgtaattctcaatttcttggtttgatagtaatttgtaaaagttatctgcctttatttagtctttccaggatcttcccaacccaggaatcgaaccaaggtctcctacattgcagatggattcttcaccatatgagccacmagggaggcctaaagtatctgacttagttgttcttaaaatatctcagtatcttccttttctacattcctgtttggatcatttatgtaaagattaaattaggtaattaaattaagtacagtttggaaatgttccccagctgactttgrtaaagayttagcttttggtaggaacagagatgagctgcaggagaagttggctcctggtcatggagtgagggggtccttctgtggagctaaagctggaatgcagatttagattttccaggggtctttaaattaggtcagctatagggtcctgc

SEQ ID NO: 1594 - DNA, 600 bp, Bovine  MMBT18873
gttaaatggcaatgtgtatgtgctgtgtatgtaatgtgtatgtgctgtgtatgtaatgtgtatgtgctgtgtatgtaatgtgtatgtgctgtgtatgtagtataggtgtagtgtatatgtacatcatgtatgtgttgtgtgtatgcagcacatgtgtgcagtgtgtatgtgttgtgtgtgtagtctgtgtgtttggcacrtcatgcactatttactcctgctttccagagcgaccacccacatggccccatcagtgctgaatttccggatccttcagaaaccctgtctcccacacccagmcaaataagcaagaacacatgtgaaaagccttattccagtgcctcttgggatgcagccaaacagctggaattatatgctttgtagagaaccggggacgtggcacggcagtaaaaaaaaagttgtttgtatttggaaatcaaattcctttccccaaacctgagagggcaagggagggctgggctgcrctctctaagggtgtgtatgtgtgtgtgtgtgtgtgtgtgtgtgtgtgtagggggcatctttcattaaaatctctgtcttttctagtgttcccccatttacaygtgcatttgcatt

SEQ ID NO: 1595 - DNA, 600 bp, Bovine  MMBT18449
ccctcccccttcctgtcctgctgctggactgggccctcgcctcccttgggttcaggggctgtgaggctttctgcttggcactgagcagtgagcatgcctatggtcctctcacgagcccacttttaatctcattgacctctcgttatactacagcacataaattcagatttggagatcttatgttccatcataaattgggctggcagacttccgatcaacaagataaagctgtctcctgtgaggtgggtgttttattagtcttggcctcagtgctgcaggcagtggaggtggggcgggggmgggaggtctctggaaccctcctgtgctgtttcagatgggcctgatgctgctttttgccatcaygggtaccatggcatcccctagacccccatccccatagcatcagaatgagcagccacagctggacccccaggctaggcacgggaaggtcaatagggagaccccatgtgcacccaggcatgtgtccatgtgtgcccctccccctgtggtggakctttgtgagcttggccagagccagagtggggttcaggggtgggggaggcagctgcacatgcctgggcatcctgagggacaaagggc

SEQ ID NO: 1596 - DNA, 487 bp, Bovine  MMBT19331
gttatctcatttgtatgagtaatatgaaaaacgctgcacaatttaatatgccatctcgtgcttttattcttatctcaccaggagggcaggtggtagtatacatgtttgaaagccaatgcagattgatatgggggagggccccaagaaatgatgtgagctgctatctgagctgagtaaaatgatatgagcacagatattattttatataggcaatctcacttgtatctttgccggtgagatcttaatcacagcatgcaatgggaatggaaacctcccctcctagttatctgggtgtggggmgacagcattgtcatcactgggagaacggttatctgttatttcactcrtgagataccaataggaacagtatgagggtgtttgtaaccaaactgtgcagctctgagtgataaaagcaggaggaggaggctcatctccaggagcgtggagataatgcctcttgctcggggaggagatggatggtattgtt

SEQ ID NO: 1597 - DNA, 598 bp, Bovine  MMBT19620
  misc_feature (1)..(68): n is a, c, g, or t
nnnnnnnnnnnnnnnnnnnnnnnnnnnnnnnnnnnnnnnnnnnnnnnnnnnnnnnnnnnnnnnnnnnncctgcgggccccaactactgaaactgcccagtagccggggctctgccacgaagaggcaccctgctcgctgcagctggagacccagcacagccaaaataatacacaaaaatcaacagaaagagtgctgaggacattacctctaaaaacagcaacaaacgaagaaacaaaagccacccctccccccagcacttggaggcgtttattacaagactcccacgatgaaattcactcmgtgcggagctcccgtaacaccggtactgggccggcagggtggctggactcaagaggtgtgcacttacctgcttggctgcgggcgcagagatggccttcctgtccagcaggtccagcagctcagccagggcggagggcgtgacaggactggcacccccaaaggagagaagaaaacacatcacttccctttgtcagcatacgcgttcacggttattcaagatcaaagcacgtgactctgcaggcttgaacacgtacctccccacccaggaatgacagtaacaggccaactgggccccgtg

SEQ ID NO: 1598 - DNA, 600 bp, Bovine  MMBT22364
ggtcacatagttgggaggtggcagggatgtctttcaaccatgtctcacagccacgcaggctgaagccagatctgcccacaacgtaaccctcacggargctgcttggtcactgagttttctgggacacagaaccccgtgtgtgccagccagcctgcgaagccacccagtgagcgactctcctctggtaccagatagcagactatcacccaggccgaggccagagaaaggccatgtgcagacccctcccagccacttaaacccccgcccctgcaccacgctgggctagcttcccacagcagmggccaaccctgctcccactgaggccccctaacaatccacccaggatggaaatgtctctgaagaccctgtcttcagagcttcgctcctggactttggggaaggtggttggcccgtgtctaagaaatctgcttaagatgaacctccgctccacccaggggatgacctcggcgtctgcacacgtgttaacccctcagcctcttccctgagcccagcaggctgacacgcgactttcaccggctcttccaccccgagttctctgattttaaccrgctgcaattcagagttgagcaccacaccttt

SEQ ID NO: 1599 - DNA, 598 bp, Bovine  MMBT19265
  misc_feature (1)..(47): n is a, c, g, or t
nnnnnnnnnnnnnnnnnnnnnnnnnnnnnnnnnnnnnnnnnnnnnnncggctggcttactcctgggcactctgatttgctgcatgactgttttcgtttccctgggatgctgtaacaaaattaccacagagtggcttaaaacaaaggaaatttattctgtcctaatgctagaggccagagtccaagatcagataaacagatctcaggctctcgcagtcccgccagagcctcaaggggagaaccagtcctcacctgtactggtttctggtagcaagtggctccgtcactccagtctctgccmccatctccacattgccttctcctctgtgtgtctcttatgaggtctttagctgttggatttaaggcccaaccagatatcatcttgagatcttgcctcaattatacctgcaaagatcctttttccaaataagatcaaattttctggtgattaggatgtggacatacctttggggagccacaatccagccaccactgtgagtgacccacacgagctattcccctcagggcctaaagtatcaggttcctaaccctgctgagacacagactcccttcaggcctcaatgcctgagagtgggttc

SEQ ID NO: 1600 - DNA, 600 bp, Bovine  MMBT12234
tctgagaattctagcctttttctgatccttcaccttcaaccttcgcgggcatttcacccaataaacctctagcaagtctaattccattttagtgtttactcttcaaaggacctgagggaacacaaatgtacattcacatgcatagcaatgtcctgggtagacccagattattacagtcaggctgcagcctagatcagacagggtatagagaacattcaattctcagcaatctcccaggaaaaaaaagatgttatatcataaaacttactctcaacaccgctactactaatgattaatcckaatgccagaagatgacacgctccccgctgggaaaccaygaytccaactagaattgaaggcacacaggactctcctcagtacgrgctagggtctggcagagagagagtgcagrgttctttcaggccwgtcrgtccagattgcaggtttagaatcagaatgaactgcttaagaggtaattccaaaaaactacccccctttacagtatcacagtcactcctaagtttctttaaaagattctgggatttttctacatcactgagaaggaagaggcattgtcacagacatataagcctatatttt

SEQ ID NO: 1601 - DNA, 568 bp, Bovine  MMBT22871
tgacctgccgacgcaggagacacaggttcaatctctgggttgggaagatcccctcgagtaggaaatggcaacccactccagtattcttgcctggaaaattacatggacagaggagcctggctggctacagtccatggggtctcaaagagtcagacatgacccagcgactaacactactactactacacttggagtgtgtgtatttgtgtatatatgcctgtatgtgtatgtgtgttggagagagagatatagtctcttatcccaagataagataagatasataaaccccatgargcccamcaactgtggccggagccctgcagtgggagtcgctcctgattctctcgtggacatcccctgtggtttcctctggttttggggtagatggggggtcccttggctcaggtttcagggttgggcacctgtccagtggatgggactcccctctacctcacttgtgcctgcaggtatctgggagatctgctcggccgatggccgggataccctcttcctgagggccaaggatgaggctagcgccaagtcctgggcggctgccatccaagcccag

SEQ ID NO: 1602 - DNA, 598 bp, Bovine  MMBT23306
  misc_feature (1)..(129): n is a, c, g, or t
nnnnnnnnnnnnnnnnnnnnnnnnnnnnnnnnnnnnnnnnnnnnnnnnnnnnnnnnnnnnnnnnnnnnnnnnnnnnnnnnnnnnnnnnnnnnnnnnnnnnnnnnnnnnnnnnnnnnnnnnnnnnnnnnnaaaatggccctattgtggtcagtaaccccatccctacccccacgggaaaggagagtaagactggcagtctgttctgcctgtagctcttcagggtggctgggtgcctatctcttcctgggatttcataaagatcttgggatgaaagtggcagcrattctgttcttgccattmagtctagaggaccctaagctttaatgtctcatttcctgcctgagaggttcatcaggatgcagagctcagatcacttctttttttggccaattgcagctggaacttyatatcccttttattatcctctcctgctacagaatgagtctcatataaaattataagccatctctcgttggccctatttcaggtcagtgggtatgattttacctgaggcatttgcatttagactgccaaacaccatgaaaccccactaccattctgatcttaatttacacccccaagccccaaccaaagcact

SEQ ID NO: 1603 - DNA, 598 bp, Bovine  MMBT20289
  misc_feature (1)..(20): n is a, c, g, or t
nnnnnnnnnnnnnnnnnnnnccagctaaagccctgagtggagggttagagctgtgtgactttggccagcccagagctgttcctcacacatgcttcctatgggcacctcgctagtagcagtgagttcctgcattcttgctgctctgataggacctgggtttccatccatagggagaggctgagaccctggccaggaggcaggaaagttaccagcatcctgagcctctcaggaacccaggtattctaggagctgactatctctgatttcagatgctactgactgtcgggactctcaagctgkggggatcatccctgcttcagctaatcccattatgcagatggagaaaatgaggctgggcacaaagagttgcttaaacaaatctaggcctcatgctaatgcagggaatggtgctgagtcagtccagcttcctgctgagtacctgacgggagtggtggggtgaaggcagggtggagggttgggaagtggaactgaagctcctctggccagtgatgacttggatcaggcaaggacaatctcagagacctgggctctccccctcacccagtgcaatgtcamatgcaggcttcctgtgggctgg

SEQ ID NO: 1604 - DNA, 598 bp, Bovine  MMBT22911
  misc_feature (1)..(54): n is a, c, g, or t
nnnnnnnnnnnnnnnnnnnnnnnnnnnnnnnnnnnnnnnnnnnnnnnnnnnnnnatttaatctctaggtcagcaaatacccaaagattatcccagaataattgctctaataatcgtgattttataaactggtgatcagtttaactgagtataatgatttatgaataactatttgaagaggtaaaaacaaggcaatgtaggatttcattttgcarcatatccaaayatgctttttccttattaaccatgcagcaccaaatgttcacygttaacatatttcattcaacatcttagtgtatamattattgatggaatcattttaatagttccttagttaaaattcaagtatgaktttcatttttagggcataaagtgcttgttctggataaaagcatctaggttgtcaatttctcctgtaactactggctttttgtgtagttttacgcagttttagccaacttggctcagttctatattctctgtgttgcgttcagtggctcagtcatttttgactctgcgacaccctggactgtagcccaccagactcctctgtccgtggaagtttccgggcaagagtactggagtgggtagccatttcc

SEQ ID NO: 1605 - DNA, 600 bp, Bovine  MMBT23033
tgaaagtaaaacttgccagaaattaggaatcaatttcccaaaataaaatactttttgttttggtgtgatggtatacagtttttggcttccctggtggctcggtggtaaagaacctgcctgccaaggaaggagacgcaagagacacgggaggatcccttggaggaggaaacagcaacctgctccaatattctcatctgggaaatcccatggagagaggagcctggcgggctacagttcatgrggtcacaaaaaagtcagacaccacttactggctaaacaacaacaaatatggctaaaaamcatcgttttcagtaaccatgtgtatgttgtattgatttttttctgctcaatgtattattttaataaatatctcatgaatgaagaaaaaaaaatcactgctttatgttgyccatatctaccaagggggagaagaagaggaggaggaggaagaggaataagctaatgatgacataggctgctgctgctgctgctaagtcacttcagtcgtgtccgactctgtgtgaccccatagacagcagcccaccaggctcccccgtccctgggattctccaggcaaaaacactggagtgggttgccatt

SEQ ID NO: 1606 - DNA, 598 bp, Bovine  MMBT22400
  misc_feature (1)..(101): n is a, c, g, or t
nnnnnnnnnnnnnnnnnnnnnnnnnnnnnnnnnnnnnnnnnnnnnnnnnnnnnnnnnnnnnnnnnnnnnnnnnnnnnnnnnnnnnnnnnnnnnnnnnnnnnaacccactgatggcacaggttcagtaatgtgtcagttctcaaattttgaaatattgtgtgataagggattaaactgctgtatttgggaggtaggtttgcaaatcactggaaaatcaaaagagaaatgtactgcgtttttaaaaaaaaagtgcccctaagttagaaaatgttgggtatagcaaatggggggccctacgtkgtcaagctacatgtaggcrtcctgtgacatcaggtttgtatatataatctgtttcttagaatctatacaataacttattgagggccacatcttacactcaasggcttgtctttcactgtttatctgtgagatgatgtatatatgaagcaacacaagttatgatgtggttcttcttccaaagacacacartagaaaaccaagacacgtggacaagcaaacaaaagcagacaccacagtaaaccagaacgacccacagtcatttcaacagggaacaccacgaaatctgctttcctacttg

SEQ ID NO: 1607 - DNA, 598 bp, Bovine  MMBT19789
  misc_feature (1)..(75): n is a, c, g, or t
nnnnnnnnnnnnnnnnnnnnnnnnnnnnnnnnnnnnnnnnnnnnnnnnnnnnnnnnnnnnnnnnnnnnnnnnnnntgttttccttcattgaaatttggggttgtttgttactgcagcataatctagactattgtctttaaaacaaagatacctgtacttaaaagtactcattgtagtgaaaataggaaaataaaacataatgaataagtaaggcacctgatatgatagaaggtaataaacactatggaattttaagacatagagtaggtaaggagccaaggattaaytcatatttaaagkgaaaagaaagagaggatgcaggttatagaactaattaggaaggtcagctaatyaatgatctctgagtacttataaaactttcttatatataggaagcactcaaaaacttattcatttttacattatgtggctctaatataataaatttgttgactatagtactaacttttgatcttttcatcacataacttttcttaaaaattaagacaaagcctcacttcatagttcagaagttaggtttacattgccaagtttctgaaccttacttatttacttcagcacatacaaatcttattaa

SEQ ID NO: 1608 - DNA, 600 bp, Bovine  MMBT19653
cccaaggatcgaaccctcatctctttgtctcctgcattggcagggaggtgctttyccactagtgcgcgtagcagtttgccgaatgacttgattggtatcgggcaaaagaataaggttggctttctgattttgtttcagttagtgtattgataatctacatatctctagatatctctagatattggtrtattgtgtaatctagatatatatcaatagtttataggcctagtcttaaatcagtttgtaaagcttcagctcttctgatgtgtaatatttaaggtttcaaaagatatgcttatmatctagcgaatcttagaaactctaccttttcagaccaaatataatctggcataggtttaggaatataaacataaagtccttaagggaaaaaaatgagtgtgaaaagggttcatgctccaaatggaatcatgtttctgacatgtctgttctgagcatcggaagtttgattctaattatgataggtttcacatttcagaaacttatctgtaagaatataaatctttaattctgatctttcaagaggccacaccaggttggttgagaggattaggtcatagtatgtctgacatattcaggtta

SEQ ID NO: 1609 - DNA, 600 bp, Bovine  MMBT20911
tggatyggtaacatctggctgaactgcatctcygtagggtcagatgggatggggacggggagtrggggagaaagtgtgttgggtcagatatggggtcaatgcagaggaagtgagcatttcagaagcagtcccaaccagaacatttcctgccgattgatgccaagttatttggaagaaaggactccggctattttagtttataaacccttgataaaggtccttgaagggrgtggctaaatcttttagccattcctgagtagagttggaatttattaattcatgtatctaaaaactaaagtmcatacaaataatggaattgtyctaaaataatgtttaaataactgtttaactttgctcaaatatctaccttcccaagagcagtttgcttaactaagtaaattgaccctggtgccttatgaagagcctgagcagctcatcatctgattccaggaatagttttccagccactgaattatgcatatttatattcagaaaagccattcccagcccctctccgtggtgactcactatcttctgttctcagtcatccccagcttgttagaggagatggtgtttctgaatggtggaaacgtgggagat

SEQ ID NO: 1610 - DNA, 600 bp, Bovine  MMBT20708
gcaatactgggtgttgccttaagatgggattctgtgaaagtagagctttctttctggatactttgctaactgtacgtgtgatttgagacaagcattttaactaacctytgtcttagttgttttttcctcattttaaaacttaataggtggaaacatatggtctttaggaaatcttcagcatctcatgttttatgagtgtatttctatttgcattaaagtttctgatcctcactgttttaattaaaaaacacattcttttatattacaagtctgtatgtaagtcacttctttagaactcamaatgatctttttccaggaatgtaacaatacatttagagattattttgcctaattaaatgtctagcaataacaaaggataaaagcaggagttcagtagtaggaaattgcaaggatctttgacaaaaaaagtttcaacaagggatgcagaagaacagctgtgaagggtaaaaatgagatgaggtttggagaaattttgctggtaaagattctagtgtgtaagcaacattttctgagtaagagcaactcttggaactgtgggtttttcaataaagaaggagaaatgaatacatttgcgcaaat

SEQ ID NO: 1611 - DNA, 516 bp, Bovine  MMBT21979
ttcctgtctcttccccatcttctgcctgaatttgtttttatgggatgacctttggtaccaacttatttttgtaataaatgtttcctgagtttatattttaaattgaaatggcctttctgtcaagtatggtatttataaaagttttctttgatgaaaagcctatgaattttgtgcaaacaacccaggcagggtcttagattagcgataacatttgtataggattttatggcttgatacgatactttacactcgatttatttgacccttacctgtgaatacgcagtgaaattcacattttamtgatgagagcaatgtagggaaggtgacttggcatgcttctgggcactagtgggcattcagcatgtttgctttaaaagaaagttagcaaaggaaaccagcarggtatttaacttgttcgaagtcacccagtaaatagtgcatcataccaagaactgaatttgcttctttaactaaaatattccatatgctctcattgtctactgctgtctttcaggc

SEQ ID NO: 1612 - DNA, 467 bp, Bovine  MMBT23220
aaagaatgtcccatctgtttggcgcagtgctcggagaaagaggaagaagaaacaccgtgaactgatacaggaagagcagatccaggagacggagtgctcagtagaatcagaagtcaaccagaaatctttgtggaactatgactatgccccaccaccacctccagagcagtgtctctctgatgatgaagtaggcaaaatagagatctggaattaagacccaggagggcaacaaatgagttcttcctagcttaggtctaaattgaaagtaacaccttagtgtcctgtgcctattatcattamgtagtcatgatttcagtcccagtagctatcccttccctgttgtaatagagaagtattttgggcaggcagatggtgatatactggtgaataggaaagttgaatgataggcagagtgtgacatgatacacctccattgtttgcattttaacctcagtccttaggattct

SEQ ID NO: 1613 - DNA, 600 bp, Bovine  MMBT20543
cacccctttccttacattttacattttaaagaggttgttttggttgctacatttttgttttctttctacctagttctgcttttctgtcatggcttacaatatcatctttcaaagacaatgctgaaagttctctggggacttgtgttgctttattgagtaatctttgatcagattgtaatggaaatccctgmaggtgatataaaatgtgtacatatatttgaatacataaaatatgtattttttttatttcatccatctttgacatgtctaaatatggacttatttagcatsttggcctcmaaacaacaggctcatcttgggggcatatttcaaaagagtkatgattttaaaaattgatgatgaaaataattggatttataaattctttgaaaatcagggatcctgtctcaacagcartagtaaaaactgctactgaagtatacagaaactgagactaaagatgtataatgtccttgtcctattaaatatgttttaaattgtgttaaccatcatgatattcacaagcttggatggcttaaatgtttactactaatacagttgtttatttaaactgagagataatttgtatataaaagaaat

SEQ ID NO: 1614 - DNA, 601 bp, Bovine  MMBT22569
  misc_feature (1)..(1): n is a, c, g, or t
nacggacctttgtcggcaaagtaatgtctctaattttactatcatttaaaataatgtttacatttcttatcaatataccatcacatatattgaaattttaaaatattactaaagccttaacaattaaaattatagatattttattcacctaattttacatcacctgaaataaattagtgtcttatattttaataatgaagcacttcactatttgtaatgttagagaaagaccactaatatcaattcaaytccacacttagactatgatactaacattccagaaatttttttcccccttccmagtttttatattctaattgcttgctttagaaactttgtggaaattgccatgtagtttgatgttgttaaaatataaaggttaatttgctcaattgctaagactttaattacaacacatcagttatttagactgtttgacatttcctgtaaattcctctaattaggaaacccttagagactctcacaaaaaaataagaaatcactaaaatgtgttgacagagatagatatatttcctcttaccgaatgagctcagagtgttataaatgtttggaaaaacccaagaattataattttatagtt

SEQ ID NO: 1615 - DNA, 600 bp, Bovine  MMBT19838
aattgctccctgtgctcagtcctgcctcctttcccctctatatacatattgattatgaaaacacttggcattaaatttcctgcatatttatcatccaggggaaggcaactgtgatagtggcagacccgtaactggcaaaattcagagctttagccattgatctttccactatgctatttatttgaacagaatgactacttttctaatgataaagtagagcacatacatgcatataacagatggagattatttttaaaaagaaaacaaaaagacaaatgacatgtttaagtacaataaaamttgaatatacatttaaaaatcagctgatacaagaatgtagataatattttaacattaatgaataataagactgattttataggtttttgccacatggctcagtcttggacacaagacatggagaagtggagtacttgagtttttggtctggaatattttgacataaaatgcccaaagtgtcataatttttcaggcctgtaatacatacattattgaataaatatgtcagattctttcaactagaaatggacattatagattttccagtctggaacccttcactacacagattaaagaatg

SEQ ID NO: 1616 - DNA, 601 bp, Bovine  MMBT20517
  misc_feature (1)..(1): n is a, c, g, or t
ncacaattttacttctgtgcaccttttctcagggaactacttgagggtttactccaccaaaagcgagtatataaaccaaagaagaagaaaaagaaaacacaggatccaggaaatcagtacaatacagagacaaagggcaaagctgatggggagtaaagatcacaagcagactggagcagctctgaagatccaaagacaataaagtaaatgaatatctgtgtttgaatggactgaaagaatacttccataatttkaagagagtctggatttaacttaatgatgagtacagagaaaacaaagmaaataaaacagaaagtttattagcctttaggggtcatgaaatactgggcagcacaagaaaagccaattttcataagaaatgattcagttcaaaatagccttgtagagttctaatgatgttatatagtatgttgatctaatcagagctataacataaaaatgatgaaaggagtagagaaagaattatgactatatatatatatagacatatatatatatatattatgactatagagaacaggaacaggagtgatcttaattttccaaagacagaagtcactaaacaataactgaaactaaa

SEQ ID NO: 1617 - DNA, 577 bp, Bovine  MMBT21611
gctacagagaacaaacttctttgttttttcagtatattagaatactatttttaaaagagagtactgaaattcttttcattgttctctatacctctttgctcaagaaccagcccccaaagccatatttttttttaaattttttataatatgaaagttagtgtggaaagataatggtagtttgcccttgcaagtattattgggtggtaagatataaaatrtagaatctaaaactcttatgataacctcctgactgattcagaggactgcttacgggaccattattatttgtgaattgattgmaaaaggggtatcctcttacagtgaggtcagagtaaacagtatggaaacacagacccttttataaattgtaaaaggtgatatatcaatatatgtatatattaaatattaagtgtttgcaaagtgccagacatactgtgagagatggtacttattactcctcatcacagaatctctgaaatggaaaatactaccacacccttcatttcagataggaaaaagaggcttaaaagggataaataattttcccagggactcagttaataagtcattttcataa

SEQ ID NO: 1618 - DNA, 600 bp, Bovine  MMBT20086
gaaaagaccctgatgctgggaaagattgaggccaaggggagaaggggatgacagaggatgagatggttggatggcatcactgactcaatggacatgagtttgagcaaactctcagagatagtgaagcctggtgtgctgtagtccatggggttgcaaagagccggacacagcttatcaactgaaaaacacagcactgtccatgtgtcctgttgaggaaaatgtatttacagatgattaacattttggcaaatagaagatgaaggcaaataacatcaaatagttaacaagggtcatcttttmattttgcttattctccctaatttcatttccctccctcctgagaaaaatctttttaaattgtctgtgctttttaatttgatttgggtccctcaaatcaattcagtacttccatgacaacggtgctcaaatcaaatcgtgtgcaagacatctgcccctcgtcttctctggtctgtggtttgttaaacagtaggaagaaaaacagtggcaagagagagatctcaagttgttcagataaggttggtgtttggagataagaacactcagctcttgaacttgagctcagcttctgcacattggggt

SEQ ID NO: 1619 - DNA, 598 bp, Bovine  MMBT20171
  misc_feature (1)..(10): n is a, c, g, or t
nnnnnnnnnntccctctaaggtttttattctttctcctcctatctcccccacaccccaagtcccagaggaacagaggaaaagaaagcagcaaaaagctctgagaagaaaaagraactgatggtaggggccagccagagagtcggctttcagagctggtgttccaggaggtcagaagcatttctctgtacggtttccctcacctttgtttgtgtgggtgacttagtggcggggaagcagagagattaacttgttatccccatgcagtttggtcagtagctctataggaaggccaataargmggagacagtcccaatcatctgctgagctctatttgcagcataaaggagtaatgagtagaactcttgctattgcacttattccagcaattatgtgtataagaaggatgaggagctgtgggcctaagagagaagggagggggccatggaaatcacacagtgtctcyggggctccccagctgtgtcaggactgaaatatgaatgtcatgcaggttggtgacttccttgtggcatgtacacattatcccacccrtgccacaattaagtcacattcagtagcacttcattattttaattaagc

SEQ ID NO: 1620 - DNA, 600 bp, Bovine  MMBT13290
agttcatggcctgagccacagtcagctcctggtcttgtttttgctgactgtatagagcttctccgtctttggctgcaaagaatataatcaatctgatttcagtgttgaccatctggtgatgtccatgtatagagtcttctcttgtgttgttggaagagggtgtttgttatgaccagtgcattttctttaaattttaaaatgcgatttaaaatacgaaccgcaaaaactattttctgaaaacaccaaaactcaaaagcctgtatcctagttttatatatagatacaaaatctcaatatttkccttaaattttcttgaatgtcttcatagcaatttttccagagacaatattatgaacaactccattattgtcatgggtcattttgaaaatgcatcatttaattaaatgatctaggcaaatccttggagaaggcaatggcaacccactccaatactcttgctttgagaatcccagggatggaggagcctggtgggctgccatctagggggtcgcacagagtcggacacaactgaagcaacttagcagcagcagcagcaggcaaatccttctggctcacagcttctcccattaaaaaaataat

SEQ ID NO: 1621 - DNA, 600 bp, Bovine  MMBT19211
agacctgaaaagtgttatcacagacaacattgcatttctccttgcaatatactttcgtattctacagagctcaggtgatctatcaaagtcagtagctgtggctaatatgtgctctgtcctcccagaattacataaatgcctaagcacaggtgctgaggtttgctgccagagctatagaagtgaaggattttaaagaaggaccttgagcagtggctctcctcttttgtgcacggctttaaaaaggtcgtgttgttgttgttttccctccaccccttcccctcaagaataattaattaatgktgtraaatagatactgaatgctacacattaggaaattccattttaatctgtgtctacattagtttcagggacctacttaatttatattgctgaaaaatgtaaagttgtgttggtcaaatgcaactgaaggacatctcaaacattttcagtaaatttggcttaagtacayttataacagatccaaagggtgtccaggttctttgggcatattgaataataccatttgtggtgccagtgtgtgggccacagtctctgactatcaggtcatagtttttttgtgtagagaggttaactgtcttt

SEQ ID NO: 1622 - DNA, 600 bp, Bovine  MMBT19791
ttcccttcatttcttcccttggtcagcattcatagtttataaaggcagcattttcacatctttgattattccaagtattcttttcayacaaactactacctaaatgtgataatcagttgtcaacccactttcaaaaggccttgccatatggtatgattttattggtcaattccagagtatatattaacttggaaaaaatgggctgctgctaatgggrtatggaatggaaatgctgtcttttgtcactaaggggactttatgtgtgaagttaatgtacacataaatcaacgctgtaaacamaaacaagagaatatcaaaaatttgttgctatcagttgtcacctatatacagatgacattgaagtttattatattttgagaatttgtttccatattcacctttatatcatcaacaaatatttccatttaggcttaaagaacaaactgtttaataaatcaaaatgaatttgatagatttgtacctgaatactgactctgaaattaaaggacgcttacttggaaggaaagttatgaccaacctagatagcatattcaaaagcagagacattactttgctaacaaaggtctgtctagtcaaggc

SEQ ID NO: 1623 - DNA, 600 bp, Bovine  MMBT22115
gtttcctatcaggaagatcatagtctagattaccagcctcaaagacctacctggaggtatagtcagacaccaatttttccaacgtgggacattccagtggattaaataaattcttccctgctagaagaggggaggggaccagggcaagaggggtaggggagtaagggggtacaaattattaggtataagacaagttacaaagatattgtacaacaaggggactatagcctatattttataataattttaaatgragtataacctttaaaaatkgtgaatcactatattgtatacctgtamcatataatattgtacaataactatacatcaaaccagtcaatmctaaaggaaatcaaccctgaatattcactggaaggactgaggctgaagctccaatactttggccacctgagttgacaaagagacaactcaatggaaaagaccctgattctgggaaagactgaaggcaggaggagaagggggtgacagaggataagatagttggatggcatcatcaaytcagtggacatgagttttagcaaactctgggagatagtgaaggacagggaagcagggctacagtccacggggtcacaaaga

SEQ ID NO: 1624 - DNA, 600 bp, Bovine  MMBT20465
tgggttcccagtagcaccaccccggggaagcccccatttctgtatggttgtgccctaatcccggtcttactaactcattactaagagaccccaggcttcttggtgaaatatcagtggacagaaggagggaaaaaaaatgcagagcttttcagccagtgctatgagatttgtagtctggttacttttctcccctgcaatgaaaataaactggaaagagaaaaccgggtaagtgaagtaaaatgatgatgaggtctcgcctcttgatagactatcttcagggaataataatgaaattcacamtggagaatttcatgacacacgatttccatttgggaaaatctttatgctccttggagcaaccagtttaaggtttgtttggagttattttcttcctttttgagggggagagtgaaatgctggtctaacattgatgttataaaatcctgggaaatacataaagtctaagaaccatagcaattagagatggagaaagcccattatatcatccctcaggcccaggggaatcagtggagagtctgtcctaggatagattttctagttctttagtctgttgactttcaaacaactcctgggatgggg

SEQ ID NO: 1625 - DNA, 598 bp, Bovine  MMBT12436
  misc_feature (1)..(68): n is a, c, g, or t
nnnnnnnnnnnnnnnnnnnnnnnnnnnnnnnnnnnnnnnnnnnnnnnnnnnnnnnnnnnnnnnnnnnncacacataatgattaaaaggaggtagttgttgattagacactcagataggaaggtaaattatttaaaaatagtccctaactctgaagcatcaatttagaacttcrtcaatgtcactgacaaatggaaatgaataaataacaaattttaaaaataatgaaaaargagataaggaaattatatcacttatatttcccagtgtaactttattttacaaattctgaaaattcagckttatccattaaattgaattttttaaacctgtagtagacagtttatcgattaacactgaatcaggtatatagcatgaattgatccttgagagtttatgaatgatactcatcctttgtaatataattaaactatttgaaaatgctttggattattacatgttggtttgcaaagagccttaagcaaatgattccatagatatattttaatgtggcaatactgacattttctttttagttttatctcagcctacactggacaaaatatgttttcactgtgcattattttaagctaccacaga

SEQ ID NO: 1626 - DNA, 600 bp, Bovine  MMBT18658
gaccccagatagctgaggttcatatgaaaggaatgatttcagtgagcccaggctcttgcatccttccatacatagaaaagtgctaataaattccttaacttgagatatctggttttctttaattaacaataatctttgggaaaggagaaggaggtggcagaggatatgatggttagaaaacatcattgactcaataagrcataaatttgagcaaactccaggaaatagtggaagacagaggaaccttcgttgcaaaagagttggactcaatttagcaactgaaggacaatagcaacacamcaacaacagatcttttgatgttcagactacctgttcttgcaaaacttctatgtaacctgattcctccccttgcctccttggagcagttctctcacagttacttgagatgctgtctctcatgcttgaagtcctaaaaattccctccgaataaaacaaaactcaacttttaggttgtgaatattttttaagttgacatatcctaactcatctctctgctcctgtttctatccattgttgactctccatcccacactttactggctttacttaacacaacaactaaattgatcttttaaaaaa

SEQ ID NO: 1627 - DNA, 596 bp, Bovine  MMBT19381
agactgaacarcaagycttggccccrccaaccctccctgggctagggaggaaagtacgtgactaagaaatcagaatcctggctctttctttcccattctgaagctaaatatacttttttaacaaaatcaaggccctacttccctttgaggggccttttggaattgaaagtagttcagaaagacctcttgacctacagtggtctttttttaattttattttcaaattctaagccaaaactggttgacttcaaaggtctctgtacaaaaatcacagcattgttttcctaaggaggccttatkgagtgattgatattttgagggttttccagcccagtgatttctttgctaaaaaaaaaaaaaaaagtgtactcactcatcttggcatttgtttgcaaactaaacccatggtttgaactctgtttatcatcccccacctcacccctcgcccttgacactggaattgctaacacacagagaacacagtggtctgttgctagcaaaatgtgctcccctgtgactttgctttttatgcacagattatcatctctgtcattcattataacttcaaaggctacaagagagtatactccctttag

SEQ ID NO: 1628 - DNA, 600 bp, Bovine  MMBT22127
ctttaactgacttggaaaaaatttatattaaccaacaaaccagttctagttacctctgttcagagagagattatgctgtatgccccacactaaataattctacatacacctatgccttccaagttctcaaagtttccttgtataatttttttggatcagcttttgtttaaaaaacatatttattgaggtatacttcatatgccataaatttcactcatttcaagtgtcaattcagtgagttttagtaaaattacagagctgtacaaccatgtctcctcccgtgtgtcaggctacccatgmaatcttcactgttgaaccaatttctcattcgttgcttctagttttctgtattaaaattgtgggtaaaaggtaaaacaagagttaccagcctctgagcaaaaatttttttccccagggaggaaaggatacaagctgtagtgtatagattgtggcatktatattgtttgcttagagaccctttaamatatttctccaggtcttctgttctgattcatatagacaagtccactccatgtaactgctattcaaccctgctttctccacacccagtactagagcaaagtttaggctcttattaag

SEQ ID NO: 1629 - DNA, 598 bp, Bovine  MMBT21386
  misc_feature (1)..(98): n is a, c, g, or t
nnnnnnnnnnnnnnnnnnnnnnnnnnnnnnnnnnnnnnnnnnnnnnnnnnnnnnnnnnnnnnnnnnnnnnnnnnnnnnnnnnnnnnnnnnnnnnnnnnatactggagtgggttgccatttcttcctccagagcatctttccaactccaggatccaacccggatcttctgtgtctccygcgttggcaggcagattctttgccactgccatcacggaaggccacatatatattatacagtctccttattaccaatcaatttgggaatatgatgagatcaatgagtggatttccttcacagamgaatggaaagaagcacatatrcgcaatatcatatataaacaaatattcatggaccaaagggcaagaatccggacaccatcccaagcgcgtcctgagctaactggccttcccaccgtcatgtctgtgcttctgcattttatcctctgcctgcagtacccatcttttattttctcacctaccaaactgctacttctccttcagatttaaayttaagctttgccgtgtctgtgaagctgtttttttctgacgcttaacaaaccctaaaggtttcttccttcaagcttattccctagtagcg

SEQ ID NO: 1630 - DNA, 598 bp, Bovine  MMBT23064
ccatagatggaagcccaccaggctcccccgtccctgggattctccaggcaagaacacycgagtgggttgccatttccttctccaatgcatgaaagtgaaaagtgaaagtgaagtcrctcagtcgtgtccgactcttagtggccccatggactgtagcctagcaggctcctccatccatgggattttccaggcaagagtactggagtggggtgctatcgccttctccaagcagatctactagtgattctttatttctcctcaaaaactaggkaaaccaaggcacagactgactgacagagmagatagcttcaaattgaatttgtagtctctgccttcagaccaatggtgcatcctgttcacctcttagccatgaagcttrttaactttaaaaatggagttaagtgtatatatcaagttggaatcaaaaatattttaaatctttacctgtatgtatacttaagattacattgaatggttttatctccaggacatgggaagtagaaagaaaataacacagacacatagacatgagttcaaaattgatagaaagaggaaggaagggagtatgtccaagaggccaccagagtcacatgggctc

SEQ ID NO: 1631 - DNA, 600 bp, Bovine  MMBT23050
gctcttttattcaccgacatacattcaggacaattacagagctgtagtgggcacgttgtgaatcttgctcatagaaacgtttgaaccactttaagatgaccataaaaaggaacacaattgtgccatttgcagagacgtggttgaagctagagactgtgctacagagtgaagtcagttrgaaagagaaagtcaaatagcgtttattaatgcttatatgtggaatctagaaaaacggtacagatgaacctatttacagagcggaaatagacatagagggaaaawatatatagacataaagcmgaggaaggggtggtgggatgaactgggagactagaattgacatatataccctaytgatcctgtgcataaaccagatagctaataaaaatcctactgtatagcccagataactctactccatgctctatgatgacctaaatggaaagacagtccaaaaaagaggagatatatgtatacctatagctgattgactctgctgtacagcagaaaccaacayagyattataaagcaactgtattccaataaaaagtaattttaaaaatgatcattaggtgtgaaaagtcaagcttttacagactt

SEQ ID NO: 1632 - DNA, 600 bp, Bovine  MMBT21294
tcttattccccttaacattccccaacctttcgttctcttaacttattaacttatttcaacttaattattgcatcatggtgaatgaagggagtcattcttcctcttaagaaaggccatagtctcttaggacctttctgatgctactattccaataaccaagccactcctccccactactttgtggatctttatagatcatggtgggtagtatgaaatgtaccctagaagattctgaaacgagttagaatagtacattaattaagttggctttgaagtcatgctatgaaacactaaacattmatttcctgttccatgtcctacttcaggttagctgcccaaaatagctatatattctttaaaaattcttcagagattctacagtgatatcaaatgacagaattaacatatttcaaccacagaattccaataacagaccctcaatgtgcatgtttactcttgcccattatcagatttttgtaaagaaatcaaatttgaagaataaaatgccaaagaggttaaaatccaaaaattttaagtcttcagagaagtgaattccaaaatcaaataatcttamctttgtgagctaaaatccaataaaag

SEQ ID NO: 1633 - DNA, 600 bp, Bovine  MMBT15394
agacagcatttggggagaggcagtataacagaaaggctttattgacaaaggagacttagtaagacaacttgcaagagaaaaatgaaaaagtgattacagactattgttttctaaagtgaggaagaactactaacacaggaagaaaggcaacacgtaaacataagcagccacatactgtcaaggggataataaaggcagtcttcatggggtgaacaaaattattttgaaatctcagggatctgtatcaagctaaggtgatatatatggccaaagacaaaggaatacagtcagaactctaamggatactcaaaagagcaggaatgggtttctgtagttgaagaaataggagaaagagtgataattagtgctgatcctaaattatttctcagctataccttcacatacccttttaaaaggccaagaagccacctgttcgrtgatcttttttttttcttctgtgtaactaatacaagagatctttaaccctctttaaggatttaaaccctcttttagggtttaattaaccctaagcataattctggagccttttatctttggtattttcatacatatctgtcaagatttgcccatctacttctt

SEQ ID NO: 1634 - DNA, 600 bp, Bovine  MMBT12810
atacaatgttgctttttaccaagtctcatccttggaggactagccccccaaaaagtagccttcaaatacacactaaaacatacagcaaatattcagtaacagcagcaaacgtatcatgatgcccaaaggctttttgtatgtgtattagcaatgcactaatttgacattagtcaaagcactgatctcaagcaaggttttgggtataagattcctacagtgctggcagagttactgaatatacccatgtggctgactctttaattgatttttgcttgtcacttctattctatccaggtatgmytctgagttgcttttgtgctgacatctaatttttctacggtgcaatcagtttctagtaaacacagaaaaaaattaagttcatgagactgtatgcaagtaccactcaatctccaattcatactcacccaaaaacttcacatggtatttaatgtgagtgttggataccaggctcactttgggcaaaaaacacatggaaattcttgcctcatgacagatcctgtcttcagtgatcattacataatctggtaaataacttttgtccaaccaaatgaagtagatgtaaagcaatactactactcc

SEQ ID NO: 1635 - DNA, 600 bp, Bovine  MMBT20586
gcacagatatgactcaaagaaaatgctacctattttctrcatataagaccaagcttayatgatcaatttagaaagcatctcttaaatttaaaatatagttacatttccatgattttttwaaaaaggacgtcaaagtaagaacctgtaaaatatagtaaaaaataagaaatatatcagatcattaaagcaaatcagacaaaataccaaaattcaaggcatagaagatcccaaaaatattatattaagacactgaaatagaccttatgaaggagttgtgtaactactattttctttcccagmtccwtatttcttatgttggataatagcaaaaccctcttcccttctaccagggctccaaactcyggtatccttggaaaatgctgcatatttcagaatgtatctattagtcatccacttcttaatcactcaaaatgtgatcataagcaaaccaaaacttactttggtttttataggccccggctgaatcacattgaatctcattccatatttaccccattcagctgcaagagacctaaaaattaaaacaaacagtacagatttctaaaatactatactataaattacaaatactattaacca

SEQ ID NO: 1636 - DNA, 601 bp, Bovine  MMBT19776
  misc_feature (1)..(1): n is a, c, g, or t
ncagtcacttaaaagaagtttaacttgtatatactgatccaaaaagatgttcacaatattgtacatgaaaaaaattataagatatgatgctayttttggaaaacaatgaaaataccaacacattctattatttatataaataagtatctatacagaaaaatttagatagacatattttaaattgctacttgggattaacttgggaggaagagatggaacattataaaggmctaactttttagatgattttttaatttgaaatttttataattggataaaataatcaacawaaagtgatttmgagggttgaggaggggccatgccatgtagcttatggaattttagytccccagagactgaacgyagaccctcagctgtgagagcacagratactaaccactggactgccagggtatttccatgatttatcttttttaaatataagattaggaggaaaaagcacaaatattcaagtatagtaagaattaagttaagctgtaaaagaactttaattcaaaaaagtactctgtacatttacagcactcaacttatcagtgtgaacgtttcatttcaagggtttctgatgctgtatcatactttc

SEQ ID NO: 1637 - DNA, 600 bp, Bovine  MMBT18664
aggctccctcgctgatagctccaggactgtagggcttccctcacacttattttgattactgctgcctgtcacattgtttcttcttcttgaccttggtgcctgtcagaccattcacaccccctaactgtctttacctgccacttgtccgtcttcaccgaaagcctggtttctctgattactcaggccctaacagcttctcgtggagttacttgactcttctcagaagtgaaggagtgctgtgtggccttctttgccactggacttgatgaaggttgtcggctgtgagtcggatcatagacsgtcctctccagagggccaccttagggagcttttagagaggggtcatggcctaagtgggggggaagctgccttgaagacaacatctttctgactttcctgcattttcatttactggctttctgagcttgagcaagccatgtggctgctctcagtctcagtgytcttatctgttaagtgggaattatttatagtaagaatcaagtctatgtaaaaatactgctatgtccaaacgaatcttctaggtagagctctcagctttttagaggggtttaagaattgtgtgctggcctccccggtggc

SEQ ID NO: 1638 - DNA, 600 bp, Bovine  MMBT20964
gattaaaaaaaaaaaaaacctaaatattgtaatatgacagataacctaataattgtatctacattaaaatgacaaacatgatattgctgcttgtcaaataaaaaaataaagaaatagaatgccttttttatgtggatggagtatcacaatgctcagaaatgtccgtgagtcctcgtgttcctgtttaaatcctacatgaaaacgtctcagttattgtttctgaatgccttcagcrtaaaggatgcgttcagcataagtgatgctttctttttatggattagaactacattggatgtgagsctcgtgaggagtgaggctgtgattctgttcgagtttctggtggtgtcctgctgcagcgcagaaccrtgagcgaggggactgmggggaccccgcgtctggcttagaaagcgccgtcattcccaggctgtgttactcctgtctccgaggtgcrtcagttctaatgaggtctgacgcccctctgctccttccctcccgcttcctcggggtcggaggtcatcctgcggtaccggtaccggtgtctgcctgtgcgttccccccgtacccctgcctgcctgttactctccacctccttccacttta

SEQ ID NO: 1639 - DNA, 573 bp, Bovine  MMBT22464
actgccctctgaacccacctctatactgaagcttctgggcccggttgtttggacagtccttcccctgtaaactgaagttgatgttggtgcggatgcagcggttgttgagtgactggacaggcctgaaattgtcactcatgctcagaaagatctgagatggttgattctggctgagcaggcgtaaggaatgcatctgaggggagagaaacarctgtgagatccacccatcctcttacatgtagtacggaagaartaagactacatagaccatggccagcctgggtagtgccagctgtgtgsgaaagtgtacttgaaccttccacagrccctgatccatgggttcagtgggtacaacccactgatgcctccatgcttggagagagccttacttttagctcacttgttcctggtatgcctctggacaagtcagtgattattttctgtcctatgacacatcgtcaaaggagaaaacccaaatgggtattctccagagactcttctcactctcagacactgaagctgagtaattaagggaattattttctgatatgagtattatcaaaactatagtga

SEQ ID NO: 1640 - DNA, 600 bp, Bovine  MMBT15644
tagaagtatctagagaggtccaaagtcaggtttcattgggtagcggtgagaaaccattatccctttcacaaaagatggtgaagaggagccagagggaaaacaattggcgtttttgtgtggggctggtctaagcagcccgtgcgagcccagctggagcttctttggccctgtgttctgcaggcggcgtgcatttttgaaacacccctaaatgttccagcctttaaatagcagcgagtcttctaaaatgatgctgcatagcgcaggagaaattaaagcggctgcctgggaggcaggaagccsactagcgagatgcttaattatcgtggaagtaagtgcttgttgctggggagcggagcgcagcgagcccgggtcggcctgggtgtcagccgtgatttgtagacaatgcggccccggcagcgcagtgctggatcagcagcatctttgcaaacatgcatttggcaggaatttaaaggccacctcttgtgtcatttgtggagccttggaaaagggtcctctgcctttattttcaggatgtacgcaaccatgcaggattttgtgctcagaatttgtgcctcttgcctcctgattgacgtgctcctg

SEQ ID NO: 1641 - DNA, 568 bp, Bovine  MMBT22902
atgtgcttagaaaaccatcggaaaacaatagaaaataaaaattccctcaatcattctcccaattggcagctctattgctataatgacattttacgatcatcctcccacacttaaaaaaatttttatgtaagggaaattaaatgtgcaaacaaataaattggaaaagtggtttccagcacagacaaagaattgatggctttaaaatatgtaaagagcttaggaaaaatgcttacattctcaaggcaaagacaggcatccgttccattgtacatcattcagcagacgttgagtgcctgctgstaagttaaaggagtgcttactgtgcacaaaaacagctgttaggagggacagacatggcgttttgtcatctgttttattccagcgttttgagtcataatcaagatataagtgaaactatatgggaaacatttttctttacactttcaaaaataatgtaggtgagtgtgtgtataaacttgagatggaaaaccatttcttaagcaagactccccacaaaactaactatagaggaagagatccataaattgagctgtgtgacataagaact

SEQ ID NO: 1642 - DNA, 600 bp, Bovine  MMBT20105
taagctgaactctttgcatccactgtgtttctttcctgggcacaaaaaagaagtaacatgattatcctcctccttgagtcttggtttgcccagaacttattacagcaggtggagcagtgacctcagtgatcagggcattccggttggtagataagactcktccccgtattcacagacaagggttcctgtggttgttggatcttaagtgcgtttaaaactataaggagctgtttgttgctttgatgaccagcatgtgaactgttctatcagaaactgtagggaggatcaccccaacacccstaatcctgaatattcttgcctgagtctcagcgagggggtcacaagagccatggcaagaaaaagagtatgcacatagtaagggcaagagggaactggggctcttaatgtatttggagaagacatgtggggacacatacatattgaaagacaccattaataaagcatattttattaggaatgaaacatgcaaatggtcacagaggacaagcggtgagtgtggaaagcgttgcaaatggggaagctgtattccaggtttaaaagtatagaaggagacagattcatggtggcagtcagggtggg

SEQ ID NO: 1643 - DNA, 600 bp, Bovine  MMBT21700
ggagccaagatcccatatgcctcatggtcaaaaagcaaaaaaaaaaaaaaacaacaacaacaacacataaaacagaagcaatattgtaacaaatycaacaaaaactttaaaaatggtcccacatccaaaaactctttaaaaagataaatgggatggggaaagctgaataaaccaggattttgataaagggaccctcaagctttcccctcaatgttactagcttaaagtaaataataacaggtcacctcttcagggagctttccgtgtgccagacgctgtcctaagagccctgggagtaastacggtcgatcgttaacccatggatggttgtaaaggtgaaagaacagtttccatgttgcccagggagaagggggcggagccagracacagtcatgactagtttaccccagaccccgggcacttaacatcccacacctgagagtgagacttcggtctcagaagggaccagatgcgcccgcttccctttgatctcttgcgcgttttatcctttgagtcctccgactagtttggaaagaagcaagtctttgaagccgcatcagtggcaagggcgagacctgaggggtgttctaagctgtgaag

SEQ ID NO: 1644 - DNA, 600 bp, Bovine  MMBT22719
agtccattgggagttgctgggcctgggctggatctgggcaggacagagcaacatctggtcagtcaaggagcatttcttgggacttccttggtggtccagtggttaagagtccaagctcccaatgcacgaggggcctgggttcgatccctggtcagggaactaaatcccacctgctgcaactaaaaatcctacatggtgcagttaagacctggcgtagccaaataaataaataatgagcattactcaaatagccaccacaaggaaaacagtgacttaggcagctccctcgcttgccctctstaactgctggagggcacctgggaacacctgaggcagtcactcatacccctcctctgccagaaccttccctggtcctgcctccccttttttttcctggctatgctgcagggcttgcaggacttagttctccaactcgggtattgaacccatgcccatggcagtgaaagcatggagtgcaaaccactgaaccaccagagaattccctcctcccactcctaactgatcacttcttygagccacagggcttccctgccaatctgtaagcacaccaggcatgtgccagcctcagggcctttgcat

SEQ ID NO: 1645 - DNA, 600 bp, Bovine  MMBT19695
aaatcacaacttatcccatgatatgcaaataagatgacccttggaagcaaaagtacatgtctattatacataaaatgcataatatgtatcatacataaaacagagaatacagaatttatttacatacattggttgtgtaactgaaggaacattacagtctgatggtgaaaagtgagctctgtcccccatggaggggccagaatggactcagtctgtctactgcaagtccactcctggagccaaatcagtagagaaacagccagcatccaccaccatttccaacatgcctgatgcaccaasaagcagagtgcaagtcctgctgactggcagctsttgggattaccttgcagtctgggtggtgaggactcattaagcaccattggtgctcaataatctttcgactcgattcaggtcatatctgaatggtctagtggttttcactactttcttcagtttaagtctgaatttggcaatgagttcatgatctgagccacagtcagctcccagtcctgtttttgctgactgtatagggtttctccatctttggctgcaaagaatataattactctgatttcagtgttgaccatctggtgatgtccg

SEQ ID NO: 1646 - DNA, 600 bp, Bovine  MMBT21338
caagggcagtaaacaggacttcgggatttaccgccgaggccccagggggtgctgggacctctgctgagccttcggctacagtgattccatttaactctctcgtmctaccccctgccgtagtaactgacctcactgaacgatggggacccsggggacccagagtgcttaagtgatttgcccaaggtcacacagcccgcatccaaacccaggctctccgaagccagagttgggccctaggcagcgctgactctcgctccggaccgattgccaccctgactaattktaagtcccgtttgtgtststctctctctyattcccagggactcctcggctgggcccagaaagacctgcagagtgaatttggaattgcargaggcccacatcctggcggtttccggccttccacctggtcccaggatgcttctcgggactacagcctgggagttgcaagccctcgaggggacccaggcctcggagagagggactgggccagcgagtgtgggcatggagttggggaggggggccctggggaatgggctggcaggtgtgccctcgactgygaggagggcgaggtcggcggccaagacggccgtggagcrg

SEQ ID NO: 1647 - DNA, 600 bp, Bovine  MMBT19120
aggagcaagactcttgggtcaagacattgttattcacagcacagcaagtagcatgagcttcttgttggtgacattcccccatgtcacccaagtctctctggtgtgatgtaagagcctgggctaccatggctgtrtagtaatacattattgatcgggagatgtattaatacatttttagagagtgattacaattaacatcaccatgtgaagttgctagagcttaaaattgatcaagagttcattayacaacttattgtcattatcaytcacattatcttgtgttaggtttttgttctaggsacgggggagcccagtgggctgctgtctatggggttgcacagagtcggacacgactgaagcgacgcagcagcagcagcagcagtgtatattataaacccaagtttattaccataaaattttaaaaattaatgcattgcaaaaattttgactgaagaagaattttttggtggattttatacagatactttctctgattgtccatgttaaatatatagtattttctcaggagatgatagttgttcagaatatagttctgattcagacaatatgaatattaggccaacaaaaagacaaaaaacc

SEQ ID NO: 1648 - DNA, 600 bp, Bovine  MMBT18754
cccttggtatgcrgacacgcccagaraagcccattctttatggcaatttgggccttctgcctggcttctcacatgtgcaagagattttggcaaaacactgcttttttttttgtttctctcattgtcatataatacaaagctttgcttctttcctctaacgggctttcctattttgtttctcaaatccagacaaacacacatttcaatgtccattcacattattaaccaaaaagacctccataatcaakcatttggggtttgattcacaaagataccatgtatggrgywctggagcttttscactcttttgggggaaggttgaaagggccttgtctgtggcaggtcgggtgcaagagggttgcaaagctttctcaggttcgtgactgacttgccccacggatgagaaaatcagagctcggggacctgactccagtgctgggatgtctgagacagctggcttcaacttccccctctccaccggcccccgccctcactcacgctgcctaagaggcacctgctctgggggcctgttcaagctgtcccatcatcccatcattctgagctgttgtttccagggttctaagggaccagggcctgagt

SEQ ID NO: 1649 - DNA, 600 bp, Bovine  MMBT19702
atgacccttggaagcaaaagtacatgtctattatacataaaatgcataatatgtatcatacataaaacagagaatacagaatttatttacatacattggttgtgtaactgaaggaacattacagtctgatggtgaaaagtgagctctgtcccccatggaggggccagaatggactcagtctgtctactgcaagtccactcctggagccaaatcagtagagaaacagccagcatccaccaccatttccaacatgcctgatgcaccaasaagcagagtgcaagtcctgctgactggcagctsttgggattaccttgcagtctgggtggtgaggactcattaagcaccattggtgctcaataatctttcgactcgattcaggtcatatctgaatggtctagtggttttcactactttcttcagtttaagtctgaatttggcaatgagttcatgatctgagccacagtcagctcccagtcctgtttttgctgactgtatagggtttctccatctttggctgcaaagaatataattactctgatttcagtgttgaccatctggtgatgtccgtgtgtagagtcatctcttgtattgttggaagag

SEQ ID NO: 1650 - DNA, 600 bp, Bovine  MMBT21613
tgtggtctaatgcaagagagtttttatatgtggacatcccacttagaaggggggtggatagaggagcatgcctaggccagatctatgagagctgtcaaaacatcactggacactgaatgagatggaatcatatctcctctaagcgagagtgctgagtgtgtttgaaaggaatagtttgccaagtccctggggtgacaggaggtgtaggctcttcacaaggatttaactcaaaaactaacggctctcccagacgtgtgggtcaygtagagcattgttttactgagtggaatttgcaagagsggtactgaaactcatggcccatctttttccatgcagcactcaacctctctcaaaggatactgaacaaatgcttcaaaaataccttttacctgggctataaagattaattttatcattgttctttatactacatatacagttttcactttatatggtacacaattaagtgatcattgcctgctttaaaacagtggcaaattgtttaaaatctactaattatattggaagaaaggaaatcctgtaataaattcaatatataatactgtgacctactctgaagaaaccacaaaaacaaccaaa

SEQ ID NO: 1651 - DNA, 598 bp, Bovine  MMBT21832
  misc_feature (1)..(83): n is a, c, g, or t
nnnnnnnnnnnnnnnnnnnnnnnnnnnnnnnnnnnnnnnnnnnnnnnnnnnnnnnnnnnnnnnnnnnnnnnnnnnnnnnnnnntactctctgaactcctctttggagagtgttttagaagagtttgcaaaaggacattgatggattcctgcagacaaaagtttaaaaagtaataatatctgagctgggtgaaaaaaaaagaagatgctgaagtgttcccactgtattctgctgatgctttaagttctacacggtagtaattggaatgggatttcattacaagaagtttttacccactcasaccaactgcatccttataagagtgacgaagactaagtgcaccygttctgaccattaccttcatggtctccagggaaacagcccaaggaagttatcaaagctgtaaaagtagaggaggcaatcataagacattgccaacaagctcaacacttcaaatacttggagctgtaaaataaataacaaactcatacaatttggcttaaataatcatgagcaaaaaaagtcttcatctccttttctacttatttattttatttaaaaacagcccatttcccttgaaaagtattattcatattcct

SEQ ID NO: 1652 - DNA, 600 bp, Bovine  MMBT15690
tttcttcttgaattccatttcatatatatttttaattggagtatagttcccttacaatgttgtgttagttcctgctgtacaacaatgtgaatcagctatacttatacatatatcccttccctcttgagcctccttcccatcccacccctccaatttcttcctgaatttctagtagtatctgttgtatacattttcatgccatgtgtttgcattcctggcctcttgccatcttaaagttaaaagaagataacaattcctgggatgttatgcatcatacaaaggaagtcctgtctctcatascaaagggatacaagcagagtcaaggtgyttgctttcccccacccagtcttaccagcattgtgtctggcaacccaagtcattctgggaacaccatacccagaatcacatgctgtgggacccaatcccatgggtcggtgtgtgtrtgtgtgtgtgtgtgtgtgtgttttaatgcaaatctcagcttccaaagcaagatcctcatttggaatttaaaagagttctaggttgtttaacgtttgagtggaattcctgagcctgttaactggtcacagtctactagctctcataattagcaagaga

SEQ ID NO: 1653 - DNA, 600 bp, Bovine  MMBT22087
caggaacattcgagactcctcttggcatggattacttttcacttgggaagatgtgttcatcgacatcacattttctgaagaacatcttaggagggaagtcaaatagggaaactgaataatgcagccacatctgttcattgcacatgcaaaatgctggctggttcgctgattatactcacctctcctccaaagaatctgtatttatgagcccactcaggaaagataacactggcatcttgcctttcaggcaaaagcctgtttgtgctttacttgtaagaaagcacaaggaaagaaatgggscgtcartaacactgcagctgggctctttgaggtgccccaagtcagagagagggaaacaagcattccattcaacactaaaatgcatgkgctgccctccagagcaaagctgcctgtcctcagcattcaccttgataatgttgccacaaacactgaaattttggtggtcgttacacatctctggggtggcaaagcaagaagtcagactgcccagggcaaggccaggtctcccacagagcctggatgagagggaggtcagatggatggtaaatarattggcaagaagaagcctgaggggacttc

SEQ ID NO: 1654 - DNA, 600 bp, Bovine  MMBT19922
ttgccaaactattttgatgtacaattttttcaataaaatgtatataacaaatagttgccggggrggacctctctcctccatgggcatctgatcgccaggatgatgcaactctacactgggcaggatttttttctaagctgtgtaattggcgtggtgtggggtctgtgccttgagtaacgcaggccaggttctgattgcgggtcttctcgggagagaaagggaagaagaaacgttttctgttatttctttgcttcaccctckctctttctggccaaaccgaaaccagaaagtgaaaggagsttaaaggaaagccaggcgcccctgcccttcgctgtccttcccaagtgcccggcctctgcaccgtgctttcgcttccccgccggctgggctgggctgccctcctccggctgcgagcagagggcaggtgcccaggacacaggccctgcatccttaggtggccgtcagatccctgtgtctggaggggaaggtgaggagggtgtgggcagtcctggcatcagagacagaagcaggatgaggcatgtgtccacccccagttcggggcacagaggtcggcgcccacgtgccacccyggtctgcctc

SEQ ID NO: 1655 - DNA, 600 bp, Bovine  MMBT22437
agcggttcggtcaaaaaacaaacaaaacaaaaagtcctgtgggcacaatttggttcttaaactgccaatttgcaatctctggtctcctccaagtctgcctgctctccattttacagatgataaagctgaggctcagagaggcctagtgaccttccyagggcttcacaggtcactgttgggaaaaccatgggtccaggaagcctgtctagtgctccttgcccaagatagcagatttgttggctgagcccaaggtcttaacaagcaattctcaaatgcttcccacgtatctctcgtttgcasagacatgaggtttacaaacacctcataacctacttgattctagcaatggccatgagggagcagggctggcattaatccattttcttttacaggtgaggaaaccaaggcttggagaggctaagtgacttgcaaggtcaacagtcttagagagggctggagttagggcctccagtaacccctctatgatttttctacccccaaactctgtcatatttgggagatacagcctgagatagaaaataaactcctaaaaaggaacagtaaatggatgggatacttgggtaaacggaatattcttcg

SEQ ID NO: 1656 - DNA, 479 bp, Bovine  MMBT20262
ggataggaatttgggattttttttgaggggaggaggagcatgtgggatcttagttccctacagtggaagtcttagccgctgtaccaccagggaagtcctttgaatctccctagtctgaatcgtgagaaactctgtccagttggtactgggttggttcagcctgagagtgctgtttttctgcttggcttattgggagcaagtaacttttgcagggaaagagcggctgctggaggcaggagtggagctggttgggctgagcgggtatgtggaggcctcttcctcccctgargctgcaagagsgttgctgctattgtgtgtgttttatttttcaaataattttatttatttatttttgtctttgctgggtctttgttgctctgygggcttttctctagttgcaaagggcagggcttactttgtagttgtggtgtgggtcttcttgttgactcctcttgttgaagagcacaggccctaggtgt

SEQ ID NO: 1657 - DNA, 600 bp, Bovine  MMBT19662
cctggtttagagaggcaattggaatggattcagggttgatgaaaagaagaagatactagactagctgagccctataataaaaagcctggccaaaatgatacagatgactggctgagatcatcttgcataaggctggccctcagcaaaattgtttaggaggcataaacattttggttctttctgtttcttcatgagatatccattctcacttttgcccaagtttctaggttcctttcactgcccttttcctgtggcagcagagagctatcaatatccaaatcttcaaccacacctgccctscagatctttccattccttttagaactagttcagtatactgggtgtattggttttgtgtcttaactacaatactcagggcccaggttgctggtcaaataaatccaggacacgaatttattataagtgaacaaattaacttatactataaaatagttaatcaaatcatctaattaaggtgataatgactactagctaaatgtgtttgcagtttagcattgtgcaggtgatgaaatgcaccaggtgtgagtctgtgggctcagctcccaggtgcagtgctaaccagccacgggaagctgggca

SEQ ID NO: 1658 - DNA, 600 bp, Bovine  MMBT22561
agatatttgctgaacgcaacagataggtggtgctgtggttcaccaaagccttggaattagactccaaaggcctgggtttttacaaaggctatatcccaagtttaaaaatcacaattagaaagtcaaataagtgccttgaaaaggcatctgacttgcatagtagctgaatttttgccttgacaaataaacttctgtagtttctaagatgtccactaattttctatttggctaaggaatgttttgggttaacacttcaattttaagcatttgcaaggtctgtcacagacttctatcacttasagaaatcaaakactaatgcaacattggcttaaacataatgagttyattgctttatgacataattacaaacccaaggaaaactctgtgttggttacctatgacaaattgtccaaatrattctacttggtaaaggcagctttcttttttggctaaaaacacactctgcttggcttcagaaggcttgtgtctgatttcttggctccatcccttcctggctgctgcaccagctttgagttccttggctacttaatcgtctgagaatcacttttcttccagtccaggggttctatctggtgttct

SEQ ID NO: 1659 - DNA, 600 bp, Bovine  MMBT20319
gcagacaaggttaagggtttagctaatctgtgttctgacaactagagtgggttttgttttccatattttgccaacacctgctcatttgattatgttttcccttataaataagtaagtttagaaaaattcctgactgcatttagttaataggggttttactgttatatatttatgaaagatggtttaaattcaccccagtacagattgtactcacatgtaacaggttttttatacttacatatctatcaagtaaaatcttactgggtaatagacagctatctcaatattgcagaaagtttscttcttttaattttacaagatctcttttccttcccttgctactcttaacctgctacatagtatgttgttcaattacaataaggcaaaatgagggcttccctcatagctcagtcggtaaagaatctcctgcaatgcaggagacctgggttctattcctgggtcaggaagatcccatggagaaggaaatggcaacccactccagtattcttgcctggagaatcccatggacagaggagcctggcaggctacagtccatggggtcgaaatagtcggacatgacttagccactaagtcaccaca

SEQ ID NO: 1660 - DNA, 600 bp, Bovine  MMBT19382
ataccacagyaaccaacaacgctaacaatactctgcttgggctttaaaattagtaagtgaaagtgaaagtcgctcagttgtgtccaactctttgtgaccccataaactgtatagtccataaaattctccaggccagaatactggagtgggtagccttcaccttctccaggagatcttctcaacctagagattgaacccaggtctcccacactgcagccagattctttaccagctgagccasaggggaagcttactagagactcttcaaactatccaactgtatacaccctaactaccaastcaaagtgtgtgcttctctctctagcttytcctggtattggttccttactaaccactagatcttggtaggagttcgtgaattatcagactgcaagagctgcagcgagcaaatgacattatgtgccacatgtggtaccttactatctggtaagatagctgtggagacagaaagattatcactctctcgaagtaaaagcaacctcccactgactaagtagtcttaagaaaagtagacaaattggcaatgagttaagtaagcacgtggacatagcagcacttcatcctggacactcgagccac

SEQ ID NO: 1661 - DNA, 500 bp, Bovine  MMBT20117
ataccacagyaaccaacaacgctaacaatactctgcttgggctttaaaattagtaagtgaaagtgaaagtcgctcagttgtgtccaactctttgtgaccccataaactgtatagtccataaaattctccaggccagaatactggagtgggtagccttcaccttctccaggagatcttctcaacctagagattgaacccaggtctcccacactgcagccagattctttaccagctgagccasaggggaagcttactagagactcttcaaactatccaactgtatacaccctaactaccaasagcaaattagcagagggttaaggactgaatcaaaaatgtgtaaaataagccataagtagatatttattaccacctcaagattgtgactctgctaaggcagtatgtgaggactcttgaaagtgatgaggaaatgagagaaatggaaaagtatttcagattttgttttaaagataataaaatgctttaaaaataaatttaaa

SEQ ID NO: 1662 - DNA, 600 bp, Bovine  MMBT21439
catgccacattgtgttcataactagagagttctgtacagagttctgaactgatccgtgttactgccaacaggaaagtgatttcagagtcagacaaagaagaccaggaagaagtcaaagccttggactaatttgattgacacctgggrgaggatggctcacttagaccttcacttttgaaacaaccagctcttacatcagaatcaccggaatcaattaaattagaccaagaaataaaagttaaatatacagcgcttctaggagtaccagctattgagtacttgtgtctgttttacttactsaaaaccactgcatttgataccacacagttatcatctgtctcattttatatattctcaagctccaacttaacttgctttcgtttgaagggtatttccagaactgctatatttgatctatattatgaatatcagataaacaagaaacaaggactttatatgcctcaacttgtagaccaccataaaaacaagggcttcccaggtggtgctagtgctagtgctgccaatgcagcagacgtgggttctacctctgggtcaggaagatctcctggaggaggaaatggcaacctgctccagtattct

SEQ ID NO: 1663 - DNA, 600 bp, Bovine  MMBT20977
gaggacacccccatttacgtatctcactctcaagtgctgagttgaagactccttgattgtgaaaactatgtctcattaatctctacatcccttaacgagcctagtgcacatttagacatttaataaggttatttctaactttgattgactcatgaaaatattatttgcttattcaacaaatacttattggatgtgccatgatgaatgaggctgccctcataatagtgatgacaatcataatgatttattgagtgcttattatctgccagacacgacactcagggttttctgtttattaastcatttaagcctcaaaacaagtctatatggatggtgctataattactttaatttaactttgggaaagkctaagtaatctgctcaaggtcacacagccaggaagaaaaggagccaggatttagaaccccggccatttggcctcagagctcatgacactttggctgattaaatatattctagcaagggaggtggcaataaagatggatgattaaatataattttaatatgtactgcaactgggaagtacaggatgccatgtgttatayggcgggtggagtaactccagtcttgaggggtgat

SEQ ID NO: 1664 - DNA, 550 bp, Bovine  MMBT23265
  misc_feature (1)..(2): n is a, c, g, or t
nnggtggctcagtggtaaagaatctgccttccaatgcaggagacacgggtttgatgcctgggtcaggaagatcccctggagaaggaaacggcaacccactccagtattcttgcctggaaaatccaatggacagaggagcctggcggcctatagtccatggggttaaaaagagtcggacacaactcttgtgtgtgtttgaacatacacacacacacacacacacagatctgcatagcggtttaggaaaagttgaacaaaacatatgttgcaagatatraaggaatattaaaaatgtaagctgsgcagtaatgtgaaggcagtaaaagtacttgtaatatcagttttactgggtatgaaaaagcatgatctaatacagacagaatggccattgaatgtaatatgtgtctgacagcatgctgagctacttgaaccagttcaacactggtggcagttacgtaagtggtggtctcaggacttaaggctaaaaatgtgtgtggtgtccttaattgatagaaataaccacacatcatgtactgtggtgttctaaaag

SEQ ID NO: 1665 - DNA, 598 bp, Bovine  MMBT21727
  misc_feature (1)..(81): n is a, c, g, or t
nnnnnnnnnnnnnnnnnnnnnnnnnnnnnnnnnnnnnnnnnnnnnnnnnnnnnnnnnnnnnnnnnnnnnnnnnnnnnnnnntacctgaattgtttactttaaaatagttaagtttagggacttccccggtgctccagtggttaagaatctgccttgcaatgcagggggtaactaagcctgagagccgtaacaaaagctcccaagtactgcagccaagactcaatgcagcaaaataaataaatagataaatagttaaaaacagttgtttatgttacgtggatttcccctgaaataataaasagcagctggcagagggcaacgcgtagctcagagggttgaatcctgaggatggacctccggcacagtggaggtgatgctccgggccctgtacctgtattgtagccgtcctggagctccatgatgaagccgtgggcgttggccttctgggcagcctccacyactgtctcgaagggcacggtgggcaggccataggagatgttgtctgtgatggagcgggcaaacagcactggctcctggctcaccagggagatctgtggaggaggaaggagggggcatgggaggccgggaacgcatcagt

SEQ ID NO: 1666 - DNA, 600 bp, Bovine  MMBT15735
gttatctttatcagaaagatacaataacatttctgtaagaacagagttcctttaccacccttagggcccaagaagaggcaaatagatagctctgatgccctgcaggggtttcaaagcctccaccagcaagcagacaagcccagacactgtggttgggcgtcacttccctgagcctttggtaattcagctttgggagaatggtgggaagaacctgcctcagatttgcctctgagccactgagctgccccagatgggataccaactaacagatggtaaattctccttgattcttttacttcsagaagaatcttaggttagaaatgrgatgcctcccattttccagatgatgcacccaaatctcgggctaattatattacccacattgaactacctcacctccccagaaggtccacgtccttttgggttctcttgaacagagagagaaccttagacaaggacttggaggcaggtggctgacctggggagctggtctcacagcccaggaagccgagcgagaccaggaaggaggaaaagctgctcacagggggctttatctatgactgagtattgagtcaccccaagctgtggcttatagccata

SEQ ID NO: 1667 - DNA, 600 bp, Bovine  MMBT22938
aaaatcttgaaacttttacttcacatgtgatacacagttaatgytaactataaaagtttaaaatttttctaaaataggttatacattctttcatacttacasgtgacataaaacgaaatttaaatttgygttactgaaatcatttggaacagcaattgttaacttagggtataaaaccatagttactaaggtcctgatagccttctatgatcccattaaaaggtcccaaatgctagagttgtagggtcctgtactttagactttttcttctccttggcttccaggttcttctattgtgtstcttttaagtagtccaaatgttttttttttttaatttttcctttctaatctgtaggctgggaaaacaagtaactctgagaattggcctataataaattagagactttacatggtctgagccttgggtatttctatgattaaagtgacagcaaaggtattagtcactcagttgtgtccaactctctgtgaccccatggactatagcccgccaagctcctctgtccatggacttctccaygmaagattactggagtgtcttgccattcccttctccaggggatcttcctgacccagggatca

SEQ ID NO: 1668 - DNA, 600 bp, Bovine  MMBT20989
ttgaggacaaggggtcagtgtcgggtagagaacactatgggaagagatatgagtgagtctgagagcaagagccagtcccagccggtcaaggggactcgtgagcgcggagcatctgggagctaagaacagcaagtgaggaccagcgtgaagcgaggtgctggaraaggaagggcagagatctgctcattacctgccttggtggaataggagctgagacccagccaaggagagtgaattatcgattcctgtctgcaaatcagtaactgtaaccaaaggaatacgttaggcatattggtaagsagaggatccagaagtcataccaagcrcaatgagggcaagtaatgtttgctccataattatctgctgatcggccaagaggatgaatatgttcttttagctaagcttttctagaagtgtattcatggtgccagcctccatctcctgagcctggtgcttcacatcccctaacaagccccgatgcaggaratgttaaaggtggaggygagattcagggaggtgaagctccacagaccagctccctcccgggttagtggggccatgagacccatctcacaaaagtgtcgaaagggtcgagaagat

SEQ ID NO: 1669 - DNA, 598 bp, Bovine  MMBT20057
  misc_feature (1)..(2): n is a, c, g, or t
nnctgagtttacctgaagatggcatccatcccaaggctgtatgtgatttgtatgagaattctctgcaaattcacaagcactgtcataaactcctttctactgactgggaaatttgtgccatgtgtggtaaatgattcttctttaagtgacaacacattaatatgttcttcagatggttgcagatacacctcctcttgggctgagctgattctcaagtcttttccctaaaggggaaaagagagtataaaggataaaactgtgaaaaaagggattctcctctttgtaggttatcatcagtasgttttttatttcaggttagctttccctgtcaggatatttctagtatgtataaaaggcagagagaaaacaatttaaatattagccttaactcgatgtaccactaagtataagtttcttggttatgcatgactcttattcctctatttactaaaataattagtacttggtaagtctagatatatatgattacaaatacgtcaattttatagaagtgtgcaaaactgaatatttcagatatactattttatggtgaatgtggattgtataggaaaatggggaagaaaagttaaaacagtgt

SEQ ID NO: 1670 - DNA, 600 bp, Bovine  MMBT19761
ttagtgagtccctttggtaagcctgtacactctattacgctgaggtttagtgtataagaaaaacgtggtgtgttggagtttgcctgcttgtgttactytttctcctttacatgctgtggtagcttactcagccatagaaaataaattcaaagctgtttaataataaggctaytgttgtgtagtagaaactaggcattatggcagtaagtaaataccttatacatcaagaatatttcaagtttctggtgaaatccaaagtatcacaagggcttcattatgcccttgctttcagcccacaasccctctgatcttaatgactcccaaacagagtcatccaagattttgtcccatgtagggtcactgastaagtttgtgatgggtctctgtgtgttctctatgaggaggggagagagggtgatgactcacactgagtatgamcaactggaaccccaattttatgcacttttgtattttttggaaaacatttcttaagcatactccagcagtctgatttatcaaacagctttgcctcttattgctgagtcatcctactacgaatgggaaaggcacccaggaaactacaaagtgacttacatggga

SEQ ID NO: 1671 - DNA, 600 bp, Bovine  MMBT18550
gaatcaggagacttggctttgccaaccactggatgactttggccacatcacttagactctgggcctcgtttcctgatcttaaatgtccagaggctttctttggtttttagtgacagttgctgcttggggaatataggtrgcattcaacacggcaggcttctttgttatgagactagaaaatttgtttcatctctctgtgacttagtttcctcatctgaacataggaagggtgattgcatcataaaaaatgttcttaaaaattaattgggatgctgattagagagtcctagacatgatttstgaaatgtaatgagcactcaacaaatgtcagatgcctttctacccttaagtcatattactgcttaatatctgtgctgtagtatagggctactcctgtttagtctgagcatagaatctgaaatcacgttagcagtcattacgatcaagtgtgatgtgtatattcccactctacactctagcatgttaatttctcacagatgcttctgtacatattgatccatttgccaaagaacacacctcctttactcatcctacaaggttaagcacaaatgattctccctcatgaaactatgagccytc

SEQ ID NO: 1672 - DNA, 601 bp, Bovine  MMBT20435
  misc_feature (1)..(1): n is a, c, g, or t
ncccaagaactgctgaggatacatttcatagtttctcctttactaacattatagttttctttgctaatgagtgaatagcttaaaagcatgaattcataattacattgttgtttatttcaatctatagcatacacagactataatttgctggaaaaactcttcactgttgcccttgtttattccatgttaaagttaaccatccatgtctataaattaagtttactayraaaactcacatttaaaaaaaaaattatacaagaaacagctggattatcacaatcagcaaggaaatggactcaasagttggaactagtatgtctgggacactttgtcttcatggtaaacagtcactttatgcaaatcccacttggcttcacttaattaaaaagctgaaaaagaaagaaaattctttgctgaaaaaaaaaacacagtgtgctttttattctatattaacttagtacaggtaaatataaaataaaaatgtaacgtcatacacagttcattaattcacttcattgtaattttatatcagggcaatttctatgaactagatcctgtaatgggatcaggtgagactaggtcaggggtgaaagcagatgct

SEQ ID NO: 1673 - DNA, 600 bp, Bovine  MMBT20973
ccatcaggcttttccaggcaagaatactggagcaggttgccatttcctactccagggtaacttcctgacccagggatcaaaccctggtctcttatatctcctgcattggcaggcgggttctttaccactagcgccacccaggaagccctagaccatttwaagcttttgtatttagatttctaaaggcatttccgaaagctcatccctttacagagcttctccactttcttatgcacaataagacccaattgtctacaaagagcttctgatctgtttctctgcatttcttaatgaagttsstaagacctggaaaggttttgtttgagaagagaactttgccaagtggggtctgcattagtttttagatttaggccagcggtctgaatgggacasggacacttggggaagggtagaactgctttgggtcagcaaagcacaactgagtaactgctgagaaattcaggacagcctgtataaaaatgagtcctgtgatgggttgaaaagtagttcccccaaatatctacgccttagtccctggaacctgtgaatgttaccttctatggcaaaaaaaatagtctttgcagttgtggttaatttagg

SEQ ID NO: 1674 - DNA, 600 bp, Bovine  MMBT18549
ggagaccmayggtgaagtttagaaagtctttgggaacttaaataggtttttcactcagagagaagttgaaacaacacacccaaacctaagagggaggaggctttctgacagaggatgaatccgtgggccctgggaacctgtgccttctgtattttgtcagcagtcagaaatgctcaaagtttaaaatgtaattactagaaatatgaaatgaaggctcatgagccacttgtgaaattgccctagaatagccaaggtgattacaattgaaaagaaatagaaaattttactcgcacaggatasgccaaatttggccttacatattctatgtgctcagtagattcttactgaatgaatttctcatatgagaaatayacagaaaaaaatagatttctatataacttttattaaaaggcataaaataaaacctgaataaatggagaatataataccttattcatggataggtaaactcaatgtcataaagataccacttctcctcaagttcatctatagattcaaagctattccaatcaaagccctaataggttttttttcagggaaaatcaacaagctgcacttaaaattcacatggaagagtca

SEQ ID NO: 1675 - DNA, 600 bp, Bovine  MMBT20000
acacctaagtgtcagtctgaagatgaagacttgatttaagactttgttctttgacttaagatttctgatctwaaggagacaccacaggggacacagccttgacccctggtcagggaactaagatcccacatgccatgttgtacagccaaaagacagaaaataaaagacttctgatctgatcttgcaagcagttcttaaaagcttccacagtttcaatatttaaaaggcgctaaggttggaggtggagtttaaatgctaatgagtgtcaaactggtgtcaatcaaaaataggagaaatttsgttatttcttctattgtcctcagtgctcactttgtcctccagcaaaaagcagtatcctttggagcttgaatcaaagaagaggaaggtagagaggagatggaggtattctgtgaggttatatagtcagtgggaaagtcccagtggtggratggctgaaaggatttgcagaagaagaataccagttctttaatatttaaattggtctattttgctaagacaagaaccactccatttgtccaaattctttgtacaacctgctgtgcacacaaagatcttataaacaggatgtgtgtgatatgg

SEQ ID NO: 1676 - DNA, 600 bp, Bovine  MMBT18880
atttttgccaagaagtcttgccatgtgacatttaaagtgaaagtcactcagttggatacaactctttgtgaccccatggactacacagtccatagaattttccaggccagaatactggagtaggtagatggtcccttccccaggggatcctcccaagccagggatagaatccaggtttcccacaatgcagacggattctttaccagctgagccaccagggaagccctgtgacatttaaagattatcataaagatatagtgggaggaggtagggaagggaagtggaggttgaataaaagasrtaaattctcaaccaccataagaggatgtcaaaagacaatatcttaaattgataaatcaagaaatagctgagtgagcaaattactaaagtacaaagagawaagtaatagataaaatagttagacattgaaagtggcagcctcttaagagcagtatggataagagatggagcagagatccatacrtaccaccaggtatgtcttaaaagaattcatttatttttagaaccatatgatcttccaatctttcttctttcagaccttgaccagttggccaaccctttgtcactgctcaggactct

SEQ ID NO: 1677 - DNA, 600 bp, Bovine  MMBT23206
agctcctgggaggttaggagaatatcttaaaatctctttgtactctcattatttcacatggggcttaggagtttggtgacattttaggaagcaggattttcagaaggctaaacaagaatggattgaaaaggagagactaggatgagggaggaaaatttggggaaattgccttatttttcaggcatgtgaagtaatatgggtctggattagacaggtagatatggaaaggaaaaggaagyratggattcaaaagaagaattatggagagttggtgatagaygaaatacggaggaagagggsgaattaaaggcaaatctgaagttttgagaatagagatctagaaatgaagaagtagtggagagaatcactgttggtggaaggaagatgagtttggttttgaaatgtaggactagaaattagggccacagatgttgatttgggagttatggcatactaaaactgtagcatattagggctagaagggacttcattatcatctagttcaatctccagaggctccaagagattttaacttgtacagcttctcctgggtagatacagtaccaaacctaggaccctgttttcctaatccagtggaaa

SEQ ID NO: 1678 - DNA, 600 bp, Bovine  MMBT19888
ctttgtgttcttgagcggtatcaaagccatgtccacyttggatgttcaggaggtgccttgggggccatttgtgagggggagcgtggctaggcagggtaagagcgcattgcttcagcttcagacagagtggctccaacttggtctttttcacacatcagagttccttggggagtttttgtatttgaaagaaaaaagatcctgctgcttaaaaaagtttgacttggctcatttaactaaacaaagtgatataatctattactaatgccaagccttgttctttggcaattggtagttatgggstttgggttttctatttatgttcttaagattataaaatacctcagtagtttaactgggccaataaacctctcctgagaggtgagcatacttcaagcccacagagaaggttggaggagactggcactggaagaagcagggaatctgagttcctgtgtatcaggtcacttcacctctctggaccccagttttcttttatgtgaaatggaccaaggaggagaattaggcaggctgatctctaaggtccctgccagctctgacagctgtggcttctaaggtggtatctagcaagtacatggcaca

SEQ ID NO: 1679 - DNA, 598 bp, Bovine  MMBT22818
  misc_feature (1)..(55): n is a, c, g, or t
nnnnnnnnnnnnnnnnnnnnnnnnnnnnnnnnnnnnnnnnnnnnnnnnnnnnnnncaatttcaattattctcaagtgcagctatgctgtttcttttattctgctgtttgtgaaacagcaatctcagtaattgaatattaattttcaccaagaaagcattccaaactcttcttcaaagagggagttaagcttattaattcattccttaacaagaggagaaagtgcatgacttgctgtataaggaataagaactcctaggggccaagaagatttaatcaaggattgaaggggaaggaaaagsgaataaaccagaaggcagaagaatgtgaggtcacctgactttttagaaagagaaaaaaaaaaaaaatttccagagctcagccaaagtgaagtaacaatgcaaagccatcagaagtacaaattcctcctgagatataagctaacgcattgactttcctttattatgccactttaatttctgggaaaaytccaaagcaaaggtttatatttcatgatattgtcaactttgcataagactacttgtgctactcatgacttacacagccatagggacacaattgatttttttctccctcata

SEQ ID NO: 1680 - DNA, 600 bp, Bovine  MMBT17816
aagtatgaatctttgtatctacttattaaagcagattctataaagccctcctttcagaccttttagtgcagttctagtaaaatagatctacccgaaagcaatgaaaaggaaaatgcttgaatcttagtgatagttttgcaaagagaattcattaacctgaagtactcatgcatgtcatttatttaaaagccatttggttttaactttaagctcacccagtcagcacgtgctttcgtcagacatttagggcctaacagggatggatttatttagtatcacagaaaatttcccagggaacastcttctcatcttagggcacaaagtcagactccgagactcagaaccagaccgttggcaagtaaattacttttcatgtcatgttcctcttacctgcccagtggagatgcacaaactcattatctgcttgtcaatgagagaaaaatatatcctgtcttttttgtgtcagtggttatcaggaagcagtgataactgtggcctgcagtttttatagggaaggccctgtggaagatgggagacatgagcgaggcctgggagagtacataggatgttagtcattctgagaccattttttgaggactt

SEQ ID NO: 1681 - DNA, 600 bp, Bovine  MMBT22343
gtccctggggtcgcagagtcagacgtgactgagcaatactgagcacacattttccaaactcagaagcagacacctttcctcatgactggcacttgctaaagaggatgtagtatttaractaggtaccaactactttgcccagcagaattcagtctgccaaacttaaaattctaccctagacagcagtcatttgcatttagggatacagtcataaaaacagctgtaatattaaggtacatagtgccagggaactcaatatttgagagaagaggtaacagcttatctttttatgtagtcccsagagccaaggtaggataataaaacccactgaggaaaattcagagttaaggtgataccgagagctcaagtcagtagcggtcaagaccggaacaaaatgactactctggcagtttgtatgtctgccaaaccatggaggagacaagagctgaggtcatttctaaaaagccgcctatgatggtacacaaaaagcacaaaactttccttagcctgcaccaaaggttgtgtacagtttagataattatagatcctgaggtccagaaggaagtgccctagttaagttgtagccagaaaaataactat

SEQ ID NO: 1682 - DNA, 600 bp, Bovine  MMBT23030
gagtctctttgtgacagttgcatggggtttytgtgttcagtgttaaggaacaatgcgtactggttgcttgagtttggtagtatcacggtcaggacagagtgaggtgtcacagaggtgcctgagggagattggacgcagcaagggcttcacaggatggaaaccctcaaggggtctctstgtttcgaaagtcatttctaaactttgattatatttttttctacgtcagagatgataatctccaaagaactgattcaaggtaacccacttkgtgggaggctgaagcttaaatcagaaaacccsttctttaatacagagtgagaagtggaatctctgcttagtgtgacatgaaaaatccagtctctgtgagtttgctattagagtaagagggattcgttaggtgagactaatgggtagttgctccatggcatacgggatcttcctggaccaggaattgaacccrtgtcycctgcatttcaggcagattctttaccactgagccaccgaggaagccctgtgcttgctcttytgtttgtttttcttggtgctgagagtcacagggatagatctgcctggttgaatctgttgtgaaagctttagcct

SEQ ID NO: 1683 - DNA, 600 bp, Bovine  MMBT22910
ctgcgagtgtggctccgggggctgatggagcatgggagcaagggtccctgatgcaaaggyggagaggaggaggacctggagaaragaaaacagaggaaaagcgatagaaattccatctctcccccaaagccgttcccaagcgccgtgcctttgagagaactcatgcttttgagagtctccaacaggtcagaaagacagatggcaggttatcgtagcaggagggtggggaggttatgaatgtaactatccacagagagaaaagcacagattccgtgcatgtaactcagaagaagatggaasaaagyacccactgtaggaatctgwggggggggggggtattttcaagatatttttagactgagatccccccaaattgccttyatttattctatttttagaacctatttctgtgctgataaaagcaatcttctaataacataaaatttaacaaatatagaaattatataaaactccataatcttttcatccaggagcaacccatgtaaatatcttgtcatgtaccttctagcattccccacaccttccctatgtgtacatggatgtgcacatacatataataactctgagtattataaaagt

SEQ ID NO: 1684 - DNA, 598 bp, Bovine  MMBT21580
  misc_feature (1)..(217): n is a, c, g, or t
nnnnnnnnnnnnnnnnnnnnnnnnnnnnnnnnnnnnnnnnnnnnnnnnnnnnnnnnnnnnnnnnnnnnnnnnnnnnnnnnnnnnnnnnnnnnnnnnnnnnnnnnnnnnnnnnnnnnnnnnnnnnnnnnnnnnnnnnnnnnnnnnnnnnnnnnnnnnnnnnnnnnnnnnnnnnnnnnnnnnnnnnnnnnnnnnnnnnnnnnnnnnnnnnnnnnnnnnnttggcctaatattaagaatcctaatatgtacaaatcaaaaactgttctattaaaatattttaccaaaattatactcatatcgsttacagggaacaagtagtacgtggaatgattctgaacagacacacaaagtttgccctttaaaatttgaccaaattctgtatactgcccaatttacaagaaaatacacttctatccagtgaagcagggaaaggaaatatcctcaggattaaggctgcttccttcttagccagctctaaattctgaaaagcacagagcataaggtttttatgtttatttgatttatagccaaaataaagagataagacataatgattcttttttctcatttcagaaagtaaatgcacataagccaatttg

SEQ ID NO: 1685 - DNA, 600 bp, Bovine  MMBT18283
tttgacttatctctctttctatcccccaacgtggacctcttgttttrgaaagaccgatctaagcacatccttttgtgataattttcccagactttcatcttggtctgatgctgtatctgagctctgatgttgcagtgcacctgtgcccaagatttattttcatttccttaatctaacttaatttttcagtttgacacctgccttctatctttcttctggracacacttagagcttggagaaaggagtattgatactatttttagaatgggaaccaaattcccttctttttgacctttatstgttcatttatctgcragaagcttattaacttccattgtgtgctaggaactgtgccaagcacagtcctccaggggtttgtattctaataccctgaacaacattacaatcatttcttttgcttaaaaatttctaattattgacatatcatctagcgatcatcaactttctgtctgtctatccatctgtctattaagacactacatgtagtaaaagggaggtttcaaactagaaatatattttaaaccaaaaacataaatgacaagatgatttaggcagaggttggcaaactaggtcccatg

SEQ ID NO: 1686 - DNA, 600 bp, Bovine  MMBT20114
ggatcccttttggtgggtttctgacaggatggcttcaccgactcgatggacatgaatttgggtagactccgggagttagtgatggacagggaggcctggcgtgctgtggttcatggggttgcaaagattcggacacgagtgatcgactgaactgaactgaactgataggatctggcagcagagggcaatggaggcaggaagcaggcagtgttcccctgttcccttcacgcttcattgtctggctcagcaagtggcaacgtgtccccgtgacacaccttctgccagcgcgagcacctcctstctgagtccagctctcaccgggcccyccacttcctaccaggccagcgtctatcacagcttcccgctgttttcatttctggtgctccgaactctcttaccctgcccactccactgtccagtcccttcgttaaggaatcttctgttgaaccacctgagaagttttctatctcctctgggaccctggttgatatatgcaattataatacatttcaatattttcccatgcaacctacttccctatcagtcatgctcttagtttaataaaatattttccatcattaaaaaagaaattctggagaa

SEQ ID NO: 1687 - DNA, 598 bp, Bovine  MMBT21807
  misc_feature (1)..(139): n is a, c, g, or t
nnnnnnnnnnnnnnnnnnnnnnnnnnnnnnnnnnnnnnnnnnnnnnnnnnnnnnnnnnnnnnnnnnnnnnnnnnnnnnnnnnnnnnnnnnnnnnnnnnnnnnnnnnnnnnnnnnnnnnnnnnnnnnnnnnnnnnnnnnngaggctgcgggctgcgcggtggcgcaggagggcggcagaggacactccctctctgggcatgcaaatcgcggggggaacttcagccaatagtccccggcttgtcaatcaagggcagcagttcctggaggccagaaaggcgtgggggcgctggggcacggtcstgatttcctgctccgcacgtgggcacgtccagacccggcctgaggagccggagctgggacttgcctcggaagaccgcggctaggctctacctggtccggctccaggagcatggccccggcctctctcctcacagcaccagtcaggacccaagtccacaggttgaaaatgtgagagrgaaaattagattaaataaataactctgcatttatatccgaatagagcatagcgagtaaataagtatgcattcatatccgaatggagaataagtatgcatttatatccgaatagcaagtccgc

SEQ ID NO: 1688 - DNA, 600 bp, Bovine  MMBT19183
ccccagcttctgtttctggaggaacagtcttgcccagcgctcrgtcatataataaaacccctttctcagtgccgatgcaacgcatcctccacaaatcctcactttcctcctcctccatgtcaaggatgggacatgcaccagtgtggttggccagaggacatgggtttaatgcaaaaacgggactcatggagggagggaaagaaaagaacgggcgcattcctgctcccagtgcagtttggcagggagtgtgtgctcacggagcaggctcaggaagcaggtatacagagaaacagagggcgstgtcagtctctggtgctgtgggggacacggagtggtggcctggcctggtcttcagtggctgcccccacgagccaggggcttccycttcccgggcaccaggcactgccatcctgcttgcctcttttctgtgaaatgtgggcagatgcaaggccctcgccatgcgccctcccttccgaggctgccccggcttcctccccttctctttcttccatccatatatttctgcatctactacgaaggtcagaaaaacaaatcaatgagaagaaggacccaataatcttgagacctggctcggggatg

SEQ ID NO: 1689 - DNA, 512 bp, Bovine  MMBT20254
tcctcgccagcggcactgcccctcccggggggtaccccagtggaggtgaggaggctgaaggtttagggaggcagctggaaggtggacacgggcagatctgggtgcagggagctggccggaagtgggtgctagggctctgggaaggggctgggggcagcccttggtgggggtggggtgggagtgggcaaggcttcaccattcagggctctgcctcccccagagggctactacctgcacatggactccagcgccttccacccgggcggggtggcccgcctgcgaagcccccctatatgggascagggccccctctgygtgcgcttcgcctacttcatgtttgggctgtcgtggggtgcccaactcaagctgtggctggcctcaggcgccaagggcaagcaccccaacctgctgtggaaacacgtgaacacgcaaagcccctcctggatccccaccgctgtcacggtgcctctggggctcgtcctgcccagccgggtgaggctgcaggcagagta

SEQ ID NO: 1690 - DNA, 600 bp, Bovine  MMBT20290
tgcacgtgttacccacactgccaccacccccaccacacaaagcttcatcatgaaaattaattcttttggaataacagcccttttctgattccccttgtgacctggggaaactcaggatgccataggagctgggcttgggcttctgccttgtgagaaggaagccactggactggrgtcactgtccctccttccctgtccctagcctgggatttcttttctctcctctctctgatagctcggaagcaagcagaacaatgacgtcttcagagaaaaggccatttcctgctggcagtgtgcacrcttcactccaagtcccagagcttctgtaaagaggcaccctcctccctgagcycagatctcctttagtgctataggctcagtaggacaaagacaacacctggatctgtccccgggtcmgctctgacaagattagcctaatctctgctatctgagagaagaggatgtctagggaggaagaatgttctcatttccaggcagaggaagaggttcatggtccccagccttgccaagggtctctgaaatagggtggggtggggcaggatggacagaggtgactttttggcttccctcatccatctc

SEQ ID NO: 1691 - DNA, 600 bp, Bovine  MMBT22993
agaaactaagggtggctttcagagacctgcttcaaacgaggaggctccctaaagctgacggctgttctttagaagaaaaggaaggccrtacaccaacagcawgcctttgttcacccacgtgactttgcctactgcctgcaggtttcatcatccctttggtcccaggatgaatgacaaaggctgaggcataggattctcccaccccagcggccytgggacttcaaagctgggaaacgagygagcccagtgggattaaaaccagaatggaccgctgcacagggcctggtaaccaggaccacrtgaggcccttgtctccagctctgcaactgactgttcttggcctcgacgggtgctctccgtgctcccctgacacctggcttccctcctcatccacagccatctcacctacctacctgcctacctgccaaaggtgtgggcagatgccttagttaacatgtatggcttattccctcagaaccttcggccagcctcggggactcgggaactgttttggttgctttataacagagaattaaaagaaaaaaaaaaagaagtccaaacctggcagaaatgtggcataataatttaatatgcctgcct

SEQ ID NO: 1692 - DNA, 600 bp, Bovine  MMBT20743
gaaccagggggccaggaccacacaggtgctgccaggggcaagtgaggacactatgtggagggacaagtctgtaaggagaatctcctaaactccttcttcctgtgatgggcaccctcatccgcctcaaggggtggggtcagggatcttatcaggaacagcagcacttgatttctaccrtagtttctcatagacatgtaagtccagactcatagttagcatgggggctctgagatagaattggtgtttatggctcttacttactgagccctttctggggctctgtggcaggtacattacctrtatagctcttttaattctcacaaccttgaagttgtgagactaccagtgttacaaaggaggaaactgaggcttaagttagttaatcctagaccacaaagtaaaggatgaaagacaataagaaataacagggagtaggaaataaaattctaaccacaagactttctagaaatttctatttaaagattctgaaaattaagcaatttattcaacttgtgtctgattgattgctttgcatttagaaatatgttctttccttttactactgacttcttggactctaataaccatgattcattctga

SEQ ID NO: 1693 - DNA, 600 bp, Bovine  MMBT22449
catcacgatggtggagaagaccaaggatctaagaatcaacagccctcggcccccttcagctctgtcactgacttcctgtgtgactctggaccagttccttcaactctcaggacctcaatttccrtatctatagaatggggatattaaaagatagtcttcaagctcctttccatctcggggaaagctgtgaccctataattcaactctgcctactctgggtacccagaagcctcgcctggagataaacacacaaagaagtaaataagcactaggatgcctcyagctggaggcaggctagcraatgtaatttctctggccccagcttgtcctagtggtcccagtcatccctgtcctaaagaagggtaagagtaaycaggtgtggcagagaggtactgtccgatgcactgtcctctgagagctgacatccagccttttttccaggctctcgtgtcctagctctaggctcaggcagggtggggaggtgcacagctggcttgcttccctccagccagtccatggatagtggaccctatttcctgccctgtgtagcccccataccatctgatcttgccatccagagaagacagtgtcagatagccc

SEQ ID NO: 1694 - DNA, 600 bp, Bovine  MMBT22446
aattcctgagcctgggatataaaatgtggaaacttcttaaaatcatcgttggtcctgaaatccagttgccatcaattaggagcctgaagctcagagattcaccagagaagctgggggagggagtgagtcgtgtctggtaaacgtgtcccaagctggttggcctggccaggaagggtcccgtaacagaaagttactgaaagttcgtttcgaaaggaacgttctctgctcaccggtctccttcaaagctctgctagtcccagctgctttcccatcacttgccatcactggaagtggagctgrttgctcaaggaaatggtcaggaaagaggggctccctggaccccactctgaaactttctgttggttcactgcacaaagctgatttaggagttggttgtgatgttaacttgccctaaccactcccgctccagggggccagggagcgttaaagacccctgctggcaaggacagctgccactcctgtttgccctctaatctgtcatggctaccatggtcatctttaatttatgggaatgaaggatttcatggtgatttcctgatggrgttcaagggaaggtcgcgtgtgatcagcccggcagca

SEQ ID NO: 1695 - DNA, 421 bp, Bovine  MMBT18800
ccccaggtgactgagactgcagagagtctggaaaccatcaccctggaattctgctccttgagttgaggtcctcaggccagcagcacagcaccacctggggctcgtagaaatgcacgcctactgaaccaacatccacactgttacaagatccccgggagattcgtgtgcacattaaagtttgagaagctgagaggcaggaggagatgaatccaggcagtgggaacttgatcagtgctgatttatgaatgaatgcaggagagaagagtgcatctggggaacaggtagagggctggcctgccrcagcgggaggcaccccttatccttccagataaaagagacaggaggatagtgcaggtacagggtggtcgggctcaggaagctggtgctgtctatttcatccataaaacagaggtgtcacatg

SEQ ID NO: 1696 - DNA, 600 bp, Bovine  MMBT21418
tggatctgactaaagtgacttakcacacacacaggtaagttatatgtgaatttttgagtgcatggaggaccagcactcctaacccccaaacccccacatgttgttcaagtctcacctgtacttactgagcccctactagctgtcaggcatgtgggatacatgagagaacacaacagatagtatccctgccatcatgctaatatgctagcatatgggaacagaaactagtagccacactaaataagcaaaatatataatgtgtagaaattataacacagcctatggaaaaagaaagggcarcacaaggtaagggagatcaagagcatgagaggagagggtcatggtaaacctctctgagaaggaggcatggtcaaagatataaggagatggcgcatatctgaagaagagcatttcagacacagcaaacagtaaaaactttgagtgaaaacaggtctaggaatgactgaggaagagcaaagagaccagcatggcaggagcccagtgagcaggagaaaagtcagagagttaatggagcaccagataatgaagggcctctggccattgtaagggttttcattttttacactgaataaatcagaa

SEQ ID NO: 1697 - DNA, 530 bp, Bovine  MMBT22969
taaaattgaatattctttttttaagtgctattcttctatcttacatgcaagtgttayagaaaagtaaagtagtaacagagacagtacaatgataactgaaaatttaatctttatgcagaacaagtagcgttctatatagaaaaaataaatattttcctattctttgtaagattttcaaacatccctgaaattaagaaattagatgcaaattaggaaattaaatttagttgaatgagatatctcactcaactaaaatcattgtactaacagggcctcatttcttcccagaggatctagggraaagcctatttacttgtcttcttttcgtttgtttgttttctagttcagttcagttcagttcagttgctcaatcgtgtctgactccttgtgaccccatgaatcccagcacgctaggcctccctgtccatgaccaactcccggagttcactcagactcacgtccatcgagtcagtgatgccatccagccatctcatcctctgtcatccccttcttctcctgcccccaatccc

SEQ ID NO: 1698 - DNA, 600 bp, Bovine  MMBT21482
agagttgtctctgatttgaatatatgttggggtgaaatctggaagtactggtttagtgttatttctgtgccaggctgccttaataaagttacgagtatagaatagttcccatcttcttctcagcctacctacctcagcctcttctcatggtctaactccagtgcactctagatacattttgctgattctagagctattggcaaattaacagtgtctttttaaagatcctttcaagtttgaagtactgtatgtggtatggctttgttttgtagagtgtgcagacccaccaggccagctgtrtgagttagagttctttcattgtgatgcttctgactacagagtctgtctgtcctcagttgaaatcagactagctggttttgggcgttgttctgttttgcagtttgtggcaggcgacacatggctgaacaagataagaagggttttattcttgtgttagggacgtgctggggctgggatggaattcagctatgtttgggctctgaatggtcactttggagactcagaattctgttatatcctgttattattttgcagttaaattaacacattcatttactccccatttccccttttcattct

SEQ ID NO: 1699 - DNA, 600 bp, Bovine  MMBT20917
ttctgacttacttccctctataacaggttctaggttcatccacctcatttcaatgaactcaaattcactcctttttatggctgaggcgtatgctccactgtatatatgtaccacaccttctttagccgttcatctgttactgaacatctaggcttccctctctgatttctaagtgaaactaactgaatgcatgccgagggaaaaatgaagagatgaagacagaatcatgtacccagaatggtgagtactggagacatgaagagaaagaagcaaaggatgactgccttcatcaccccggcrtcctcctcttcctctacattctggtctaacttctcactccagccttggccaaccacagggaccaaggggatcaactccatgggttccaggtcctgtcagctgctggcctcatggaaactcttacctccaggacagtttcttccatggctaacaccctacagtagctgaactgccattgtccaaagctatctgctctgtgtatgaagatccagtctcctccaagctttcaactctcctggactctaggaaacatccttgtgtatgttgctttccaccttatatctgctcaccaatcttata

SEQ ID NO: 1700 - DNA, 600 bp, Bovine  MMBT22323
tcatattaaaaaataaattgaatagttttctctccttctaagcagggagagttcttactcttcatccttttgaacctttaagatttttaatatgttgcctattcaaaaaagcaaattaagaagttaaatagaaaggaaagaaggaagggagggaaggagagaggaaggaaagaaatgccagttagaaaagccattgctggagatggagcagagagaccagagtttagattmtgcgattccataaggaagggctggattgcgcgtgaggtgagggacagcggagccaggtgagtggccagrgcttcctcaaggcctctaaggttgtgtctgaggtagtccagggctagaagccctgctcttcctgttctcctctgaaatgcagactcagtctgtactggttcagtgttctctctggttctaatgtgtatttctgaaacatgacattaaactgtaataagtaaatttaaacctcctgagcacattccgtgagcattcattagtttgtagtttatatactgacaacatatatttattggatttgtctttcttcccttcacctcattctgaatgggttcagatttttaacattccctcctcttc

SEQ ID NO: 1701 - DNA, 600 bp, Bovine  MMBT22256
tctcaggatctgcatggccctgcctgtctcatccctttcccctctgccagatgagcgccaccagggtggccattctgaacacaccctgcgtgttccgagtctttgcgtattctgttccctctgcctggaaccggcaactcttcccctacctggagtaaaccctcygatttcaccattgcttcctgctgatcactgggtgtctgctcccctgtcctgtcctcagagaggccttccccraccgccttgggggtgggtgagtctccagcagctgtgctttaccttcctggcaccgaccaggartctggtttgtatactatggattgcctgagcctcctgcttggctgtgggcaccactagggcaggggtcctgccttttttctctgctgttcaatacccattgcccagatccagggtcatagcagacattcaatacaaactcgttcaaggatcgagtgaattagagaaaaaataagctttgggaacgcagagaacacagaggactgtgtacaagaggctgacgttcactgaagcaactattgtgtgcctcgcatttactctcacccacggatggctatcaaattcatctcgcagcccagagaa

SEQ ID NO: 1702 - DNA, 600 bp, Bovine  MMBT11934
acaagtgcatagccaggtgcactgaagttgcttgggaaatctgtagcactgttttgatatagtccttcactttggcacaccaccttgtgatctgggagaaactccccgttcccagcttctcctcatggagggaaagaatatattggaccttaagcctgtctgagggactgacttctttctcacctgtcttagagcactgatgggacctgccatagtgtagatacytgggggtcactgaagaacctaaagaagctggatggcatcctgctgttccagaggagccatgtcacagcagatggraggtgatatagctyggtttcttctccctcagagacaagaatgcagtgtgtgtccagggttctggctttttagtagctgcctgagggacgagtatgtatttagcctagtttgggacactgataatattgggcatactctaggtacatccctgggtgctgctgagaacaaaaaagagctaggtggcatgctgctatttctaaggacctcagtacagaagacagacagcagagggagcaagaatttatcagctcctgmaaaaaratcctttatattagaaatctacacacatgcattgggaga

SEQ ID NO: 1703 - DNA, 600 bp, Bovine  MMBT22050
catgagatcatgcctcataaacctcaaagtataggaagtatcactgactaggctactagtcaatgctactttgctctgaaatctattttttctcttctccaaccaatgactgagtgcagcagaggtactaatacaaacccattgctggaagacacgggattcccttgatggcctgtgttggctcaggattcsctgagcscttgctgaccatttcttagcctgcacatcatgccagaaagcttccactcaaccttccttttgtctctctttcactctaggtcacacttgcttcatggccarcagctctttcagccttactcagattcctctccaatttctctcataggcatttccctaataaaatccctcttgtgtttagtcctcctttggtatctgcttcttggaggacctagaccaatacaccatataatatttgtactatagttatccccatgctatagattggggaatctaagataggaataggttaagcaactttcccaaaacagcattgttggttaagtatacagcaaggatatgaacccaaggatgtgatctttaaatacaatcactcaataattatgaatgtaaattcctgaa

SEQ ID NO: 1704 - DNA, 600 bp, Bovine  MMBT21262
tgagtgctttatgagcacctaccacgtgcaacatattgggcaagtgccagactgccaggggtcagaatgccagaggcggtgtaacttgatttcagtgaggccttagacaaagcatcccacgattcactgataggtcrggaaggtgagtggtataaaagtataatgacatgattttgcagctgactaaagagccatatccacagaggattgataaataactggtttccgttagcaggaagttttccatcagactcatccttcttataccttgctttagtcagcatttttatatatgacttraaggaagaagataagcacaaagtttagagtcatagctaggagatgaaagaggcaagatgaaaaacaatctgaasagcatgaaattcagcaaggatcattattcagttgtgtattttgtttttttaaaatcggyagtacaaattcatggggattcctggtttggcaggagttcttgttaaaaacaagtaggtttttttattgaccacagcttcatcaagaggcattaatggaatgtggctgataaaaacaaaggcgagggcaattcttgaccatggtcataaatctcatgtccagataata

SEQ ID NO: 1705 - DNA, 600 bp, Bovine  MMBT20179
actgcatttattctgctctgtaaaagtccctgagttgaattgtatactatgctggtaaggtaactgaaaggttgtgttagagcaaatggtgtcccatttgctctaactgtccccagttgcccttcccccagttttaaaaggagagcaagcatcagaaggtctttggtttggtgcagtccagtcatgattttgtctgatgtcactgaatcaggaggacagcatcccctcagagatctcagctcttactcacagggtcccacttgtatgatcaatagaaaggattcttaggggcatggccaragacttattactactgtttgttattcatcaattaatatgatctgtgcctattatatgctaagcattgtgttcaatactttacttacaytgttttatttagtaggtgtaattattatctctattctgatgaagaaactgaagttcagtgagactgaaaatttacccaagatcacatagctwttaagtggcagagccagcattcactctctgtcgtgggtgcttcctttccttgtacagtattaggagcataaggaaagatttgtaaagcttccccagcgagatcaccattccgccttcttc

SEQ ID NO: 1706 - DNA, 600 bp, Bovine  MMBT19797
cattgtcctcaatgacttcagacaaaacactgaacactcaaaaggattccatttatctatctttatttatgatttatgatatttataaatatcctctatttatgagcaatgatgacctaaatatttaaaagtaataatttctacattagtgaataaagtataattcttactaactcagaataaactattactttgaatatatagctccattctgaatgttgaatgcttaaaaatcctccagtggtccctattttccagaaaataagtttaaagggcttagtatgaatatgcaattcatgrtcttatcccattatctctcactaacttgttttcttcatttttcaacataactggtatcttcaaggtacaagactaacaggataattttacagatccacttaggctgaactcttatgaccttactctatgaagattttgccaacacacacatgtactgaagcaaaactaatacatgatgaaataatatattaaaaattcttaattttatatcaatatagcagattaacttttctatttttaacctagactatgactttctgttgtgtatatacatatgttcatacacacacacacacacac

SEQ ID NO: 1707 - DNA, 600 bp, Bovine  MMBT22363
tcgtgtctctctccatcggagaccgcgtccctgctgacatccgtctcacagaggtgaggggcccagaccccggtccaggggccgtgcagacacttggcttctcggaggcaggcattctctccttcttgcacacacatatacacagacataggcatgtgtgcacacaagcagaaagttagcaagcaagctaattttaagcacaaagctcctccgatggcatttcataaattatgtattctcatgtaagtataagctaacacgttttggttatatgattttctagcttgtagcctactgcartagagaggaattttatagctgaggaatgggtttatagctgaggaatgagggataagttgcttctagaaacaaccatactgatggcagacagaagcactgtcagactgcttaatctcaaggataacaactagtctagccgtagaaagtagcacaagcctttgttaagagtgcagtttgggacatcgggtgtggggctccatccccaacctttgcgggtctcagggtgtcacaacctcacagaacattccctgaggctgtcgaagatgatcctgaatcctcaagaaaaggaagaaaaaaaaa

SEQ ID NO: 1708 - DNA, 600 bp, Bovine  MMBT15652
atcctggctgtactagttaccagctgtcctgctttggtcaaattacttaacctttacaagcttctgatttatcatcagtaaagtagatattatcataatacctcccttgaaggattgtttttgaagtttaagtgtaaagtttcttgtcaagtactggcacataagtctgaaagactaaagaatagcttcacttgtcttctcaggaaattgaggttaatttacagattaagattcttggctacaagcaaaaaaaaaaaaaaccctgtctctagctaagtaaagcataaagagaatttatcrgaagaagtcaggaatagcctgtccacaggattgaaggaaaaatggagcattttagtctcaggaaggatagaaattggaccagcatgagaaatctaggtagtgggacacagtggacaggctctctagggtgcagctattataatgcttctggtctaatcggtttcctcctttgaaagatgcatctcaagattcaggttcctaggagagacaaagtggtatcaactagggtagtgagacatcttggttgacagtttaggggtcccatcaagactgagagaaggaaaggctgagcaaaaaaac

SEQ ID NO: 1709 - DNA, 600 bp, Bovine  MMBT21970
tccagaatatatcccacatgtctacaagagcatatattcccaatgcaactaactccatttacagaaacccctgaacagcagcagttagcttcttttagtctcaaccccaaatgagtttttagggtctggagatgtagcatgatagggatccttacagcctcaytgagtgacagatgatagccacaataaaaatagattatatgtratgacatacaactcacttttatggcttttgtaggttggacagcttgcatgttacataaatttaggtaattttactctaagatgcattataatggrtaatacccttggctggggcttcttcccacatggcactagtggtaaaccygcctgccattgcaggagatataagaatcatgggtcagtccccgagttgggaagatcccctggaggagggcatgacaaccctctccagtattcttacctgcaaaatcccacrgacagaggagcctggtgagctccagttcacagggtcgcatagagttggacatgctgaaacaacttagcacgcacatgtgcacccwtggcttactaaatatatgtcattatacctactaagtacttagagaatggttgttt

SEQ ID NO: 1710 - DNA, 600 bp, Bovine  MMBT19023
caagttaaaaaccaagtatttccttataaagttctagaaaacaatagatacttacttcgatttattatgtttctgactctggcatgaaacaagaatcaggtttgttttcacatcctrtaatatctttgccagtttactagccagagcctcacaaatatatttccttattaayaccaataygaattttcctcatactgcagaaattmttttcttaatgtttaaaacttgtttgttaagatttaaaaatctaaagtatttagatttttaatgctaagagtagaacactctcattgttctaartagttaarcaaaattattttccccaatatggagataatcttttcccccaagattgtaagcaaactcttactgttgtaaaaatttggatagtacagagaattataaagaaaaattaatgaccctaaaaaaattaatcacattaatctcactacccactgatgatcactgtcaacatttaacatctagtatattcaaatatatgtaaattttacaatataggattatattatttgttcttattttccatctaatgtgattatttttctcatgggtaaatataggactatatcatcttttcac

SEQ ID NO: 1711 - DNA, 600 bp, Bovine  MMBT23037
aaaagaccttgtctgagggtctctgagtggactttkcatgtatatgtgaaaattcttcctgttccaagatctctgggacctgtgtgacaagtggggcaagttgatctaagttttctgtgatttggatatcattctgctgttaagtgccaactccctggggagtttttaatgtttccttgtggtccccaattaatctataagttaagtatgtgagaaggttaaaaccagttttcctttgacttttttagcgaacycttgaaagccatttgatgtcccctgctgagattccaggccagcctrtccctaagaacatcttgcaggtacttaacaatcttataccgaggccttggagtcctgaacagtagtcctccaaactggttttgtgtagtgggccagctttgggccgtagagaatgatccatgttgcctggcaatgaaggatacggttttgctgcctgacatagttctctgtagctataaatgtggggtgggttggtgggtaaaaaagatgatcgagtaaagcyttggtttcccgtttgcaggtttgcaatttctgtggaaatttaaagtatctaacctatatctatagcactaacttaaa

SEQ ID NO: 1712 - DNA, 600 bp, Bovine  MMBT22644
accattggcttgtttgttgatgggcaatccaggcacattcagactcgaggcaatcaccccattttcttatcaattatggacaaatgagagacaggaaggggaatttctagggagaatggaaaaatggtcttcaacacaaaagtgttgtgtgattaggggttatctgtcgaacctcttgcaggatcccatttctcatcgttattgtggatgattgagcatgatattgtggccattctgatggcatctttcagaagatttcatttctgatgttcacttgcctgcttgttcagcaagctgacrtatctgttcaatactgcaccccctccccgcaacacacacaactgatggattttagtagatgtagtagattagtagtgaaaaaaatcaaagaagtttgacaaaaatgtcctcttttgatagaatttattagtcatttgctgactaaatcgatcagctatttttatcttgatttttcttgtttttgtttttagacataacaagttcagctaactaaaaagaccaggtgtctaatcgacttggctggttgtgctgacagttatttgatatgacatcaattgactcaactgacgggaatttgaa

SEQ ID NO: 1713 - DNA, 600 bp, Bovine  MMBT20093
atagcagcactatttacaacagccaaaacaygggagcaacctaaatgtccctcaacagatgaatggagaaataatgggtgtaagggttaaatacactggggacctgggmgccttcccatcacttacaatctttatttttctgggttcaaaacagcttatcaaaaaatgattcatggccacttagtgaattaaagcttgctgacacatttcctcaaaaggaaacatcatttggattattaatacacagtggaataaactcagccataaaaaaagaatgaaataatgccatttgcagcaacrtggatggayctagagatcatcattctaagtgaactaagtcccaaagagaaagataagcaccatatgatatcacttatgtgtggaatctaaactatgatacaaatgaatgtayctaatgacacaraaacagactcacagatataaagaayagacttatggtttcccaggggagtcggggagggatggattgggagtttgggattagcagatgcaaactattgtatacagaatgaataaatgacaaggccctactgtatagcacaaggaactatattcagtatcctgcaataaaccataatg

SEQ ID NO: 1714 - DNA, 598 bp, Bovine  MMBT20178
  misc_feature (1)..(23): n is a, c, g, or t
nnnnnnnnnnnnnnnnnnnnnnntgaatgaataatggaatgcactaatgtgagagattgtgaaattttcttcagtagagatctaaaaaattaattgctaaactacttcctgggctcttccttaaagagtgtccaagttcatgaattggccaccaggggtcaccagaagaattgaaagggcttctgaggcaaagccataatttcctgttcasgaagaagagggcaatttgtaattctattgttaaagagacttctcacttaaatatttaggattcttttgtcccttcttttatatttaaartttccttgtcccttatttttgatcgtcagttcttgctgcactactctgacctatatgtcattggtagatatttttctttttaattaaatatataaatgcttttttgtaaggtattattcacatttcaaatattagcccatcaccaaaggctgcctttaagtattcagtctaacatcttcctgttgttcttttatattacccatttctttaattacttatttattaccwgtcttcccactttaccagaaaagtagccagagctaacacttaagtagatactctaggcactgttcaagtg

SEQ ID NO: 1715 - DNA, 598 bp, Bovine  MMBT19391
  misc_feature (1)..(16): n is a, c, g, or t
nnnnnnnnnnnnnnnntagatacaaactttacttttataatacagaaaatagctacacaccatcttaagtagtattcaatacagaatataaaaaaagtcaaaattcaactgagctaagtaggtattatacaaaacatcagaaagcagataatgaataccaaaaacctctaattactggaagcccttttaaaaagtttaaaaacacctcataatgcagcctcaaaaatcacaccattacctttctgacttaatctgagamgtcctacaggtttgtagttcctaataatccatggctccatrgccaactggttcagtagtcactacactacttaacagactcattcaatactgagaacaacaaagctcagtggatttatcaaaaaggggagaattcgagaattcacattttctcaaccaattaaaaaaatgccattaatatcaacatctgggaaacaaatctgataaggttacatgtgtggcgtatttacacttaattgattataggctgttcaaaatcagacaatactgacatggagccatttgtggtggagtcattagtttcaagccattcatgtaccttgaaacgaactcaattatt

SEQ ID NO: 1716 - DNA, 600 bp, Bovine  MMBT20840
taatgaaatggagtattaattgtggagtgttaatttcttcccttcagcagtagctgcttgctttgactggatgtgtttgcagccaaataataaaacaatggggcttaaaaakattttctaggtggtttcagccctctacttttccaaatgagcaaacaggatggggagaagtacagttctatagatacgtattttcagtatcatagcctgcatatgaggcagaaataaaatatgtgcatattttaattaattaattaactggccgccatgggatcttgtgtcacatggaatcttgagctrcggcatgcaaacacttagttccagcatgtgggatctagttgcctgatgagagatccaacgcaggccccttatgttgggatgatggagccttcgccactggaccaccagggaggtccctagaatatgggcaaattgttgaggatgtccatttgaattagaagctttgcttaaaattttatagggaatcaagtcaaactgcaaaatatctaaagtgataacatttcctacaacaaccatcgctttttagttttgccaaagaattgatgcttttgaactgtggtgttggagaagactcctgag

SEQ ID NO: 1717 - DNA, 600 bp, Bovine  MMBT20579
ctttttgtgaccttatagactgtaacctgcaaatctcttctttccatgggtttctccaggcaagaatactggaatgggttgccacttcctcctccaggggatcttcccgacccaggaattgaaccatcatctcctacatcttctgcattgcaggcagattctttactgctgagccactggggaagcctgcaatttagaatctatgatggaattattccttgagttaatgtgggttatatgcatatgtttatgctagtaaccagttctatagagctttttccctttctattttcccggaartgatcaagttctcccaggtctgggataatgtgttattttgtggccaacaccagcaactacrttgtcccagatccttccctattacatttctacctcctcaagggaattaagctactacttaatgtctttattttcacctgattttctcasgcaggacacagttgattccttctgtagcaataaatctctgcatgcccctaccatttctcaaccaaatcactttgcaagtctcaactaacttaactattgacagctttctgttttaaattttctcctttcatcataaacttatgtaaatca

SEQ ID NO: 1718 - DNA, 600 bp, Bovine  MMBT21728
tgcagggggtaactaagcctgagagccgtaacaaaagctcccaagtactgcagccaagactcaatgcagcaaaataaataaatagataaatagttaaaaacagttgtttatgttacgtggatttcccctgaaataataaasagcagctggcagagggcaacgcgtagctcagagggttgaatcctgaggatggacctccggcacagtggaggtgatgctccgggccctgtacctgtattgtagccgtcctggagctccatgatgaagccgtgggcgttggccttctgggcagcctccacyactgtctcgaagggcacggtgggcaggccataggagatgttgtctgtgatggagcgggcaaacagcactggctcctggctcaccagggagatctgtggaggaggaaggagggggcatgggaggccgggaacgcatcagtccagcagtcaccaggaacctcaccagccccgggcctggctgatgcctggggcctcaagtctgaaatctgatcagggcccacggccggcggctgctgcattcagtggcctctcttctttccaaacagtggagtcgactttctgcacaagccctcagcctccc

SEQ ID NO: 1719 - DNA, 600 bp, Bovine  MMBT21732
ttcacagctggcatgaagtggctcctgcaggccttttctatttctaaactcagtaagtaggctccctgggcttccccggtggctcggcggtaaagaatccacgtgaaaatgcagagacgtgggttcaatccctgggtcagggagatcccctagaggaggaaatggcaacccrctctagtattcttgctggaagaatcccatggacagaggtacccagcgggctacactccatggggtgcaaaagagttggmtacaacttagcaactgaaccacaccaccaagtaggctccctgggtgttyacaaacgtgaaacgagactgaccttgtcgaagagttgtacttggtcccgctggcgctttctgaacaagtgcacacagatttgtggcgcacgaccctctgcactttggaaggcttgaagatgctcatccactccacgtcagacatgtggcccggcgcttcgattacgaagttactcgggtggcagcacttggactcccacatgtcgctttcatccacacaggcttcatttctgtggcaacaggagactccaggcctttccaggtggtcctgatagtcgacatccagcttttctggctgctt

SEQ ID NO: 1720 - DNA, 600 bp, Bovine  MMBT19317
gacgaaacgatttctctccttcacccacgcaatactaccattcttccagcctctctttttgaagttggaaaatcccgamttcaggctcaactcgggcacctcctcctccaggaagccttccgtgacctcctcccagcattgcatcaggcaactcctcggggatcccacctgccagagctggacagacctgggcccaggatcctggggatccatctagaaccacccatctcaaagcatggtccagcctcatctagaaacttgtgagaaacatggcttctcagtctccaccctggaccttcygaatcaaaactgggagcayggcccagcaatctgtgttgtaaaaagcccctcatgggattctgaagctcaagtttgagaatcagtggtctaagcagctgcattttctgcatctgaagtgccttatgacctggtcccactccagcagctgctgcaagagggaggggtccgtgtctcccctgggtgccgcccgctaacagagttgttacagactagaactgtctctgacccatcctcttctcgcacttcctggagacactcaaccaattttgaattgtaactttcttttattggcaaagaaga

SEQ ID NO: 1721 - DNA, 600 bp, Bovine  MMBT22200
tataaggtttttggcctgtgtgctgattatttcctggagtatatgtcttactaacccctcagagctgcactgccaactttctgtctgctctgagctagcccatgctcatttctttgcctttgcctatttctaccacactgagctgctaaagcacataggaggcactggaagaaagttatttttcccccacagtgctcttcagctcctagtaacctacttcacttttaccaacacttaactgcagtgccctctccttagtgatgtgttcttttttcccwgagtatctaactattgagaggygaggctgtccttcaccattgtgggggatattgagtgaaagcctagggcatcaactgtcttgctgcagtaatagagaatgtgacagctgcccaaggctacagctcattttgagctctgaagctcactttatattcttttacttttgtcaagttatttttttttttaagagttgttttattattattttggctatgctgtgtggcatgtaggatcttagttccccaaccagggattgaacctcaagctgtcttcaccactgatctaccagagaagtccctatcaagtacttgactgttgtgg

SEQ ID NO: 1722 - DNA, 598 bp, Bovine  MMBT20112
  misc_feature (1)..(94): n is a, c, g, or t
nnnnnnnnnnnnnnnnnnnnnnnnnnnnnnnnnnnnnnnnnnnnnnnnnnnnnnnnnnnnnnnnnnnnnnnnnnnnnnnnnnnnnnnnnnnnnnccctgccggtgcagacttgctgccttagaggaaaagccgttaaaagaacgtatttgtgtgtggaacaaggtcatgctcttattggctttctgctgcatggcatcaatataccagatgaggagaatccgtttgctttccctatagccttgtactgtgcacaagggctgcagcacatatatattctctaaygctgccggtgccaaagyacagaggaacccagaggcagggggttcaaaacgagagaagagccaagtgtttgttgtaagaaataaatacgttacctggacacatcattacacttgagcaattggtgatggtggtgggaaagcacgggacttctgaggctatttcacagataaattcccagacgttcccctaattctccattctctcctgtcccagtctgtccaaccactgcagcttgactaatattattaatcgccttcgtgctgctcctcctcctcctgttactaatatggtaacacttcatttatccagcatcat

SEQ ID NO: 1723 - DNA, 522 bp, Bovine  MMBT23177
tggtggatctcatttattggtttttgacatttctttctggttcttttttgttttcggttccccctttaccaggtccaacaatggtaaaaaaaaaaccctacagtagtgggtgtggccctttttaggccagcccaaagccttcagagcactcctggatggccaatagtagcatgtggcggagcttctcaaagctctcataggcaggcaggtccagctgattaaaactagggaaagaagacacatcaattcgtgataaaagatgataaccaaatccctgtgttcccatggtgcccacctgayttctgcctgtacactcccaatcttgtcctagccttgtctgtccttctcagtcccactactggctaccaggcacctaaaatataacctgaccctatcactcctccttaaataccatggcccaaccatggtataaataccacctcccaaataccataccccttgagcctgaaagctccaaggaggcattcagggtcactggtcacctttgctgagttctgctcc

SEQ ID NO: 1724 - DNA, 500 bp, Bovine  MMBT23189
catttgggcatccctaggaaggctgtctcaccgccagcagccgatccccgatctgtaggcgtccatccttctgagcagcacccccctcaatgatcttggtgatgtagatgctattgtctcctgggatgtgctggttgccaatccccccagcaatgctgaaaccgaggcctgggaggaagccagcaaggagtgggagagtgatacaaggagaagttagagtgctcagttaagcccaaccccagtcccccatgctcagccaagccaccagacccataggagctttccccagggatcccaaaygctaggctgtcatcccgtggtcagtaagggtgagatgtgaggtcaagaaagaagactgtgagctgaactggggaggtaggcagggggtgaggggattcccttccacttcctatagggccaaccaggggcctctggccagagcacgggaacctagagggccgcacctttgggccctttgagcagattgacctccatgatgg

SEQ ID NO: 1725 - DNA, 600 bp, Bovine  MMBT18630
aaatatagcaagcagttcagttttgcttgagaaccagcactccattatgtaaaggggcagtgcagggtaaggctggaaaagggacattcaactggacaaatgtcagattaagcagttttacctaatttgacaggaaacyactgataatttttaaaatagggtggagctgtgatctggccactgctttagggagatggttctggcaagaacaccaaatggaytgaagggaaagcaactaagcggaagaccaaataggaaactacagcaaaagtctagatgagaggtaaccagtagctgacygagggcagtggcaatggggacacagaggcaggggcggatggaaaagacactgggtaggaaaggtctataactctgtctaattcggtaccccccagccccatgtggctatctaaattgaatttatgtacactaaagttataaactttgttactggcgtgctgtagtcaatggggtcacaaagagtcagacatgactgagcgactgaacaagttataaaatccagttcctcagtcaatgctcgatagccacatgactactgtattagatatgcggataaagaacattctcatcacagcagaa

SEQ ID NO: 1726 - DNA, 600 bp, Bovine  MMBT22025
tgctctaaaatacagatttgttttttttatattgatcaaaaatgtatttttcagtctttggaatatgaagtttatttatagctttagttccaaaatagcttctgaaatgcattgcccctgtttttagttgtaatgcatgtgattatactttattgaattaaaactcttaacagagaaacaactgaaagcaatgacctaattttttctcttagcaacttggtcagattccaggagtatgtgacttgatacaaatacmgaataacaaaaactggccccactctaatccattcctccctcttyccatcctctccattgtccccatgttaacacgctcccttctgtctccatttggttgctctggtagttcattttgcttctccctctaattgtttcctcttcggcagcttagtctggatatacttgctagagaacagtggagctaagttaaataccatcatcaacagatcaaagtagtaaatacaggtttcagttaaacatgggatatggttgaagaattcctgtttcaggaatggcagttcaaatgactcaagttatacatctttaatcataatgaaatttagcacttaactcaaaattgtg

SEQ ID NO: 1727 - DNA, 600 bp, Bovine  MMBT19337
aaaggctttctttctgtatgtttttttttttctcccagtgacttctttgcttgatttacctactttaattgacatatacttaacatacagtattgtattagtttcaggcatacagcatagtgatttgacatttgcatccattacaaaatgatcactgtgataagtctagtaaccatctgtcccttacagacttattacagtattaytggccatattctgtatgctgtgtgtatcccyggggcctactttataattgaaggtttgtacctttcaacccccttcacctgtttctctactgcyttcagcctctcccctctggcaaccgctcatttgttctctgtgagtctatttttatttgtttgggttttttagattccacatataaatgagattatgtgatatttgtctttcggtctggtttctttcatttagcataatagcctctagatctgaatatatctttgcaaatggcgagtttctttatggctgagtactactgtccccgtgtgtgtgcgcatactcatcttcactcattcatctactgatggactctgttgcttccatatcatggctgttattaataacacatcaatgagtgta

SEQ ID NO: 1728 - DNA, 600 bp, Bovine  MMBT19053
agttatttaagtgttttctcccttaatacctttaaattcaaagttctgcttctttagcagaatttagcaaatctgttctaagactctggcaatctttttacaataagcaagtaagcaactcaaacctatttagcagaagttccttgaggtcccaggggctgtgtacctctttcatatatttcacaaatctttattatatcatttcatgtgtactttggttgacattattttttacctttgtgcagatagtcacaaatgcctccaccgcyggacatataggaaacccacttatggagatayttccttgaggccacaagcgtgttgtcctgcttcacctggaccaggtactggagtgggcctgtgatcgtcttcttgttacagtgccacttcaaggaaacgtgggtggaatcacactcgtatatgctcagcggctgctctggactagacacgttcaggcccaggcagccactgccttccgatgttaaataggcggtggtttgaaacccacttccacagcatgtacttgttgggtggtttgcagttctccagggtcagtgtagatttgctggcttgaatacatttctcgaggttctcactttg

SEQ ID NO: 1729 - DNA, 571 bp, Bovine  MMBT22856
cccctctgtccccaccctggcagccacagccgcccctcagcccawgggtcctccacacagggaccctgggccctccaacctggcatgggaacagagtgccaccctccttcagcaacccccaacccacagggcatgctgccatcagcctggctttgtcccctggccaggactgacctctcccctcctgacacgtggaagtgatggaggtcacacctgggggtggggggcagggggagggagcctagttcattctgcgggttgggagctgggacctgcatcccgctaacatgctcccctgayacctcctgtccagtgtgtgggggcggggggagatggacaaacttaaagtcactttttggggctagtgtgggccatacagtgaccccaggggtcagagtccttatctagaccattatcaggctcaggttcagatggaaaagcttggagcctggaaggggaagaccccgttggagcaaccctgggggaggggagtatctgtgcccagcagtgggacctggcgataggctggcaggccgctcagacccacctgacctgcaagcttcaggaagag

SEQ ID NO: 1730 - DNA, 598 bp, Bovine  MMBT20771
  misc_feature (1)..(160): n is a, c, g, or t
nnnnnnnnnnnnnnnnnnnnnnnnnnnnnnnnnnnnnnnnnnnnnnnnnnnnnnnnnnnnnnnnnnnnnnnnnnnnnnnnnnnnnnnnnnnnnnnnnnnnnnnnnnnnnnnnnnnnnnnnnnnnnnnnnnnnnnnnnnnnnnnnnnnnnnnnnnnnnnnnaaaagttatttattaatggacatattagccatgtagttcccataaaattgtgccatatggacactttgtccattactcaggcatatttgcaaagcatgtgtccaggatcctttgcaatggctttttgtattcagaaaacygcagacctgggagaaaagaaagatagggggaggagtattaagatgcagagaagtccttgtytctctggggaactagcrtgagaggtgcagacaccagggcgtgcaaactgtggcctgtcataaagcccctttgaatgggaacatggaggagctagagcacctccacctgaggctctcaccccacatttacagatgcttccaggagacttcttccccgaggccctcttcctctctggggagttaccgakccccacccttcaggaaggtgaccaagatgaacaattcccagaaatcagga

SEQ ID NO: 1731 - DNA, 600 bp, Bovine  MMBT19869
ctggttggaatacaaagagttaatgtagaatccttattccagctcggctctgtttccatggcaacagctaagggtggtgaaatcttaaactgaaatccctaggagccagcaggctgccagctgtaaagctggactcactgctcccagcgccacctgctggctgaatgccaccagtgcagctgacctacattccaacctcatttatttgccctgggkacgtggtccagggcagggtcccctgtgctgactgatgatgtgtgcagccttcatcccacaaatcagctggactccacctttccytattacacyctaaacaataactaggcacaaactctagaggcttggggagaagsggggaaaggtgaaggatatacctcacgtgggcttgtttattattagagcaaagtttgtggcttacatacaactggagtaagggcaggggaactgcttcccaaaaaaatataaagaaaaaatagaaatgcagggtgcttcaggtccctaatcataccacaacaggagtggccaaagtcaagtccctgcgagcaaaaatgctagagcccctcaccccttgtgctcagcacagcactgattcttgccaga

SEQ ID NO: 1732 - DNA, 600 bp, Bovine  MMBT19062
ctcttcacgaccccatgggctgcagcccaccaggctcctctatccatgggattttccagccaagagtgctggagtgggatgccttcgccttctccgataatacttcctaatacctcatttatcataccttattggtcatacaaagggtcctattaacatgactctagccctttcatacttctaagttattcacatgactcaagatagatacacagaggattagagaaagtgatgaaggggccarataatgtctcatcagtttatctgaaatagtacctaagacctgtttcttccacttcygtaggaaaaaacagaaatgcatttcccctgaagacagtgtcccagctcttatcggggtgtggtgatactttgacccttattgtgaggtttttggccattcaactgtgcacttcagccagaagcaggaggtggcccccagagcctaaggaactggaacaaagctgattctttgttggtgaccaaaaactatagtgagtcatgacccttcacttcaaaataacatattgaagaataatttttcaactccagaagcaagttaattacataacgtaaggaagaggctccaaaagtcttaaggat

SEQ ID NO: 1733 - DNA, 600 bp, Bovine  MMBT22287
accttaggatgaccttgcctgctgcctgagctgttttcatatcctacaatgcttattgcataatcagaaacctcctgctgaaaatacagctggatgggatagtgtaaatggagggtgaccatggaaaacattgctttagtctcttagcatgaggacagatctcataatgataccagggatggaatgaagttgagaaatcagacacccagagcacgtcaccttgaaacgagcacccttaaccctcactctttggctgtccaaacattgatgctccttgctttctgtgttatattttgtttygtctactgtgtggaacaaaggttggatttacctgcyttgtgggagaggggattaagagcaggtgggaagagcaatgtcacattaggacttttcctgttgtctttgactttaagaagccaggtgtaatgagagtgacggatggacacggggcaatttgataaaattggaatccccacccccccagtattcccagcaccttgagaatctttctctgaagggaaacttggcccagctgctgaacaagaagatagggacacatcattgtacatgctcatacaaagacagaaaacaaattagctt

SEQ ID NO: 1734 - DNA, 600 bp, Bovine  MMBT23224
ctagctgtcagggtgcactctgccccagattggcaccagacgcctctcctgacttccagctcggcaactaacctcagcttttctcctgtgctccctgtaccttygctcctgctccccagttcactgggtccaagattcatcctcatgccctttactgaccccgaggaaggggaagcaaaagttttggtgcctgagtctcggggatgagtgctaaagaggagagggggagagtatgcaggttcctgcttgcaaggtggcaccggggggtggggtagagactccactgagagggtagggmcygggaatggggaagatgagcacacctgtgcctgytaccacctacttaagtaaacatgcaggcaaggtcatcgatggcaagccaggggagggatcgagggtgctctgacaggaaagcagagtggtcagggtaagcaggacagtgagtgcagtgagggaagggtgaaagactggagctctgtaagggggtcacgagttccttctgacagggaggcagaatggcagcaatgaatggaaactgctaaaccccagaggagggtgtttagagaactagaagagggccttcagggaaaagggaggacg

SEQ ID NO: 1735 - DNA, 600 bp, Bovine  MMBT22837
acagcaccccatcgatatcttgttctgttttcccagtgggaacctgacttctagtgggtaacatagcaaagagctagaagagagtttcttgtaagtaaagtggcaggctgccctcagatgccaggaggtgctctgagctggaaagaagcccrtggcctggcaggcccctaggtgtccagaggagccttgtcacagagcatctgtgggtgggtgtcctacctcacgctgccttgggcatgaaackaacttggttttcagtaggcttcaccyttgagagcacagagagcctggcaaatctgytcatttctcrtcctaatccaagtgttggcactgctgtgcattagacgaagcttcttactygaggaagatcaatacataatattggaacatggtcttggagagagagtttatggacttgtaagaggcgttgaggcttttagcctgttgtatataaaacagatcaagaaaaacaaagcagaatacgggggatgggagggccttttgcttagactgacattaacccagaggtcctaagtacatggagggctgaggcaaggtgatctggagggaacgtgttccgggcagtgggaacagcaagtg

SEQ ID NO: 1736 - DNA, 600 bp, Bovine  MMBT21085
ctgatgagatgaaacactccttgcagagaaatattccttacagagaaggtaagccatcttcagctgagagatgctggctgagtataccgtctggtagcggaggcccccaagtcaggaaaggaagtggtccccgtgtcagccagcgtgagagtgggttctctctggagacgccaacctcacggttagtgatrcctggctctccctgcccactctctactgaactccggagtccagagtctgaggagggaaawtaccagagggcctgggacagggagatggaccacatgactgttcacarcycagccaggaacagctcctactgtggaagtgtacgtttctttttgttggtcttggctgttctgggtctcattgtggccagtgggatctctgatctctgttgcggtgcgcagttcttcagctgcagtgtgcttgatcttcagctgtgggacctgagagcttttcgttgcagcatgtgggatctggttccctgaccaggggttgaacccgggcctcctgcactgagagctcagaatcttagcaactggaccaccagggaagtcccagaagtgaacatttctaaacacaatctgaactggagaa

SEQ ID NO: 1737 - DNA, 598 bp, Bovine  MMBT18890
  misc_feature (1)..(65): n is a, c, g, or t
nnnnnnnnnnnnnnnnnnnnnnnnnnnnnnnnnnnnnnnnnnnnnnnnnnnnnnnnnnnnnnnnntacttacaattgcaggcagattcgatgagtaaacatctgagctaccaaggaaacccttagatataatgttttagcttgcatggagtgtcagtattactatggatggcatacagtcatttacaaaattgtattaaacttcctgtggccggttgcatttttcaaaatcggttgaaatagtatattcagtctcttgtgctcttccaaccccaccctccttacctagtcaaaagatggyatctttgttcctattctttggacctgagtggacttcttgggtgarcttctataactgcacaagaaagtaatgcttttgaagctggctcttaaaaattratacagcttccatctagttcccttactcagagcatatgcctgcggacccctgaagtacaggtgccccgaagtcaccatgctgtggagaccacacagcagacracatgtacgcagagaatgtcagaggaaccccagctgtttcagccccagcartttgaacattcccagactcaatggcaaacgtgctaatgaggaaaaca

SEQ ID NO: 1738 - DNA, 600 bp, Bovine  MMBT22795
attttgaacattactttgctagtgtgtgagatgagtgcaattctacggtagtttgaacattctttgacatcatccttgcttggtattggaatgaaaacagaccttttccagtcctgtggccactgctgaattttccaaatttgctggcatattgagtgaagcactttcacagcatcatctttcaggatttgaaatagctccactggaattctatcacctctactcggctcccttaccatggggtattttcttgggtttcattcaccttgtatctttggttcctagcacacagtctcagtyggcaggatgtgtttgataaataaacgggtgttgacagaggagttacaggttaatgcatcgagcaaacatgatctgggcttcgaaaaagcttaggaacttgatatgacaaggatgaacttagagaacttgctaagcatagcaggtgagaagacatgaaggtgagtgtgtcaggaaatgttcagatcatcatgtgaggttgaaattatcagcacttgaatccatttttaagtgtttaccacatattgattttaaaatgcattcaaaagagtccttttctaccctgaggatagtgtgaagttt

SEQ ID NO: 1739 - DNA, 600 bp, Bovine  MMBT21092
agtgccaccagagctgggagcacttctgcacagagaaactcttcagttcagcctctctgtgcagacagaagggagtggagtctttattagtcccagtatcagctcccagaaatagtgggaattgggaattccagtgaggtcctcccccaaggccagaccactaagactctcccaggacttcagaaagaaggatcacacaatatcttggatcctttgagaaggaagacctgacactcccagtgagcactttctacactttgtctctaatcttcccaacaatccaataaagtaacactgtcygcatttacagtcgaggagcctgaggctcaagagttgtcacagccctctttccaaaggccttgcaacaagatggttgggagccaggattacaaatgagtgttttgacttcaaaaatgcaagttcctggttgcagcccaaatcctcccactgaccttgagaaggtgatcagtgctccaatttacctgactacacttagaaatgcccctttctacagatgtcttctggccatggaaaatgctgactctatctgacatgtgaaagcagagaagagaaactgccttcagggatcatccccaccaa

SEQ ID NO: 1740 - DNA, 600 bp, Bovine  MMBT22257
tcatgccaaggtgcagttgactcatctctgacactttccttgagagtgttttcatggagggagagagattaggaccctggcttccaggtgggattagagggtggaaaagaggtgagggccctgagagaggaaatgtaacaaggaaaagtgagtgcaacctcatcaatttcagcaaatrtgagtttcatcaactctagagtttgtccattgagatgactgatctcaaggcggttaggaccagcaagtggaattgaggtgacrtttcagctcagttggaggtataaggtctcacaatcagaygatcagtcaagggatgaacaaccaggtaaagtggggagcgtgccattacttagagaagttcaagttgaatgcagacatgaatttaggggaatgtaagagcctaaagttcctctgcttccatagaggtcaaccttggttgcacctcagctgggggcagcttttaaagctcttcacatccaaacaacayggagcattgattaaatcaggatttctgagggctgggatctggagcatcagtactttttaaaacttgccttttacaaattctaatgtccagacacagttcttcagaagctctag

SEQ ID NO: 1741 - DNA, 600 bp, Bovine  MMBT18629
gaagaagaaatgggaggcacatgtccaggcagagacaatttacgcaaatgagttagctgctttgtaaaaagttggtaggaaatatagcaagcagttcagttttgcttgagaaccagcactccattatgtaaaggggcagtgcagggtaaggctggaaaagggacattcaactggacaaatgtcagattaagcagttttacctaatttgacaggaaacyactgataatttttaaaatagggtggagctgtgatctggccactgctttagggagatggttctggcaagaacaccaaatggaytgaagggaaagcaactaagcggaagaccaaataggaaactacagcaaaagtctagatgagaggtaaccagtagctgacygagggcagtggcaatggggacacagaggcaggggcggatggaaaagacactgggtaggaaaggtctataactctgtctaattcggtaccccccagccccatgtggctatctaaattgaatttatgtacactaaagttataaactttgttactggcgtgctgtagtcaatggggtcacaaagagtcagacatgactgagcgactgaacaagttataaaatcc

SEQ ID NO: 1742 - DNA, 589 bp, Bovine  MMBT22118
actattctataactcccttatttatcagtgtatcagaaacctagatgtctctaaatgtgagaaaagagaaaagctgtgaagcactcttagcctagattggagcttggaatactcacatttgacttctaaattaaaatgctttggaaatagaagctcctgaagaggcccagtgtgaagggtacacaggcaggmtgagtaccaaaaaggcartaagccaccacagacaggggcacccctctcaccatctgtctttgtrgcatgatgctttgctctgtggcctcagagtcatgccctatcctygcaacctctccatctggtaccaagtgctgtaccagcacattgtgtgttaagaactgccagggagccagaaccaccatggtttctgttttcaagatccaaggcttgaattctgcccacggatcctgtatatctcttggckgtgctgcggatgatttcagcagaaggctctggcacttcttaatcccaggaccagtgtctactcataacctcactcttgctcccgcatctgtggctggtcttcgccaaccagcagcaggacagaaccagctaatttcttactcaggtctta

SEQ ID NO: 1743 - DNA, 407 bp, Bovine  MMBT23192
taagcctttcctcatttctcccgcctctgcttctcctagctattcccaggcaggttcactgtggccaacttggttcaccatagtaacccctgaaccagtcctgtctgaggcaaggaatatcccatcagctttagcagacccaggagctggagaacctatgacaacagctggggtcccgcattggtctctgagtcttcttgctgccaatttgatataagattgggcacctctaagagtgaccttggagatccatgttgcctcttagttgtttcctcttccttcctctccttcccccaaccytgccacccctaccatgttgattcctactcccaaattctacacaatcaccctcctttgtactccattgccggcccaccatcccaccccaactggaccaagatcctgtc

SEQ ID NO: 1744 - DNA, 600 bp, Bovine  MMBT22473
tagagctgtgytggacccatggcaaagccctgatagacatggatytagaagcaaatcagtracttcttatgactttgcttcttcttacaatatatattacagctttctctggtgactcagtgataaagaatccacctgccaatgtaggagacatggatttgatctctgggtcaggaagattccccaggaaaggaaaaggcaacccactcaagtattcttgcctgggaaatccgatggacagaggagcctgatggacttcagtccatggaatcataaaagagtaagacatgacttagcaaytaaccaacaccaccaacctacactgccccgtcccctgttaatggccaaactagtttacctattttgtcctrttcacaacatatgtgcacatgactaggcaaacacatttattgatcaaaagatatttaatctaacttgacctccctttggaagctcatctttctacaacatragtcccttaggtaagagrctgaaaagctttagagcaactctgggtctttagaaattagcctctgaaaatgtataaatatttctgtatacacacatctctgcttattttttgaagaaggttcatagctt

SEQ ID NO: 1745 - DNA, 600 bp, Bovine  MMBT21537
gatttgtcacaggtccagaaaagatgcctaggtagttctgtaaaatgcataattcaccacagtaactgcctattgaagaaaaatgagatggacattgtatacagtgataatgaataaaacaaagcactccctgctgaaacagatttttttttctttgaatcctggaaagagggaaaaaataatattactgacactagccagatttcatattgtcactacaatcaaatcctgcttcatgcttttcagctgcttattctgtgtccatgttcacaaaggtaattggctgtggctgagggagcytgagtgggctagcatgctgtttctttgtgctgtgtgatcgtcttccttctcatgtccctgataccaggattgcttgtgattgttttcagctttctgttagggatggtaggctgtccaccmaatctcgtatctttcagaatagctaccaagaaggctcccaggaagttctcaaaggaatcttccagagttataggctaaaagaatctgccatgcactcaaatcttgatccttttggttatttctacccagcacaaagagaggaactagcaaatttacattttattttgtctttatttaaca

SEQ ID NO: 1746 - DNA, 600 bp, Bovine  MMBT20332
ttttcaactaaagccagtggccaccctggccgatggagcaggttctggtccacagagtgtaggaagtgtcctgtctgcacgtggacaggtgcgtggaggaagaagagccaggtggatgaggctggctctgccaggagaccagatgggcagaggagaatggaggcaccattcttcactcaattctactgcaggacatgctgcagaggggacttaaaccacggtctgctcagacctgccctggtcagggcaaagatgcggcccccgtggcggctggttgtttgttccsacgggagttaggaygagagagtgggcataaatcccaggtctccagccaaaggcagctgatygagggaaaacctaatattcaacttttcctagaggaactggaaacaaaacagagctccagtttgctttcttgtgctcgcttgggtcatggaggaaaaacaaagatggctttttgcagctgacatgaggggctgccggaatgcaggggccgatgcatgctctgaaagggcccccatccttcgactgctgcaggatagagggacggaggccaccggggacagccagggacgtcaccgtgacagacctacagcacgc

SEQ ID NO: 1747 - DNA, 600 bp, Bovine  MMBT20860
tgtgcctacgtgaccctgtggacagagcacacgcgtgagggtaaagcacacagttctggtcacgcagaccctgctgggctacaacgactgccctccaggacctgtgctctcattctttgggcacagaccaacttatgagcctggggtggtcctgaggggaaacattgtttatagttttaagagtttcgtttttttttaatttgaattttctgctgctcgaatggatccagctctgccagcagtaaggtaaatgagcactacagctaaaatgaacaaatgagagtggtgagcagacctaaygcttggtgtcaggagacttgttctgctgcttattcagactgaccctggcatcagctgccctccctgaaaactgctatatcactccctgagaccttgggtaagctaccatattctctgaggaagcatttagcagtactggaaccaagcgctttctttctcggagacgatggggggctaactccattatgcagtacatctctttacttcactcatctgaactaaagttcaagggtctctggtcttattactgccctaacggccatactcacactgacctacatgtccctaatccctccccta

SEQ ID NO: 1748 - DNA, 600 bp, Bovine  MMBT20668
agtccactttttaagcattctattgtcatttctgtccctgttcatggtgggtttacctaggacagaggctgcaacttcaacagtaaagtgtcaagacacaggcttctacattctatagcaaattcagttgatgccatctcagcacaccgacactgctcgcttcctaagggcatggttggcagacacttttattagcaatcaactctgccaccttctgcttatctacagatttaaggccacataatcatcctctgcgtcacagagagggtggggtggaaactaagagtctytaaatccctyctaacacttgcttcttccctaccagcaagattaaagcagtcaacagctgttggcatatgtgcccagaacagacaggctggactgggctgtccagagcctgaggaaggccagttctcagggcaatgctggggaccccaggtctgctggtccaggcctttctctctgagacagtagagggcacatgaccaactcctaggggcagtgagcaggctagggacccgaccacggccaggagggcaaagccagggctcccattcctccagctatgctgaaacagactgagaggagacggtcctgggg

SEQ ID NO: 1749 - DNA, 600 bp, Bovine  MMBT19079
gcattacaggtggattctttaccggctgagccataagggaagcccaggaatactggagtgggtagcctatcccttcttcagtggatcttccagacccaggaatcgaacaagtttctcctacattgcaagcagattctttaccaactgagctatgagagaagcccaccttaaacttacacaacatgatacatcaattatttctcaatcaagtgggggtagaaaagaggtctccagctgcccatcaagcctggccacattgtcscctgcacaggtcctctcctggccccactggtggccctygaggcagaggaaggctcttttcagctgtgactgaaaaggtcaaataccaagcaccattaactaaaggttcattctgagagaatgaggctgggccccaggyggtgccaggcagtatgccctggtgctgacctggtttcccgattcaatccagccctccatatctatctcaatgtgctggatcttcactgtttgtgctcagatcgatgtattagctcacatcatttggtgccagccaattgttgacgtttggcgaggacttagtaatctgatagtttagttcatccttttaagtgggggagt

SEQ ID NO: 1750 - DNA, 600 bp, Bovine  MMBT19318
ttcacccacgcaatactaccattcttccagcctctctttttgaagttggaaaatcccgamttcaggctcaactcgggcacctcctcctccaggaagccttccgtgacctcctcccagcattgcatcaggcaactcctcggggatcccacctgccagagctggacagacctgggcccaggatcctggggatccatctagaaccacccatctcaaagcatggtccagcctcatctagaaacttgtgagaaacatggcttctcagtctccaccctggaccttcygaatcaaaactgggagcayggcccagcaatctgtgttgtaaaaagcccctcatgggattctgaagctcaagtttgagaatcagtggtctaagcagctgcattttctgcatctgaagtgccttatgacctggtcccactccagcagctgctgcaagagggaggggtccgtgtctcccctgggtgccgcccgctaacagagttgttacagactagaactgtctctgacccatcctcttctcgcacttcctggagacactcaaccaattttgaattgtaactttcttttattggcaaagaagaaatttcagcaccggtctca

SEQ ID NO: 1751 - DNA, 600 bp, Bovine  MMBT20355
tggtgacaggtggggaaggggctggaacagacggccactgtagctccaggaatgatcagcctttaaatgacagatgaggttcaggagccatcatgttctacagacgtcagggtgatcastgctgtcactttgttagttcggcgttcatttgaggaggtggggaagatcttagtacatgtcatgggctggtgccagacagttagctggctctgtgatcagtgttccctagaaatgatcctgtttaatctgcaccagcgccttccactgcagcccattttatggatgagaaaattcagcctyggggaaggtaaacacctttgaataaagccacagaactaatacgtgatacttttcaagatcacattaaagcttgcagcaatccaggcgttttactaatcttgtcagccctctgacatcctgggaatgaaattctctgccccccatcctcattccatgcctgtgcttggcaggtaccagcactcaataaatatttttggattgattgatcacaagtggartgaagatggaagtgtggcatctgctgcccagcatgaggaggaaattagctggaccagctcctccgagatcctggggcttacr

SEQ ID NO: 1752 - DNA, 600 bp, Bovine  MMBT20890
gttctggacacagtgctggggaaacgcccacggggtctggtggaaactgcccatcaggggagacacgttctcagcgtggctttgcaagttggcatctccgccttttctgcgcccccgaccagctgttcacctggtgattaaaatatcaagagatctgtgacagttgtctgctggtatttacagaaataatgagtacgatcagagcaaagattttcttacccacttaactgaagttgatatttgactgtggaggatgagagccggagggggaccatgggattcccacaccccagccccgaygttttcatagagtaaatgagggccactggggacacrggacctggcctggccacccggctggttctcgtggccctggccataggggatgcctggagttactgtgttgtgcttttcaaatacagccttacaaatttaaggtgattcatgggaaaatttayatttttataaagtatccatgcttttaaatacaagctatagaaatagtatctttaaaaacctgttttagttatgttcactggcaaagtaggagagacaatggttttacctgcagttaaagcatttttttttttttwwaaagtg

SEQ ID NO: 1753 - DNA, 600 bp, Bovine  MMBT19191
ggagataatcagcggtatcctttatatttttcagtgtggatgtcacatggttgggccatgtgttggcctgggcagccacagttcttgccaaaagtatcacttgagagaggaacactggtttatccgaatagaaatctgtcaacaaccccttagaggaaaccaaacccccggtccactgcctcaggccacacgcttccctcccccaaccaggaaagccccagctcccatctctcggtgacccttttcctctttgttatttcaggcctcagtctcgcctggaacttcttcccaccgcagccygcagagacacggagtgcagtgctgtgctcatcctagatctttcttactggtgagttgacttgactgatttacctacttcagagtcccttccttgagactcccacctcacggccacggcagaacacaagtgtgatgacggggccccgagactgaggggcactcggggggcacatgagatgtggccgggaaggcctgggaccaacacggtgggaaccaagctcaccagtggggtggacccaggcacggacacggcctggcctctgtccaagagggatgcccctgggtcaggctgcctaccac

SEQ ID NO: 1754 - DNA, 600 bp, Bovine  MMBT22779
gttagctaaaaattgtgacttgccatctgcctctacaaggattaactctctagcggctgcagtcgttgatcttcaacacacactgaaaggagttcaggasggagaccaggaatgaggcactctacgctctgggagaaactggcagaacaggccttcaaatagttagatatttttggaagattttatgagccccaattcttccatctcctcatatctagaaaagctctaaaatcattaatggtgacatctgttcctcatgactagcagcaaacttctgccaagacatgtgcttgacggcayacattcaccagttcacctatataccggcctcccccactgtgtctttggagcagttcctcagagctctctgcgatgctgtctcctgggctgtagtcctcattttgccctaaataaaacttaactcacaactttcatgttaaacatttttttttcagtcgatactatccacaggaagaattactcgcttaaggctcatcagaggtgacatcagcatccaacaaggctctaggctcaatcaacaaggttcaacatcaagggaaagagatgttcaaggactaagcagagggaagggatccaggg

SEQ ID NO: 1755 - DNA, 600 bp, Bovine  MMBT19523
aggacattggccatatactagagacggcagagctgtggattacatatagctttgtcaactttctggaatacagttgccatcccagcgcttgactgtctgtgaatttctccacaagggagaagttattcccatcttatataagccactgctattttgcatttttctactgtttgcaattgaagggaatcctaatgtgccacgtctgtatgaagaatggaaatcggaaagatggcactggatagctacatttttctagaaagactgatcttcctcattcgtgtatgagcttatctgtcaccygtgagcacctccgcttgctccccctgctactgctcttattctctgggtggactccgggtggtgaacaagatgtcagcagccaygttggtgctgttgccccctccttacctgagtccccctcagagattccaatacatcttagatactattgagttttgtcttggtgttttggttcatttgcttgtttctttttaagaacatcacaacrttccactataataatatcctagaattcagcacaacggaggaatgaggttttttgttttgttttaaattctgggaaaatagattaaagcagtt

SEQ ID NO: 1756 - DNA, 600 bp, Bovine  MMBT22510
tggcttcaaaacttagtcaaaccttcaagtttcaaagatacttaaacttcctatgtccattcttcccatcttagttctcccaaaatacgggtagttttcaccggtaagtactggctgtttatacacaacagagttccaaactgtaagtcatgtgatacgttttggycaatgcagtgctgcttccaactcgaagcgacartgrcttctgtgtctcgtttacagcaagctaacacaaccaaacactacgtctaakgcacagcrcaatcattcaagctactggacatgctgcttttacttaayaactttacctgtttctgaatgatttcactttgattagaagcttggagggtgtgttcccgcttaatttctatctgttgctgcttcttcttttgctgctgatccctgagttgctgaaccctctgcaactgctcttgcacactggctgcctgcactgcgaccacattctgaatgtggtgagtctgcacagggctgctctgctgaatctgaacgggtaactggagtttgatctgctggggcacaccaccttgctgagcctgtatctgagccacaacctgcggctggatctgggagagaacctgg

SEQ ID NO: 1757 - DNA, 600 bp, Bovine  MMBT20096
tggctacagtccatgggttcgcaaagagtgggacacaaccaagcgactaagcagataaacaaaacaagcattcatagctatgctctaacaacaagtatcaacatratgctgtaaaaactgtggtctaayacattgggagctaataggtaagggctgaccctcctggaagcgagggctgttcttggatgtggaactttcagtactaaaaaactgggaaagtcctgggtaaaccagaactagtttgtcacatgagtcatgaggagaagagatggctaaaagatgctcatatgctcactttgyggagcagaagtttgatagatgctttagaaaagagtaagttggtgaccactaacattaacacagcaactcttagcagtggctgccacttaaggaatgacgtgtctatgtttgacttcagccccttccaaatgatttacatttctaaaacaatacatccatttagagtagaataagccaagtcttattcaggaggcatctaactgctaacaaagagcatgtttcaaagtgtgaaaaacctagggctccagacacggtgagctaactgaaaatgattaaacaaaggatttttatctaaacgct

SEQ ID NO: 1758 - DNA, 602 bp, Bovine  MMBT20303
  misc_feature (1)..(2): n is a, c, g, or t
nncttgctttgtgcgttggtttctagagaacactgaatactctgtctctttcatgccatgctgcaaagatactattgacttaaaagttcgaatattgatgaaaaacactgtgttagaaattactaagaagaatatctacaatgtattayacagaggttggtgaagtattggagtgaaaaaactgcgtcactacattgattcttttggggtaaggatggggactacaatcttaaaggaaccacaacagaatctttggttgaaacttttctaaatatgcatagtccatgtcctgaacctctgcyatagccatcactcctgggattctactttttctttatcctactttgaatcactatatatactcattatctgtaactgctgttaggattattatgattattgttagatacaaggtgaatatactctggggctaggagaccattgtaattgrttgcctagctattttatagcaaactcttaggtaggatataagattagataaagccctcatacataataagcttttagaattttaattaaaaatgaaacaagaatggacacttacggggaaatactgtaaggatgttattttcagtgttgag

SEQ ID NO: 1759 - DNA, 600 bp, Bovine  MMBT19180
ctaggtccatatcagagttgtagttttgtgatattctcccacccaaaattgaatttaaatcattatattattatttaaagttaatattgttctttttaaaattattttaactcattagtgtgatgccattagtgtgttggagaaagaacatgactacagagatgagcattttgattttattcagtcacatatccggaagttttgtttacagtgtatccttttaatacattggttggtgcartatttctaagctgtttgtttatttaagttgaggagtaaattgatgaacttagaaattcyataaacttttatcttyctacctctggttagaaatttcattttaattcccaagtgtcttggtattttgagatacaaaagcaagtactgaaatatgtaactttgatttgatgtgtttaaagtactatgattaagaaaaataattctcagacttatgcagaaaattctaacaagttagcattgtaaatattctcatttaaaactggtgttcattacttgggggtgggtggtagggcaagatcagtgtttgggtttgtgtgttcttatttttaatatgtttgatatgttaatcatctccagagt

SEQ ID NO: 1760 - DNA, 600 bp, Bovine  MMBT19063
agtatcttaccaagcactcctggcttctgtggacatttargcaatttccaaccttttataatataaataaatgctgggtgaacatccataaccatgccttcgtgactttctctaattattaggaaaatttccaacagctgacttactgggtcaaaagctgtgaaactggatttaaagcttttggtgcatattgccaaatgcttaattccaggaagtctagacagatctgtgctctcactactggtttattacaccatttagtcagagtaaatgacttgtgtttttccctctctaataaaytccctaagaacaaatctttttaatatcttcataattcccaatcagctttcttaaactgtgagattgatcagtgaggctcttctatttattctgaaactacagccccctgggaggggaaaagagccatgaatttgggactagagaaccagattctagtcttagcacttttacaaactttaatttggcaacttgactaccttatgtcttggttttccctgcccaaatgaaaagatggtacgagagtctctatagtacccttcactaagtaaaacaataataacaacaaaatctttacaagta

SEQ ID NO: 1761 - DNA, 600 bp, Bovine  MMBT20300
ctcaaacagaaaggctccctgtgggtgaaaaggaatgtgtctctgatctcagtggcattgtcctgggaagaaattgagatggtgtgtcagaagacctgcatttgaattccaactctggtatttactgtcagtaagaagtaactttttctgagctctggctttttcacctgcaaagtgagcataacaaagcctggctcagaggggtctgggaaagactttyaagaggacaatatatgtgaattgctcattgtaactcaatagcattttaagaatattagttgttggaawgtattcttttaygttgaaaggagtttgggttttggacttgagtacttagtttagttaatctcttgagcctaaggatcttcatgtactaaacaataaaaagattgcaacgtacttttgctgcttcttgtaaggattaaagaggataaagtatgaactgcctctagcaaaaaccatggcaatgcatgtgcttcctgcaaaagcataactctttcttaaattaataaaccatcattatttaaatgttactcraagtgtgtatttttaaataaagaaaaatcaaagaactgcccccactcaagttctgacaaatga

SEQ ID NO: 1762 - DNA, 600 bp, Bovine  MMBT21524
aagccagatggaagaggtgaagagggcaaggtctggggaaagggcaggagctccatgccccctcccagcacctccacatggtcaccatcccagaaccctctctgaacccagtcctcttggatttttatggaggcttccttaaataggcatgattgattaaatcattggccatggattactgattcaaccttcagcccctctataatgaataccctctataatcacaggactggttcccctggcagtcaacctgaatctttaagtgtctccaaaagccrcctcattaacaacaaaagacayctgtaccacactcagtacttaggaaattccaagggttttaggaaccctgcgccagaaatagggaccaaatacttactgcttattataaattacaatatcacatctcctctcagctactgttttcctcttagtgctttgttgcctgctattatccccttcaatgtatttctctaggataccgcaacaggcactttctccttcttattgcatcccrtgggggaaacgggggtggggtggggtggacggaggtgggtgtgaccacaactgtggcgaaaaacacaaaattcacgttaaagcgag

SEQ ID NO: 1763 - DNA, 600 bp, Bovine  MMBT21350
tctcttaatctagctaaggcatatccaaaataaaatgtaaagaagaaaaataaaaattgtcttcatggaagcaactggtcttccttggttgtactgagttatagttacgctggggtgaaataattgatgctgctcaatgagaaaaccaagtgccctcagaacaggttgatgtggcagacactgttgtttgcccttcttgcgaatcaggtagttagcttttgactctgtttagttcttgatttctaatactgacatgccattctgatcatttggcaaaattgaaaatcctttccrtgtttygacaatctggaaaaggtggccattttaatgtagtaaaggaagctgtggggttaatttcactctgatgatgacaatactctgatagcatttaatatcagtgctccttcacaaaactcaatgtccataaaagtacagagttaaaaaaaaagactcctgctgccttccttaaaggcctgttgtgacagtcccccggcccatttctttccctctgtgtccctcgatcgttgtttgtgggacttttcccctgagaaggcatttgtttcgattcacaggtagtgtctgtgataaaatagaactgct

SEQ ID NO: 1764 - DNA, 603 bp, Bovine  MMBT19115
  misc_feature (1)..(3): n is a, c, g, or t
nnnctttrctgagcttggggaaagctgtggcagttacaaggcacattttggtcactgatggaccgtgacattaaagtcagtaaattccrtttggagacagagattcccagaccttactttcactaggattgargaaatcatagccccwgtccaaaaagaaaaaagaaaaaaagaaactacacaggtctctttcctgaagagtgatattctgaagggagtgggaaggaactaaatcaactaattatgtgtcagatatttattaagcatgtagtgtatgtaggtgcctgagacatgaaaatgaayggtgaataatatattggaggtcttgtccacaaggactgaaatcctcagaccccatgtacatgtctcataagtgccagcacctaattagcttgcaagctaagggcaatgtgctggtcattgcagagaaatacaaatgaatgacattatatatgtcttcctagtytctgcctcttcatcacagtggctaccatctctttcaggttttccatgaacccagccctgaactaaacactttagtctaatttaagccttgtataattgtatcaattattcagtatttatctgatgtgacaggtgagg

SEQ ID NO: 1765 - DNA, 599 bp, Bovine  MMBT19152
gcacagtaacttactgcagaaycgaagaaaggcgttcaaagagaggtaccttcagcatcacactttgagaagtagtgagagtgcaaatacttttggtgacctaatccccattccatcccctttaacttayaccaacaatgttaaaaataatttttaaacaagaacgcatataaacctctgaagaaaccagaagaaawagttcaattcttcccctatcgcatgttttcatgtagttttatttcacatttggaggtgatattattccattaaacttagtagcatttggtcttatactamgayaagatataaaagtagaagggtccttccaaaaatgtcactgatttgacaattttagtagtttcaaggtttagaatccaagaagtaagcttcatagatcaacattgtgatttaaagaagaaaatctaactactttctgtgggcttgtttattttgttcaagtatgaggctttatctatgttttctttgctagattaaagccttgttttccatctgttttagcctcttgttatttaaattgcattttagaagaaagagtagatggtggtggttttgctttacatcagctgatgcttcacagt

SEQ ID NO: 1766 - DNA, 600 bp, Bovine  MMBT19173
actacctctagcgctctgaagtaagttcacagatgcacagacatgctgtcccagcaaatgtgaatggagaggcagctgggttgactttgaattgtgtatataccctcatgctttcattcagagcctataaatgttttctacttctccctgaagggatgaaatgtcrtctaactctgagtctcacacagctggctcagaattgaagcatcagcgcaccactgtygagatctaaatatttatgccacctccttacctcctgtacatttaacaaacaaaagctcttacattttagacagtaaytttctgagagagggactatattttaccaaaatttaaaggcagacgatccaaaccctccccaaacaacaactgccggccacgatgaaaggagctgggaaacattaaggactttgtgcaaacagggaccaaagcgtattcgtccctgtgaccccggctccacgcccgctgcctggcacatgaaggcagatccataaatgtctgctgaattggatttctcccactgctgtgcagcagaaccagctcagccatggggaacagcaagcaaatgggcttatcacccgctgcttcagaacaaaatga

SEQ ID NO: 1767 - DNA, 600 bp, Bovine  MMBT19172
caggtgctaacttcacttcactctgtaattctcccctgtaatttcccccctttccctcacttctgtaatgctggctcactacctctagcgctctgaagtaagttcacagatgcacagacatgctgtcccagcaaatgtgaatggagaggcagctgggttgactttgaattgtgtatataccctcatgctttcattcagagcctataaatgttttctacttctccctgaagggatgaaatgtcrtctaactctgagtctcacacagctggctcagaattgaagcatcagcgcaccactgtygagatctaaatatttatgccacctccttacctcctgtacatttaacaaacaaaagctcttacattttagacagtaaytttctgagagagggactatattttaccaaaatttaaaggcagacgatccaaaccctccccaaacaacaactgccggccacgatgaaaggagctgggaaacattaaggactttgtgcaaacagggaccaaagcgtattcgtccctgtgaccccggctccacgcccgctgcctggcacatgaaggcagatccataaatgtctgctgaattggatttctcccactg

SEQ ID NO: 1768 - DNA, 600 bp, Bovine  MMBT19092
acttcttttgtagcctaactacttatcattttaaattaaaatacacgttttattctgcctggaattttaaaaaagttaggtaacctatttaattaaaaaacttggagaatgaactagaaaatgttttatagggcatttttttgtaaactgatttaaaacttgcatgacttccttcattatgattatactgacaggaaacttgtgttgtctaaattctggaaaagatacatacaacttgaaagaaatattaattttcatccagtcaagtaattcctcagaaggaggaatagctagtctgtygggtcttgtgacttcagtggtgcctttgtaatctagactgtcaaggccaggagattactgtcattttgcattttgtgtattttgaggagttttaytccattttcattctcaattcctttccatttcataagccacaactaattatcttaaccatttccactagtaagaactgrttgtrgytgtggtgttacagatcttgcctgttttctttccaaatttcttatccacatgcttcacgatagtctctcgcctcttctttttgcccccattctctcgttttttgacttctgaggactcctt

SEQ ID NO: 1769 - DNA, 600 bp, Bovine  MMBT20085
caactgagcacacacacacagatgaaagtcaattctaaatacaaatacatggaaaggcagagagtcataaacagaaaaacaaagaacaaggtctccattgtgagtacatccaggccagtgcactgtgttaagtcacaagtactttgagctttgctctgtatcatatttttgatatggtgatatgtacctaccatgtactttgaagtgtactgataatcaaagagagaaaataatcccgtaatagaagagagmacacactttcagctacttctgtgagttaataaataacctggagctttyggtcttttaacaataaagtttctaatgttttccttctagaaattagatacaaaagtcaaagttttgctgtccagtgaaaccagccttgttttaaaaaagagagagaaaaaaagaaaaaagaagctgtttctaggcaaagagcagaggacgtgggaataacatccttcattcagcttcatcccctcaaaagctcatttgtagaaccgggtaaacacacacgttctgcattctatttttgaaattacgttgaggaatatacagagtgttatctgtaaaagaagcaacttttgaaactttagt

SEQ ID NO: 1770 - DNA, 600 bp, Bovine  MMBT22504
ctcctgcctggggaatcctgtggacagaggagactggcgggccacagcaacgtcaccaaaagtcggacaggacggagcgacttagcaggcacagcacacgaaccttctctgtaaattcaagtcaaggtcgtacacgaattctccaggaacatcactgattctgtaacatgttacactcgctcccctttctagggtgtgattttaaggtcttgattgtccccactgctcaaggcaaacgcractgtgtttaatgttacactgaaagtttgaaaaagaactgtttgtgtaaatacttactayatagaagcaaaatgaccaaaggccgctatttttcctcctcttacgaaaaataaatgctaycacgtacatcagggagacaagtgaagccgcataaccaagcgtcaggacaacctgaaaacaatacaaagacacaccaaagtcaagaaaatgaaacattaactgagggagaggttacaagcgttgctgaagcttctcgtcacacatgctctctgcgtggtttctgtttgggtgtgtgacagaccaagaatggaaacggcactactgtacgaaactgcatcagtgtgaaagtttaccaggaat

SEQ ID NO: 1771 - DNA, 600 bp, Bovine  MMBT22486
tggtgttagttctagaaggtcttatgggtcttcatagagccattcaacttccgcttcttcagcattagtgattggggcatgagctagcacatacactggtgctttgatctccagtgggaaccatttttgtacagtgcaacagccctggtctgacaaaggtacaaccaggagtttagtcatctcagggtgaagatctggttaccctaccaatcaaacaacctagactagcttagcagaagttctggttcaagataagagtaatctagarcaggtggtatttagataaacatgaygaatatyatcattaarcaggtttrcatgraatgctgccagtgtctaatccataattctttgcctttatcactttggtgtatggtagtagttacctgtattccytttcttaaagtttctttctttctttttttaatttaaattaccaaagcttggtttgctgtctctagtgtaactcataagtgctagggaattactgtcccttggaagaagtcttcaaccaatgactgatcctagtcagagtataaacaacacaactgtctcaaacagtaagtgggaaagtcactttatacaattcttttacattgg

SEQ ID NO: 1772 - DNA, 600 bp, Bovine  MMBT19843
tctctaggtaagaatactggagtgggttactgagccattcccttctccaggggatcttatcaacccagagattgaacttgagtctcctgcattgcaggcaaattctatgtctaccatctgagccaccagggaagcccacyggaaaatgagtcatgatcatatatgcagtcgtcactcaaccccccctcctcttcaattacctgctgactctggacttagctccatgaaaactgtgaagtcagtcaatttttttaatgtgttmttccactccccttttcaaccaccattgyccctaytctyattcttttctcatatcaggataccttgtgagtctctaggtattcagtttcatctccatctcccatcttgtgcttccttcactktattctccctgctgttgcatgtgaaagatattattaggtgataygtaaatatcagaaattgttatcctttctaaggaaaaaaaaaaactctactggtggacttacatttatataaagtagactagcagatgataattttggcagcaagcaatattacacgtgtctcttatccaaacagaataggtatcctctagcaaccaaagacaacccagatctt

SEQ ID NO: 1773 - DNA, 600 bp, Bovine  MMBT20106
tacaatgttgctttttaccaagtctcatccttggaggactagccccccaaaaagtagccttcaaatacacactaaaacatacagcaaatattcagtaacagcagcaaacgtatcatgatgcccaaaggctttttgtatgtgtattagcaatgcactaatttgacattagtcaaagcactgatctcaagcaaggttttgggtataagattcctacagtgctggcagagttactgaatatacccatgtggctgactctttaattgatttttgcttgtcacttctattctatccaggtatgmytctgagttgcttttgtgctgacatctaatttttctacggtgcaatcagtttctagtaaacacagaaaaaaattaagttcatgagactgtatgcaagtaccactcaatctccaattcatactcacccaaaaacttcacatggtatttaatgtgagtgttggataccaggctcactttgggcaaaaaacacatggaaattcttgcctcatgacagatcctgtcttcagtgatcattacataatctggtaaataacttttgtccaaccaaatgaagtagatgtaaagcaatactactactcct

SEQ ID NO: 1774 - DNA, 598 bp, Bovine  MMBT21585
  misc_feature (1)..(21): n is a, c, g, or t
nnnnnnnnnnnnnnnnnnnnnaaaaggattaaaatttatttgttgcagcagtttgggtccaaaatctatgtctttataaccactctataaaatgggttccttacattttgaaacttttctgtaaatttgaaacttatgtttttcattacgtggtgtaaaaagaaacaaaaacaatgacttaatctctcttrttttgtgtttctacacttgttcagtatcttttcatgctgatttttctcctactagagagaactagtctggaagcatgtacacttggcagacacagtactttcttttatycccatgtttacaagagawataaaataactcactttactcaaaagaaaactaagataactttttgttttgacttgttcctacttaaggtatggatttgatttgtaaatgttccaaacaycttgaatctgtctttttaactgattgttctcctttttggcgtctccccccccacygccaaacaaagtttaagagaatatattctagatttgtctttagacccttgtggatatttttttcaaggagaacttcttttcttaggagtttattgaacaaatcaaagttttggggaggacctgct

SEQ ID NO: 1775 - DNA, 600 bp, Bovine  MMBT19333
aacagtattatattgaagatctccttttgcaatttgtgtttttactcaacattaaattttgacatttatctgaactcatgtacagggaggtactaatttgtttttgcttttttgtctttttatacattgtatggaggtatgaattatatatggtgagacatacagaactaaactgttacacaggagtgagttttaacaaatgcatgtacccaggtaaccacacttctatcacaatgcagaacattcctctccccagaaagttccctctggtctccttccgctcactccctactcctctcyccaggtaaacactaacctgctttctgccataacaaattaattttactgattctaaaacttcatataagtgaaatagtacagcatgtctttttttgtgctggtctcttttgctcagcgtatttggggtgttcatctgtgtaattgtatctcagtagtttgttcacttttattcctgagcacgttccattgtatgacaacatcacattmtgygtgatggatgatttggggccttataaataaagacttaggaacattgttgttaartcttttgcattcaccctttcatttgtcttcagtaag

SEQ ID NO: 1776 - DNA, 600 bp, Bovine  MMBT22100
tgctcttttattattatttttatgtttttatatatttgcaccaggtcctagtcatggcatgtgggatccctgatcctggggaatgcaggatcttcagctgtagcatatgaaatctagttcactgaacagggcgagaacctgggccccctgcattgggagtgcagagtcttwgccactggaccacccaggaagtccctgctctttttgcttaatgttctctgatcaaggaaatagtttccatgcaattcagctttctgttttcttccaatagttkgcttagtttacatgttttcatacaaytggcttggagggagtattttgacacagacattttctcatttatcagaargctctgractaggcagattycaggctctgtggggagtgagttataagaatgtaagagaagaggatttgcctttatttgtggttatggaaatatttctgcaagactttcacaatgaactttgtcctacaccaactcttctctctcgactgatgcttatagaaactttttgagcatggcaaaaaagaaagtcacaggtattccaactcctccattcccacaactctcagacactatcacatacactcccaatc

SEQ ID NO: 1777 - DNA, 600 bp, Bovine  MMBT23157
agggtagagggttatatatgtaaagaatatgtattttcagcttcttctgatgtttcctaacactcagctcacaaagcatcttttgtcttacctctcggtgcctatcccggtctcgagacttctctctcacccaatcaattgtattgaaatcatcataggtccccacaccagggattggctcctccaagaagtccatcatcctatttgaagaacctattcctccaccattgtatgacctactctctggattgaacagaaagaagacattagtaatacagacactctggacatttttaatayctcttttttgagcaccaggaggtgagcccttaaactatcagatgactacagttagggtatgttgataaagcagaatgatcacctggcaggaacatccttcacattcagaggtttctgtggtttaggcacaaaacgatgagcatctcgaggcagtgtgaatggaaagggacagatgagaatgacagtaaaaagggagaactgacaggagttgaaatacagggtaaaagggtgtatgaaagaaaagacacgagcttggagtagttcagatatttcagtttatgtttggggaggaagacaaaa

SEQ ID NO: 1778 - DNA, 600 bp, Bovine  MMBT23188
gtccatgcttagggcaccaataacaggagtacaaaagagagagagaatgaaagaatctaataagaagctattttattttcaatgtacaagtggagctctgagtaatcctttaaaataagattttatttgcaggtttagtattgttttcatttggaattaggtatgaagaggcactatgatctttccagcacttaaagctacaaaagatcctgatccatctgggtgcctttaggtaagtccctaccctttcctgagaagaaaatacagaagtcaagtattatggtgcccataatgattaaygaccaaattgttggtgccacatagtataaactccactccacccaagccagagaaatacagggacaaatgatgcaaattcaccacccttctcctgtcatctaatcaactccataaagataaaaattgagcccaagagccataacttgaatcctctcctattattctactcttccatcattctgatgtttttatcactttaggtgttcatgtgtctaaaaaaaagggaaaagattaaatttcttgtttctaaagtggaggaaattctagtggacattttggtgtccaaatttccagagaaga

SEQ ID NO: 1779 - DNA, 600 bp, Bovine  MMBT20108
gttcctctgtccatggaattttccaggcaagaatactggaataggctgtcatttcctgcattaggggatcttcctaatctagggattttcaaacctgcgtctctttcatctcttgcattggcaggtggattcttcaccactggcctcacctaggaagccctatctctgccttacttacagttcacatctttaaaatccatatgaacagaccattgaacagtactgaaattgattcagaaattttaaaactcccaacaaacaaaratgcaggactgctttaacacttgaaattctcttctygmaaractagagaggaaaaatgctggttcctcaactctccccattctttgatgtcccctgaccaaaagcatagacatttttttattttaaggattatattactatttaccataagaaacrgaagagaggtaaaacatctttaaaagttacagcgtccggggctctggagcctgtgtctattttgagatggcaacctcagaccctgtgggcatctgtctgtcctgattcctgaggacgcggttcacaaactcctccccttctttctaactcctaaacgtaaaggacaactttcctccttcc

SEQ ID NO: 1780 - DNA, 600 bp, Bovine  MMBT21726
ctgtgtgaaaccatctccaaggctacagcctactcgggaaaggacatttgccagctgcttatcaaatgttccaccaaaacaaccactcaaacagaatgtattagaccaaaaaagacagctatttctgatggcagataccaaaatccttcttgctgacagaaacttgctgtccttagaaagcagcagatgacggatgcagactcgaccaatcctttccacatggagctggctcgcaccttaaaaattgagtgttattcactttaaatgcaaaaatgaacacagaaatgcaaaaaactagcyccagggaagaagttagtggtctcagcgacacacaactygattgttttctatttctggcaggcacaacataccagggtgttctgttgggctttttttttyccccagaagacttacttcctaatatttagaggaaaactaaacaagatctccccacttcctggacttgtgtggacagctgtgccaataacaagcgttattcctggcatcaggggccttgcaattcctggggactcagggtggagacagagaggggtgaggagcagaaggcaagatgggacccaaacagaccacaatgttacc

SEQ ID NO: 1781 - DNA, 552 bp, Bovine  MMBT18896
  misc_feature (1)..(1): n is a, c, g, or t
nataggaaatcgacttaactgctcatcacactatttaaaacaaagtaaaaaaaaaagttttcaatttagatttcttttatcacattttaatccaattgtatatatgagaaaataataggcagcttatgacaagtttataaagagatcttaagtattgccagcatagctattaagtattgccactcatatcatgagwacctagattgtgtacaaagcataattttaattgttttgtgagataaaaactaaatatagccacaaactcaatttagtctgaaaaaaattaaagcattttaactgytgatttcctcactaagacaaacagagtatccaggttattttttattaagtctaacttttacaagtaaagaaaatgataatcaaataatccacttcttgagacactattcagtcaaaactcaatctctggacaaggtttggaaggatacactatctatattttatgttagtcttttcagcttcagcatttataatatactggaggggggaatctcatctacttactctgggggaaaacctcactgatgatca

SEQ ID NO: 1782 - DNA, 598 bp, Bovine  MMBT22051
  misc_feature (1)..(93): n is a, c, g, or t
nnnnnnnnnnnnnnnnnnnnnnnnnnnnnnnnnnnnnnnnnnnnnnnnnnnnnnnnnnnnnnnnnnnnnnnnnnnnnnnnnnnnnnnnnnnnnggggcgagaaggacccaaagagtggcttcgacattaaagtgccgcggcgcgctgtaggaccctccagcacccaggttctcgttccttgctctactgagtrgggtgacccgtgagctggggaggtggtgggaggctgggagtgaaacgacctcaccatggccaagtacagtctgggtctttttttgctcctttattgcttgtccaagygaatctagggtatagacaccccatgattcccaggtttggtcatttgcatgcagaacttaatttgactgcatcaactcctattcccaaaatgtgggtgaaagtctatgtgtccatatttacactgtgtttcctggtgtttaaatgtgtggttataatttttatgtagggtctmaaaaatgattattcctaaagataaaatttttggaaatttgaaaacatagctttgctatatccctggtcttcagctttcactgctgktctttctcctggcacactcagctccctcctgccccttcaa

SEQ ID NO: 1783 - DNA, 600 bp, Bovine  MMBT19531
atgaatatagttcaaggggtaagtaacagcaccacttgccttaactttgagattttaatttatgacttcttaaattttgcatctttcycaaatatctgtttgtattttcaataataccaattccttatagtattaatcctataaaaagacttcttwaaaatgcatatgtttaattatgtgtattattatatgtttattatagatagtgattctcctaaaataaatgtgattactttttgaggcatatgttcctgtcagtgtatacaacatggaataatggatgaaattctacaacaaaayatgtttcaggtacaaaatagtgaatggaaattactatcgtcgagaacaacaacaacaaaacgtgttctaaaaccttaagaccttgagtacgtttcctaatcccctggtgccttttaacaagtgaaactattttttttttataaaattgtcaatggcttttctttagatttattgggatcctgcttaaatggaatatctgtcttttgtgtttcaacaatatccaaagctttctcatgtattattttcccagtacacatgcacacacatgaaaacgcttacagagaagttcatcagtgtgaa

SEQ ID NO: 1784 - DNA, 601 bp, Bovine  MMBT19833
  misc_feature (1)..(1): n is a, c, g, or t
ntcttctcataattaggagaattcactgtgggaaaaactagtaccgtcagggatcatatctagattttgttcatctaggcatgaaaaccagatatttctttaacagaattcaaaaacggaatcagttttttattatgaaactgaatcaccttgattatgttgttttaaatgttgagcataatttttaccttaattaaggtaacatgataagcttgaccttctttaacccctaaagaattaaaaatgccaatattagcgtttttattctagttaatgtatttttttctctcttctactttgyaaacatgatggagaatgtttgttgaagagtattttgggaatttctctyttcatttttgaaatctaattyttaatgaaaataaaatccccaatattaggctcattattgctgttctaacattggcttccacaatcatattccacaatcaggaaaaaagagaaagattacataagatcaactttatatacagcatacaattggcagaaattagtatctaaaataggatgtggtgggtcrgtttggggttcagagctttatggctttttaattagtcttggtgcagagccttttcagtttagt

SEQ ID NO: 1785 - DNA, 600 bp, Bovine  MMBT22049
tttgcatttaataaatgaagattattatctttagtatatgttaaagataattagtattttcattaaaaatagaaaatgtctaatactttttgagacattggttaaagcttmttcagccattgtcatttaaatctrtcttgttaacctatttttattcttcccacagtggaatctctagcactatcactcatggctggcatggaacaaagttaaatatcttcagtgtagtaaatacctcagatttaatcttcatacatatacatttccaccatatggagctaagaaatgggactcttattytggtttatttttaaactgttgtctactgtctaaacaagtgggttttatgtgtattctcttgggattattggttggtatatagagttatatgtataaaactttatcaatgcaaagtgaatacagtctgtttacacttatatttcctactgtaagcaatagctttatggtattggtacctttaaatgtaaaatatatcatttttgaaaatgtaattaagatttaaaataaagcactttattcccccttttgcttagtcacagaagttttttatagttttacatactattttccctaaaggtt

SEQ ID NO: 1786 - DNA, 600 bp, Bovine  MMBT22113
aggaatacaaagatgaaaagttacgggcctcagggagctgagtctcaggccaacaggccccaaaatctcataatgtgaaaatccaatgtcatacttacatcttttgttaaagataatactctaaggtttgttcttcagaagcatgaactaacagcagatgatgagccaacagaaaacatgatttcctaagatatgaaactgcctgctttaattctatcttttccataagcaagtgtataattatctccccaaaggctcagagaaaacaagtggcatttgtctatcacaaatggcaaaaayggtaatagcaatttttcactgttgtttagaaaccgatttggcttaggatttaaaacagtcttaaaaaaaaaaaaggactcattctatccacccagcactccaatatataagcgatagtcttggtcaagtgtgatagtttctctgaactctaagagctgtgatgaccaggtaaaaatcaaaatgagcaaacatcacatttacaaagaatggtaatatcaaaaacaatttttgctagaaactaacacaaacattgtaaatcagttatactccaattaaaaaaytaatttaaaattaaaaaat

SEQ ID NO: 1787 - DNA, 600 bp, Bovine  MMBT18615
taatttgcgcatactctatgtatgtttgttatttctcattatttagggacctcctggcttacccggtctcaaaggtgaccctggctccaagggtgaaaaggtgagartaaaataatgtattattacactgttgctatcctaattgcagaggctacrattatgcacattaaaatcactcaaaaggaaatttcaaggaattgctttgtcattctaaccaaggaaaatgctgtcaatccttagcttccaagaggaattcagaaaagagaaaakaatgatgaaaaatgtaccagaactcagtgytatawtagtcaatgttcctttgtaggaaccatatggagaaagcatatggttatactaaaataactattcagaaaataaacagaataacaaagtgcccattttttcatgtttttaaacatgaaaataaaaattttaaactagactgtccttcagatggtaattttaaagatatatgtgctctgttgcatcaaataaagaaaataaaacatttttagagtgacattaatatttttgaattatttttgtttgtaaatatttcttgggtactgaaaaatctctgaagagtagaactcattttat

SEQ ID NO: 1788 - DNA, 600 bp, Bovine  MMBT20081
acatgtgtgtatatgcattcttaaaaagaatggaaatcttgtcacatgctacaatacggaaggacagacttaatatgctaagtgcgagtagtcagtcacaaaagacaaatgcagtatggtttcattcatgtgaggtatctagtgtgatcaaattcataggaacagaaagtaaaatggtgcttgccaggagctgagggataaggaaatggaaagttattgcttagtgggtacagtttcagttttgcaagatttaaaaagttctggagaytggttgcataacaatgcaaatatacttaacayttttgaactgtgcacttaaaaatggctgagaaggtaaattttgtttttttgtcacaattgaaaaatgtttaaaagataaatttcaaatttgatctgtcagtctcagttacattttcaagtgcttggtttcaattctgcagtgcagctctggaatataaattatgtgagtcgttttctgacagtaagtatttgcctacatatttaattgtaaagaaatgaaaaggtagccaatagatcaaacacagaaagaaagaggcacggaaaagataaaacaaaactggtgagaaaatacaggtagtg

SEQ ID NO: 1789 - DNA, 600 bp, Bovine  MMBT20899
cagcatgcagatacagacacacacatttatgtaggaacttgtgtagtttttatgaacctggggttcatccccrgcaaaagtcacagaaatttgtccattcaaagagttgaggttggtgattcaggtcaccctcagagactttgggtgactgtggtgatagccaaggaatcttagagatttctgagcccrgatctcatctcgrcaaactccttcatttttttcagctgaagaaatcaagagatgatttattcagggccatactgtggagtgaaaaccaggtttgagacttaaacttgactyaaaycctctgtagactgttcttycsaaacactatgcttcctgccttgtaggtttggaggacaggagagttaaatacaacacatatacccatagagaacatagggagataagctttacccaaatacacattgggaacctcccaaacaacccatcccagagggcagacaatgtgccttctgtcagcctcttgctgcccacaatcctacaggaactggaagttctccttgatcctcttctcactgaagctcttggccagagccaccacaccccrctgtagctrgtagcacagggctacctggg

SEQ ID NO: 1790 - DNA, 600 bp, Bovine  MMBT20369
aaaacattttattatagaaaatctggacatctataggtaatttactagatttgagcctcttctattttcactttgttagtcaaccatctcctctaatcatcttgagagttcattatatcaaagagtaaactgattactaaaaatatggacatcatagcctcaaaaacattggattctttaaaaactgcacactatatataggcaacaaaacaacactttagaaatcatatcccctggtatggcatcacttttaaaaggttttaaagagttcgaataaaaaatctcaagcacagatccttyatgtttcccatggacaaaatgctattctttctattaatttcatttggctaagaatacatggcyaaaatgctcctcgcaacctaatgctttgtggttaagtgatatacttctaaaatctactcagtggcaatttttaaaattagtacaaaatcttctctatttaaagataggaagctatttcagaggaattctgtaataagtttgtcacatcacaccaggcattcaactctaaagctatattttacacttatggcgcagcaatagcaattggcaaattacactgtttaaaaaacattttca

SEQ ID NO: 1791 - DNA, 598 bp, Bovine  MMBT22024
  misc_feature (1)..(97): n is a, c, g, or t
nnnnnnnnnnnnnnnnnnnnnnnnnnnnnnnnnnnnnnnnnnnnnnnnnnnnnnnnnnnnnnnnnnnnnnnnnnnnnnnnnnnnnnnnnnnnnnnnntcataccagtaactatattgaaagactagtgtataaaattcccaaaaataaatgactagatggaagagcttcagatgaaggaccaggtgtttaatcactgactttacacaatgaccttagaatacactgcataaacagctctgaaaacgtgagaacagtgagaatgtattatttattgatttgtaattcttttagtaaatacygactctttaggggaactatagattttctcatgaactttaacaacccacaggccagtagagcttctgtttccttttcataaatactgttgagttagcaccagcatctgcatgcgtattccagtcaggggtgtcttacagttgtgtgctctaaaatacagatttgttttttttatattgatcaaaaatgtatttttcagtctttggaatatgaagtttatttatagctttagttccaaaatagcttctgaaatgcattgcccctgtttttagttgtaatgcatgtgattatactttattg

SEQ ID NO: 1792 - DNA, 600 bp, Bovine  MMBT19153
tgtctctaaagtacaacttaaatcacatgtcagagtctgtagtttacttggttaaaaattggtcacatactcaatatgatatgaaactatgtctagtatgacaaatattacttcttcaagaagtttacaatttttccaaatatagtcagatcttgaggtgtttccactaataggctgagatcagaggcaagaaatatgcaaaattcatcacatttttctttgaaaaagagcaagaaaaaaactaactacacatgtaatacacatacacaattatatagaaagrcacatagacccttacgyacacacttttcttttgatctgatattaataatagcaaactcaccaagctccaccctattatattgcaggatcaaccagggaagtcatcctttaccagattatctacttaagaagagcaaagaatttgcatatttcatggaatcaatggataagtaaatatcttgcacagagaatgggcctaagagatcttgataggtaatgtttcagattttcaaaagacaacagattctcaggagtcctattcaacattactccaacagaatgtagctctccaataaaatacctgactgaaagccatta

SEQ ID NO: 1793 - DNA, 600 bp, Bovine  MMBT23166
gggatcaaacccaggccccagcaatgaggaccctggaagtcagctcaaatgtttcagctggagctgagcaagctctcagcccagcctggccctaggcctgtccaggatccatctcccatggctaacccattcacttgaacatggccagggaagacagaggagttgttcccaaacaagtaagaaaagtggtttctcttacctgctgttttcttactctgctgagcagagatacttgcttttgcctgggagygcagctgtctctgagcctgctctgggcctgatgttcctggtactatcttygaacgtttttttccctttacaggcttcttgggcatcacctttttaacgtgaaagtcacatacaatcagtatccatttctcaagtgctttagagcttacaaagtgttttcttgtgcagtaccttaattaacgtcctcaacaagtctgagggatcattatrttacctgtacctaaattacgaagaatctaggaagttagaaggaaatggaatggtctaaatgaagggcgtttccaggattagaacgcttgttttcatgctttttccagactgacaccctcaccaagagaaatctccaagtga

SEQ ID NO: 1794 - DNA, 600 bp, Bovine  MMBT23250
tccatgtttctaatgataaattaaagaaaaccttctttgatcatcactcgaagttgccagtgtacaaactcattaccccactagaattcagctgataaatcagaattcaagttaatgaattagaattcaagctattcaatgaaggactgatagacttttaaaacttaacattttgcaactccaaaygaaaaaaataaaacaaaaaacaaaaacttggatctaaccaatgatcrtggatggatgctaaaccactatgtgaaagttgatagggaaattctggtggcagaatcaggctcatayatttgagaccattgaccaaatctagcatcaaaaaagtgggatagacagacgtttgtgccatgagatgtaattcaatagtaaatatacagcagtacctataaagtattgtttttcaattttctttcattttttaatcagtatagtttatatatagtaaaatgcacacatcttaaatgtacaggtttttcttttttcctagaaagttctctagtgcctcttctaaggcaacctcaaagttgcaggaaacatggggggcagagaaataagttaaatgacatcatgaggaaacagtcaggcaga

SEQ ID NO: 1795 - DNA, 600 bp, Bovine  MMBT20372
ttgaaaactttagcctttagccacatatggtttagcagttttcccagggctcagtaaaagtgtatggaaagttgcatggccttcattttcgacrtgttgattactggttcatcagttgtgacagatgtaccatgtccatgagggtgtragcagctggggagctargagaagcagcgaaaagctacrcgtgagctccttwctttaaactccactctgtttttctgtaaaccaaaatgttccccaaaatagcctatgaactaacacatgaaagtaggaagcaaagacaaaaagtcagatgcyrcagtttggatgttttcagcttgttttctattatttgaagttttaaatgagttgccttgtgaaaagtaggacgttggaaagatttctgcacccttatttttgcttcgtgagctcttaagttatcatcccttaatatgttcagataattgttacttgctttgtaattaaggtgaagggcagacagatgctgtgtcaggaaagaagcaaaggttttcgaagcttcaagctgtggccccagacaagtaacacccctcgagttcctaggagtgctgtctagacttttgtggcactttagaatcc

SEQ ID NO: 1796 - DNA, 600 bp, Bovine  MMBT19077
cctgtgtctcctccattgcaggcagattatttaccacctgacccaccagggaaacctcaataactagtactattaaaaaaatactttggtagcaaatgtttatctctgtcatcttgattaaatgctttctcagattttatggcagatataaactgacmtagtatgtcttagtactagygaggtaagcatttcacaaatgatattgatgtacaactaaatgttcatgataaatatagagtattcattttaagcactaatgtttttcattgcattgttgtgaaagtagcaaccatcaataayagggaaagacagccttttgtaattcactgcccgtgagcataccaggccattggaaacaacacgaacacaggaagcatatcttttcatccactgttttagcacctacgtctagtatggtgcctagcacataataggagtctaataaaaatgtgtcaagtaaatgaatgaattacgtatragtttatttctgcccccagccacacattatatctctctctgcttatgaatgcaaacctaaaataacagytgttaacttaggacagtagcctttactttctgatctggggaaccatgatgctt

SEQ ID NO: 1797 - DNA, 600 bp, Bovine  MMBT23200
aatacttcctgtggctacttttatcaagtttttatcttatgtgtatatctctgactaagttagctcctgggaggttaggagaatatcttaaaatctctttgtactctcattatttcacatggggcttaggagtttggtgacattttaggaagcaggattttcagaaggctaaacaagaatggattgaaaaggagagactaggatgagggaggaaaatttggggaaattgccttatttttcaggcatgtgaagtaatatgggtctggattagacaggtagatatggaaaggaaaaggaagyratggattcaaaagaagaattatggagagttggtgatagaygaaatacggaggaagagggsgaattaaaggcaaatctgaagttttgagaatagagatctagaaatgaagaagtagtggagagaatcactgttggtggaaggaagatgagtttggttttgaaatgtaggactagaaattagggccacagatgttgatttgggagttatggcatactaaaactgtagcatattagggctagaagggacttcattatcatctagttcaatctccagaggctccaagagattttaacttgtac

SEQ ID NO: 1798 - DNA, 600 bp, Bovine  MMBT21596
tggtggagtaaggatcagaaaccagtcaacagatctcatcagcccacatttcagtctctcatcttatacttcctcctgtgtatctcaaaagggatatgggtttttacagttagagatctggaatagggactattggtgttgaatctggttccactacaaccctagccacaccctgagcaaattgctactataaaattacagtaagaatccctattgcttcttttcttcatcattaggttactgttatcmttwttctctagtctctttccatcccagttgctacctaccacacagacctaytgggagttttaaatgccktaatatgtataagacacctatacaataccagttacataatgggtgctcaataaaggccattcttccttcccatcaaactttattgtgctatgaaaaccttctttcaggtcaaagtttattggtccagtacacaaatgatgattgcttactcatagaaattaatcatttctctagtgttggccagcagtgtttgaaaatggtatagacacaagccccagaaagaagccaagatggcagggctatgtatctcccattagcccatccatattttaaccaaacgac

SEQ ID NO: 1799 - DNA, 600 bp, Bovine  MMBT21309
aacaactgattcatttgaaaagaccccgatrctgggaaagattgaaggcmggagaagaggatgacagaggatgaaattgttggayrgcatcatggactcaatggacatgagtttatgtaggctctgggaattggtgatggagagggaagcctggtatgctgcagtcyatggggttccaagagttggacatgactgagtgattgaactgaactgaatgaaagtattggcttaccatagataaaaatgcttgctcttatttatcttattaataagaattggtatgaggagtgaaaaggtcaygggaagagaaattcttggagctacagtttcatagaaatctgggttcatataaactatcactttgagaagcttcctcagccaaggcctgagaaacttgttctttggcatttggggagatctccccactgcttactgttatcaccttgattcatgctcttgtgcttgtttgttttcttttcctgacattttggcatttctcatgtttgatgcatctcatactggtggtgcccttgactgctcttattcaacagggaagaattatttattataactgctcatttttgctttggcaaatctgaa

SEQ ID NO: 1800 - DNA, 496 bp, Bovine  MMBT18843
attctcatgggcgtttttacaggaagtaagcaaagtacacaatattgtgtagtctctgtgttagaaagtatgacatctcactttaaagaacaaaggttccctgtaaagataaacacctaactacaagctcctttaggaatcagtccaaagttattaactgccagagctcatctaatttctctaagttttgacaactaagacaataagctttagggttgatagcactaaagctacactggacggagctccatggggaaagagtacaggttttggtgttacatattcctacggtcaaacctyggcaccaccactcactaatgggattgtgggtgttactcaactttgcttaaacagctctcttattgtaaaatggaaataaatgatccagtctctgtgaagattacacaagatactgtgaagaatgcaccttgtgagtgcttaccaaatgttcattttctcttctctttctttctaaatggtcagctgaattaacaca

SEQ ID NO: 1801 - DNA, 600 bp, Bovine  MMBT21030
acagttcttagttcctgtacatttcttagttattgctttttacactttggtaaattatttctgttccctttgattaagttccctcatcaatataaaagataggatcatgatagcacatacctcataaggtgytctggacattaaattagtatacctaaaactctgtcatttcatwttataagttgtggctaatattaatttgttcaaaagttaagcaaaaacataattttgtcattctgtgagcttcaataattcattaatttgaattcaatttattcttygtaagttgaatatagggcyttggatatcatctgaagtkyaggttacaattaaattgctgattacagaggatcactaaagatatttgtgctatgtaaagaagtctattatctgttctattctagtttttcaatgtcagctgcaatctctctaaaaaagttgaagtcagcctttattttaaaagcactttaaacacttccgtgaaataatttgatgtattggtattaatgtaattctcatggtacagaagaataaatgggctgttaagaatattgaaaaaattagggaacactgaatttaaagcatcttcttcaacttttg

SEQ ID NO: 1802 - DNA, 600 bp, Bovine  MMBT18668
cttagttcccagaccagggattgaacccatgtcttctgcactggtaggcggatgcttaaccactggaccacagggaagccctggctttgtgtctttacacaggactgtggtaaagaagcagagctatggrcagcggcaccttctaaacaaacacagtattgcawgcagcagagcaaactcttggcacaagtgtcccaggcctccccaggcagcaccatgcaggatcatcacagagcaggtctggggcagcccagagatgtggaaaagagggaatgagttatcacctkcgatcctgtcttygcttgacaaaaatcaagtgacagctctgcttgggatgaaatgtggtggggagggagtggggggttgggatggacaaaatgcgtcttgggatctttcccctcctttcctggcccctggtctctcccttgccacattatactcgcatcctccagctgccatggctcttcactgtcctctggctgttgtcaaattcctgactgtcttcaccataatcttgtccaaaaaaattcaccatgattatggcgaccttacttctcaattcaaaaattaaaagtggtctgaaaaaaatttttttctgac

SEQ ID NO: 1803 - DNA, 468 bp, Bovine  MMBT19016
gagaccatgcagcctggcatttctgaaaggacaccaatggccttggtttgccaaatccttcacaaaggaacttgacaaaagtggtcaaatgaattaagtgcaaaygagaatttaatgtccccatttggtagtcagcttgtggggcgtgggggaagcctaggaccaaaattaaggtattccctcatttcagatgcacagaactgatgaattagagctataattcattttyggaaatcaaaaacaaacctgcagaaatgtcacgctgtagtctcatcatcagtctgtyagtgagctgtgatyctgcagcccaggacagtgatctgcacacccyctcatgaattcagcttccccagaaacccaattcctcacctcccagtgaactgaagcttcttttactggagcgagtatcttctaaacctcatctttggctgaaaatggaaggctgctctcactccacattccaggcag

SEQ ID NO: 1804 - DNA, 600 bp, Bovine  MMBT20182
gagaacagaatttagtcatttgcggaggggcaccaggttgggggagatgggtcatatgggaaatgaactgaaaatgtcatgctggtccaacagggatgcaaggacaaaaatccaggtgggctgtgactctaaaacctgtgttctacacttctctggtacccaaaccagaaatgaaagagtcatccttgattctgccttcctcacatttctcatcagttccttaataaatccccttgggtcaacttccacagtagatcccagatttgtctaytttcttccactcccactgtctctcgttaygctatccaataaaccatcatctctccccaggcccaaaacagcctccttcttcatccctctgcccccatatttaccatctaagatccttcctcctcaggacagccagcatgatattttcaagacacagatcgaatggaaacagtcttctcctcaaaaacctattcacagcttcccattcctctcaagttgaatccttacctctttggccatctacaaaactctgagagggcagaaaccatatcagcttgttctcagsgtgtactcacagctcagcatggtgcctggcatccagaagggacc

SEQ ID NO: 1805 - DNA, 600 bp, Bovine  MMBT21687
tttcagagatcgtaactcatgtggttgttcacagtagactggtctgggatggtgctcagatggtcctcaggatggtgcactgtggtttcccaaatgttaacaaaacaattcattggctacctccaaggagctccttgctgtggggcaggaaggaagcctgaggttcatagtgtgatcatacagtgtgttggcttcttgagctaaatcttcattctccccttctcgcctccttgaacctttgacccatcagtcttggttccaatctctaggttctagtagagcaagggtamtccctcttcyacgtgataggtattccaagaaagctatcctgttgactggtcctcctcaaggtacacatccccttccctccaaccattcttcacggatcttgctgttgaagccctttgccaacttggcagtcaccttccttctgacgctttccattgtgtggtggggtccttcctaaaacatgatgaattgcaactggctgtcaccttgacgtcagagataaaggcctgtggagaaggagacacaaactctgtgtttcayrtttataaacrgtaacatgtactcatagaagaatattgaaaaaacagaaaa

SEQ ID NO: 1806 - DNA, 600 bp, Bovine  MMBT20198
caccacccgggccttccgaagtagtgctgactcccctctggcctaagactggtccccacctggctcaggttcctgcctcgttcaaggccgagcaaggtggtgggatgagggtcgccctgtcacctcacccctgccccggtgtggtcctcagccagcagagcggtggatgaaggcacaggatgtcacagcctccctggtccagacgccactcctctggcaactctggaccccagaagctggggctgtagggagctcttgtcctaagagagtgttcggggcggctggtgaacacygtctgcytctgcagggctgagccggatcctgaagacccgtggggagctggtgaagaacaggactgtggactgggctctggcggagtacatggcttttggctccctactgaaggagggcatccatatccggctgagcggccaggatgtggagcggggcacttttaggtaatggccttggtgttcttgtgggcccttcagagtggaggagacacaaaagaagggctgtggtgtttgtcttccagaagaaaatcactgccaggaagcagtcattagatcccattgtctcaggcccagaagcaccctattc

SEQ ID NO: 1807 - DNA, 600 bp, Bovine  MMBT21824
attccacagctgtacagagtgcctgcgagtgactcaaatcagtctctcctcccttctcccttcccatctcagggaagatgaacaaagttgttgttcaagataatcgtggcaaaaaggcagactcgtcagggggtggaggaggggtctcttgttcccttygtaagcttcctcttctgtcagagatactgttcctttctcacctctcattcccagataccctcatcccttttataatgaaacaaggagttggtgctgaccttgactttgcagaaaaggtattttgctctgggccatctctayaaagactctacaggtttccgggttagggtcattctataagtcaagctactaactctggctggaagaggagaagagacctgggggcaaaaccagaaagtactgatggtttagggccatgtagtgtcgggaagggcattgtttcgtgaggccaaaacactcgtcagctgtggagaggactggaacccaggccaggcttggcctcggagaggccggggtgacacaggcaagtctgctcacccttctggcctcagctttctcatctgtgaagagagggcgctgctcgagaggacctgttgtgty

SEQ ID NO: 1808 - DNA, 598 bp, Bovine  MMBT22563
  misc_feature (1)..(179): n is a, c, g, or t
nnnnnnnnnnnnnnnnnnnnnnnnnnnnnnnnnnnnnnnnnnnnnnnnnnnnnnnnnnnnnnnnnnnnnnnnnnnnnnnnnnnnnnnnnnnnnnnnnnnnnnnnnnnnnnnnnnnnnnnnnnnnnnnnnnnnnnnnnnnnnnnnnnnnnnnnnnnnnnnnnnnnnnnnnnnnnnnnnnngcctggagaatcctgtggacagaggagcccagcaggccttagttcacagggttgcaaagagatggacatgactgaagggacttagcactcatgcactgccccagaacgcttcccytactcygctcctttttttcatcatctccccaccccaacccatccttcaacaagataacacatgaaacttccagtcagggactcttgttaaatcatggagctgtgtctttacaagagggcttgaggcactgaatgtctgaaaggacagaggaccacgttggtcttctgaaaaatagcagcacagatatacttagccagctagccagaaagaaaggtgttttctgaagcacatggtgagtttctgcttttggtggagagaagaaggttgcaagagtttaccaagaagatgctgaattatctcaggg

SEQ ID NO: 1809 - DNA, 600 bp, Bovine  MMBT19433
ctttgctgctcctgctactaatactattctactgtcaagtggctggcacgccagacggagagaatttttcggtactttgagcttgagctgggcgctgggaaatcctgccgtcctggatttggggccgcacgacgccattcttccagcagaagcctcggcgcccccgcgaacggcgttctggcgactgtggcagccagccccgctttggttggtgaggggctctgcctgatggacatgaaaagtgaatttcgcctttgtgcctccaccctgcagctctctcacgatgaaaatagaacckgytttcatcttgctgggcctgacgaagagatagttcccagactgcaagtcagcatttgtgggcatgattgtgtggcaaaatctatttttaaaactctataagttctcctggtagacaaaatgggtactcttttctgggagcaatgggagactaggtatccatgatgggctgtcaagtaatgaagggagattagctccccacttcttttcactgggagcctggcatccttaagctacctcgagccaagttacgatatggagagttgactccccccgccggcccccgccacccccggaaggagg

SEQ ID NO: 1810 - DNA, 600 bp, Bovine  MMBT15290
tcaactctacctctagctctcagaagacagctttcctcattctgttaaaaattttaaatcttgacaatgaaagatcttcatcctaatgcacattttaagcactgaacacaaccccatactcagtgctaggatttcccattctaggagttctgaagctgcctcttacctagtgctccagaccccaatccagaatacaaactcttaaggacagttcagaaataccctgggctgataattgggttactaccaataaagtcactgagtcagcaggccacttggtttggttgctggtcaaactgyggagcctgaaatcttcttccttccgaatcatgcatgtgatgggatgtacaggctccaagaattagctggtagcagtttttttctcccttaaatttcttttaggagacatgagtcctactccagtacctggattcaggtaacaatcctatgtccagtcctccaactctcctgacacattttcaaggctctgttacccaaaagagccgtattcctaactgttactgcctgcttccagacccaaaggccagcagtcctgtaactccagccccaccccccacttacagtttgttcatttctgat

SEQ ID NO: 1811 - DNA, 600 bp, Bovine  MMBT23145
cctcacaactttccataagactttgacacctacctcacaccttatttctgggtgtctctcttgctctatagctggcccttggcagaagctggattctgcacacattgcccagtgacccctagttgcccaggctctgccactgacctctgtattaaatgaggcaaagggaggttacaaatatctctgaatatgactgtcatcattccagccaagctcctatgcttagagtactgtaattatgttcacttgtttctctcaccaagtgggcagagttctctgaaggaaggaattctgtcttgytcactgctctgtcttctagctcagctcttagttcataggaggtgctcaacaaacgtcagtgaataagtgaaaagataagaacccagatctcctactaaattctggctaaggatttgttattaatataacagactgttaggatgagtaaccctggaattaaatgttttccggaaactaggatcagatcgtatcctactgatttctaaatgaatccaatgattttagaatcatttcatggctccaactaacagcctctaatatctgtctgggacataagttatctgtcctagacctgcaact

SEQ ID NO: 1812 - DNA, 600 bp, Bovine  MMBT21857
ggttycagggtgtggctgctggttggggacccagaccctcgggccctggtcggaagttctgcatggcttgaaattcttcaccttcctgccaggaaagcccctcacctgggtgatggctgtggttaagattacccaagagcaagccgttttaggactgcgaactgggtcagaggtatgaggaagggaagggctttttctaatccggggacagacagggtgtcaggagcatctgggtcccaggatttcagtggaggttgcctccgctccycttttgagcatcctccttttctctgctcctcygtgagactctcttaggaggatttttgctttcagttttgtgcaagttcctcatgcggttgcccgttgtgattggaacgattgtctttataaaagacacttgaaagtcaggttggaacaaggcacggtctctgcagaggatgttaagcatgttgactggaagcctgcctgccaggacaagatccctctgagaacaccgcacacaatctgctattgtctccggggatgagacagtgccaacaaaaaatgcgaagttccagccaagaggaggaatcctgccttaactgcttcaccactaagagt

SEQ ID NO: 1813 - DNA, 600 bp, Bovine  MMBT18798
ccctactggagctgtatgtagataatctcaaattttctatattctgaatgtttccctaaggagtttgagcccttggctcctttcatgaaaaatattccttcatttctttagaaagcatttttttgggatataaaaagtagacaaagttgtatctctcttcttgaaaattctccagttaaagaggggaagaaaacaagaatatacctaagaacagccacccttcccatggctaatcccagccctgacacttcatggatatcaacctggggcaagtaacagtcaagtctcatctgagtccaygcaaggctggaggcttctcggagggcagccctcaagggatccactcactgggcctctgccactctgtccagctccaaataccagcttgttgtccctgagtagtccaggccgtttgggagaaagcaacaagaataggaaatgcaaacctgctcatggtagcttagagctgctcgacagacaaaataaagacacttgagacccttaacaaatagctctgacttaagttattaggtgctgaatttgtgggtgcatcaagtgcaggaaagggagagatggtcaaggacttgtgaccagggctga

SEQ ID NO: 1814 - DNA, 600 bp, Bovine  MMBT19914
ggaagccaatcatctagatagaagataaataaaaacaacctcaaacaattatgtatgaaatcaggacagaaggtagtcttggcagctttcttcctgccctggggagctttcagggcttcctgaccaggggaagcagtggcctggcggcatttatccctgtggccatctgtctctctgctaggactcggttgaggcctataatgatgttgtgaggagaaggaggaataaaagacgggtgtacttccacaaagaacgtttggtgagcaatctaagcaaccctggctagcacatctttagaaygagtggggaattgttagatgagctgcaccatcagtggtcagtgggtgataatttaaaaccttttgtaaattgcagatgcaaacccagctaggagtaatttttggaaaggttaaaaaaaatcctaatcttacctacttttagagtggtcccttcccttttgtgtttatacacagggtttctttaagggaagctatccatcttctcaccatactctgttttttacactctcctctcaaatattgtagatgaaacattgacagcaatatgtccgttttgtcactacatgtggtggcttcagag

SEQ ID NO: 1815 - DNA, 598 bp, Bovine  MMBT19618
  misc_feature (1)..(212): n is a, c, g, or t
nnnnnnnnnnnnnnnnnnnnnnnnnnnnnnnnnnnnnnnnnnnnnnnnnnnnnnnnnnnnnnnnnnnnnnnnnnnnnnnnnnnnnnnnnnnnnnnnnnnnnnnnnnnnnnnnnnnnnnnnnnnnnnnnnnnnnnnnnnnnnnnnnnnnnnnnnnnnnnnnnnnnnnnnnnnnnnnnnnnnnnnnnnnnnnnnnnnnnnnnnnnnnnnnnnnnaaaagtcttgaggctctggcttccctttttgatttgtgcattaatgctgcggagttgacagcctgcttgagagaggctgaagagaygygtgttctgcacatctgaaatttattcctttcactctggaagatgggacaccacataacggccatggagaagtaatttttaccckgcaacgatcttggcaccagttccagaaagacatatggacataatctttgggacatttgtagaaccttcccttgaggactgtctttgcaggcttgggttcacttcaagacctatggcactcactttagcttgggtctgtttctacttaagagataaaaagctaaattgtattccattggaagaactaaaaatattaatgtaagagcaagtcatca

SEQ ID NO: 1816 - DNA, 600 bp, Bovine  MMBT20992
ataggagctgagacccagccaaggagagtgaattatcgattcctgtctgcaaatcagtaactgtaaccaaaggaatacgttaggcatattggtaagsagaggatccagaagtcataccaagcrcaatgagggcaagtaatgtttgctccataattatctgctgatcggccaagaggatgaatatgttcttttagctaagcttttctagaagtgtattcatggtgccagcctccatctcctgagcctggtgcttcacatcccctaacaagccccgatgcaggaratgttaaaggtggaggygagattcagggaggtgaagctccacagaccagctccctcccgggttagtggggccatgagacccatctcacaaaagtgtcgaaagggtcgagaagatgaaacatgctgcagcttatgtgattcataggtgactaaaccaagatttacacctcagtctctcaccccgaaacctattcgtttccatcagtcagtttaaaataacaatacatgacctaacaaaatttaagtgtttagttttaataaaaaagactaactataaagaccagaagatttgcaaaaagataaaatgttttgatgggt

SEQ ID NO: 1817 - DNA, 427 bp, Bovine  MMBT19624
ataagagaaaagaataaaggttcatttctctgttctttatttaagaaaatgtgggaaaagcacacatatatattaggagtggagaatcagaatgagaagtcgacaccaygctgtgcagggcaargtggttctgcaattcttcagcagctccaggtgctctgactctgactgatactctcgtaatacctgagctcagctcataaacctccttcagtaaatacctatccaagaccaccatcagacgttcaggtgccaaggacacgaaaagggaatatgaggtatttccttatgtaagacttyacaggttcaacaacagagatcayaacatgaaatgcttcttcctcaattcacctgagaattatcagtgatcctccatgagtaagcaaggcttgttccaagagtgactctcagagcagagggtagacaa

SEQ ID NO: 1818 - DNA, 497 bp, Bovine  MMBT21948
ccctgagccccaaccaaacaccagaggtaggtccctgctgctgatgagccatctgcccaaacccctggactagcacccagaggyggcgggctctctgtgttttgcgatattttttttaccaagyaagaggtctttgtgaaccttaacacctccatgtgtgctgccacgctggagaagtggaagattttccatcagatatttacatggagactaagcgtggcacagggcaagtaaagactttttcctcactcaccacgtgccaggatgaaccagcctttccagtagtatccccttcttttytctgtaatacaacttatgggggtgacagaagtggaggagagcgaatgttaattatctacctattacattagaggcatttgtgtttgctctctaatcctcagattaaataaggtaggttaacatgtaccatacatttacaaaagcaaaatcaaaattcagggtgtaaaagtacagttagtaaatggaggaataaggag

SEQ ID NO: 1819 - DNA, 549 bp, Bovine  MMBT20039
aatataatgaatatataatgttaatacacacacacacacaccgtgcaacatggtttggaagaaagaactctcaataaaaagcaggaaacctagagtcggctctgccagtagctgggtgaccttacgcatgagtcagttacctccactgcaccacaaggcggtaagataaacgtttctccttcaaactgacaccctgtacgtacacgcatatatacatgcttttatttacaggcaaggcgggcactcactagctcataccagtatggcatgacrggctgttcataggccagcacctgttcygattggtctgtcaatgctgtaccagttgttaaacagtgtgaattatcatcctatttacaaycacccccaaattacaaaatgtctaacatgtatatccctgtgtttgcagtctgccttccacacatagtgaggatattccaaagttaaataggccctccttaatctccagttaaaatttaagagcacaattcctttccaactccctttctcctctttcaaaaagagtttctgtacattttctgttctgta

SEQ ID NO: 1820 - DNA, 600 bp, Bovine  MMBT18924
tgcgtgtggaagggaaatgacttttctgggtaactgagggttaactggaagcctgtgttcttctgccttgttgaatttttttttttttttttctacaaatgatgagcatttccccaactgagtattttgaaaagttccaccactttctaaatatgtgaccttggtcaagttacctaacctcagtaacctcagtttccttatctgtaaaaatgcaccgcgcgcygcctctctaggttgtgaaaggcactagaaagaggcgtgtgtgcttgaggtggaggcgccagcaccgtaaytgttctyagtgggtcagcggagcggccagattggctgaagctcttcgtgggtatttagcattatgctttggaatccaatgtgcgttttgtacacgttgacrtggagattagccagaattggcattcatctgcaatttctatcgcagctaagtcctcccaaagagatggttttttttatgatttgctgctttctcataaaakccagtgcctgcaacgcaccaaggactcttgttctgtcgggacctgaatgctgtctttatctgggaaatgtctacagataaagggcagggctagggctcagccttcc

SEQ ID NO: 1821 - DNA, 600 bp, Bovine  MMBT20291
ccccaacctgggatcaaacctgagccccctgcactggtgtagcacagaatctacagggattctggaccagggaaatccctgggaaacatttttggcctgcaaaacttttaccggtctgatgggtcagtaacaataagcattaaaagatagtgttcaagttgtgggtcttatttttattagccytttcactttccagaaagctttatttcttttagacctggataaatccctcggggtccacagacttgttctgatttgcatagctgtccttcgctctggggccgagttgtagcaatgatytctgtaacctacaaaaaagcaattggaatatgggcttccatctgccaccaatttgtgttttgggtaagcgatgccaagaggkatactctgcacctgatatctacctcctttcatcagaaataccccagtaggttcctgctaactttattccgtgcagyatcgcctaccttgggtagcacggagcccaatggagtgacagctagatgcctacctgtgtgcagttgccctatggaggtatgtgatggaagcgaaagcagaaacaccttctgcttttcaggtggggttacgtgtgctctgccc

SEQ ID NO: 1822 - DNA, 600 bp, Bovine  MMBT18959
cattcctttagtcatggttatcacctgtgcagcccagtgcaggttgtatattcattaatactagggtagagactgctacagtgttttatggacaaaattcctatcctgggtttccactgcagctttcatatgccaaggggagctaaggtctttcttaatatcaccctattcaggtgccaccaagacaataacagggcaagaggctgaaacatgggaaaagaaatgggttaagaccacatttgaggataaaaacctgagtgcaaacaatacactaggccaagtgtgatgcccttgttacayaaagtccrctatcctgtggagagagtggtgctcagcctgagaatcctgctactcaaagcccagacccactggtgaccttgcaacccctgggaggtggtccagtggccatgaattcccatcctygacctggccccacatcaacaatgtgcatgcgagtggtggtggtcctgagcggccctgaggtctccaccccttgagtctggggggcctctgacggctgtgacccacagagtgtcctcgggcttctgccctgagaaagcctgcttccacttcctgtcactggaacacctgccaggagcc

SEQ ID NO: 1823 - DNA, 600 bp, Bovine  MMBT23138
ccttccccttctgttctgctcctctgcccttgaccacacacattcatggcctcacgagtcctctgttcctagttccctgggaagtgggaaatgagaaacaggctatcaagtgtctctaaccagcatgttggcacagccaaaattgaagttctatagcrttactgctccactcaagggttcaaggccctrtctatatttcttcctttactctgatccaaccacatggggctttttgctgtccttcaagcacccccagccccacaagtttgtatccatctcagcatgtcacactccctgttyattcatttcaccacaaatagtcttggggttgtatacagcagactcttggtcggctaaaccaacactcattcctaagtcctttctcccttgcctgcctccactacagaaactggaaaactatcaccgcaccccccccaccccaccccagagtaccttagagcaagaagtattggccatgaaagaaaggcaataagtcataagcagagacttctgggatcatttttgccttcctgattatttaaaaagacataaattacaggcactaggactagctgcaaggcagaatcacagagggttctg

SEQ ID NO: 1824 - DNA, 567 bp, Bovine  MMBT20905
gaatgctgaataattaagacagctgaaacacgaggaaagcgaagcaggcacactgggcagtgctgcagccgtcggccccgcccgctcccgggggacccyggattcagaaccatcaggactgcgagtaccttcyaggcggagccacatcagcctccccttcacagctatgacggaggccacacagagctcgccygggttcctggggttcacggcttcaagcttcatgttcttcgtgaatccccgactgaacgatgtctggaagagaaagagaacggacactgagccagcagatgccacaaygagaaaacgctcagcgagagcagagccagctggcgcagcagaaatgcacacacatgcacacgcaatcaagtgcacacgcatatatgtgcacatgcatgcaagtgcacagatcgtactraragaggtgagttcacacgcttatttccccatcacccatgaggaaagaaccacacatgcttcatttgtgtcccagaagagagacctctgcttggctcacagcaggtgcctaataatttctcattttccagctctgggtgcatccctccg

SEQ ID NO: 1825 - DNA, 600 bp, Bovine  MMBT19926
agctggagaggatccagggaagtgccaaccgtgggccaggggcaggggtgtgcactgtgcaaatgggtgtgccctggggctgcccccctcctgggtctaccctccatcccaggctaagatgatgagaagaggcaccagttcatgcctgaccgtccacaaagactccagccgccacagcacaacacgtcaggccccggggtccrtctagcagccctgagtggcggctgccctgtctctgggaagactcagtagcaaagyrctagaaggctgagctgatccctgtctcttttttgctaacaygtaagtagaagtgaacatgttacttccagcatayaggaaaaccaccgagtcaatatctggatggraaacagaccacagacatatgcccagtggctctgttcacaccatgggcgccgatcacagagactgtaatagaaaacaaaggctaagtgacctaacttgacacgtggcaagaggtgtctgacttctcggcgcgccagtctcgcttaagaggacggtgccagacagtctaggaattcrtggcagacacactggcagaagccatacaccatcaggatgacgaggctggaggggaccagg

SEQ ID NO: 1826 - DNA, 600 bp, Bovine  MMBT21903
tccagggcggggttggcctggatgatctggtcctccagggtgccctgcggaggtcaagaaggatggcaggtgagaggcctcctcctcctcctccctttctgcggtacaggcccttgraggacagtaggcctaccttgcctgtggcctgctcctttttgctgcggtcgccaatggcggcaatgaccgcgaagtattggatgactctcttggtgttgaccgtcttccctgccccggattctccgctgttgggacagtcgggcttattaggcartgaacaaacattatttgagaccacaagcytcgagtcaggagagctttatttggcagggggagccctgcagcaggaagccaccrgataatatgcatcccagccacaaagctgtgctctgacatacacagggtcaagggtagcaactaggaaagatgtgctagaagaagcggatttgggcaggtgggagacctgaatttgatctttgagttgggaagatcccctggaggaaggtatggcaacccactccagtattcttgcctggagaatccccatggacagaagagcctggtgggctacagtccttggggttgcaaagagtcatacacaac

SEQ ID NO: 1827 - DNA, 600 bp, Bovine  MMBT20176
atgagagccggaaacatcagataataactctgctaaatcaactctcagctcttatcagtatgcaaaaatctcccaggcagaaatggaggagaagaggtcaaaacatatgtctccactgacaatcatacatctggaaataaaaccaccttacaaaatgacactgattttctactagcccacacaaagctcctgaccacttcacaacagccttgtaaattaaagaaggtatgatttttccaatttagacatygggaaactgaggcagygagcagttacccaagtgttcaaagactcacagcygatgacaggttgagttgggtgaaaaaagccagggggcccaggtgataattccagcattcattcaatccctctgctttcagagggagtacaacacacggtctctactcttaaggtgcatatgacttaattagaaaaataagacrattacacactaaatcaaacagtgcagttgaagaaaaatcaccaatgctaagcatataccctttgcaccctttccaactcaaaaccatactccttttctgaatttacggaattaacaaaaagattcttagtcaacacacagtttcaaacttaaagctg

SEQ ID NO: 1828 - DNA, 601 bp, Bovine  MMBT19777
  misc_feature (1)..(1): n is a, c, g, or t
natgaaaaaaattataagatatgatgctayttttggaaaacaatgaaaataccaacacattctattatttatataaataagtatctatacagaaaaatttagatagacatattttaaattgctacttgggattaacttgggaggaagagatggaacattataaaggmctaactttttagatgattttttaatttgaaatttttataattggataaaataatcaacawaaagtgatttmgagggttgaggaggggccatgccatgtagcttatggaattttagytccccagagactgaacgyagaccctcagctgtgagagcacagratactaaccactggactgccagggtatttccatgatttatcttttttaaatataagattaggaggaaaaagcacaaatattcaagtatagtaagaattaagttaagctgtaaaagaactttaattcaaaaaagtactctgtacatttacagcactcaacttatcagtgtgaacgtttcatttcaagggtttctgatgctgtatcatactttcttgatctcttatagactacgttaatcaagtaaataaaaaccatctcctttaactcatatcaag

SEQ ID NO: 1829 - DNA, 600 bp, Bovine  MMBT22145
acatccatggtggttaaatctgtgttgtaggattttccatattttataatatgaacatgcataacttttgtaacaaggtgagaagcaaagtacagtgtttcagaaaatggaagagcaagactgagaatagagcaggattacaaatggcctcgtaaaaaaaaaagctgaaccrcacccaatgagcacrgaggaacggtaataggaagaagatctgtttcctcagggtcctaaatgatctcgcctctgcacatctctccagcctcatattcatcttttttttctgctcacgtccttccctcyaactttgcatatctctctttgtttcagcaacactagctgcctttctctcccttgaacatgcaagctcattcctgtctcaggagccttccwctagctgttccccyttctctgaaaagttcttcctctgggtctttgtatggtaggatcattcaaatctcagcccaaatgccatttcctcagagaagcttttcccaaccacttaatctacagtcattctgtaccatatccccttttatattttcatggcacttactacaaactaatgatttgtgtattgtctgcccccattcctgtcccagc

SEQ ID NO: 1830 - DNA, 600 bp, Bovine  MMBT21454
ctgttaaagggacacatacttttaatctagtgttcataaatggatttcagggagaatctaaactacctaaagttatatgaaaaagtttgtttgtacataagtatatttatctggatagaaggtacaaagttttcctcggatcatacatgcttatcaaagtatacctttggtctttgggtacttgaagcttatgtggttcttttgtttgtttgtttttcggtcatgcccctatagcatgcaagatcttagttccccaaccagggagtgaacctgtgaacctgtgccctgcagtggaagcayggaatcctaactactgggccaaagagaatctctgaaccttacatgttaatagtgatccagctgccagttcaaacaagaaatagtttagtrgtccactaaacactaggaaactttagttatcccttgaggtattcacatttctcttaaagaacagctttagggaaagctttagtgatagggaattattaattagtttttaactttttaaatcatgtgtgtattttttttatttttgcattcttccacttagaccttcaggccctagcaaggctctgaaactgggagccaaaggaaaggaag

SEQ ID NO: 1831 - DNA, 600 bp, Bovine  MMBT19937
ctgttctgcctgcactttcttcgtatgtgggtcattaacattgtgtttaggtcagatgagagtctgttccatctgctgtgatagctgaagtaaaatgctgatggagatcatttgagatcgtctctgtgctgctgattgcatgcttgtggctcataatcagaatgatgcgaagtaattgttcaagcgacttgccacggctacgttttgtgtcgttgcaactgtcagcagtttggtcctgctcctctgcctgaagcgtgtttgcccagcgcctgttggatggcgcgagtygcccttcactgytgtgggtgacatcggttctagcatcctcacttgctgccccccatctattttataacctgaaaaagaaatgtctgcttatttagtgggagcaagtgctggcttttgtgttcaacagaatgctacgtaccagggcttccatacagaaatccacatgcttgttgccacagtgctcctctctttttctctttggccagaaaagccaggcagacctggcttagaattcttgctttgtcacctactggttatgtaaccttgggtaggccacgtgtcttgaaccttgttttccttatctgcacattg

SEQ ID NO: 1832 - DNA, 600 bp, Bovine  MMBT18960
tttcatatgccaaggggagctaaggtctttcttaatatcaccctattcaggtgccaccaagacaataacagggcaagaggctgaaacatgggaaaagaaatgggttaagaccacatttgaggataaaaacctgagtgcaaacaatacactaggccaagtgtgatgcccttgttacayaaagtccrctatcctgtggagagagtggtgctcagcctgagaatcctgctactcaaagcccagacccactggtgaccttgcaacccctgggaggtggtccagtggccatgaattcccatcctygacctggccccacatcaacaatgtgcatgcgagtggtggtggtcctgagcggccctgaggtctccaccccttgagtctggggggcctctgacggctgtgacccacagagtgtcctcgggcttctgccctgagaaagcctgcttccacttcctgtcactggaacacctgccaggagccctgagcttccatcaagagtccaattaccatgaggccaccatctacaagcacatggtcaccaggccagctgagctgcaaccccccaggcatccagcagatgggcccaacagagggagcaaggtc

SEQ ID NO: 1833 - DNA, 404 bp, Bovine  MMBT19625
atttctctgttctttatttaagaaaatgtgggaaaagcacacatatatattaggagtggagaatcagaatgagaagtcgacaccaygctgtgcagggcaargtggttctgcaattcttcagcagctccaggtgctctgactctgactgatactctcgtaatacctgagctcagctcataaacctccttcagtaaatacctatccaagaccaccatcagacgttcaggtgccaaggacacgaaaagggaatatgaggtatttccttatgtaagacttyacaggttcaacaacagagatcayaacatgaaatgcttcttcctcaattcacctgagaattatcagtgatcctccatgagtaagcaaggcttgttccaagagtgactctcagagcagagggtagacaa

SEQ ID NO: 1834 - DNA, 600 bp, Bovine  MMBT22144
gaggcttctgcttagaggaaaccaaagacaccagaacatccatttgcctcaccctgtcatgtgtggaaaattttaatttgcctagttaatcgtgtgggacatgggagacagacaggcagaaggrcatgacagcaaagagcacrgttcagaagcagcctccgccgttcaaatcctatatccgcagtyagtactcgggtgaccagtcctagaccaggagcacctgaaacctcctgttcaccttgaggctttcatgccagyacctgtggctttctgcgggctccaaggtgaagcacaagatcygcccccctacctttcaagacctccacatgcatcccttccccctctccagtccactttgtcttctcagaaaaaacctccatctgtgtggtctcttgtggcaacccactcagtattctcgcctggagaatcccatggacagaggagcctggcaggctacagtccatggggtcgcagagagtcagacacgacggagcgattttcactcttttcacttcggggaactaacgtccgatgagccactaaaaaaaaaatgcatctaaaaaaacaaacaaacacaattttgagcaaacaatttaaaag

SEQ ID NO: 1835 - DNA, 600 bp, Bovine  MMBT18969
acacacatggcccccactctcccagccccatgcatgcccagcgccactgcagcctggctgtgctcccaacgctcttctgatgccgcttggtcaaggccacccatgaccctgtcttgccggtccagccccacccactctgcagcttcatcttagtccttcatcactggtgaccactccctccctccctccggaagcactctgctctctcagttcctaaactgaacactttcccagtttttctctgacttcgctggccagtccttcatggggtcctcctttttctgagccctgaatggtggycctccttacaccccattgggctctctctcttcactttccctgctcacttcccaagagatacctttcagtgttgttgctaagtcgtgtctgattcttttgcaaccccatggactgcagcctgtcaggmtcccctgtctatgggatttttcaggcaagatactggagtgggttgcaatttccttctccaggggatcttcccaaccaagggatggaacctgtgtctcctgcacgtgtctcctgcattgcaggcaaattctttaccactgagccacctggatataaacaccattcttgggactt

SEQ ID NO: 1836 - DNA, 600 bp, Bovine  MMBT23309
acagggccgtgggcattactgtcacctgcacaggccctgcccttaagagcaaatggttgctagtgcacaggtgcaatgtggaagcagagccaggactggaggggcgggagaagagggttgggggaggggcggagctaatggccataaggaggcgggatcagaaatgaggggcagggcctaggtttccccaggcaggcggtgggtgaggggcaggggccagggcccagggggcgagcccagaastctgtgtcttacaagatggaggtgaggcccgttgcacttggagcagaggagtcagcyaggtgcccaccctccctgccgagttygccacgcactcgtccttctgaattccttggcttgcatgaggttctgtgaacacattttcctgcttattcatgcatctctcagacagattattggcacctacgctgcagatgttgcctgmaacattaatgggaaagccccaaatactagccagcataatccagagcagcatgttcaaagagtgcaccgtgaccagggaatgtaaggaaggtttaatgctaagaaatatcttaacattctacattaaaagactaaaataaaataatcatctggtca

SEQ ID NO: 1837 - DNA, 598 bp, Bovine  MMBT20541
  misc_feature (1)..(72): n is a, c, g, or t
nnnnnnnnnnnnnnnnnnnnnnnnnnnnnnnnnnnnnnnnnnnnnnnnnnnnnnnnnnnnnnnnnnnnnnnnctaagtgaccattgctgtcctttatttcctagactgacccccatagttctgaggggttttgtgctatttgaaaaagaaggcagaggcctcttcaattccttagcatgttctgcgtcaccttggaaactaattgtgtatatcagaaattccactctccaatctcaagctcatcaaatgctacagtcctgccccaagtacagcatgcgatgccaactgcctgtcagaaaygcaggtgggtcctcagtgtattgaagataattattgccttttagatattgtaaatggttaagtgcttattaaaattaattacagagaattatcttacctggcagggccagggaatgggatattctggctagtggttcaattgaaagaaagagaaaataaaagatgattgtgctcctgagattcagtctgggtgtgtgtgaggggactggatttttccagcatgttctctttcatcaagaagaccatcacaggataccatcagatatttaagtagcagcaaaatatttttcaggattgt

SEQ ID NO: 1838 - DNA, 600 bp, Bovine  MMBT20006
ttctctataataaagtcttctctggtgtctcagatggtaaataatctgcctgcaatgcaggagacctgagttcaatccctgggttgggaagatcctctggagaagattatggcaccccactccttgcctggagatttccatggataggggagcctggtgagcaatagtccatgggatcgcagagttcgacacgactgaacaacttacacttttcactttttttccccatgatacagggagaaattccagtacatgttggctaaaacgactccagggttgtgggctacatggagttcataytggatatttatcagtgggactacagcagccagtttgtgccaggaataaataaaataatctttaattctctctcctatatcatccagaatttggatctagttggaaggaaaggaatgattttctccactgtgacaatgctttaaccaacttcttgaactcatttagctgccactgccactgatcctattgttttgttttttacatcatcagagtttgatcaaagggttcagaaaaattagaaatataaagagcagagcatgctgtgcgtcagctgctagtagagaacagattaaacaaacg

SEQ ID NO: 1839 - DNA, 600 bp, Bovine  MMBT19686
gcccgggagaaggatggggagggtccctggaggtgacctctctgagcttgtacccacagaacctctggaggttgaacaaacctgtctccagggcagcagcaaggaccagcgggagagaggtttaggctctcaaatcttcatccacttccccgaataaaaataaatagagcagcattctagccatggaaacagagctccaagatgcaaccccaagttctcctcctacccagagggcctctctgagccccagcctgggaattcgggaattcaggaataatcccagactggaccacccactcytcataagagcctgagaaccagaagttcgagagaaacttccatcgcccctgagtatcaacgtcatcgtcacagaggcaatgggcctcacgagcccaccggtcacacggctgtctccattcaaaactgctctgcaagctctaaatttccatttatttatgtttggtttatgccaaggctgcaatggcaagctgctacagttactcgtttgtagctacagagaatccaatttcataaaaatttgtttagctagctaattaatcctgatcttttcattagaaaagaagctaaacaatttccggt

SEQ ID NO: 1840 - DNA, 600 bp, Bovine  MMBT22734
tttactttgggaaatgatttaagttcactatgaatttattctttgctttaaaaatgaggattaacatctcttgatcatttacttttttaagagacaatgtgttaatttgcatggaccagctactttaatccttataaaaatcctgggattcagggattrgtattgagtccctgtctcaataaggaaagcaggacttggagagtaacttgcccagggtcacaaggcaagggtactatacagccagggtttggttcagaaaggtctgctgcagagccsaagcacagtgccaccacattcttytgagtccgaatgggcagttccagctcattttcacattgacctgaaacccaaagttctgcttaacaggcttgggacacacggtggaatggctgaattatattatgaaatatatcatagcacggccctgacagcatgttcctcctctgcttctrgaggccactcaggatatacygagtgtctttcatcactgcatgcatttgttcatattttcagaaatagctagggcaagtgatgacaaakgcatgccgcagtatggatgttgcatcattgtgggcaccgaagtcctgccatcttttcgtg

SEQ ID NO: 1841 - DNA, 598 bp, Bovine  MMBT19689
  misc_feature (1)..(2): n is a, c, g, or t
nntatgttagcatgtctgggccgttatgtcatttgcattgaccatatgtcggcggtatgtacccaggggttagtcttagtacaaagagggttacacgtccaatggttctggaaaacacataagtaaaagggtgttcaaagggcatgcctcagtgactgtgccttcccagagctcgtctataaaaagattttgcacacttggtcttaattttctgttgatttctaagctctagcaaaccgcaaaacagctctgtgggcttctccaccaagctggttccacagatgcggctgcagcagtccyaagccggaattacgtgcaacagaggaaggaaccgagaggagcggcggtgcgcagtccagagccttacacgccagcccgacaggccttgtggggtgtcagcgccgttagtggtctgaatgagctacagatagcacaggctccagaacacacatcacaggacagcttttgttcttttgcctcttgcttctcctgttgttgttgttcttaatacatttctttgcgaagatttcttagatagccaaggaaaagaaaaataatcaatttttcaccagggcactgtaagtactaaagtacttgc

SEQ ID NO: 1842 - DNA, 600 bp, Bovine  MMBT22399
ccgagtagttgttgacaatgtttttcatctgccgtctgatggatgaggtcgtcatctttacgttctgtgacaagtgcagatcctttcagagagagaagcttccccgtctccggcaggttcgtgctccacagasgttcagtctccgtaacaggtctggagcagggtccctgacggtcatttcctctattggagcctcaggtctgagaagctggaagccatgacctagagaaagaagtaacaaacgttactgtgtgtgagttcccgagacagcaggctctctgcaaatggcaggcaggggtyggccagccggggtggtgagaggacatcctccagcccccgaggacaaaaaggatgccatcttcccttcaaaactaagttaagaacaatactacacattaataaccaatacagtttaaactcaagtttaagcctctggaaggaaagcggtaacactgtaactcctggtctattttcaaaccacttctgctggatctgctctgccacacctggcagacgcccgctagaagaatctcacaccatctacactggctycagagactctctctgaccctcttctcctgacttcttacagagactccc

SEQ ID NO: 1843 - DNA, 600 bp, Bovine  MMBT19928
ctgtctgttctgaggtcccttcccrtctctacagagtgtgagagtgcagagacctttaggttgaccagatgcccaatggggacatggcagaggatttattgtattaagtatgagatgggacaacaygctgagatgctgctcacttctaaagctgctctgattttaagagagacctgtggaagatggtcataggaagtcaacaataaccattgaggattgccacgtgtaccagtcaccaagcttcagtaggctgtgttgctcggactgtctggtgcccgtctgcccttaactttttycccygagtagggaagtcgagctttttctcactatagccrggagagggagtgggagttggtagtccttgcatctttctggagctgatttttccctgactcttttctctgctgcttctttttgtccccactttggggtacaggggctggagcagattttgttatgctgggaggaatgttttcgggccatactgagtgtgccggagaggtgatcgagaggaacggacagaagctcaagctcttctatgggatgagctcagagacggcgatgaagaaacactccggaggggtcgcggagtataggtat

SEQ ID NO: 1844 - DNA, 600 bp, Bovine  MMBT22981
actacgagccaggactcctctgccatttttttttttaaaggcctgctaaacacaatcatgactaatagctttttaatctgatctaagactccactgatcgcagtacacatgccaatttcagaagggttaaaatgtgtgttttagaagtggtgaaacagtaatcaagttaagcccaagccaaccaaaaccacatttcctatttattcggataatgatgccaggcagagagtaagaactaggcaaacatttactgaatcgatggatggtctgggaggcgatattcatctgtaaataggaaaytgcttgcagcctcctgacaaactgtcttctttcccctcagcacctgtccatgccatcaccctctaccatctcctttcgtgaagaaaaatcagttcactgataatggataccgcttcactgtacatgatcatttccatgtcaactagaaatacttatttaactttcctcaaggattcaaggggacgtagtaaatcacttcatgtactgtggacttgaaaatacgtgtaggtgtgaactgggtctgtggtaagactgacaatggcccatttaccagcttcagatgcacaggaggtcttggtg

SEQ ID NO: 1845 - DNA, 600 bp, Bovine  MMBT20475
ggagccagagctctcccctgaaattcacgcgtcgccccaaacccgcaagccaaagaaaccggtccttcatgacagaaaccccagtcctgcttctgaacgtctctcctccgttcagttgcttcctaggtctatgagcccctgaagtcacttggaaagcacaggatcccatttccacaaaattcggggggactttatcctcatcactagactataaacctaaaaacacaaacccctctcccagtggcttcacgctgtcccaggctgagagcactggaaggtccacaggcargcgcctcgtgyccaaatcctcgctgaggtgcttygtactctgtgaccttaagcgagtgactcagccagtgagaggccttagtwtatgcatctttaaaatggggattctcatagtcagttgcaggattggtatgaaagttaaacatggtactgtatagaaaatgtctacatagaaagaaataagtattggtgactatgtcatttgtaagggcttcggaagaatccagatccctcccgttcattcttctccagcaggttcttgatcatttcgagatcttgctccttgatcacttccaaacccatctgctctct

SEQ ID NO: 1846 - DNA, 600 bp, Bovine  MMBT19917
aatgcctgctgactgcagatagaaaaggggtgagtgcagcttgtgagacctgattctgagaygatacggtgtgtgttttatttggagagggagttyagggaagtggatggaatatagacattcggctttaggcttctgagctgtgtgacctggggcaagttacttgacctctctgagcctcagtttcttgcctttctgggtaactgtgaaaactgagtaggagagtgaatgccaatgccatgaggcagactggcctgcgatactgccagtctggtggtcagccttggctagcaggcatgygtcatggtacaaatggaatgcggttgctccmggtggcttcctgcccatggctcctgcgggaattatcgcagtggtcctgttccttatgtggctccttcactgtatgtgctgcagagttttcccctcccttgtgttgttttctgcaaatagcttctatcaarggggaaacacagggttcctttcctcttctttgggcttgtagccatattgggagttctgtcttccctgtcccagatcctgccagagtgtgaactctttggggtaaccgaggcccactgcattggcctcctggccagagct

SEQ ID NO: 1847 - DNA, 600 bp, Bovine  MMBT22138
taaccagtgttcaaacagcaagctcatgtcaactcttggctggaggcttctgcttagaggaaaccaaagacaccagaacatccatttgcctcaccctgtcatgtgtggaaaattttaatttgcctagttaatcgtgtgggacatgggagacagacaggcagaaggrcatgacagcaaagagcacrgttcagaagcagcctccgccgttcaaatcctatatccgcagtyagtactcgggtgaccagtcctagaccaggagcacctgaaacctcctgttcaccttgaggctttcatgccagyacctgtggctttctgcgggctccaaggtgaagcacaagatcygcccccctacctttcaagacctccacatgcatcccttccccctctccagtccactttgtcttctcagaaaaaacctccatctgtgtggtctcttgtggcaacccactcagtattctcgcctggagaatcccatggacagaggagcctggcaggctacagtccatggggtcgcagagagtcagacacgacggagcgattttcactcttttcacttcggggaactaacgtccgatgagccactaaaaaaaaaatgcatct

SEQ ID NO: 1848 - DNA, 600 bp, Bovine  MMBT21279
acagtccatggggttgcacacacctgagtgactagacaacaacgatgcagtcttagcttttgcttcctgacataaagctttcagtgcccttcgtgacagmtactcaggtaaccttcagttgctccagactctataygcaaagttgtttacttgcctttcaattttccataaatttacatttaaataaaagaaactttcaaaacattcttattgaatttatagtgtagaaagaaaggccagtgatctggggaagcaacgtgatacaaaaggcaaaggcaaggagtcgaggatcaaaggacytgagttcctgcaccgcatgaatgatgtgacttytgcaaggttatttcacttctttgattctcatctctcttatctgcagaatggaaatgctgagcacatatctacacacttttgaggataaaagaagatcagacataaagcacttgacacataacagtaagtgtttaataaaataggctttccgccacttcctgtagttacctatttcttcacaaaattaaaatagccacctttgcaatctcttctctatcaaattatttgccttatcaactaatcctcatcctctattgaacctattaa

SEQ ID NO: 1849 - DNA, 598 bp, Bovine  MMBT23043
  misc_feature (1)..(2): n is a, c, g, or t
nngaaaagaccctgatgctgggaaagattgaaggtgggaggagaagggaacgatagtggatgagatggttgggtggcatcactgacttgatggacatgagtttgagcaagctccgggagttggtgatggacagggaagcctggcgtgctgcagtccatggggtcacagagagttggacacgactgagagayggaatgaaagcaactacatccttggcakcrgggtattaaaatattgaaaatcccatggatggaggatcctggcaggttacagtccgtggggtttcaaagagttggacaygactgaagcgacttcactttcagtttaattttattcctaagaggtggtttattctgtcagtccactgatttaggatggggatggttaaatctcaatctggtctttgcaaaaataacaagtgagaacatttgggattgcagatcttatttaaagaactgtatcacttgaagctgaaattaaatatgcaaatgttaatcatttattttacacaaaccaaactcacataaataatttcagattaacatatgtacaagctattggctcttattgaccctgatgcatttatcaactctcataa

SEQ ID NO: 1850 - DNA, 598 bp, Bovine  MMBT22133
  misc_feature (1)..(76): n is a, c, g, or t
nnnnnnnnnnnnnnnnnnnnnnnnnnnnnnnnnnnnnnnnnnnnnnnnnnnnnnnnnnnnnnnnnnnnnnnnnnnntgattaagggtgtgggtaaggaaggctgtctcgactgagattagaggaacttgagacgtcaggcttagaggcacaagaagtgcatgtccagtctagtgtagctggagtagagctgggcagggcaagtggagaagaacaggagatgaacaggccaggtggcaagctgcctcagccttcttagggggtggagatgtcatcctaaaggtgatgaaaatgaagtcccyccaggtttaaccagaggagcctgagattgacggtgccttctggaaagacagctctggctgcagcacagaaggtgggtcagggcaagccaataggaagcaatggggtgtgtggggggagtccatttccaagccattgcagcaatcggggcaggaggtaagaacggctgctaccaggggagggaaagagaagagcatttgagagagatccagaaagtggaacaaacatttgagggatgaaggatgaatttggagaaactctaccagaggcttcygcccccatgggaccagagaagggagg

SEQ ID NO: 1851 - DNA, 600 bp, Bovine  MMBT21634
cctcaagcctcgtaggtagagctgcctggccagctggttcctgttcccragtcacagcccgtgatgaagacgaacttgtcctggaggcggctcaccacctgcctctcctggtaccagcgcaggaggtagtataagcccatgaggaatgccatgtatagccacatggcttcgaagggaacagacacacacagagtgaggtgaaatagagtctggctagtaaacagacaggaggaattaggaacatgcatgatgatgcttggccaaccaggttccaggctctctggcatggagttaccaagyttttccagttcactgtcttcagtgagtatgactgactctgacctcawtgcacgctctttggtatacttaggtcatttctaatagatgtcattgcattttaaacacaaacccttaaggatgacaatacttttcccaacctcactttcctagtcctccctgttcccttggcccacctctccactctccacccccacccttaccctcacagattagaaccctkacatccagatttcataattcacagctaaattctttcctttttcatattgaagtctatgacctggatctcctagatctagt

SEQ ID NO: 1852 - DNA, 600 bp, Bovine  MMBT20218
gttttcttatttatgaacattccgatcctgatttgcaaaatgaggaaaaattattttatggaaatacataaaacataagacaacaagccaagagaggagaaagtgggaaattaaaggatatgatatgaagcgagttctgagttacaaaaaacacatttcccatttsacatattcractttgaacatcctagcagctgaggagaatggaaattcattacacgtacaatccatggtttgagaaaataaaagcaaggcggattttctggaaaagcacagctcctttgaaagccacttgctggygattcaygsgagcatcctgggtgacgtgataaaacaagcaccttggggaacctccctagtgggctagtggttaagaatctgcctgccagtgcaggggatgtaggtttaaaccctggtctgggagctaagatcctacatgccccaaggcaaccttaagccctctcacctcaactaagacccaaagctgccaaaaaaaaaaatatatatatatatatatatatattttcttaaataaagctccttggactaaatgagggttctagatttcctgtgaaagattaagccaatggttaaaaggga

SEQ ID NO: 1853 - DNA, 600 bp, Bovine  MMBT19911
ggtcctcggcgtgtgttaggtgattctgtggttgtcactgtcatcttcaactttgagacatgagcattattccagagcctagagaatgccagagacgcaccatctcagagcatgcaggtttaaacctctcagcttctcaactgtctaatctaaggacattagctcttctaaagggtgataggaaacgcaaccaacgtggcctggccgtttggttacaaagagtttctttgcggctgcccgggtcaccaggctgagaaggcatgtgtgcttccttttatgtggagaaactcagctcagccygcrctgtgggcccttccagcgtctgcacatccctgccttaggagccrtgtgacgggccagagggaagtccacttatcctcagcggacctcagggggcatcgagaggtaataaattgtatttcctcttgagtacaggagacaggaagctccaaattggactctaattaactctgaaggaacaatgggtttctccagagcctggcagttccaatggtgtctaaggaggtgtcacgcagccttggaaaataattacaaacgtaatgacgatgcctccgaagtcggtctcctgacgatacacct

SEQ ID NO: 1854 - DNA, 600 bp, Bovine  MMBT20162
ttttccctttcctatttcatgccccctatggtgtgggcaggctaaaaaatcacactttaagcactgcaggaaatctgaaacatgaggacaagtatctttattttgtaggggggaaagcagattctcaaagagactaggtcagttttcccaaggtcatatggctagtgagtggagggggcgagtcccacgctggctgacggtggagtccatgtgctttcagtatacattccagtacctgtgatgccaggcatttgcttaagaycttgctaaggaaagtacaggctgcagatcagcatcacygatgtctcctgggaacttgatggctgtgtggaatctcaggtgccacyccrcaatgctgaatcaggatcttcctttttactaaggtccccaaatgatttgtatatgaatcaaatcaaagtttgagaagcatagacacagggcataataggtagctattaaataaaggcatgatgagtataaaagtaatttttcaaatatgtaggagaggtcaagcagttctgaaatcagtcacttgggagttctagaagaaaccaaaataatggatggaaggcaacatgcaaagagtaaaagagaagagcg

SEQ ID NO: 1855 - DNA, 600 bp, Bovine  MMBT21935
gttacctgtggtttagttaataagttatatgactggagcttgagctggaatgagaagaaacatccccctagcttgacaaagagcttggtttccggctggtgaaccacacattccctggtgaaccgtctgagctggttcacttggaaattgatctgaccaagctccaaaaatataatcaaagtgggttgaaatcactcattttgtcactttcattcttagtttcactatttaaggatttggctgaaagcattttaaggattttgtcctgaaagcatggaattttctatttgtgacaatggyattgtgtgtgcgtgcacatattcagtgtcctgggcttgcctgtacaggcatgttttcagctgaactatttatacctaaaggcatgcagtgattaaagatcacagcgtatggcaagttttctttgatttccagaattgcctatctgaatttgtaggttagtgtctttggagaaatgcaatgtgcatccaactgatcacctaggtagaggaccttgcctcagaaatatctgaggataatttacttagaagaaaccaatatgccttttttttttttttttttttgaggaacaggtgtatttga

SEQ ID NO: 1856 - DNA, 600 bp, Bovine  MMBT19202
agctatagaagtgaaggattttaaagaaggaccttgagcagtggctctcctcttttgtgcacggctttaaaaaggtcgtgttgttgttgttttccctccaccccttcccctcaagaataattaattaatgktgtraaatagatactgaatgctacacattaggaaattccattttaatctgtgtctacattagtttcagggacctacttaatttatattgctgaaaaatgtaaagttgtgttggtcaaatgcaactgaaggacatctcaaacattttcagtaaatttggcttaagtacayttataacagatccaaagggtgtccaggttctttgggcatattgaataataccatttgtggtgccagtgtgtgggccacagtctctgactatcaggtcatagtttttttgtgtagagaggttaactgtctttgtagaaatgataactgggttcttaagatttttaagtgtgtgcataaaagccacatcaaacaagacatacagttgaaaatagaagtctctggtgaaaattccatatatattagtgaaaacaaacagctttttgataaaaagaatgtcttttggagatcaaaaatgtgatt

SEQ ID NO: 1857 - DNA, 600 bp, Bovine  MMBT18968
ctagcacatccagagcagatgcaaattccctgcaagacctgtcccatctctccctagacttcccccatctcagacaatggcacccgctctccaagttatgtaatcctctcttttatcttcttctcttatctaatccattggtaaatcttgtcgacttgctctctaatatatcttgaatccagaatccacacttaacacagcctggaaagcacagccgtagcctcagctcagcatagtcttcagagatactscttttatttgtttgtttgtttttttactttatttttaattgaaggatayttgctttacagtattgtgttggtttctgccaaacatcagcatgaatcagccatcagtatacctatgtcccctccctcttgaacccttctttccgtttttactttcctttcccacactagctcttacccacttaaaggtctcggtgaagaggttcccatcattaaatccattttacagataaggatattaaggaaggttcagagaggtttaaaaacttactgtaggtgtccagctggtaagtgggatctctgggcttctccccacctgcctgactccccaycccacctgccttgtgactgg

SEQ ID NO: 1858 - DNA, 600 bp, Bovine  MMBT20912
cagctcagaaaagagttcaaggtacttcttaacaatgttcttatgaataaccttcagaattttgctctgctggagcayttctcaggagatgttcaggtgaaggtcttcagagtcaaccaccccacggaagaagttgagatattcaggaatcaactcatcacagctttccatgatggacacatggcggacatacagtttggtgttcttctttttgttctcgaagaggtcaaaaggagcccaatgagggatgaacagcagtgctctgaattctaattgaccttctacagagaagtgctttaytgcaaagtgatcttcccagtaattggtaaaactcttgtagaactcaccatattcctccagggtgatgtcatcagggtctctggtccaaatgggcttggtcttgttcagttcttcctgagcaatgtacttctcctttatcttctttgtcttctttttcttatctttgccactatcatcctcctcatctgaacccacatcttcaatcttaggcttctcttcatcatmtttatcttcctsttctttctcacctttctcttcttcagcctcatcatcactgatttccttctcacgttctttctc

SEQ ID NO: 1859 - DNA, 601 bp, Bovine  MMBT21934
  misc_feature (1)..(1): n is a, c, g, or t
naacattaattgaatgctagcaatttcaggattcttgcaaagtactataaggaatgtgatgttgaacaaatcgtgtgccttatcctccaatagccatctcttaaaagggtttgcaaagtgcataaagagctataaagtttaaggcggtcaggaatttaatacacatgagatattttgaactgtattctgatttagccattgttattaatacttagcattttctagctcttggagattatatcacaccaatgtcttggacccatattttgttttttttaatttttcctatttcaaataacayttgcaaatttgaaatttccaaagtgaatcataacttcaggggaagtgagctctcatgcagggcaggaaggcaaggcacatctttgaaaaaacatccttgacagtactgaagagtaaggaaaagaaagagattagagaaaagaagctgtttgtggtctggctacaaccagggcatctatcaaaggagagactcttaacctttactgctggggacctgttgtcaaaatatgctttaaatgcatgaaataaaatagtaaagaaaaaccagtggaatagaaatatcacagtttttattgtcata

SEQ ID NO: 1860 - DNA, 600 bp, Bovine  MMBT22636
cctcttgccctcaygttcccccaccccacaacccacaaccaccaaattgaggcaacaggtcaacagtcaagtcaaaattgtacccactcctacatgtaaactcatgcaaaaagtataagtgcagatgtacatgcagagtaacatcacctacccatggaaataacttgtctgaaagtcttcatcagtaggayatacaagcataaacttgttatctggcttcattcttgtatcttccatatttccaaacagcacaccttatagcttagctcaaatttagtattcatcataaacaaagacagyaatattttcacattttaattatacttaaaatkaaaataaattatcactgtcgtttttcatatctaatatattcaaacaatgacaagtcagtactatataaactttaataaagttaaggaaaggtgtgtttttccaattttgccttccaacaagaaatcacaattaagcatcttgtgtcccaaggtcatctcacactatcagcaaaccaaaattaagtaagatatgtttaaagaactaagcatcaaggcttggattttgaatcactaagtatgaatattagctaattgatggggacaattt

SEQ ID NO: 1861 - DNA, 600 bp, Bovine  MMBT20467
tcttaaaaatcgggacctacgcttgatcacagcattctaggtaggttttgacagtgtaaagtgaagtatgattctgtcatctcttatgtgagacatataatgtcttaaaattactctgtttttctcacttgtccttcctattaagacaccaactagaactccaaagtctttttcacaagtgttgcttttgaaacacatttctcacatcctgtatttttatagcatgattcttttaaaatttatcaaattcatcttggtgatttccacctagttgtccaacagctaaagtctttttttccycctcagttttattgagatataattgacaggcagctttgtataagcttaaggtgtacacataacaatttgatttatatatactgctaatgataaccacaataggtttagttaacaaccaccatctcatgtgaataccaaaaaatttctttttccttgtgctgagaacttgtatcgtcttctctcttagcaactttcaaatataccatacagcagtgttaattatagtcatcatattgtatattatgtctctagtacatttttatcttataactagaagtttgtaccctttgaccaccttca

SEQ ID NO: 1862 - DNA, 600 bp, Bovine  MMBT21282
ctccctcttcccataataccacttagattagcattaaacatattttcatctctaactttcctttttctatgaagtcatgtgaaccaatttctcctttctgaatgctatgtaattccttcagatctgttaacatatcttattagtctatgctatctacctggaagccatcctgcttttcaatatatatttgctcaatactattcttatctattasatattgacttagagtttaattctcaagggcttattttcatgttcttaggggagaacctcagaaactctcgattcacagaytacagytggatgatgattttacattaacaatatggagatttactactactaactcaaagcgttgttcattgtattttacaaggcattcttagcaagacacaagaacagcagaaatttgcttgacattttattacctctgcccaacaaactcaatctccaaacatgagaagatagttgacctttactattagtcaccggcctttaaaggatttttattattttcttttatgatcacattcttcattccatgaacgccaatttgtgcaaaagaaggtataaggtgcagaacaaaaaggttccaacaag

SEQ ID NO: 1863 - DNA, 600 bp, Bovine  MMBT20939
ttaaaattgaagttttaaacagggctctcattgggtcatcctttcagtccattcgggtctagtttggaagctgacaactggaacaaaaagaaccttgaattcggtgcatactttggttttggtgctgctgcttctcccagtcctcagcagggattacgaaagacctcggtgtgcacggcagatccccgaaattcctggcaaaycgctgcgtttttccacttttctgttcaggaccactaaatgctgagatgtggatgcatacgaaataaaatcaattcattgtgttccaagggttttttytgtttgttagtgtctgtgtaaaatcaccttttgaagcagcaactatcaagtctgaaaagcaattgatgtttccattaatctttttctgggggaaaccttagttctaaggatttaacatcctgtaagtaaagtttaacataacagtattccataagcagcctttttattgtcagaccattgcctgattttaatataataaaaagaagtgtgcgttaatatttaagaagctgtgctcttcttcctcagcatatactttattcaggattagaatttaatgtcttagatgctttggtattcaac

SEQ ID NO: 1864 - DNA, 600 bp, Bovine  MMBT18769
agagttcctctacctggccagatccatgcaggtgtcagtgaggttggtagaagaattgaagtactctctgctggctgccagaaccaagtcaatacttttttcgtaactgaccctgaattgggtttttcctttatgggctatactagttggtggayttattgagcaagcactgcagtgcatcatctgcccagccaggtggatgttctcaaggcgactggaacacagaagactttctgtaaatatctggggaaaagaataaactagaattagtgcttagaaagggaggactcaattctcaayacaatggaagctctgatatccaagtataataaattttaaaaatacatccattctacaagtagaggttgcacaataccatgaatgtacctcaatgacaatgaagcatactttaaaatgcttaattttatgttatgtgaatttcacctcaattraaaaaaaactccctcttttagcaagaagaaataatttaactgaacaaactaatggtaagcatactttcatgtgttacaatgaacacttaagtaaaatacctaaagttcatactcactaaaatcaggtccattagacatactgtcccac

SEQ ID NO: 1865 - DNA, 600 bp, Bovine  MMBT19681
tttgtgaagtttggcctaattttttttttttctttcagtggtgggcttttaagtaatttctctggaattgtattttcaaatatttaggaattcattacatttcaaaacttataaaaataagaaaagcattaatagatcattgctttgggtggtgtgaagctgccactggaaagaggagcaggtgggaagcagtaggcaatttgtagctgggaaggcttcctgtaggtggctcccatggtccacactgacagacggacactcraggctgagatgcagaggtccagatgttagctcgtgacygmtgttgctattatgtattgatacatatttatctggaagaacaaacttactcccaataccgcagcaaagtagaatattaaaatttcctttttccagtgcaactttaagttcaatttcaactttgcacaccatgagctatctcagcacagacccaggcatccctccagacccgyactgaacatggcagtggggaaaatttgccccaaccccagtgagagcccaagacacacggaagccaactccagcctgaaactgcttgtaatttttcattcgcccgagtttcccatttcggacaccttt

SEQ ID NO: 1866 - DNA, 600 bp, Bovine  MMBT23350
ggggaatgtgagttgtaaaaaaataaaaaggaaatcaaattatttttaaagggtttcccaaattttaaaaagaaatgcatatgaaatattcctctaattttaacaagtaataatgtagatacatttttgaaatgtcactgatacactttgcttaggaaattctatacattaagaagaaacaygttaaactataataaacatgaaagatgattcaaaatatcttaaaattgacattcgtttcatgcataagaacttaaaagcatmccattcctgataaacatcagacagtcagtacaattyatttaaatcacgaatgctcagttgtcactaggagctgaaaagaaacaattctaagtttctaaaagaaactacaactagaagagaagactgcacagaattgattcctttggtctactgtaagctaacaccctcaacaagtgtttctgaaatcaagataaaacactacaaatcatgtttttctgtgtttcgaatacttattaaataytgctttaaggttattgttgtttaaaaaaaaagaataaataaataaagtcacctacctggatgacatgaaacataaaccaccttgaaatttccttg

SEQ ID NO: 1867 - DNA, 600 bp, Bovine  MMBT21291
aagtgaatattatttcttgtgactataatttattctatttgaccagaggtcaaattgcttcatctcctccacctgaaattgccatataggcctgtttagtgttgtttaactatcaggttttaccccatggtgacttttgtcatgagtgtgtacgccactattgttaacattttgaagtaatatatggtattactgttaaggtcattctagtttttgtgagggaaactgaccagcagcatcttcttatttagactttctgaatttaatttgtaccctcttatragtagtaggttactttayatccttacatttagttaagttcctgagatatagactcatttaatatcagtaagccttttagcttctgtactgaaataaaaaattcaagcagtaatttaaatttgaacaaactaaatctaaaatattttccattattttagtttaggagaaatctccataagaaataataacttctttctgaaccagaggctaataaartattttaactttctgctgccctggaccttattgaatgtcccacacagtcccacttccatcattatgggtattttaaatgaaaaatctgtttcatttgtgtaa

SEQ ID NO: 1868 - DNA, 598 bp, Bovine  MMBT18980
  misc_feature (1)..(148): n is a, c, g, or t
nnnnnnnnnnnnnnnnnnnnnnnnnnnnnnnnnnnnnnnnnnnnnnnnnnnnnnnnnnnnnnnnnnnnnnnnnnnnnnnnnnnnnnnnnnnnnnnnnnnnnnnnnnnnnnnnnnnnnnnnnnnnnnnnnnnnnnnnnnnnnnnnnnnnaaaaaggggggggggtgctcaaagaaatagatttctttaggcttttattattgggacttactaaggtccctaactctgcactttgacaacttttgccaaatttgggaggttcttatattgttatttcttctaatgtattttctgttcttttytctacctcttctcaaactccaatattaggaatgtgttatktttgttttttaactttcctatactgggtcttcgttttggcacatgggatctttagttgcagcacgtgggctccacagcatgtgggctcttagttgcagatgcggaatctagtttcctgaccaggagtcaaatctgagccccctgctttgggaatgcagagtcttaaccactggagcaacagggaagtctcccagataggaatgttaaaccttctggtattctctcccaggtccttcaggatctgtttactttttaatc

SEQ ID NO: 1869 - DNA, 600 bp, Bovine  MMBT20961
ctccaagattcttgggcttcccttgtggctcagttgataaagaatctaccttcaatgcgggagacctgggttcgatccctgggttgggaagatcccctggtaaagggagcagctacccasttcagtattctggcctggagaactctggayagagggaggagcccgmaggctacagtccatggkatcacaaggagtctgacatgactgagcaactttcacttgtatttataaagttcaaattgatatcattcaaaacagtaatttctgaatttatgcaaaaagtcagatttgcaggactgyggtttggccgtgaaaaccacagaccgagttgtaagtgaaaagggctggtctgatatttgcataatctttattaggagcttttattttgcgttttcttatctataaaatgagtaaatatactctgtgggctctaatgtctttttctaacatgaattttctttttgcttttttattgtagtgatagccaagtaagttaggttgtcgtagctgaaaataatttgattccttttttcttttttacagtttgaattattttacagccagcatttcagtggaaggaaacttacatggttacactat

SEQ ID NO: 1870 - DNA, 600 bp, Bovine  MMBT23340
tttggggggcttccctggtggctcagacggtaaagagtctgcctgcagtgcaggagacctgaagaaggaaatggcaacccactccagtatttttgcctggaaaatcccatggatggaagagcctggcaagctacagtccatggggtcgccaagagtcacgactgaccaacttcactttttcttttttttccaactatttttgtgtctgcaagtcagatactatcaagcaaactgccatgtctgatccacaatccttttaaatttttaactcaaagacaaataggaaaattcagtaaattytatctttccagatgttctcagaaagagttataaaacacagttggataatctatttacaccaaatgaattacctatgtgtgttgtgaggtagcaatgaaagactatgatcttctatggtaataacaccctcaatgcagaagccttccctcctcacagtgtgtgaagagtgtgaataagggatggagagtcacctttcattatttcatcaactactggtgttttcacagtattttaaatgcctgatttcaattttacaacaataccaatatttattctgaaaggtaatcacatgttccaagt

SEQ ID NO: 1871 - DNA, 493 bp, Bovine  MMBT19639
atttggaccaaatcagcttgaasaaatcagatcattcttctcagactgaagaaattagaagaccaaaagagaaaagatgtttttacctactctctaagactctgatatttagttctggtattgtaaggaagtactttctgtattagccaaaacaattcttcatattctagactttagctttctgagggcataagtataacccatttaagtgaggaagaagcaacagaaaacagatgttcaggaawacttcaaacagcatgaatgactgtagtattttgctctgccccgttttccataatygttttctggaaacaaaaaattcaatttcctattgaaattaaaatcctattgtggattttgaaaataagcagacttgccttttctaattgattaaatggagtggaaagggaaaaagaagaactggctctttgaaggtacaaatctatgaaaacacttggcatctcccgaagtctttttattgttaataataaca

SEQ ID NO: 1872 - DNA, 600 bp, Bovine  MMBT20570
taggctttgttgagttttattgctgttatattagatttggtaatatactgtattaactgtgtgttcaatttaagctattaagttttaattgtcaaaaacagataaaatggaaaactaaaattttctttctccaaaattagrgaattcaaatatggtctaaaatgtattcatttgtcttatgcttttgttctctctctctgtctcttcaatgtaatataatatgcataaaacaccattttaacyctttagagacatacagttcggtggcctcaactacattcacattgttttgtaactatygccactgttcatctccaaaaggttttcatcatcccaaactgaaattctgcatccacaaaacagaaacaccccactctactcacccccgagctccaaataactgctaccctaccttctgcctttgtaaattaagatggaatttggctattctaggtacctcctgtaggtggaatcatatttgcacttttatgtctagctcatttcacttagcataatgtcttcaagtttcacccctgtagaatataacagatcctcgttctctcttacaggacttttctttatctggataccatgagcatg

SEQ ID NO: 1873 - DNA, 600 bp, Bovine  MMBT21615
atacagtttatgtaaggaattaagtaccagcctcacttactgttgcatgaggcagggtcttaagtgagataggtttttagggcttcaaatacccactttacttcaagagcccaaaagcacaaagaaagrcatcattctgtgataaaactcataactgaattttgcaaattctgaagcagtcagtcaaactgtgattagcctgagggattcagccttcagtaacatacaatcccaaggggaggggctctggtagtggatacagactctaggacaaagggatggaatgtttcccaggaatayatgatctcttgtgacactgttccttatggctttaattggtttcagaacttgcttagtgtgcctgtgcatcttggtgtagctattggacatctctcttttcccttgcttttcttccctgaccaggtgacctatccaggaaggattagacccagactctgtactctccactcttttctcacctccttccttttttctatgcctggtgggagctggacagtttcatctcttgcatgtaagtgtatctgtgcttctagtgttcagtgaagcatgtctatctgaatgtttctcttccttcctgct

SEQ ID NO: 1874 - DNA, 600 bp, Bovine  MMBT19622
ctgttttcaatagcaagtgaattgagtttaattttgcttttgcagggggaatgatggcttctcagggaatttcaaccttttacaaaacaagtatagcacattcaacaaaaagaatatatacttatatctccttatttgagatttctgtrcatatcattaactccctagctgaaaatttttattttgtaatttcagaatcactgtacatagacgttaactctcatagcttttcagggctttattttcttatttttagagagcacataaaggaataaagatgaaatgaactaaagrtatgtycagagttcgtatcatgctgctgagagttgtacatattacttcttataattcagattaaatgtaaaaaaaaaaaaacttcctcataatgatttctttsatgtaaaaatattgataaaaaaagaagtactggatttcttgctctgaagtcttctaaatataggatttttcttagcaactgtatataaatggccttgttgatgaacaaggaaattactggatcagtccctaaagaaataattcccttgatcacaaaatatgttattacattataatcccaagggattccagatgctctttcct

SEQ ID NO: 1875 - DNA, 590 bp, Bovine  MMBT21100
tctgcactcactctgccatctggtgtctttggacctttgtaaggctcgacttctccaagcttgactggccactcatcatagaattcctgaaggcaaatatattgaaacactattaagcaaactgtcctgttacctaccatatctgagtgccattggtttgcatattttatgttaatttataattctggaattttaaagctctttttcagtaatgctgtttatgaacttgtgactrtaaacaagtcaatcttktaaatctgtaagacggagacaataacaaaatgcrtattacagagtcaytatgtggattaaatgaataatacagagcacctaccctracacatagttagaaggagggagggcaagaggaaggaaaagaatatgtatggaaaytctctgaacttcctgctcatttttttctgtaaacctaaaaatactctaaaagaatatggtctactaattaatttttaaaaaagaaaaaaagacttgttgaagacacatagagctaggaagtggaaaagccaagtctagatacttttttactccaaaaagtacactttcccttcttcttttccatgtaaaatgtaatt

SEQ ID NO: 1876 - DNA, 600 bp, Bovine  MMBT23047
aatctagaaaaacggtacagatgaacctatttacagagcggaaatagacatagagggaaaawatatatagacataaagcmgaggaaggggtggtgggatgaactgggagactagaattgacatatataccctaytgatcctgtgcataaaccagatagctaataaaaatcctactgtatagcccagataactctactccatgctctatgatgacctaaatggaaagacagtccaaaaaagaggagatatatgtatacctatagctgattgactctgctgtacagcagaaaccaacayagyattataaagcaactgtattccaataaaaagtaattttaaaaatgatcattaggtgtgaaaagtcaagcttttacagactttctttaagataaaccatttaaatgaaaaaaactccagcacaatatgataaggtggaaagtcactcagtcgtgtccgactctttgcgaccccgtggactatacaggccatggaattctccaggccaggacactgaagtgggtggccattctcttctccagggggtcttcccaacccagggattgaacccaagactcctgcactgcagatggattctttacc

SEQ ID NO: 1877 - DNA, 600 bp, Bovine  MMBT20574
attttgtggcatcatatttctacccatctgacacccaattttcccaagttccctcctacaatggaataatggtcattttaagactttgaggaaatttgtcatagcagtatagttccatttaatgctgagatgatccacttagcagttcgtaaaaatataaaatgtgcctacctgaggtgaacaactgttttgctctttaacaggaggccctagagcatgaataagggaacacatcacartctttttccaaccagttttttcatttggatttcaatcatgctgaatcagtggcaattaccytcaaatagctatttcatgactcttggaaaacttttctttctatgtttcctcacagaaactgtccatgttagttgagaatctagtaactattctacaataggccccaaagaaggaataacacaggaaatgaatrtgtgtatacacagagratgygtatataagtgctcctttatatgaaacttgtgggaaactatgatattattcttattccacactttcccatctgacccctgcctataaatatcatgaactttcatttgcttttacatagcaggaccagagggagagagccctaaaatt

SEQ ID NO: 1878 - DNA, 600 bp, Bovine  MMBT19377
ccaaataattcctatcacatcttatctcttctttgtccattttatattttatgttatgtagaggggagaaagataccygggaaaagtcattttagtggcattgctgagaataaaaggacatttcagcattttttctgatcattaaaaataatgcaaaatatcaggaataaaagaatataacaaaataatagtgactcattatgtcaccatccagaggttgaatatcttgaagcatttctgttttgtctttttgctgtacatttttctccacatgcatagatgtatgtatgtatgtatttyaatttgggagcctggatgctytcttaaaagacaatttaccattttttttgttcggatgtaacacaccaaggataagctggcaactaaaatctcaataatttctacttctgtgtctatcattaattcatagctcaactcaagcagaagggaagttacttagaaaaagtaaaagaaaactacaccccattttgatcctggaaaaactgtagaaattaggagaaatgctttgctgaaraaagcagcaacagtaggaatttytcccctgactacttattcaatcactggtaaagggtaatgcaa

SEQ ID NO: 1879 - DNA, 600 bp, Bovine  MMBT21972
ccactaagctgtaagaaattgtaataacttggatgaacgattgaggttattcacctagaagactcccatcaaggccaccaagattgtgatgaagagctagcagaggtgggcaactgcaaaccctggcacccatccattccagaatatatcccacatgtctacaagagcatatattcccaatgcaactaactccatttacagaaacccctgaacagcagcagttagcttcttttagtctcaaccccaaatgagtttttagggtctggagatgtagcatgatagggatccttacagcctcaytgagtgacagatgatagccacaataaaaatagattatatgtratgacatacaactcacttttatggcttttgtaggttggacagcttgcatgttacataaatttaggtaattttactctaagatgcattataatggrtaatacccttggctggggcttcttcccacatggcactagtggtaaaccygcctgccattgcaggagatataagaatcatgggtcagtccccgagttgggaagatcccctggaggagggcatgacaaccctctccagtattcttacctgcaaaatcccacrgac

SEQ ID NO: 1880 - DNA, 600 bp, Bovine  MMBT19427
gtattttccacagtttctcctcctccttctgatttgttttgccttgaacttgcacaatcaagggagggttggttatgcaaatccctgtctgaattatcacaaatttcaaattggaaggatctgaattaatgaagattttacccaactgcattccatttcagctcttccagataaaatgtgctatggaaaatttggaggcagtccagaagacagcaactaaaatgatgaaaggtttgactaatatcccctctgaggaaaggctaaaagagtttmtttagcccacagaaaggaaggctgaayaaggaattaataatagttctcaagtatatgaagaagtgtgtgagtgacaagaagcagattcccttacttctaatgagtccagaacaagaggaaaatggctcgagaccggggaaaaccatgtgtcatccttagaaagccttcctggctttacaagactcagaacactgacaccttagggactgctccagtggatgtcttatgaacaacctaaacatttacctttttccatggactcatgttaaggtcttgcctgaatgcagatggcatagactaagcgacttctcagcgtcccctctaacc

SEQ ID NO: 1881 - DNA, 600 bp, Bovine  MMBT20277
aagccagaagcatgggtctcacttgtgtcatcccattacgctgtaacttgcagaaacaaccaggggtgatcctgaagtgcagactcccactgccaaagagtaactgagaatttacatgaataatactggtccagagacaaactgagaaagggctcactgggtttacacaatcctgttctcaaccccaaagctgagacctgtgcaagacaccacttttattttaccccatgtttcttttacttttataatgggcaatttacctatgcctcctaattaagtaagacagtaaaggaatgaaaygttgacaaaggctttctgagactgtttttcaaaagaaaatggtttataaatacaatccccactggtgtctgtttctttatgaaaagcatttcttactataaaaaaataaaaagtggaagtaaaagttcctccactggtttcccttaaaaccactgtttttatttaaagttacataataataacctcctttggttctcttgttttaaaactttcacctatttcttctcttagtatgttgactactattaataaaatgtcttgattcaagaacctaggaaaatgcttgaaatgactctaata

SEQ ID NO: 1882 - DNA, 600 bp, Bovine  MMBT21991
aaaaaagaagtgagcaaagggtgacctttacgaaagccaaaagagaactccctgacaccagttcattcaacaaggaagactgaacccagctcagaaggatttttatcaaataaagggaaaagtctgatgcctttgtgacaatacaggtacacacgagcacagctggcccttgtaaacttggaccaccatcacctagctttcacagcctgcagagacaagccaggaaaagttttcaaagtgaaagctaatgtgcagattgtctagggcaactgacacgccaatttccaagaacttctacaytgaattgtggctgggttcaaacatagtgcacacaaacagcttacaaagtgtcacacatttagaattcctgccccatcacatcagttagggctcctttcgtttctcctctttttcctggggagcaaaacagcaggcagcttggaacagtcacgtccacagtttttctggcttcagtaacctgtctctgccccctttctcaattggccaagggaaacgggagatggttccagaactccaccttccttccttcctatcctcttctttttcatcatcctgtttttgttttaaaccttctctacc

SEQ ID NO: 1883 - DNA, 600 bp, Bovine  MMBT19205
atggacacctgagttgtttccacctgttggattttgaataatggtgctgtgaacattgatgtgcaattatctgagtccccgctttcagttctttggggtataaaatctagaagttagaattgttggattatatggtaattytgtgttcaagtttatgaggaatttccctcttttctcatttttgttactggaggattctaccaacctttatagttgagaaattcctagatcctgaaggcaaagtgtttggcagtgtctggcacttagttagtgctcagtatgtagtattacttaggcttycttgactgttctctgccccacagtataccaaatgtggaaataaaattatccagtgtactctctacttaggaaagcacctgtgaactggtctggccagcaagcagatttttcaagattaggtagtcattaagaaaaaggggacttccctgctggtccagtggttaagaatccaccctgcaatgcaggggacgtgggttcaatccctgttgagggaaccaaaatcccacatgggaaactgagcctgtgcaccactactactgagcttgtatggcaattgctgtgtcggtgagccacaatgaa

SEQ ID NO: 1884 - DNA, 600 bp, Bovine  MMBT19491
gacatctatctggtcacttgacatatccaggtttgttatttttatctcaaaaatgttctccctttctttatctaccttaatttcaaatccactttttaggaattcaagcattttgtggatgtcacagccaacgcaattcatatctaaagggttcaaagtgatgattttatatattaatatattatgaaagaatccccattgcctcatcattgatttaattaacatatccaataccttatttatttacattttttgtgtatgaaatatgtaagttctactctctcagcaaatttatattayacaatacagtgttcaactagggtcactgtgttacctattagatttgaatagaccttatttatcttacaactgaatgtttgtgccctttcaccccattttcttttacccacctcattcctgaaacccaccacactattctctacttcwgcaagttcaactttctaagactctatacatatgaatgacagcatacaatattttcttcccctgtctgggttatttcatttggcatagtgcaatgcaggttcatctatattgttgcaaatagcaacatttccttcttttataagactgaataat

SEQ ID NO: 1885 - DNA, 600 bp, Bovine  MMBT20180
gtgtcccatttgctctaactgtccccagttgcccttcccccagttttaaaaggagagcaagcatcagaaggtctttggtttggtgcagtccagtcatgattttgtctgatgtcactgaatcaggaggacagcatcccctcagagatctcagctcttactcacagggtcccacttgtatgatcaatagaaaggattcttaggggcatggccaragacttattactactgtttgttattcatcaattaatatgatctgtgcctattatatgctaagcattgtgttcaatactttacttacaytgttttatttagtaggtgtaattattatctctattctgatgaagaaactgaagttcagtgagactgaaaatttacccaagatcacatagctwttaagtggcagagccagcattcactctctgtcgtgggtgcttcctttccttgtacagtattaggagcataaggaaagatttgtaaagcttccccagcgagatcaccattccgccttcttcagatgaagctatctgtacagccaaaatatcactgaagttttgaatccaaagatcttccttccatcaccttctaccaatacaagatgct

SEQ ID NO: 1886 - DNA, 600 bp, Bovine  MMBT21830
agatgtcagagactcaggtttgatccctgggtcaggaagatcccttggaggagggcatggtgacccactccagaattcttgcctggagaatttcatggacagaggagcctagtgggccacaatccatcgggttgcaaagagtcggacacgactgaagtgacttagcaagcatgcatgtatgtatttagggatatttttgaaatataatggtaagtgttctcgtgtataccccaaatgtggattttgtgtaatggcaatttaaatttaggtgtttgggagccagggcacagttcgtaaaaygagctctcgagatgtcccagttgctcagacagaagtattgaatactctctacattgaccaaagggatggaatcagcagagccgtgacaactctgcaaatggatgaggggtccatgcttgggggtcacccagtgttctttagggaaggaatgtcttcttttcctcaatctaccttcttttctaccactggactcaaagatggaaggatgaggtttctctccttctattgcctcagcttcctctttgagtatgttgcgaggcggaggaaactgttagaaactgaggagaaaagaaaaatttg

SEQ ID NO: 1887 - DNA, 600 bp, Bovine  MMBT22983
aactaattaactctaatattactctattaattagaatgctctaagccttattaaacataactttgctatcttatcaagggctgagcttaaatagttaagataatgtttctttcatgaaaaattcttaattacaacaaaaaaagtctttaacagcccaaaaaagaaagtttcagtatgacactacctcttttagagttataaccatcagacagattttgacagaatgrtaaaataccatataacttacctttgctttctcaatttcttctctaacatcagaaagaaacgattcccatgaaygtatgtctgagtccatgtcagaatacgctgccgaatcactgagagaagagaaaaacataaaactgctgatgttcacttgaagacttaaaaactgaaagcactaaagtacaaatgaaaataaacatttaaagataatgagagaaatatgatcatgcacacatagcaaaaaagatgatttttaaagaactgtgtatcttacaaagtcactacactttaggaaatactatcaactgatctaacccaaagcccaaaactggtggacagagagcatatattctcctgaattttaccttctctcct

SEQ ID NO: 1888 - DNA, 600 bp, Bovine  MMBT20237
caaattggcagccttccttgagtttcattttacttgctaaggaaacaatgaagcacttattctgatgccagcagaattgtgggaagagacttaagagatttgtattttcctgaatctttaatctgcagaagagagcaactacactgaccaagtggcacattattattatttcaataattctttagwtgtacaactaattgaatcttggaaaatatggtgtattcacataaaaattgactcatatgattgcaaaaatgctgattatmacatagatctagaaattatagcaacagaattgayagtaaacaaaaagtaagaccaacaaaaatatcattgatggtgtttctacggrttaataataaaygtactctcaaacttataatttcctttgagggaaaayaatttttactcctttcctcattatggctatctggtggtttgtgacaacaatttcttcttgaaaagtgtctgcaataccagcactcaaaagtcttctcgtcagttttcccggcatctttaaactggacagctccagccctgattatacccaacccttcccacaaacccccatagccctaggccattggcagtgcacattct

SEQ ID NO: 1889 - DNA, 600 bp, Bovine  MMBT19476
ttgttttctgagaggttggattatcatccaatttttacagacaaggagatggaggcttggagtgggtgacttggccaaagttgcacagctggtatgtgccagaactgctcctctgtcagagtccagaaacaagttcctatctacatatgctgtggccctcttcgaacttaacccctcaacatttcaaacaggattcctctggctttgtcctggtctacttttctacctcagtcccttcactccctccacacaaactcaagccatattaattaaggttccctgagcacagtgagctctctyatgattctagtcttttttttacatgctgtccttaccctcccagtgaactacttatccttcaagatccaaatcaaatcacctgatatgaaaagtcttccttaacaccttcttgtccccactcctttggcaaagttaattactcttttctctattatcttcaagattcttgtacatacctttattttatattttccatgttgtactataattaattgtcagagaatctgctacagcaggaagggactttatctcattaccttttttttgttgttgttttttggctatgctatgagatagttc

SEQ ID NO: 1890 - DNA, 600 bp, Bovine  MMBT20020
aaagagttggacatgactgagtgactgaaacttgacttagtacttagtaactgaacaataataaaaccaatttggggtaaaaagaaaaaaaaagtgctacttaatttttagtctgcattctgcttgttttctattacattttactcagttggaacaacacaattagatttcagtatttttttctccattttgttctcctaggctacactgaatatttaaattagaaaaaactttattgatttttttcttttatcatgaaaatgttcctctcttattaggttagtgagcgtatttcttaaycgaacttaaatttccaacctgaattwctttgtagtacaacctaatgtcccatgcaataatattatacctgtatttgtgtcaaatctaattatgaagycttgatttgtgtaatgtgcgagaaattatttccactttccctaccatgcaaacagatcaattttctcattagccktttccatcagtcttgattgctttaaacttatgcttttcatattactctgtttcctggtcaaattttgtccttacttcatgtatagacagatttatcacattttaagaaatttattcatgtggacaaat

SEQ ID NO: 1891 - DNA, 600 bp, Bovine  MMBT19709
caaagctgggctcacctgtctggttctcatcgtctctcctgtctcgtcccacagacgctttcataaggcctggttctcaccaccatttcagagcaccagtgtcttcaagcaaaatatctttcccagctttccaagttgctctcaatgagcacatctagtctcttctttaaaagatgattttattgcagttgtcatatttaaccaatagcggatgtcagggatttgcttcttaagagatgtaattgaaaacacccaaggktaagatttttgctttcttagagggaagatcattatcatcayaaccttttcctttccaaatctcctcttctctttctattttgtaagtcaacgctgacatctcaacatggagtttattttgttgggtttatagctctggcatctagtgtggttgtcttgcttacatgccaccctctgtttttactctggcttcactgtgatcactaagctccgatgtgggtgtgtgagctaaggagaagagcatattacaaagctgcaacgctttgtactcaccactgtttatattgtatgggttttgaacactataatcctaaattagttatgcaactctgcataaggcac

SEQ ID NO: 1892 - DNA, 600 bp, Bovine  MMBT20181
tcaagttgaatccttacctctttggccatctacaaaactctgagagggcagaaaccatatcagcttgttctcagsgtgtactcacagctcagcatggtgcctggcatccagaagggacccagactacattctgggttccagtctcagttcctttgctcactagctacatacttggaaaggacctaacttctctgagcctctgacttctggtctgtacaagagcaataattcctacagtgatgagtaaagttgttgtgaagtttaaatgagatgaaaatgtatgcaaaactctttgaaaayggcaaagaagattctagccatgtaatgaattatttatgccccaacccagggtcaaaaaggaagtgtagtcacgccgactctggttctgataactgccaggtgctttcaaggcttctcgatgaagtgcaggcttcagacaaatgggaaatctaatagacctctctctgcagttggccgcatctccagccagcacagatataattataattagagttttaagagttctgtttcatttcaaaaagattccatggtacagtctgcagtctacctgagatgtgtgtctagaagcagattcctgta

SEQ ID NO: 1893 - DNA, 600 bp, Bovine  MMBT18784
caactgggatgggtagcatgttgatgcccagatttctcccctctggttttggattcagaggcttggttttgccaactcatttaccattggtctgcaggcttttcagctcccagtacaactgttgtcatttcccagtcttgtgactccctttcccatggctatggtagggttttgacagggagtaagttgaaatgtgcatatttgagctgccatcttagcctakgagactctcaagtctctttcaaccattgttcaggtaagataactgggaactaatacaaatccaactgctcttctttyaacatgccccaggtttttcagcaattctcttacagtgtaatagtacctcaaactgaacttcaagtgtgttctaaccagtacagattataattgttacttcttttgtgttagacacccaattcacacttttccaaactgggttagacagggagcaatgcccctcaggtgatcaacagatattctgaaaagaagttgggaaagtaccacatatccatttctcaagtatttataatactataaatcaaaaaagaaacaggcttcattttttaaaccagtttctccaaaacatttgactgttta

SEQ ID NO: 1894 - DNA, 598 bp, Bovine  MMBT20004
  misc_feature (1)..(113): n is a, c, g, or t
nnnnnnnnnnnnnnnnnnnnnnnnnnnnnnnnnnnnnnnnnnnnnnnnnnnnnnnnnnnnnnnnnnnnnnnnnnnnnnnnnnnnnnnnnnnnnnnnnnnnnnnnnnnnnnnnnctattattttaatatatattttaaaaaggctactcattattgttaattcagaaaacattctagtgtcattcatgttttatctcactttctctttctaaaaggtcaaagagcaataattaagaactaccaagtaccaagtagggcagctaaagactaaggaatccattctgcagaactggaaaaactygtatttgatttacataaggatcctttcttttttcttcattttggttaaatataccagttgcagaaagcattccccataatattggttttgcttctccaaaagaaaagtagaagaattatgtactcttattgttataataatcagtgataataataaatattattaaaatagtaaatattaatgacaaatattatttaaataataacaaatattattattaagtatrgtaataatatgaaggtttggttcttagtaaacaagatttgattatcaagactcttttccaaaaaccttgatt

SEQ ID NO: 1895 - DNA, 600 bp, Bovine  MMBT23053
tcaaaaatcttccatccattcatccactccatctgtttatccttccacccacctgtttatccattcacaaatccacccacaaatccatgcatccatttatttacccatcctcccctcctctccatctaaccatccacccatgcatacatccattcattatctctcattttacagaaatgttttccgcacttgtttccacattatctctcattttccacacatgttttcaggtggcttagaaagacacgtaaagtatataagcaaaayaaacaaagcaagagaatgatgaacaaaccagayggaagtcagctgagaatgaaaaggacaggactcagayagggacataaagtagaaccggggattccatttatccaagcgtgccttcctgtgaccatacctgccacgtgagggtctcamagggcacatcttaacatgttgggttactcgtgctcccaagttggcccctgtctgtacaggaacttctgtttccctgcagtctaaatggggatctctcctaaagtgtttactgaggtctccatcaagtattgatggcatttgaatagacgttgacaaatacagtccgtctctccatttatcctt

SEQ ID NO: 1896 - DNA, 601 bp, Bovine  MMBT21940
  misc_feature (1)..(1): n is a, c, g, or t
ntttacaggatgatacaattctaaatgaaaaagcagaacacaaaattgtactttcaatattctcttaattatgttacaactgttggagagggaaggaagaaagacaggagggagaagggagagttgggaaaagctamaagattacaagtctaggtgatatgttcaycaatgattttttcttttttgtactttctaaatttttttgtaggaattacatattaatttgataaccaggaaaaagtcataagatatgtatttatatattttggctttagtccttttctttagtctctctactctytcaggctataattcccaacaaagatgtgtagggaaagtgatctactggtaggagtggaaacgatttattctggaaaccaggttgctagggcatgttgaaaaaaattgccttacttccttagggaatgtgaacatttgtgtacttggaattctgatctgttgtcataagctcattttttttaaccaatgaaattatttaaagtgtctcacatatatgaaattaccatgaatggcattgatattttcaaatgctccatgatatgtccctaaagtcttaatgaacttaaagagaaaatgaggc

SEQ ID NO: 1897 - DNA, 600 bp, Bovine  MMBT20933
actaaaaaaagataatgaagggaaagcttgagatacaataaccattctctgtccatggaaataacctgttccctgggttcaatcttgatactagcacataaaaccctggggacctcccccggcagttcagtggttaggacttggcactttcacagctgtgcctgggttgaatccctggtcggggaagtaagatcccacaagctgaacagacaaaataaattaaaaaaaataataagcaaaaacctcatgataagcaaaagactatgggaatccttayagtacagctaacgtgatcatgcygaatattttaatatctaagacattaaagtacatggagtaagcattctgtacactattgaccactgagccccagtggagggtggggtcctgaaggcatcctgggaccctccagactccagaagtcagggagttttttgcagaaagcagtcacttcttaggtctagcccactccagaggatggaggcgaagtgtccaaattcactgccactaaactccccaagaagcactcctgctcttcctgaagtgacttctccaggaaaatgttaacaatgaccttgcttttcagcacttcatactaca

SEQ ID NO: 1898 - DNA, 598 bp, Bovine  MMBT22376
  misc_feature (1)..(80): n is a, c, g, or t
nnnnnnnnnnnnnnnnnnnnnnnnnnnnnnnnnnnnnnnnnnnnnnnnnnnnnnnnnnnnnnnnnnnnnnnnnnnnnnnncccccataaaattaagcccctaaagcacagcttttgatcacatcactgccctgttacaaaatgtaagagagctccccatttactatgacataaaatccaaattccttagcatattattcaagatactataagaagcagttctaagctatttgtcctggtatcccatctcctcaacttcaactaagtaatctaagctaaaggcacataaatcwagttacgyttcccaaacatatcttacttgtgcattagctgttcagatctmtaatctaggtctgtggaaatcctatctttaggggtcaactcaagtacaaggtctctatgaattatttcctgaggacccaggtcagagttaaatctctcctcttgtacttttataataatgatagctaatacttacataatacaaaccacatgtcaaatactacatatataataacacttaatctttacaaccaccctttaatcaatgaggaaacactttaagggagagttttgtggttttctatcaccacatttta

SEQ ID NO: 1899 - DNA, 600 bp, Bovine  MMBT22672
ataaaggaatgagatagctttatctctgtttcagcatagatagaaaatatacagggaaaaggaggtaagaatgctttctaatgggcaaagtgaccagtcactccaaaattcggaatttgatacaaaaagtagacaccaaaatgccaaatgtacatgtctacttatatgtttgtcatccctggagaagaatattcttttccattttaccaccagtgtacattctccaaaaaaaaaaaatcttgatggtaattttgttttagtaatgaaaacaaaacatctgtacaatgttataattctagytaacaatcattttttttttttcacttcttaaactgtctaactacttagaaaataataggccttgacagttttaggggaaaaaatagtatcttrttgtcttatgtccccaaagacacctgctgagcaatttatcacagttcaaagagcatggcaataggatctcatattaaatgcaaaagtattatctaaagtgtggtcccttgtgtggttagtgaattttgtttgaaaaatcacgtatttattcagatctttgttttagtgttaatcctctgtctgacagcatctcggatctcttggtta

SEQ ID NO: 1900 - DNA, 600 bp, Bovine  MMBT20165
atcatgacactgcttggtgccacctcttagagatctgtcctgtccttcagcagatagtcttcaaacaaaagtctgagactcaacccagttctccaaactgttcaagagatggtgagtggaaagtgggagtgatgtagagggaggaacagatcaaggagggaaacctgaactagtctgctattcatctgttcttgatttattctcattgtgtaaattgagcaacaccctgcccatctatcttgatgtgggaactccatattctatttatttactctatcttcttttttaaaagtaataccyagttttgccacgcctgtgttcctgcttattgcaatgattgcacctgcctttcttctggtcattaagtgccacttcttggtatttattatttagagattctgtcattcacatttttatcaggaatcctaggtctktaatgtcatttccaaccttccctacagaagacagctaccactgagcttctcagtgatactgatgtacctccccatagcacattctttagtatttggtaaatggagcatctgatgggctcgcccctagattatagttagctggtggggtttctgaccttacatattt

SEQ ID NO: 1901 - DNA, 601 bp, Bovine  MMBT20520
  misc_feature (1)..(1): n is a, c, g, or t
ntctaccatctgaagatttttttttgcaaattgaatgtttgtggcaatcctgccttgagcaactcttaayggcacccttctttcgacagcatttgctcacttcgtgtctcagcatcacattgtttctcatgatacttcacacttccattattatatttgttctggtgagctgtcatcagtgatctttgttactacagatcagtcaaggcttaaatgatggttggcatttttagcaaaaaaaaacatttttcattaaggcaacttgttttttaaacctaaagctcttgcacgctyaatagaygacagtatagtgtaaacataccttttatatgcaccaggaaaccaaaacatttgtatgactcaatatgttgtagtgtcagctttactgcgaggggggtctggcactgaacctgtgtatctccagggtctgcctgcgctgccctggtggtgctgatttccttattcaattcaggtgaagaaagaagttggtgatgcttccatcctgatcaacaatgccggaatcgtaacaggcagaaagttcatggactgcccggatgagcttatagaaaagtctcttgacgtgaatttcaaatcacatata

SEQ ID NO: 1902 - DNA, 600 bp, Bovine  MMBT19376
ttttacaaattaaattatccagaatgctaacatcttgagaaaactaccatcagtggtttagatgcattttgtagtttagttatagtttaaaacattgacctttttgtcttatttcctatatatgaaaatttaaaaaaacactttgaaaaatgtatacattaacatactacaattgtctagaattctacaagtcataaataacactcaatgtttttagtatatttattttatattatagtattatatgagcatatgtatttgtatactgaatattagttacygaaagaacatcattggtcygagattcaaaagagtatgaaaagggggctatatgtcagataatatcacatcttaagtgatttactattatttctcaattaaaatagaagcaacacagtggatcatgtaattcaatatgagttttaattatcaagaaaatcattagttaagtttattgkctattaagatggcttttatttattttcctaaggaaaccaataactgagagagacaaaacaaaaacttttggtttaataatgcactgagcctagtagctcaactgtatagtttccatattattagcaagtgcctaaagaataa

SEQ ID NO: 1903 - DNA, 497 bp, Bovine  MMBT21101
caaatatattgaaacactattaagcaaactgtcctgttacctaccatatctgagtgccattggtttgcatattttatgttaatttataattctggaattttaaagctctttttcagtaatgctgtttatgaacttgtgactrtaaacaagtcaatcttktaaatctgtaagacggagacaataacaaaatgcrtattacagagtcaytatgtggattaaatgaataatacagagcacctaccctracacatagttagaaggagggagggcaagaggaaggaaaagaatatgtatggaaaytctctgaacttcctgctcatttttttctgtaaacctaaaaatactctaaaagaatatggtctactaattaatttttaaaaaagaaaaaaagacttgttgaagacacatagagctaggaagtggaaaagccaagtctagatacttttttactccaaaaagtacactttcccttcttcttttccatgtaaaatgtaatt

SEQ ID NO: 1904 - DNA, 440 bp, Bovine  MMBT20951
agctctttgatgtatattgatcacttttatgaaacacgtgtttgcagttaattgttatagcaatgtattaacttatttggaagttgataacttttcttgggaagaaaaaaggataaatttagatgtaagattagtttaaattgttaatccataatttatccttgagtgtattattttacaattctatgatactttacaaactggaaaaagaaaaaccccaaagctttattatatagataccatctttaagttgtttcattttctgtactttctacattttaccaattttaattgtagccyyattatgatgtgttatggtaaaaccgggcagaatgtaattttgtctgatatttaaaaatgaaaagtatgtaggattttaagcttctaaatatttcaaggacaacattacacatataggagttcatttattcctttttagt

SEQ ID NO: 1905 - DNA, 600 bp, Bovine  MMBT21985
cacccttggtttcgtattccgatataattttttatcatgaaatattttggatgtacaaaaatcataaaagatattataaatgctcaggtaccaaccactcagctgaagaaatagatagaatgcagttacagccgggccccctcccaaggccctttattgacaggaccacgaagcacaaatctaggagctgcaaagccagtagttcagtgatgtgcttaagagcaagggttttggggctgagtagacccagggggaattctgaatctgggcttccttgctgggcacatttagaaaaaaatygtataacctctgagagcctcaacttttttcatctgtaatatggggctgaagagtgtatacctcctagagttgctgtgaagactaaatggaggaataaggtgagtaatagcacttacccagtgctgggcaagtggggaacacccagcaaaggatggaagtggtttctgctggcggttgttgggcttttatatctgggatttggattacagagatgggccccagggggccactttcccacccatccttattccaggggaggcctggggacttgtcaacgccctgaccaggcaggaggacagg

SEQ ID NO: 1906 - DNA, 600 bp, Bovine  MMBT21609
ctgtaattattctagaaagtaagatttctcagtcagcaatgttaaattcttcattctaatctaatgacccaatctgctatattctgcttcctatactgtgttattctgcttcctrtactgtgttatgcttcccatgaaacaaaaatgtctcccactaatgagaaaataggaaaataaaatgggtgtatgttatttgcttttgatttacggggttataatctccaggtcagtgactaattcttttgtgacttctcaaaaatggacaggacatttcagagctcttagtaaatctgtaatcayagaattgatttttgacaagacttgctctgtacagccaagctcttacaaagggacaagataaacttgtaaatcatttatccaagcaccaaggattgtaactatctccaaattctcattttccagatccaagggacatacctagaacctacagggaaaccttgaggaaaacgttcattttctaaggaatagtgacagatgctgagggcagaggttgcacggagagaaacaccatcagtctaactttctgtaccgtgtatcttgactaaaacattaagatgttacaagatgtttaatgacttt

SEQ ID NO: 1907 - DNA, 600 bp, Bovine  MMBT21826
tggaacagcaactacgcctcaataaaatttttaaagaaaatgaaatggaaaatgcagtgaaggaattcagcaaagaataggccaaattagtgatctggaagataaggctcgggaaatcaactagaatttagagcaaacacacacagagatggaaatacagggaagagtttatggataaagatggttaaggaaggcctcaaacgccagttgaactggaattccagagtcagagaacagacacatgggaaagaaggaaataatggaggaaatatttcttcaagctaaagagggataagaatygtctatttttgtacagaaaatgttaaaagcagtcatctctagtaacagaactgtggatgatcttattctactttggcccttgtttagatttccccaaacttcaacaataaatatctattttaaacagtatatctatctcttgtattagaatataaataaaacacagacacatttgacttaaaaaaaccaaaaagacaaaggacctcattatgcttttcattctcagcctctcatttgagtctttaaatagagaaaggtgacttcaaccaaggtcctaatgagctttttatgtggaaataa

SEQ ID NO: 1908 - DNA, 600 bp, Bovine  MMBT21420
attccttctggagttactgaggattttttaatatatacaccatatatacagtattccatttctattaaaaaayttcttaggacatagagcaaacattttgtaaaagagactatgtcttagggcttccctggtgrctcggtggtaaagaakgcacctgccaatacaggagacgtgggttcaatccccgatgtgggatgaccccatatgctgcagagcaactmagcctgcaggccactactattgagcttgtgctctaggaggctggtagctgcaactgctgagccaacgagccaccaattrcggaaggccacgcgctctagagcctgtgctctgcaacagaagccatggcagtgagaagcccgcgcagagcagctaatccctgctctctgcactagtgaaaagcctatgcagcaacaaagaccaccacagccaaaaataataaataaataaataaatatttttttaaragagagaccatgtcttatgtgaatgacaaataatacacaactggtgggaatctttttttttttttgactgctatttcccaaatggttaaagaaaaagttgttgagaattaagaaaccaggattttagtccatt

SEQ ID NO: 1909 - DNA, 598 bp, Bovine  MMBT21753
  misc_feature (1)..(160): n is a, c, g, or t
nnnnnnnnnnnnnnnnnnnnnnnnnnnnnnnnnnnnnnnnnnnnnnnnnnnnnnnnnnnnnnnnnnnnnnnnnnnnnnnnnnnnnnnnnnnnnnnnnnnnnnnnnnnnnnnnnnnnnnnnnnnnnnnnnnnnnnnnnnnnnnnnnnnnnnnnnnnnnnnncgccccgccgcccccccgcccccgacaaactgcaccaagctctaaaaattcacatgtcaccatggcctcgtagcttaataaaccacatcaaaagcattttgcaatgatgcttcttcctctatgaaacctgaagccataartggacctgctattaggcgggtaattaagccrctccctgggcccagtggatatgcattcaagctgccaaaagatgatgaaactcgtgccttcctcagtgggatcctcggggcctgactcccatgttcccccagataccttgctccaacaatgagtgcagtcagggagataccagcatgtgaaacttggtttcaagcacaccctttcaaaacccaactgactccagcaagcagcttaccaaatagccatggaggagaccaaaaacacggctttccactgtgctcctgaggaaaaaccagc

SEQ ID NO: 1910 - DNA, 600 bp, Bovine  MMBT22581
tgccagttacttacgtctgtctttaggggagttctttgctcaaaggtctgaagctctcggttgccttggtggtggttacaatgtgaaaagagtaagtaccatgtatattgggagtggtaaatgcaccagcccttatgtactgaatgcagtgacagtgtagccaaatcatagtgtctttaaagcagagacaataggggtgtggtgggatggtgggaaaaggtttcgatttttagtggttgtacccttgctccagtcctacctctgtcttttaactagttctgtgtcatggaacaatgtatrtaactcctctgtgccttaattttccgatttctgggatggaatactgtcttacagggtttgtgggttactgtgctggtgcactacggtgttcagcacagcttcacatgtgtcaagtacttgatgtttgttgctgttatgtctttggttgtgggaagaattcagagattcattaatttttaaacctctggtctaaaaacatgttttgaaatatagtagtgttttggtttagtaagatgtatgtgtaaaaagttttaaatgccagtggtagtggtaagttgtatgaggcaggaggggaagctg

SEQ ID NO: 1911 - DNA, 576 bp, Bovine  MMBT20038
ccaatgacagtaagattataatatataaatataatgaatatataatgttaatacacacacacacacaccgtgcaacatggtttggaagaaagaactctcaataaaaagcaggaaacctagagtcggctctgccagtagctgggtgaccttacgcatgagtcagttacctccactgcaccacaaggcggtaagataaacgtttctccttcaaactgacaccctgtacgtacacgcatatatacatgcttttatttacaggcaaggcgggcactcactagctcataccagtatggcatgacrggctgttcataggccagcacctgttcygattggtctgtcaatgctgtaccagttgttaaacagtgtgaattatcatcctatttacaaycacccccaaattacaaaatgtctaacatgtatatccctgtgtttgcagtctgccttccacacatagtgaggatattccaaagttaaataggccctccttaatctccagttaaaatttaagagcacaattcctttccaactccctttctcctctttcaaaaagagtttctgtacattttctgttctgta

SEQ ID NO: 1912 - DNA, 600 bp, Bovine  MMBT21745
ccgctgtagcctcaggaggatgctcagcacgtccacaaagtgcccgctcttcagcgcttcctgggtcctrcgcacatgcrggaagagayaggagcattgccaggggtgcaaacatgtgccagctgggcttctccccgtctgctatccccactctatgaacgcacarctggtgcatccccttgacctggtgagtaaatctgccacatgccaacccacctccatgaggttgtggttctgagactggctcaccaccccatgagagaggacgggaggccagagagccagggtacgggttagacrtcggggcaccctccatkgcatgcccccaaagagcaacagggcaggtgtcccaaagagcccaggggtctgtctgggtcggggaaggaatgccctgactccacacgagtcctytcacactggcggcatgctgtgctcctcctgggccggctatgggcagagcctctgacaggaccagggaggaggtaggactgttgagcccgagaggagcgtggcctccagctccaggcacccacctcccgaaaaggagccttctaaaagaccagaggaggccctgctccgtgcgggcagagagggtggtgg

SEQ ID NO: 1913 - DNA, 600 bp, Bovine  MMBT18521
ccggagagtccgccccgaacctgttcaggtataagcaaggtcaggaccccacatgtctcactgggatctcaatcagcaggaaacctcagggactacagaacactctgtgcacccaggtgagatgacagtgattcaaacagcgccacagaagaggtactgaattcctggtagctgtaattaacatcagtaacatactggaatcctgggctgagacttggtgttgggccccacctggcccaggggcttgcagacagcttcttaaatccactaaatactgccccagggcctttgcacagactrtccttctatttatctaaaacacttcctgctgtcactcaacaaacccttactcatccttcagagtctcagcttgtgtcactctttcaagtaagccttccctgacccccagttacacactcttgggccactctggaccttgccttgtgtaaacttgccacacttgtagcgtctgccttctgcayacactgcgtgctccctgagcccagggaccgcttctgacttcctcgatgcaggatgcccagcacctatcctagggctaggcacaggaggtatccgggatgtttgtcgattggctggaca

SEQ ID NO: 1914 - DNA, 600 bp, Bovine  MMBT15699
ggtcactgacatgtaacactcacccctccaacaactccttcatgccaaggtgcagttgactcatctctgacactttccttgagagtgttttcatggagggagagagattaggaccctggcttccaggtgggattagagggtggaaaagaggtgagggccctgagagaggaaatgtaacaaggaaaagtgagtgcaacctcatcaatttcagcaaatrtgagtttcatcaactctagagtttgtccattgagatgactgatctcaaggcggttaggaccagcaagtggaattgaggtgacrtttcagctcagttggaggtataaggtctcacaatcagaygatcagtcaagggatgaacaaccaggtaaagtggggagcgtgccattacttagagaagttcaagttgaatgcagacatgaatttaggggaatgtaagagcctaaagttcctctgcttccatagaggtcaaccttggttgcacctcagctgggggcagcttttaaagctcttcacatccaaacaacayggagcattgattaaatcaggatttctgagggctgggatctggagcatcagtactttttaaaacttgccttttac

SEQ ID NO: 1915 - DNA, 600 bp, Bovine  MMBT20333
gatgcatgctctgaaagggcccccatccttcgactgctgcaggatagagggacggaggccaccggggacagccagggacgtcaccgtgacagacctacagcacgctgcagacgagaacctggaagacacttctgccggtggaaggggagcaggctgtccccccagatgagaacaccactgctcatctgtccagaaacttgtttttctcatccgaacaatggggcctctttgtaatccaagagctgggactctcggatcttgcctttggaatggagcagccttcagcaaaagagattaaartgttcatcttgttccttggagcaccgaagcccactccagctgagtggactaacccaagtgcagaaatagggcgttgcacatcagtcggctggggctcaggaggtggaggaaaaggaaaggaagatggacttgagagggagggggggatctacctggtgggggcacaagaggcgacagggcagaaccatccagactcatcagggtggtcaggacgaggccctggaagcacgcccagcatcccttccaaccgccctcgctccccacccccagcttgcctctatggaaagccctcctctggcc

SEQ ID NO: 1916 - DNA, 600 bp, Bovine  MMBT19901
tgccaatgcaggagacataagatcccttggagaaggaaaaggccaccactcccaatattcttgtctggagtatcccatggacagaggagcctggtgggttacagttcagagggtcgcagagagtcagacacaaccaaaacaacttagcatgcatgcatgtgacttactatgtaaagcacagggcccctcccatagtttcctgaagccccctggtttcctccgttgtcycatagctactgtggagaggctcacagaagaagagatgcacaagttcaccggcatagaggaaacttcatctaraaagtgatatttgaccctggccttgaaaggtaaccctctaaccaggctgagactgtgaggggtggagtagaaaagaacaaagggagaaaaggcatttcaggcagagagaatggtcagcaaaagctcaaggtagaaccgactgaaattcttggcaatgtggccacctcgctccagcattttccaggcaaagtactggagtagggtgccattgccttctccaattatgggggtagcagaaggattggcaggggctggaagaaaacttgaatctagtatcattttagagaaaataagtagtaa

SEQ ID NO: 1917 - DNA, 600 bp, Bovine  MMBT21693
tttgaagtgctcagtagtcacatgtggcccatattagatggtgcagatacagaactttttatcctaggatgaggggtgctgtagaaaaagcatttgccccttagagaatctggttgtattttaaaggctctgacaagtcctgcagtaagcaaccggtctcacttggagcccaggactccaaatttacttgcccacgaactgttttaacacctacaaacagttcttkccttaaacacatcaagtgacctttccccctgtcccatggcggtcctgaatatcacccttgttgggattctaacrtctctcttcttgttttgtccccagattgcctcggctccccagtgtttactcctatcaaggcggayataagtggcaacatcaccgtatgtacttggcctrgcagccccagtacccagatcaggattctaatcccaccctggttaccactgccctgctacccactgcaagctccccaggctaaggaacagaaggagacgtggaaaacaggcctggcccccagctcctctgactcaaggctccaggttcttggttctccttgcagtcatgccatccagtcacagccaaactgtgattcacagt

SEQ ID NO: 1918 - DNA, 600 bp, Bovine  MMBT21765
ccaacatgcataactaagcggcrgattttacgtgtatcaacataagggctgtctccagattttctgcagactctttccctccaggaaatacctggaagagctttctattcatcagaggacacgagcactgctagctgagtgagcaaagcaaagctccggcacttaaaattgtttgcctggagctaagcgtcatccatgaaagaggaaggaggaacaygcctgtgtgtaaaatgaggtttacggctgggacaccctggccaggaaactgacgctggaaartcagtgtcacaccaaataaartgttgtcagataaagagggaaagggcatagtgtcctctgattggccatctcagcgaagacttgccacttctcttggacacgacagtaactagacctggcctgtgggactcacacggtgggtttgagttataaattgtcctgtgaacacattatttcccattaattgtgagcgaaactggaaacgtttcaaggccacaaaattaaagctctgaacctcctagcttcagctttatgtgaccatatggtctccattcacttagaaataaaaccctggaaggcaagcgctgaaacaccctacgc

SEQ ID NO: 1919 - DNA, 600 bp, Bovine  MMBT20306
actggataaaacaactctcaactaaaacaaaacaaaaccctttagatcttctttgcaaatcaacaacatcccttgagtagtccgtgcaggctccccccarccccgatcctaccmcgtctgggcacggtgctcaagccagtcctggtycctctttgtccgaaatgactctctcacaggccagccagcccacaggacccctgacaggctggatggccaaactcattaggggaggctggggtgcrggcagagtgcattttgtagacatggagaaagcactgtcaactagatctggggagtccrtgaattgtggcagatttggggcaaagtggaatcaacagggacaaaaataatttaggagacgccctgctgggagctccaaagcttctaagaagatgctgcctgacggcacccagctcagcttgactgtcccacaaatcaagggcacacttggctatggtgatgatagtacctgggcagagggagaaaggcatagaaccacacgactcagatgctttgggccacttctagaatatttattgaagcaggcagtttggaggtatctagccaaattacttaatcattcaactattaatcatttca

SEQ ID NO: 1920 - DNA, 600 bp, Bovine  MMBT23186
gtggaaacatggtttgcagaggctgatagcactttctaattacccacagagaagtgaggtggtggtctggaggccaaggactaaagagatttcaaaagccagtccccctctgtgactaaggcctgcctgatgagctttctagtccttggtctgttcttggacagacctgggtggaccctccccggatagggcttggcaaggtctgagactggagacagggaaatcagggaaccagartctgtatgatgagagatgtgcctgagcttcagcctcctggatgccatagcagcagagtaaggrcagatctttgcactagatgtccttgggtgagcggggrttkctccaggagcatacaggcagctgcaaggccaatgtccaaacctggaatccagggaccagcccacatcaggccagtcatcagggttctccaaagctcaactggtctctaaggagctgctccaatcagggagtcatcagtctagaacatttattaagcaccagatacagggtctgggaaaacacaggkgaacccttgctttctgacagttggcatctctaagctgaaataatgggacacatggggatggcagtagagcttca

SEQ ID NO: 1921 - DNA, 600 bp, Bovine  MMBT19208
tgcctacgctggcacattatggatagatacttctgcgtggcaataagtttctttgtcagtactctcctcaccatacttatttaaagttcacttgcttctgtatatttctggraccataccaagaatactgaattttcataacaattacttagagatgttgtaagagttagaaatgattccatattgttaaggaagaggaaaaagagtcttggaaatagtctccttttgccctaattagagaatggcagatcgtttgtttgtaggctgatattcttccttccctcgtggcagctgttgtcrctcattgttgttcagttgctaaatcctgtctttgtgacccyatgaactgcagcacatcagttttctctgtccatcactgaactagtaaatctccccattcttccctccttatccctaccaaggcctcagagtcttcaacagactgctctaagcagctgcacaggttacttggagttagcagaagagaggaaacccatttcctaaacttggtgttgtgctaggagaacaggygatgagcagagcccccaccccgctggctggctggtcctcgtcctagttccaaagacacagtgacgttgc

SEQ ID NO: 1922 - DNA, 600 bp, Bovine  MMBT18845
agggattgggggcaggaggagaaggggacgacagaggatgagaaaggctggatggcatcactgactcaatggacatgagtttgagcaaactccggtasttggtgatggacagggaggcctggcatgctgcgattcatggggtcgcaaagagtcggacatgactgagcgactgaactgaactgaaattgaggagttgatcatgcagaccactgatttccttttcaccctaattcctggcatyatctcgggaattttgcatccacgcaaatagctagcatcccagtctccaggtccttcacrttctcagctccagggaccttcacctcctatccayattgggctgcccattcccttggtcccacctcctatattacaaccacccaaaaccacttcatccttacagtcttaaccttaataatccactctcacatctttgatttctctagctctcactcaggtcctcccactacacctactctctgacctcatcttgacctctgagctcctaactctacctggctctccacttctgtcagcagctcctgacctcacttcctcccactctacatagtttcgcttccattgttctcgctccagcgc

SEQ ID NO: 1923 - DNA, 600 bp, Bovine  MMBT22447
ctttcccatcacttgccatcactggaagtggagctgrttgctcaaggaaatggtcaggaaagaggggctccctggaccccactctgaaactttctgttggttcactgcacaaagctgatttaggagttggttgtgatgttaacttgccctaaccactcccgctccagggggccagggagcgttaaagacccctgctggcaaggacagctgccactcctgtttgccctctaatctgtcatggctaccatggtcatctttaatttatgggaatgaaggatttcatggtgatttcctgatggrgttcaagggaaggtcgcgtgtgatcagcccggcagcaacaggtgaatctgatcggccgcctgggagggcctccgtgcctgggatccccgctgctggctgatgctctcacagtcattctgtcttcatcagacttgctttgtcctccaccccatactcctgaagctccaacatgtgtgcctcccagggctcctccttccctgtttttctccctgtaagatctgatgtccacctgccctgcccctgcccagctacgcacactctcaatttcctctgaggttgaaaaaccctccacaaagtggc

SEQ ID NO: 1924 - DNA, 600 bp, Bovine  MMBT18467
aaaatgacagtagtttaaaattcatggggactttcctggtggcccagtggttgagactccaccttgcatcccaggggatgtgggtttgattcgcgggggcagggaactaagatcccacatgacttggggggcagctaagcccaaacgctccaataagagaagtccttgtcctgcaacaaagacccagggcagccaaaaaaaaaaaaaaaagcaagcaacaaaataaagcagcagtgactgctcccagatcccaggcacrgtctagagtggatccatcagagttctgacaaaggagatacrgatgaagatttatgtcaaggagtgggctcatgtgctcacaggggctgttaggccaggctgaagtctgcagggcagcctagcaagctggaractcctgggccagagcagacactgccatccaaccacagaatttcttcctcttgggtcccagctggactcttaaggccttcaactgactagatgaggcccaccaactctcctggatgatcttcactcagagtcaactgatggtggatgacgacccacctgcaaaacgtcacagcagcacctagggtctggctgggttcctgggtcccacag

SEQ ID NO: 1925 - DNA, 600 bp, Bovine  MMBT23267
caccgcatactggatcttcaacacccttgacattccttctcacgtttcattggtcagagtcagtcccatgggcacatctcacttcaagggagtggagaagtacagtcctgctggtggtctggaggagccgagctgagtacttggtgagcagaaatcatatccacactcatcttcctctgggtttcttattatgtgacaccatagctctccttatcattttagccaatttcaggcagtgttgtctgttatctatggccaaaaccatgataactgaatgctgctgctgctgctgctaagtcrctcagtcatgtccgactctgtgtgaccccatggactgcagcccaccaggctcctccrtccatgggattttccaggcaagaacactggagtggggtgccattgccttctccgaactgagtgctagaacacccaaatctcaaaccagaaaaaaatcccctatakaaattctatatccagcaaaacatccttcagatatgaaggagagatttaagacattctcagataaataaaaagtgagagaattggtcactagcagatctgccctaccagaaattctaaaggtggtctttcaagctaaaa

SEQ ID NO: 1926 - DNA, 600 bp, Bovine  MMBT23203
ggagagcacatcctcggagagggtgggaaagacaggaagaaagccgtggagcttgcactgcccttctcccagcacagcaggcagcaagagagcaggcggagttcacttgagagggggagagagagagagagagagagagcgaaaacgacaaggagacaaaggagagcagggaggacccaggccactgtggaccagataagacaccacggccaaagcatgggcttagcaccaacaccatgagggttagaggcctggtactcctgctcgttagccaagtggcgttggggtaaactgcttgarcctrcacctcagtttccccatctgtaaaatggagctaatgatgctggtgttaccagcctccccaggcagttgtgatctcataatatatgtgagagaggataaaaaccctaagcaggacatcaccattagatgttttattattcttacaaaatattatcagctacctcttcccacttcaatttcacaaaagtctcaggatgtgggcacagccagggttattatgcttgttttatgaatgagaaaacaaaagcttagagaagtgaagtgatgtgcccaaggtcacactacgaacaagtggta

SEQ ID NO: 1927 - DNA, 600 bp, Bovine  MMBT20286
gggtgggggggtgcaaatcccagagctaattctttgtatccaggcaggaacagagcttcctgatcagacacctctctaagaaggtagattttttttcttaatgggagttcaacattgagggatagacagcaaagtcactcactcacagtctcaagccaacacggtacagcaggttamggcagtgagggaccagtgtgagcggtcagaagcctatccaggccaaaagcaggtcactcaagaactccctaagaaccaactgctgtgcagctttctccaggatggtcacagtggtgcggtttrtccagacaaaccacagggaytaggtcgtgccctgccctaagtatttcaagtttcccagytccacgacgaactccccaagttcactatccctgggccctttggactaggggacaatctgtcactatttcaaacttcctggtccctctccagcctgcatttatgtccccagagaattggggcagcagttggccagactcaagattgtgatgaaatggagtaaacagtgggtccttgtgtgtgtttagaaattaaatgaactctctttggagtcatgggtactcctagctctgcactaggagt

SEQ ID NO: 1928 - DNA, 600 bp, Bovine  MMBT18889
catctgagctaccaaggaaacccttagatataatgttttagcttgcatggagtgtcagtattactatggatggcatacagtcatttacaaaattgtattaaacttcctgtggccggttgcatttttcaaaatcggttgaaatagtatattcagtctcttgtgctcttccaaccccaccctccttacctagtcaaaagatggyatctttgttcctattctttggacctgagtggacttcttgggtgarcttctataactgcacaagaaagtaatgcttttgaagctggctcttaaaaattratacagcttccatctagttcccttactcagagcatatgcctgcggacccctgaagtacaggtgccccgaagtcaccatgctgtggagaccacacagcagacracatgtacgcagagaatgtcagaggaaccccagctgtttcagccccagcartttgaacattcccagactcaatggcaaacgtgctaatgaggaaaacagatgacccctgcatcatccctgcctcacggcaaccaggtgagagaccctgagtgagaaccacctagcggggcccagcccatctccagattcctgagagac

SEQ ID NO: 1929 - DNA, 600 bp, Bovine  MMBT15123
accatcgccatcttcatcacctccaacatcaccaccagcatcatcaccaccaccacctccatcacctccaagatcgtcgccaccgccaccaccaccttcatcacttccaacatcaccaccaacacctccaccaccaccatagcctccagaaccacttccatcaccccatcatcaccactgatccctgctctgagcccacttgctttattactaagatgcaagtgaatgtcctagtatctgggcccccaggcaagcaacgaccctacattccagtgtgagtcttcagaccctgactgacarcctttgtacctcagtactcagtcccacagccaagacccatccccagatgatgagatgtatccaccaaaagtccggcggtggactaaaactcactgagatcctgttttcaagccctgtgtaatctgcatgtacctggatgctcctcgggttccctgatgaacccaaaggtgtcacctttaaggtaatcacatgacttatggaaagtaccctggatccctccaagccagcagcagggccttcccactcccaggaccccggacttgcgcttacataacccttgctggaagtctgagctgacga

SEQ ID NO: 1930 - DNA, 600 bp, Bovine  MMBT19641
tctacataggcatgttcacatgtaagtcagtagattctatttgtgtaattgccgtaagtcacgtgttatattaccatcagtatctttttatagtttgtattactagtttgatttttatcttttatccacgaagtgtttaactttgtatggctgttgaatcatttttytttctttgttcatagatttacttgtctgatagttgttaaccaagaatasttatcacagtctagatgactgcatatgacagtgcatcaccagtgtgcagtcactgtaggagaggcagagacacacacacccagrcttagaaaactgtcagtccctgttgtgtgggatgtggagttaagttcacgcaccacacagcatccatctgggtcctgtttcacatttacatctgcagctgatgaatgggatasagatatacataagacaaagataaatgtattagaccacgagaaagaacttagtcatttttgaaataaaagctttattgtccatacccagatattaaggaattctcatttgttgattttcctcctcatgtttcagaagttcacagatgaattatttgttgttatggtctgaaacccttgtacaggaatt

SEQ ID NO: 1931 - DNA, 598 bp, Bovine  MMBT21447
  misc_feature (1)..(5): n is a, c, g, or t
nnnnnttaagtgctcgccagctcagttgttaggaawggaggtaaagctaaagattgaagacagcttgacaaaatcctacacaccatccagctgggctttacacattatgagatgtggtaggacagaatgagggtgtttaaaaaacttattgctcttatgttgctgcggggcgttgggctgagctgggaatatgccagggggacttgtgctgcttgtgtaggtaaacttgcaggacttcagctttcaactccatccartccttcctgtcagattctcttaaccttgtcctgtcccttgctragcactgacattttcagagcagaagraaatcatgttaaatttatgtatggggagggggggtgtctgtgtgttttgctagactctggtcttaagtgtttgggctcttttgattagttccgtcctgggtttgttttgtcgtctgagaagagcttataaataagtgctggttaggagtttaatttggattctcatgttctctggccagcatggctgcggttggttctttgtggtgggttacagaagagcttcagccccttctgagcagccagagggccccccgagtagcatgctgctgctg

SEQ ID NO: 1932 - DNA, 600 bp, Bovine  MMBT19644
attggaaaagactctgatgctgggaaaggttgaaggcaggaggagaaggggatgacagaggatgagatggttgaatggcatcaccgactcaatggacatgagtttgagtaagctctgggagttggtgatggacagggaagactggcatgctgcagtccatggggttacaaagagttggacatgcctgagagactgaacaggactgaactaaaaaattgtgggtcctatcttcacatcttcatctaaacctaattatctcccagaggtcccatctctgaagatcatcacactgaggtcagrgcttcagtatttgcattctgggggacataattcagyccatagcatcagccaacactactgcgagtgtagctgttaaaacctggtttgcacacctgatttgacaaagcacattgtcaacaactatcctatatctcacytctccatatttcaaataaaagcaatatctcaaatctggtgtgtgacgtaggttacttatgatttattgaatgcaatttgacactaagtggataaattatgctttacatcaaaaaatgtcaatcactcagatcttaatttatgatccctttgagatttatataa

SEQ ID NO: 1933 - DNA, 600 bp, Bovine  MMBT22162
ccccgacgagagtagcggccgaaggcgcccaggggcccgcggggagtcggctttagggaccaacaccaggcaggagggagtcctgggtgccttagatcggggcgaattccaaggagcatctcatctagaagtggcgaggagagcccgggatccactcatccagcgaacgtttgctggatccttggcgctttccccgacggctcggtctttatctcgcgctagatcatcgcgaggagagattattactgaaatcctgggagggtcagggactttaaatttgggractcattttgagaccargccctaccacgtgctaccgaaggaaagccatttaccctctctgagcctcagtttctcatcttgaaaatcagggcgagagccgggggaggaatggttcatttgtaagtcccccttctgtagtcagagggtttgggaaatgtcgggccaattctgggacaatgggcgggtgacgagaccccgtgacccgaacccgggtcttccccgttcttcccggggcaggtgtgaacgccatgctgaggaaagtggccgtggcggctgcgtccaagccgcacgtggagatccgccaggacggggaccagt

SEQ ID NO: 1934 - DNA, 600 bp, Bovine  MMBT18892
cttcctgtggccggttgcatttttcaaaatcggttgaaatagtatattcagtctcttgtgctcttccaaccccaccctccttacctagtcaaaagatggyatctttgttcctattctttggacctgagtggacttcttgggtgarcttctataactgcacaagaaagtaatgcttttgaagctggctcttaaaaattratacagcttccatctagttcccttactcagagcatatgcctgcggacccctgaagtacaggtgccccgaagtcaccatgctgtggagaccacacagcagacracatgtacgcagagaatgtcagaggaaccccagctgtttcagccccagcartttgaacattcccagactcaatggcaaacgtgctaatgaggaaaacagatgacccctgcatcatccctgcctcacggcaaccaggtgagagaccctgagtgagaaccacctagcggggcccagcccatctccagattcctgagagacgacaatagtatatgattatcattgcttcatatcatcaackttggggtgttatttcatgtcacaatagattaccagaacacttctagatagaagtgtgggggg

SEQ ID NO: 1935 - DNA, 600 bp, Bovine  MMBT15924
aagccaataaaaaagataagaaggagagagactgattgggaaaagattcctttgggtggcaacgtggaaacatggtttgcagaggctgatagcactttctaattacccacagagaagtgaggtggtggtctggaggccaaggactaaagagatttcaaaagccagtccccctctgtgactaaggcctgcctgatgagctttctagtccttggtctgttcttggacagacctgggtggaccctccccggatagggcttggcaaggtctgagactggagacagggaaatcagggaaccagartctgtatgatgagagatgtgcctgagcttcagcctcctggatgccatagcagcagagtaaggrcagatctttgcactagatgtccttgggtgagcggggrttkctccaggagcatacaggcagctgcaaggccaatgtccaaacctggaatccagggaccagcccacatcaggccagtcatcagggttctccaaagctcaactggtctctaaggagctgctccaatcagggagtcatcagtctagaacatttattaagcaccagatacagggtctgggaaaacacaggkgaacccttgct

SEQ ID NO: 1936 - DNA, 600 bp, Bovine  MMBT21729
tagtcctaattaccagaacacagtcataattaaatagcactgggtgctatgccaagcagtcattcagaagtcttcttgtttttttgctggtttcggggtgaattctttaacaagtttcttatcctgaggtacattccagtagattccgccatgttctcgaattcaaacggcgttattccggttgcaaacttgctcatgtcggggatagcactgtgggccttcgtggctgctgcaggactgcagtccgcatgaaggagctgctggctgctccctccattcctgacctcactgtttgactcraccctgccgtggtcatgagcacctttagggtctacctgagtggactcttccttttccttctggccaagcaaagcagtctcagaatctgggctcaaggcttgttcctcttccgatttctttgcagcagtgtctagtacctcggcctcccctggcacctgcctttcgggtgtttttccctctggcacagggaggtcaggttcgtttggacaaggtgaagaggccaccgaattcccagttaaaggtgtgtctacaggaatatccgaatcactgttgacgctctcagcctgctccagggccgcc

SEQ ID NO: 1937 - DNA, 600 bp, Bovine  MMBT20351
gtgttccctagaaatgatcctgtttaatctgcaccagcgccttccactgcagcccattttatggatgagaaaattcagcctyggggaaggtaaacacctttgaataaagccacagaactaatacgtgatacttttcaagatcacattaaagcttgcagcaatccaggcgttttactaatcttgtcagccctctgacatcctgggaatgaaattctctgccccccatcctcattccatgcctgtgcttggcaggtaccagcactcaataaatatttttggattgattgatcacaagtggartgaagatggaagtgtggcatctgctgcccagcatgaggaggaaattagctggaccagctcctccgagatcctggggcttacrcggcgagaggacacagggatggggaagcaaccaagaactaaggaggggagtaatgggggaaggtgacagaagtgaatcagaatgagtaaagaaagtagacagaaaaagcataggaagtaacagaaatgaagtgcttggagttagaaaacagtttgatctcgcytatatacggaatctaaaaaagtccagggcataaaaacagagtgaagatggagggc

SEQ ID NO: 1938 - DNA, 600 bp, Bovine  MMBT23183
aattacccacagagaagtgaggtggtggtctggaggccaaggactaaagagatttcaaaagccagtccccctctgtgactaaggcctgcctgatgagctttctagtccttggtctgttcttggacagacctgggtggaccctccccggatagggcttggcaaggtctgagactggagacagggaaatcagggaaccagartctgtatgatgagagatgtgcctgagcttcagcctcctggatgccatagcagcagagtaaggrcagatctttgcactagatgtccttgggtgagcggggrttkctccaggagcatacaggcagctgcaaggccaatgtccaaacctggaatccagggaccagcccacatcaggccagtcatcagggttctccaaagctcaactggtctctaaggagctgctccaatcagggagtcatcagtctagaacatttattaagcaccagatacagggtctgggaaaacacaggkgaacccttgctttctgacagttggcatctctaagctgaaataatgggacacatggggatggcagtagagcttcatctcagctctaccactgctttgcatagtacagatttt

SEQ ID NO: 1939 - DNA, 596 bp, Bovine  MMBT23160
ttatccattccatgatgtagattggaataagtgagcagcagggtgaagaggtgcatctgtcacagggtgcagagatgactattgaaaatactgtattcaaatcytagtccagattgtgttaacaaacaaaaaaawgtcaggtgtatgtggtaaagaacctaaatagaatttcaagaaattaaaaatagtaattgaaacaacaaatccaatggagagggtaaagaactgaagagagaactggcgaactggatggtgtatctgaggcattatcctggaagaggcacagagaggcagaaggaraagttgaaacattacacagcagggagaccatgtgaaccattcttgtcctaataaattcttgtggagtatactaaaaagttgaaatactatgtataacttatatacagataaaaatggaataaacacctgtacttactgtccagaaaattagtagtacctttgaacctgcttgtatgttccttcccaattatgttattatttatcccttatgtacactatacctatagttttaggtatctgatatattcatactaaaattttaaaaaggatgccctatagtcttctttatttattta

SEQ ID NO: 1940 - DNA, 600 bp, Bovine  MMBT21717
actgtgaccttgaacaagtcacttagcctctctgagcccatttttctcatccataaaaaaaggacaattcacagatgcccctcccagggttgataagatgcacagagtagaaattcattaaataccatctccctttaacatttctctttattctcccataattcagtactcctacatttaagacagagatgactgtagtccttactatctgaagagaattgaatagttgccaaaagccctttcacataatagccagcagctgcctccttggggaactggaggcttaaatgggacattgcrtatgaaatgctttgcaggccttggaagaaaagggacaagagaaaccggagggttattattagacatggaaacgggagagcaggagcccacacatgcctctcgtataatcaaactgacattgaggtttacagtgcattgaacactgcgttccagtccggggagctaaaaatggaaacctgtgaaaacagcagctgggttaaaaagrgagcaggcctggagcggagggcgctgagcgggctcccaccagccagagagcagaaaggacaccggtcttcgccacctgagctgagacagcagcgg

SEQ ID NO: 1941 - DNA, 598 bp, Bovine  MMBT21090
  misc_feature (1)..(170): n is a, c, g, or t
nnnnnnnnnnnnnnnnnnnnnnnnnnnnnnnnnnnnnnnnnnnnnnnnnnnnnnnnnnnnnnnnnnnnnnnnnnnnnnnnnnnnnnnnnnnnnnnnnnnnnnnnnnnnnnnnnnnnnnnnnnnnnnnnnnnnnnnnnnnnnnnnnnnnnnnnnnnnnnnnnnnnnnnnnngaatttgggattgaaacgtaagtgggataggaacgtagttatctggtttctgtgcaagggactggcgagaacaaaaggagaagcaaacagaccactaagaaggtactgtagcagttcaggagagggacartggtggttaggattatggcaggagtgctacagtggatggattcaagacacacttcacaaacagayccagtaggccttggtaatggattagacacgggggtaagggagagtgaggagtcaaaaaaaaaaaaaatccctacgtttctggcacgagcaattactgaaatggggacaaacggactttgaaaggagtggaagaagagatcaatggttcaactttagacatttgaaattactcaaagggaatgtctaatgggcatctggttctgaaacttaaaggaaacttctgagactgaaga

SEQ ID NO: 1942 - DNA, 601 bp, Bovine  MMBT21821
  misc_feature (1)..(1): n is a, c, g, or t
nggtcaccaattagtctttgatttactctgatgtacttagaggttttttagtattaaaaaagscttgcagctgaaaatttacatttaaaaagtaattaatgccaattcaatgaagaaatcctcagtttcctgtagaatcacattgaacttcaagcccttttaaaggatggaaagaattgatcatcagctaagaggtgcttccttggttctctgttggacaaaattctttgtccaggtaaatggacatcagacmccttcccacttctctttagctttgtccccatcactcttcatacctacrtgtgttgttactcagaagacagcatttgacgaacggttactgtcaagttccattcctccctgttccagccgagcgcttcccagacacagacggtcaccaggacagtgactcaagcagagccgcttgcgtctgatgtcagctgaagtcctcccgcccatccctttactgctttcttggtttctgagccgtcatacacagagttatctcccccgtgtgaactcaccgtctcattctccatctccctctgtcaccccccaaaacaagagcccctctttggggtgggagggtgtgagggcctga

SEQ ID NO: 1943 - DNA, 600 bp, Bovine  MMBT21456
actgtgaaccaacgaccagcagattaataggatgtgctgaggaagagccgcccgctcacccactaattgcttgtttacgtaactgatgagcatggcactcattacgggttgttagcacatcaaggcagtgtctgctgatactgggaaaggcctgaggtttgtggatcttagctggttgtcagcaggcacagtagctacttctggggtgctctacccccacagaactgccacggatcgagagtttagtttcaggcatatgacctcacgtaattmcatagcaagcctgcgaggaagggactrtcatccctgttttagaactgaggaaaccctgggtcagagacactaagtgattcacataaggtcacacagctcatccatggtaagctccacagcgttaaccgctctgctgaacagcccccacctccaacacctgccttcatactcagtgatgtcatgaatgcaagtgatgtcatgaatgcaagtgatgtctgcatctttcatgcaatttattggacactctatgctgtgtgctaagtcgcttcagtagtgtcagactctttgtgacaccatggacagtagcccgccaggctcctctgtcca

SEQ ID NO: 1944 - DNA, 598 bp, Bovine  MMBT19203
  misc_feature (1)..(112): n is a, c, g, or t
nnnnnnnnnnnnnnnnnnnnnnnnnnnnnnnnnnnnnnnnnnnnnnnnnnnnnnnnnnnnnnnnnnnnnnnnnnnnnnnnnnnnnnnnnnnnnnnnnnnnnnnnnnnnnnnnttgacatgagaacctcgatgactagaaggaatcagtcttctgaaaatctagaggcctcacaggaggaacagatgatacacaagccctcaggctggaaagagtttggcgcatttcagaaaagtaagacagccagtcagcttgaagcacagtagatgggaagagggacaaaatgaagaggcaggcagggrcaaggtcacaccatgcctcatggttaagagtttggattttgctctaaactagggagttacatggtttgattttgagagtgaattacggggagaagcagggagactgctggctgctgtaggctacccagatgagagaaaacgctgctttgcaccagagagatgagtggagatgaagaaaggataatgaatgtgagatgtccttggaacttgaagtcaacaggactcaatgaattkatgtaagaggtgaagagcaaagagaggaatcaaggataacttgaggactttgggcttgatgggg

SEQ ID NO: 1945 - DNA, 600 bp, Bovine  MMBT18520
tatatcatgcctttactgcttcttaggcagggtactcaacttctctgtgcttcagtttccttgtctgaaaaatgggcatatgatagtacctrtctcatagggtgttgtgttgattaaatgaatcaaatatgcataaatygcttaagacactgtctggcacatagcacatgctgtgtaagcatttgctatgctttggtttcctctctataacctctaccatattatgaagttcytgaaggcaaggatcaaattcttttccactctcctcccaccctacactctgggacccagcacaggacrtgaggcagagaaggagctcagtaagtgtttgctaaatgaataaatgaatgaatatgttttaaatgataacttgtataatccattatagatcttccacaggggaaagtgagggggcattaaggaggtggcagcttgtactggtcttaaaggacttcagtagagggaaaggaagttggcacagggtctcacatttgggttaggtggaaatgagggtgggagcaggtcatggggtcttgaatgcagggtgaggggttagattggatttatttgcagttagcagtgtggaaggtctagaggcag

SEQ ID NO: 1946 - DNA, 600 bp, Bovine  MMBT21699
tgtaacaaatycaacaaaaactttaaaaatggtcccacatccaaaaactctttaaaaagataaatgggatggggaaagctgaataaaccaggattttgataaagggaccctcaagctttcccctcaatgttactagcttaaagtaaataataacaggtcacctcttcagggagctttccgtgtgccagacgctgtcctaagagccctgggagtaastacggtcgatcgttaacccatggatggttgtaaaggtgaaagaacagtttccatgttgcccagggagaagggggcggagccagracacagtcatgactagtttaccccagaccccgggcacttaacatcccacacctgagagtgagacttcggtctcagaagggaccagatgcgcccgcttccctttgatctcttgcgcgttttatcctttgagtcctccgactagtttggaaagaagcaagtctttgaagccgcatcagtggcaagggcgagacctgaggggtgttctaagctgtgaagagaatactttattttccgtcctctctggcctgaagctccacccacctgccaagggcccgcccctttcccccgcccaccacacgt

SEQ ID NO: 1947 - DNA, 598 bp, Bovine  MMBT21743
  misc_feature (1)..(82): n is a, c, g, or t
nnnnnnnnnnnnnnnnnnnnnnnnnnnnnnnnnnnnnnnnnnnnnnnnnnnnnnnnnnnnnnnnnnnnnnnnnnnnnnnnnntgtaggaggactccgggagccggggtgccaccagcccagggtggttgcagatccgctgtagcctcaggaggatgctcagcacgtccacaaagtgcccgctcttcagcgcttcctgggtcctrcgcacatgcrggaagagayaggagcattgccaggggtgcaaacatgtgccagctgggcttctccccgtctgctatccccactctatgaacgcacarctggtgcatccccttgacctggtgagtaaatctgccacatgccaacccacctccatgaggttgtggttctgagactggctcaccaccccatgagagaggacgggaggccagagagccagggtacgggttagacrtcggggcaccctccatkgcatgcccccaaagagcaacagggcaggtgtcccaaagagcccaggggtctgtctgggtcggggaaggaatgccctgactccacacgagtcctytcacactggcggcatgctgtgctcctcctgggccggctatgggcagagcctct

SEQ ID NO: 1948 - DNA, 600 bp, Bovine  MMBT21483
tggaccaaagtgggaggagagctggtcctgggacccaaattgggaagttaaagctgatttagactgttgagaattttgcctgacttagaaataaggttattccttacaccctggctctgcctatgctgggggtagtaggctttctggctcatctgagcatgtgtgatgacagtggtaattcagcttgatgattcggagcacacattcctgacttctaggccctgtcccgctggaagggaggcgtactggctctggaaagcacactgagtgggcctggagccagcccacatttggacctcractgttaagggctgtccttcttgcacctgtggctgcctgggaacgcagcggccagagtttctgtcactttagtgacggaagacagccttyaggacagctggtgaaaaaagatacatggcctccattgcccaaacaggcagtgatcccttgccacccagccttgtttaatgcttcttcactgtgacctcggcttatttctgttccttgatttgtaaagggagaaatctagtgtctgctctggcccctcagaaatgttttttgacttattcaggcagtaatgcatgtgaaaatttggtgctc

SEQ ID NO: 1949 - DNA, 600 bp, Bovine  MMBT19493
ttaatgttaaggtcttcaggtaggattctgctagatgtgaaaagatgttcatgggaaaagatttcctttttttctttttttgagaaagaactgttcacatggggaaaaggggcagaagaaatcaagaataaaagcatttgtgaggacctccttggtggtccagtggttaggaatccatgctaatgcaggatacatgggttcgatccttagttcctcccacatggtgtgtaggaactaagcccatgggccacaactgctgaagcccacgagccctagagaccacaccaagagaagccaccrcaatgagaagcccatgcatcacaactagagtacagcccccactcgttgcaactagagaaagcctgctcacagcaacagagacccagcaccaccacttccaaaaaagtgtgtgtgagaatagtgcaaagacatttcagtttatgactttaccaccacacagatatacacacgcatattcacaacatacatggagagtcccgtccagtacctccccattttggaacggatacaataagctggcagacagggcagcaagatactggtgtttcagcctcctccaaccctcccagataatttcca

SEQ ID NO: 1950 - DNA, 600 bp, Bovine  MMBT18796
cctgaatcctaggtcaggccctgccacttcctggcataacctctctgcacctcagtatacatctctgtacaatggcaagatgtcaggttatgccatttcacctgtccctcgaggttgtcatgagaatccaatgggccatagactgtaaaccaaggcatatttagaaaggggaggcccctttgatagaaggagaggactsggkcgagggcagaaggccatcctgtccagggatggtaccccaggttgttggggaaccagtccccttcctagtttgattarcttgtgaacaggctcccaccrcagaacaggagccattccaagtcccattatcctgcacattctcaccctgcagccctgctattcacttaaacaccgcagctcccragtacattttaatctctgatcattagttacaagattttcttgttaattctgattcagcagattttgctgagacaacgctcttttttcccttttcattttggtcacgctgcacatagcctgttcagacagacaataaatctggtggctaacctccctcccgaggatgaatcatccaaaactctgcaaaggacacagccacgggggtggccacaggga

SEQ ID NO: 1951 - DNA, 598 bp, Bovine  MMBT21731
  misc_feature (1)..(58): n is a, c, g, or t
nnnnnnnnnnnnnnnnnnnnnnnnnnnnnnnnnnnnnnnnnnnnnnnnnnnnnnnnnncagcctgtgctgtgatgaaaagaggaagtggtgtgtcaaacgcaatgtctgttgcaaacgctgcttgcatttcacagctggcatgaagtggctcctgcaggccttttctatttctaaactcagtaagtaggctccctgggcttccccggtggctcggcggtaaagaatccacgtgaaaatgcagagacgtgggttcaatccctgggtcagggagatcccctagaggaggaaatggcaacccrctctagtattcttgctggaagaatcccatggacagaggtacccagcgggctacactccatggggtgcaaaagagttggmtacaacttagcaactgaaccacaccaccaagtaggctccctgggtgttyacaaacgtgaaacgagactgaccttgtcgaagagttgtacttggtcccgctggcgctttctgaacaagtgcacacagatttgtggcgcacgaccctctgcactttggaaggcttgaagatgctcatccactccacgtcagacatgtggcccggcgcttcgattacgaagt

SEQ ID NO: 1952 - DNA, 600 bp, Bovine  MMBT23269
ctagcagttagttagctagctagcttctttatctatttaaccaatgtttggaggactttgtatgcaagggcaccccagaatcatttattaaatccttgtgttactgtcctagatacggcataagtttttttaaaaagcaccaattaacctctctatggaaacttctgtgacattcccagtatattttgatattgcaagtcagagttggacaaaatattasttttgtatttttcatactctgagaaaagtccttagaactcyatcacttgatgaagcttgccaggagcagaagaatcactragatgtggatccaaagcctgacatgctgagcttggagctgctggtattattcaggataggcaagatgctgctgctctacctaacaacccccaratgttagagcaacagaagtttatctctcatgggacagacccatctcttcatcctcytcctctgaaaaatctggctttaccatctagaaagtcagtcaccactgccaaagaaagggagaagatggagcaccgcatactggatcttcaacacccttgacattccttctcacgtttcattggtcagagtcagtcccatgggcacatctca

SEQ ID NO: 1953 - DNA, 600 bp, Bovine  MMBT14556
ctcctctccccacaccctcaagagccagaggaccccatttcctggcctcttcagtcttcgggaccctaatccccctaccctaagccccaagccacttcccctcccttccctctacctattaactctttctatatagccagattgattatagacagagtccaggccctgctttccttcgttgctgtgtgaccttggacaagtcacctagyctctctgaatctcacttcctcctctctataggggataatcctcccttggaattctgtcctagagattaactaataactgacatcacacccrtggatgtgttcacaggtatctgaacatgtgagtgtctcacaggcctgaccacatgggatgggcgagctgtttggcaccaaggtggtgaagggagctgccatttaaaaccgacccacactttatacgagtttccccaacggcccgtaagcaccacttaggttgcaagccaagtgccctgtcctttagtccacgacctatgacataaaaatacaattcttgggggacaggcaggggcttcatgttggcctctcttcatgaagttacagcatctgaggtcctgaggcaggccttaggggagag

SEQ ID NO: 1954 - DNA, 600 bp, Bovine  MMBT22966
cggccgggggacacggcccgggataccctggagctgatctgcaaggtatgaggccacttggggttgtttgygttggaggactcyacggacactcagatgcgggtggcagaggaggaktcttgaaagaacacctttatttcataacagagcagtgttggatcctcttgtgatataygcataatggatggatgtgatttcttccacactaggaggagagggawtctcttagtagcttcttgcaacatgtgttcttgatagatttgtgcaaagcctmttatgtgctcattgcacaagttgtaragaatttaggtaaagaacaaagccgaaaattaaggcacccttgctcacaaaattcagaagtcacctcggtgaacattttggtgtttgtccctggtctctgtttgccacaagcacacatacgtgtattcagtggcatcatatyatgtgcacggagcttcccaggtgtctcagatggtaaacaatctgcctgcaacgtggagacccaggttcaatccctgggtcaggaagatcccctgggggagagaatggctaccctctccagtattcttgcctggagaatcccatggacagaggagcctg

SEQ ID NO: 1955 - DNA, 600 bp, Bovine  MMBT19212
ctgaaaagtgttatcacagacaacattgcatttctccttgcaatatactttcgtattctacagagctcaggtgatctatcaaagtcagtagctgtggctaatatgtgctctgtcctcccagaattacataaatgcctaagcacaggtgctgaggtttgctgccagagctatagaagtgaaggattttaaagaaggaccttgagcagtggctctcctcttttgtgcacggctttaaaaaggtcgtgttgttgttgttttccctccaccccttcccctcaagaataattaattaatgktgtraaatagatactgaatgctacacattaggaaattccattttaatctgtgtctacattagtttcagggacctacttaatttatattgctgaaaaatgtaaagttgtgttggtcaaatgcaactgaaggacatctcaaacattttcagtaaatttggcttaagtacayttataacagatccaaagggtgtccaggttctttgggcatattgaataataccatttgtggtgccagtgtgtgggccacagtctctgactatcaggtcatagtttttttgtgtagagaggttaactgtctttgtag

SEQ ID NO: 1956 - DNA, 600 bp, Bovine  MMBT19985
ttgaactattctattttaaggataggctgacattagtagttcatgtcctgcaaaacatgtgaaagttaaactcttagggtattgagttacttcttttaaaatgtagtcagaaatagggctaaatagatagtagtttatataattgactcaagaatttttgtgatggtgatttgattgtagcctgagtatcatkctrtgcatatagataatgtctaagagcacaaagttttactgttactacttagaattaagcagcaggtaaatkatcgtgtttgagttttaaaaccatgagttatgagrttaaacaagattacctgatttttctttcagcgtagttttggaagagctaccgcctataaatatttatgaatgctggaaaccactggctgccttcgctaggaaaaaagtatttggttgtacgttttgtgatctttgtaataactttatttacatgacagaaactagagaatattgataatacttggtagataaaaagccaaatggttgaaattcagagctttgattttgcttcagttcagttcagtggctcagtatagatactatttaaataaataactttatgatcttcctgaggaaggg

SEQ ID NO: 1957 - DNA, 600 bp, Bovine  MMBT22468
ggcactccttccactgcttttcacctgacacctaaggttgtctttctcttatcttattattctttagcatccaggttcactattgtgtttactattgaagggttttgctatggtgattaaggacctaaagctgataattaccctatgatttacaagcagcacagtggctgatacttcccaaatattgctgtacaaatattacccgtatgctgtgtcagctttttactcaccttgagagcaatctccccttagttttatggcacattaagtctcattttggaatgaattgggtttgtaggrgtggaattggttacattagagtaaaagaggaaacagcagggagggatgactggaaagttatacaatagaagcattagaagaaaggaaagaagagggtaggaatggggtagagagctttaaaggagagttttaaaataataaactagtagaagtttggtgacactctgggggaagaagagaaaagttaatgtttattatatgtccacgtgtctccttgtaactttaaaccagatactgcactgaactggactcctcttgaaatctttcaacttgccttccacatgcttcaccattattcaa

SEQ ID NO: 1958 - DNA, 600 bp, Bovine  MMBT22469
caaattgcatagtaaacacaacagagaaatatgggaggagtgtagaatttagtatcccttgaattttaattaactcatttagaaaacagcaaaataacagattgttgctgaaatacagtaattctgttcttcagggaagatttttattgagtcatagaatttttttttttcccctctataaaggaaaattcaggatctaatattattctgttctgggcaacttctcagcaaaagttgctgagacaagacctatgatgactttcattttcatggaggtggaataatttcaatttggaagtrtctgcaaatatgggagtgtggacatattatttccagatccaatttgaaagagtaagaactttctgacttcacactctgtgcttattctagataatctgtttggattggtccaaracagagagagagaatcagtttaaacttgtgctttgctgcgcttatttcaagcagtattgtttccacaggttttcaaactattgtcatgttatagcctaatctctccatggcattatgatattttataaayatctatttgaatagttattttccctacaataccacaacattcttgaggtttatgtc

SEQ ID NO: 1959 - DNA, 600 bp, Bovine  MMBT18717
acttgggtgggactgtgactgcttgcccatggcacccggtgattgaatctgctgtcaccagcatcctgataataatgaacacccaggctcaacgaccgtgattatgattatcataattgatgtgcaggagcagtgtgtggggatcattacagctgaactgtacatcagagaaacaggcctcagttatgggtaattttactcttatgcattgattgggataaaatatgcctttctctttaaacagaccagcttcatataattttaagaatctttctgtacacgctgatggatgattatgtrtctgctgaaaacagcccccgacygttgttagttttgtgttgtttcgtttcattagcaaatgtaaacaattaaataattmagtgtaattgagggaaaatattttgcttaggaggatggtcttcaataatcaaatattcagttyaagtgctttttctgtctctctgacgatctatctgggactgaagttcttcagtgttctccctctgattatccttgtacctgaattccagaggtcagcaaccatcagggaaaatataagcgtatacagttttttattataaagtattgtgcatttgaata

SEQ ID NO: 1960 - DNA, 600 bp, Bovine  MMBT21455
ttgtacataagtatatttatctggatagaaggtacaaagttttcctcggatcatacatgcttatcaaagtatacctttggtctttgggtacttgaagcttatgtggttcttttgtttgtttgtttttcggtcatgcccctatagcatgcaagatcttagttccccaaccagggagtgaacctgtgaacctgtgccctgcagtggaagcayggaatcctaactactgggccaaagagaatctctgaaccttacatgttaatagtgatccagctgccagttcaaacaagaaatagtttagtrgtccactaaacactaggaaactttagttatcccttgaggtattcacatttctcttaaagaacagctttagggaaagctttagtgatagggaattattaattagtttttaactttttaaatcatgtgtgtattttttttatttttgcattcttccacttagaccttcaggccctagcaaggctctgaaactgggagccaaaggaaaggaagtagataacttcgttgacaaattgaaatctgaaggcgaaaatatcatatcctccaatatgggcaagcgtacctctgaagcaaccaaagtgc

SEQ ID NO: 1961 - DNA, 594 bp, Bovine  MMBT20007
tatagccagagaaaacctatcctgttaaatttaatggcaacacttcaaattaatgagccatcattcctctgatgtgaactcactgtaatatgccactggaccttcctaggagcttgcactcagaactgcagaaccaatctctcctcrctaaaatatatgcaggttctgcactggggaacgaaggcagtggaatggattaagcggtatctgaaggctgctggagatttagagagcaaacacaacaygtgtcctggtgtcccttttcttcaggtaaagttgcaagcttgtctgaaaaattgraattgcttctgtaggttacataattaaaagtaagctggggataacaaagtttgccttgaaagagctagaaaaacccatagaataaaaggctggtaactgataggaagtatgaaatcaccccgagagtccaactaatgaaaaggaaagaggttttttagattggagccaggttctaaaacttggattcaaagccactattcaactgaaatgtggccatctaactgtggaccaaccatttctccctccagcgtcttattctggaaaattgggaagggccaggtttgatcttccctg

SEQ ID NO: 1962 - DNA, 600 bp, Bovine  MMBT21725
atgaaacttctaatgaggttttggggtgtttttaaatggatgagaacaacacagaagtcaactaaaggagtgtgactctatatgaaatgagtgaggaagatagctgtcaaaattactcataatccattacattctgggccttataacagcagacctcagaaaatgtttcccttactctttgttgattgtaaagatacatttacttcaaaagaaatcagccttcttatttggaagggctttgaaattcaagcatggggtgggcattcagtagactctaaaatcgcaatggyagcaaaaatrtgtattctgagaactgcacagacaagaaacttctattaagatattacagattaaagtaccaaaaatctgctaaatttgaaaatttttaaatttgcatttgtcatacatctagcagtggtttgaaagcatcaaagccatttaattctggggtcttattaaaaaattcatatgaatcactgtcgtcgtttagtcactaagtcatgtctgactcttcgagaccccatggactgcagcccaccaggcccctctgtccacgggatttcccaggcaaggacactggagtgggttcccatgtccttc

SEQ ID NO: 1963 - DNA, 600 bp, Bovine  MMBT22477
gcctagcacataataggtacataataaatagatgttgaataaagggaaggctcaatgaatgaattagttgagtatttctggatggaaggaaacagaaattatagttttagtactctgggtatgtctgaaagagagagaaaattaaagaaatttgggggaatttcgagtgatacggtggaggctagtagtggtagttgcttctaaaagttgtatggtagcatccacagtccccatattcaagtaacatattatcagtacaaaagacttccctatccagcctctcattttctcctcacaacraatcatgatgtagctggtataaagactgtcatgggagccagggctagagaggtaaatgatttgacttattagtgtcagaaccaggcctggaactctgatgtcctatctcctggttgaagacatctccatgactcatctccactttcctttccatattggggttttacaaaaatgttcaataggtacttagtgtacctattgtagaaggtacttagtgtagaagggaagagagtgggttggatgtaagttacagaaggtgggaggcaacctgaataccctctttagtaggaattctaatca

SEQ ID NO: 1964 - DNA, 600 bp, Bovine  MMBT20234
aagaataatatgtggattaatagcatcttgtaatattacacacagttggtattaatgtaaattgctactaggacatttaacagagcattttaaaagctttaaatatatttctttgaattgaccattatgtgtcttagaatttgtctgaatcctaacaaaaagtgagaaatcacctatatgtccattaatagaggatttttaaaataattcaccatttagtcattcttttaaaacgatgttaagtgtgtttcttatgaaaaggtactcaaaggtattgatatgaaatagtagcttacaaarcagtatactgtataataacatgcatactcattaaaaaatgtatagccatgtattacatacattaaaaaatcaattaaatacataagtttaacaattatttcccaacaagggtaattatgacttttttggtattcttctacttatatattagaataatgagtttctttagaaggaacaattaaactttctttttggaaaaatgaaacctaagcaatatgtctataactaggggtagctctttccttggggctagttctcattaattcactgccagaggcaaactaccttctactctatctg

SEQ ID NO: 1965 - DNA, 600 bp, Bovine  MMBT19909
ttattcagctaattataaagtactctgaagaacttcttttttaagcaaatctttataactgacatgagtttgagaaaactattaggcaaatatgaacaaaactgcactagaaactgaaagaagctgaagaggcatagcctgcactttattcttgggaagctgctcgggttggaaaagaaagaaggaatcacacagcaaattagcaaaaggcccacatcacagagagattaagagacccactaacagctgatattgggcaaaaagaaatatgccccrgatattaagcagaagatgctgatratacagacatctggaataartggagtggaatgagattrggatgtcagtattggagccaaaagagttacccagaatggtaaagagaagaccaaaggatatttggagatgtctggaaacatggagacatgttgattatagaagtgggctgacctgagatcaataagaaagttcatctaacttgcaattccatactcatatagtttctgcttttgtaagtcagacattgctgtcagtaaaaggaaaaaaaaaaaaattaaagttctgatttggtcaggatggtaggcagaataacagcttccc

SEQ ID NO: 1966 - DNA, 600 bp, Bovine  MMBT19903
agtgaaagcgaagtcgctcagtcgtgtccgactcttagcgaccccatggactgcagcctaccagactccgtccatcggattttccaggcaagagtactggagtgggatrccattgccttctccacctctttacakgactttttcaattaatccaccacccattgtttctacttactttagtaaggtcctcttttattttgctaatttaaccacatttcacttcctcctgttactctacttcccccaaggcaaacccctctgaatagtatttattaagaaagctctctatagcrtgactaraaaatgctggcaactataaagatagcaagtctttgcattgtaactgtgagtagtgataaggaatcctaacaacctgcatacattaagatttcattctggcttcaatttacttctaaccctgttatcatctcatgacattytgcactactaggggaagaggttggctaaagtygttggtacagatgtaatttatggcaatttaaactgagtcaagaagttaataactttgaaataatgcatgcacctcacactgagtttaatcagggcttattaaagatgagttacatgtgccttttygcc

SEQ ID NO: 1967 - DNA, 598 bp, Bovine  MMBT18497
  misc_feature (1)..(123): n is a, c, g, or t
nnnnnnnnnnnnnnnnnnnnnnnnnnnnnnnnnnnnnnnnnnnnnnnnnnnnnnnnnnnnnnnnnnnnnnnnnnnnnnnnnnnnnnnnnnnnnnnnnnnnnnnnnnnnnnnnnnnnnnnnnnntaattttttctttattatatgccttctatctgcttatattttgagtgaaaatagcatgctctgttgtggaaatcaattaggatgtttaatcagcttattataaattatataattttgtgtgctgctagcttttttttagtatgtggaagtatgctttgcagtgaggtgttcttggtrtaatgttaaagtattgagacagtcacatttttttccccttacatgtgtctctctctgccaagttaaaaattttaaacatcttaaaaaaacccacagtggtatgtctctataaaatcctaacttaaatttagtgaattcttggattaattacttaggatttcattttgattataggatgaattgaaatctagcatgtttaaagatttttattatawgagaactgctccgtttcttacagttaaggaatatttgtggaacattcaaatggaaaacatttattattacttttgttttatac

SEQ ID NO: 1968 - DNA, 600 bp, Bovine  MMBT18716
atacaataaaacagaatttataactaatttataccacaatacaaatgtaagctttcaatctagtcagaaataatcatactatatatttctcagaaatcatatgtagaaactatgagcacaattcaattgctgtaaacaactcacagaagatttataatagcaaatgtagatatttaaatgagtctacatatttacctagtacatagcccccctttttaacaagatgtaaatatcccatttcattatttcaagtcaattttggttttacttttaaagatattcaaataggcataatttagratttttttaaatgaaacaaacactgagatctatatatagtcttttcaggtcaatgacactggtctgactcaggagtaaaatgttctaataatgagaatcttttgctactttaggtattagacacctttaccaaaaaggtgagagagattgagaagggagtacgacaaagctgtttactgtcactctrtttatttaacttatacacagagcacattatgygaaatgctgggctggatgaattacaaggcagaataaagattgccaggagaaataacaacaaccttagatgtgcagacaata

SEQ ID NO: 1969 - DNA, 600 bp, Bovine  MMBT23284
tatgtggagtctaagaaaacatagcaaataaacagaaaacagaaaaaagcttggccacctagtgtgagctgactcattggaaaagacccaaatgctgggaaagattgaaggcaagaggagarggcrgtaacagaggatgagatgtttggatgccatcactcaatggacatgagtttgagcaaactttgggagatagtgaaggacagggaagcctggcgtgctgcarttcatggggttgcaaagagtyggctgtggcttggtgaccaaacaacaacattgtaactagacttatggttggtratcattttgaaatgtttagaaacatasaatcactatgttttgtaacaggaaagaatacagtgttgtagatcaattacatttcaaaaccaaccaagcaaccaaccaaccaacaaactcaataaaaaatattagatgtgtgattactttagatgaaaacatgaaaggagaaggacttggatgaaggtagtaaaaagttataatcttagtcaacttattctcacagcatgtcccagttgcctagagaggatcaaatagaacatttgacacacacacagacccacaatgtaactaaataagcac

SEQ ID NO: 1970 - DNA, 600 bp, Bovine  MMBT18477
tgcaggtttgtatttcttctcttctgaaggatcctgacggaggaggaaaaccagccggcagccgtggacatagagtgagtaatggtgtcggttcatctctgcagagagaaattctactggtaaaccrccagcttaactcactactcaccagacagcttttgcagaaactaacacctgtgcccagccatttttattctggctggccaaaaattaattctgttatttcacgaacactttgtgggttattacattcaatagttacacctgacacatctgtaaatcttctccagcaccgttgartttcattttcactttctacatgagaattaatcactaaggttttttgtctgttagttgaatattcacatcatctgaagtataactatattctgaagaactaccatcttatgagaytccagtatacatgtcactcagacaattagagaaagtatctgcattaaaattcaccgaagaattcttcttcactcaaaatttcattatgcatcattgtaaaaaaaatttagggtaataaacttgtrtttacaatatacacaaggttggaacaaaaatctaagagcgaaatgtgaataacaacaatcg

SEQ ID NO: 1971 - DNA, 600 bp, Bovine  MMBT21438
gttcatgaatcaaataaaaatcccaaaagaaaatatcctaagttttatacccaaggacaggctaactttatctgtctgaacttaacatttgcataccccttctgaactgtacattggtttaatatctttctacactgatatctaccatccacaggtacatgaaagcaacatttgcctatacatctgcataatagattatgtccagttaattaagctcataaaacacatgatgagctgcaactggaaaggcagacagggggctaaatcattatatcaattctatatgaactcttgattttrcacactgaaggcaatggggaagaacagaactattttaagcagaaaamtgacaaggatcagatctacattttagaaagatcattctgacagcaacatggaagatggattagatgagggacaaatttggaggtgaagagactttaggctgctcaagttattaaagtgagaaatgatgaaggtcaaaagtaaagccctgatgraagacactggagaggttaaggacacatttaagcactactgcacctgggaccctagttaataattttaaaacccaaagaatgaaaacttaaattctggaat

SEQ ID NO: 1972 - DNA, 600 bp, Bovine  MMBT23118
gccacaagaataacaccggatgcagagaaatttgtgtggagtgattagtttccgtttctctgcccacactgaagaaatggagtctatttatgtgagaggctttcctttgagttgggcccatctaatgccacatttgtgtcttacaaattctgaatagtcttttaacttttaatagcacaatatattaaccactctcgtaattgcatagataaaatccacgtttcacatgarcatttaaatgaatgcaaatcaacctaatggcctctcctagagggaggattatcatgcagtgaayatttrctctaactgatattatatatgcaaatgagattttaattttgatatactttcacatggacatattttcagttcaatgcaaatctacttatagtgtatcattaaggctgaatcagtctcttttctagtgtgtctatgtgtgtggttaatgttgatacagacgatgaagcttaattttcagaatatcagatgctctattctgctcaccactctcccctttcccgcccccaatgtcagcattattatggaaaactttattttttagatggggacatgatgtcttacctacctacatatattttt

SEQ ID NO: 1973 - DNA, 600 bp, Bovine  MMBT20297
tggtcttcatatttgcctctgaaatttcagattcagcatcagcaggaaaccatatttgaattctttatctaataatgagaatgaattgtctctttcttctctggttggcttggttatgggtgttgtgagaggtaaggtctgtatcctggctcataacagaattcgtcgtgactgtaagggtatgaaccatctctctatactcagctgtgttgactgaccacaggcccttttagtgtgcaaatgtggatagattttgctcactctgaatgagctgatgttgggcaggtggataacatcayrctacaatgaaatcattckctctctccrtggcctccacaatttcccatttcaaaagaccccctctccttttctatttctaagccccaccatgcatcaagggcttcccaggtggctcagtggtaaagaatccacctgctagtacaggagacacaggtttaatccctggattgaaaagatcccctggagaaggaaatggcaacctactcctgtatttttgcctggagaatcccatggacagaggaacctggtaggctacggtccatggggttgcaaggagtcagacatgactgagcacaaaca

SEQ ID NO: 1974 - DNA, 600 bp, Bovine  MMBT18579
tggcatcaccgactcgatggatgtgagtctgagtgaactttgggagttggtgatggacagggaggcctggcgtgctgcgattcatggtgtcacaaagagtcgaacaatactgagtgaactgaactgaactgaatagatgagctctgggaatgagtaaaagagagttccaagggataacaccaacattacaagtatagaatgctgggaaacttcagggtaccatcccaatgaaagaggaagatctaataaaggaaattaaaaagtgtccagaaagataggaaatgagtagtatgctttaarccaaaagaggaaagaatgcccagaatgaaaatccaaccatgactacctaggcctgatgatggctccattgcttactcactatgtgatgggcgagtaatttaatctctttgtacctcagtttcctcgtccttcaaggggataagagcgtctactttataaagctgaggggaggactaaacgatttaatataagaaaagtgcagagcagggccaaggacaaaacaaatgttttaaatatataaatgttaataaaaagaacaaagtgctacagagaaactactttagatagttgatgaatgcc

SEQ ID NO: 1975 - DNA, 600 bp, Bovine  MMBT19176
gcagtcaccatccacagtgatactggagctgaagaaaataaattctgtcactgtttccatttttttccctatctattttccatgaagcgatgggactggatgctgtgatcttagtttttttgaatgttgagttttaagccagctttttcactctcctccttcacttttatcaagaggctctttggttcctttaggaccataacaaaatcatcttacctcccattatctcccgcgaggtttattgtggtttatcaagtggttacatgcattaatgtgctggctcttttgctaatggrggarttccttgcatggaggggggtgtggttaaggtaatagcaccatttctgaaaacaaaacacaaagccttgtttctctacgggagatgttttcttaggtcaaagagaggcttctcagtcttactagagcttcagagaagctggtggaaggaattctgttgtccagggagacagagtctgttctgagcagctgaaggcatcagggcggaggcccgggtgaggtgtggggaacagactcaggcatggcctttcctcctgagcccctcactccttgcagtggcagattgctactgttgtttggtca

SEQ ID NO: 1976 - DNA, 598 bp, Bovine  MMBT22501
  misc_feature (1)..(32): n is a, c, g, or t
nnnnnnnnnnnnnnnnnnnnnnnnnnnnnnnngaatttctgcagcagcagctccggatcggcctgtggtccagctctcattgagggtgtgaggggggaagggcaggtaaggccagggtagacaggacccggctcctgcagggtgacactggctatggtttgaatctccaggatccaacaatgccagagggtgtgagggccagaattcagatgcaggctgtccccagatgacccccagccacacttatgttttaaaattatattcttactgtgaaaacatgttgtgaaaacagcatgaggrtgactttccaagaatgtgtttcaattgcctgtrattctccccaggcctgtgcacaataattgcttacaccttttctgtgatcccttctggtctttgtctacattaygcataaattggtcatagctctgatcctcctgtccgtatcactctgtaagcgctctgcctctcctaaatggtgytgcttgtttctacatagcgtgcataattatccatgttaatagctgcatattatgtaggatcatttttaattaacaacagcaccctgggttaacagttcatcgttctgccaagaattact

SEQ ID NO: 1977 - DNA, 600 bp, Bovine  MMBT21697
gagatatgtcatttatatattttttaaaagctgtctaatagaaaagaacactatcttcaaataagatgaaattaacagtgagaatcaggcagcagtatctcccctatctgtgtatatctcaaccgagaacacttgctcgaagcacgcaagaaacaacagctccttcattcaccacacctgggctggggaattccacagtttcacatttacaccaaagacaagagtgaggaactagttctctaaagggaataaagcaacaattcataatgttgyaacagtatcaaaaacatgcaaatacaraagtggggtttaattactcacttcagcctctgcttctatcttgtcctctttcaccattttttctaccattctctcagccaggggcagaaacattgtttttgaaaggttttcatcctgtgctgatatagactggaggagaaagatacatgtttcattctaatttcttccctgtttgcactatttatattatcgccacgcagactattattgtgactctggcccataattaacaaaccactatgtcaaatatcagacctaatttgaatttaccaagaagatacattagagatggtttgcttt

SEQ ID NO: 1978 - DNA, 600 bp, Bovine  MMBT19621
atgcaactgttttcaatagcaagtgaattgagtttaattttgcttttgcagggggaatgatggcttctcagggaatttcaaccttttacaaaacaagtatagcacattcaacaaaaagaatatatacttatatctccttatttgagatttctgtrcatatcattaactccctagctgaaaatttttattttgtaatttcagaatcactgtacatagacgttaactctcatagcttttcagggctttattttcttatttttagagagcacataaaggaataaagatgaaatgaactaaagrtatgtycagagttcgtatcatgctgctgagagttgtacatattacttcttataattcagattaaatgtaaaaaaaaaaaaacttcctcataatgatttctttsatgtaaaaatattgataaaaaaagaagtactggatttcttgctctgaagtcttctaaatataggatttttcttagcaactgtatataaatggccttgttgatgaacaaggaaattactggatcagtccctaaagaaataattcccttgatcacaaaatatgttattacattataatcccaagggattccagatgctc

SEQ ID NO: 1979 - DNA, 600 bp, Bovine  MMBT21088
aacttaccctatctaatccacagcagagaaccaaaagacwtggagaaaaaagcttcttccaaaagagataagacaaaaggatatttaacaccagggttaaaaagttctagtctgaaccaattgtggcaattttcattcctcctgccaatgaatgctttagcaataagcatctgatgcagttctggccagtaagacaagagactaagtttgctgaagagattctgggaaaggttttcctgggctgatgaaaaaagacacccaagtgaaaatacgtatttttttcaggcaactttgggtttraattgttaagcagaactatgacagccatcttaggaccacgagsaaagagaaagtctaagaggacaacccagcagaaaaggagcgactgcactaaccgacggaagacctgggtctgaggtgatgctacttcagttcagtgctcagccgtgtccaactctgcagccccatggactgcagcccatcaggctcctctgtccatgggattctccaggcaagagtactgcagcaggttgccatgccctcctccaggggatctttccaacccagggattgaacccaggtctcctgcattgcaggagg

SEQ ID NO: 1980 - DNA, 600 bp, Bovine  MMBT23245
tgacacaagcttaacatcacaaatgggtattcattgtattgccacggcaataagccctgcattggtgaagaagaggtgactgcctaaacttttktgctctaaatcttgctttaaacacataccacagaaccagaaaacaggaaagttccattaacttggtcacacagagcttccttgtgcttcaaatattgacctaggaccagctcctatagcatcatgccagatgtctgaggtccaagagagcaactgctggagaattattgcactgccatgccttatactaaagcatgaaaagcctarcacatacatacatggagagaacaggtaaatgatacatgtatacacttcgtaaacactaaggtcatcaggaaataaggcagacatcaaattttaaaacaccatatatgccacagccacaggaaatgaagttgagggggctctcagtatacccaaagtggtctccctaaactaaagagcacacatctggaggggttctcatattaaaacaaaaaagtatcaagggaaatcttgctaaattcttgtcatcttaaatgaagtttcctctaaagcttaggtttgtaccatgtcctgaaagggatt

SEQ ID NO: 1981 - DNA, 598 bp, Bovine  MMBT18855
  misc_feature (1)..(70): n is a, c, g, or t
nnnnnnnnnnnnnnnnnnnnnnnnnnnnnnnnnnnnnnnnnnnnnnnnnnnnnnnnnnnnnnnnnnnnnnacacttttccattttacattacagctgctgctgttttcatccttcggtcagcgttcaggaagacttgcctggcttcctggggcacttagtcactcctccctctggctggcacagacctgcgctgagccttgcttagaggattatgtcacattctctccccagccagaccttgagttccttgaaggcagaaactgtttcttttcacctttataacccaatgtcgaccactrtgcctgccacaaagtagggattcaataaacactgaattaatgcgagaaggagaaaacctttgataatgtttttgttctgatgtttyctgccatttttatacacctttatgtagacacatgggacttcccagtggtaaagaatccacctgggatgcaggagacacaggtttgatccctgagtcaggatgataccctggagaaggaaatgacaacccctgccagtgttcttgcctgagaaatcccatggacagtggagcctgatgggctatagtccatggggtcacaaaaaagtcagaca

SEQ ID NO: 1982 - DNA, 598 bp, Bovine  MMBT18888
  misc_feature (1)..(20): n is a, c, g, or t
nnnnnnnnnnnnnnnnnnnntacttacaattgcaggcagattcgatgagtaaacatctgagctaccaaggaaacccttagatataatgttttagcttgcatggagtgtcagtattactatggatggcatacagtcatttacaaaattgtattaaacttcctgtggccggttgcatttttcaaaatcggttgaaatagtatattcagtctcttgtgctcttccaaccccaccctccttacctagtcaaaagatggyatctttgttcctattctttggacctgagtggacttcttgggtgarcttctataactgcacaagaaagtaatgcttttgaagctggctcttaaaaattratacagcttccatctagttcccttactcagagcatatgcctgcggacccctgaagtacaggtgccccgaagtcaccatgctgtggagaccacacagcagacracatgtacgcagagaatgtcagaggaaccccagctgtttcagccccagcartttgaacattcccagactcaatggcaaacgtgctaatgaggaaaacagatgacccctgcatcatccctgcctcacggcaaccaggtgagaga

SEQ ID NO: 1983 - DNA, 600 bp, Bovine  MMBT20993
agagaacactatgggaagagatatgagtgagtctgagagcaagagccagtcccagccggtcaaggggactcgtgagcgcggagcatctgggagctaagaacagcaagtgaggaccagcgtgaagcgaggtgctggaraaggaagggcagagatctgctcattacctgccttggtggaataggagctgagacccagccaaggagagtgaattatcgattcctgtctgcaaatcagtaactgtaaccaaaggaatacgttaggcatattggtaagsagaggatccagaagtcataccaagcrcaatgagggcaagtaatgtttgctccataattatctgctgatcggccaagaggatgaatatgttcttttagctaagcttttctagaagtgtattcatggtgccagcctccatctcctgagcctggtgcttcacatcccctaacaagccccgatgcaggaratgttaaaggtggaggygagattcagggaggtgaagctccacagaccagctccctcccgggttagtggggccatgagacccatctcacaaaagtgtcgaaagggtcgagaagatgaaacatgctgcagcttatgtgattc

SEQ ID NO: 1984 - DNA, 536 bp, Bovine  MMBT21039
tattattgtccttcaatcagatttgtgttttcatattttcataggtttatttctctccgagaaatgtttacattcctttcattagagtatctcacataaaagatggttgaaagtatatttgttaatttttttattccttttaaaatttatcacctaactgaggaaactgcacctagtgttcaataaaatacattatcgagtcacctcatctggtttaaataattaggttaaagtaaaagaagttaagaaatagttgaacataatttgcatttaacataattttctataggggaaacagtrttttattataagaaattaaatttattttgtgtccaagtatttctaagaccaatgagattgcttttaatattttaattaataatggacaatatttattgaacagctgtgatattcttagaactgtcattaatttattacttaaactgtgtcatgtaatcataaaaaacatactgacttctattgacaaataatgtaacaggcatagtgatgtaaataacctagagtttgatgactgt

SEQ ID NO: 1985 - DNA, 600 bp, Bovine  MMBT22104
gcatgtgggatccctgatcctggggaatgcaggatcttcagctgtagcatatgaaatctagttcactgaacagggcgagaacctgggccccctgcattgggagtgcagagtcttwgccactggaccacccaggaagtccctgctctttttgcttaatgttctctgatcaaggaaatagtttccatgcaattcagctttctgttttcttccaatagttkgcttagtttacatgttttcatacaaytggcttggagggagtattttgacacagacattttctcatttatcagaargctctgractaggcagattycaggctctgtggggagtgagttataagaatgtaagagaagaggatttgcctttatttgtggttatggaaatatttctgcaagactttcacaatgaactttgtcctacaccaactcttctctctcgactgatgcttatagaaactttttgagcatggcaaaaaagaaagtcacaggtattccaactcctccattcccacaactctcagacactatcacatacactcccaatccctgcaatataccccaccactgggatataatcttaatttgtaaagttgtcctccat

SEQ ID NO: 1986 - DNA, 600 bp, Bovine  MMBT21444
aatgacacaaaagacttttttctagtttttatcactaacttttgtaaattataactgttacacatagcctaaatgctaatatatcaatttttactttttgaatgaaatttgttcattcattyttctatttagtcaatcaayaaatatttattgaggcactgtgctgaatatatttatggatggtgatttacctcttttcactttaaattatctatatagacaatgagcactgaattatgctacattttacacaaaaggtagggatttgcttccacaacctggcaggaaacctttaagcarggcataaacggtattcacagttttgaattagatcagaaatgctctgctgaaaccaataatttggggtttcatttttctttttatcttctttattcttattccagctataaatcatatcactacccattcattcttctaagacatgggaacatttaagtggaagggttctgtttattctttccccaaaccagtgactaaatttaaataaaatgttctttgagggttgaaggaacatgccatttcttttaaagttgtcaaccctctaaaaaaaagtttcaaaaaggaaagccaaaaggagtg

SEQ ID NO: 1987 - DNA, 598 bp, Bovine  MMBT23103
  misc_feature (1)..(58): n is a, c, g, or t
nnnnnnnnnnnnnnnnnnnnnnnnnnnnnnnnnnnnnnnnnnnnnnnnnnnnnnnnnnttttatttccccctcctcagtactacagggtacaattctacctttcaagtggatcatacaattaaaatttaattcttaaattaagaggcaatgttaaaagtgttgtattttaaatccacatagaggaaagtcttctaacagattatctaagaacagactcattattatcctagtttatatgaaattgaacatcctttgggcagctaacattacttctctccttgctgtgggctttatgctcrggactcatcttcagtaggaggtttacctgatgagctgaggagtgctgcagcatccggccttggtggagaggttcgcactctggctgggtgagtatggaatgctcatagttattcttcctcattgtcttatgttcatgtgtcttcttaatagacattcatgcagtgatgaggctataaacctcctatgcagatggcagacccctctttgaaggaatatttgcaaaggtccctgcccaattgacagcagtttattccttcctaacacacttatttgcttgccatagagcaatgggaggta

SEQ ID NO: 1988 - DNA, 600 bp, Bovine  MMBT21895
gcggtaagtattagagagaatcaatagccagtcgctagtaacagaagctgtgtgtttrgagctgagtctctatgctaagggctgtgtacatataatctcrtttaacacttgcaacaacacaattagatgctttaatccctaattccattttacaggctaagaagctgaatttagttgggtagtttacccaagataatatgcctattcatctatggaactgggaagcaagcctagaagaaaatagttcctcctgaaggagtcagcagagaagacaaacaatgggcttaggttccaagcaarwcaggtgatagaagtatctgacagtgactataacacaagtaaatgcacaaaataagttattaaaatgagaacaagactacccaaatgatccagatgcatttgacaaagaaccaaatgcaatttctaaaaataaaaaagcatgctcaatgaaataaaaatcccagtgggttaggcacayaaggtcccaattgagctaaagagagttagcggacagatgaagagagaattaatgaactagaagatcaatctaagaaaattatcaagaaagtagcacagaaagattaggaaatagaaatatag

SEQ ID NO: 1989 - DNA, 600 bp, Bovine  MMBT20373
tgaaaactttagcctttagccacatatggtttagcagttttcccagggctcagtaaaagtgtatggaaagttgcatggccttcattttcgacrtgttgattactggttcatcagttgtgacagatgtaccatgtccatgagggtgtragcagctggggagctargagaagcagcgaaaagctacrcgtgagctccttwctttaaactccactctgtttttctgtaaaccaaaatgttccccaaaatagcctatgaactaacacatgaaagtaggaagcaaagacaaaaagtcagatgcyrcagtttggatgttttcagcttgttttctattatttgaagttttaaatgagttgccttgtgaaaagtaggacgttggaaagatttctgcacccttatttttgcttcgtgagctcttaagttatcatcccttaatatgttcagataattgttacttgctttgtaattaaggtgaagggcagacagatgctgtgtcaggaaagaagcaaaggttttcgaagcttcaagctgtggccccagacaagtaacacccctcgagttcctaggagtgctgtctagacttttgtggcactttagaatcca

SEQ ID NO: 1990 - DNA, 598 bp, Bovine  MMBT19415
  misc_feature (1)..(121): n is a, c, g, or t
nnnnnnnnnnnnnnnnnnnnnnnnnnnnnnnnnnnnnnnnnnnnnnnnnnnnnnnnnnnnnnnnnnnnnnnnnnnnnnnnnnnnnnnnnnnnnnnnnnnnnnnnnnnnnnnnnnnnnnnnnacaagctgcatagcaacgcccaccgttcaggagtcagcaaggaccaaagaaaaacagcacaagttcaactgaaagagtgaataagcaaaataaagtgaatccacattaaacaagcaagtccctttagtgctccccagcccaggaagcaatagcagaggggaaatgaggtcaactctgcrtatttggaaaaactattccacctgtacttctacagaatgagactaaccaatttgggaacttcagtagcctgtgacacattatctttgccarttgaaattttgtaagtcttgccttttttctctccatcataatttgatagtaggtcagcattatttgatagagatcagcattgttactgaaactaggagcataaagggtgagatttataactcacccatctagattaaaatctgtctaaaggcatgacatggcactgcaggcggtcctgaggaaggagcagatgcgtgtccactccct

SEQ ID NO: 1991 - DNA, 598 bp, Bovine  MMBT19414
  misc_feature (1)..(30): n is a, c, g, or t
nnnnnnnnnnnnnnnnnnnnnnnnnnnnnnacaagctgcatagcaacgcccaccgttcaggagtcagcaaggaccaaagaaaaacagcacaagttcaactgaaagagtgaataagcaaaataaagtgaatccacattaaacaagcaagtccctttagtgctccccagcccaggaagcaatagcagaggggaaatgaggtcaactctgcrtatttggaaaaactattccacctgtacttctacagaatgagactaaccaatttgggaacttcagtagcctgtgacacattatctttgccarttgaaattttgtaagtcttgccttttttctctccatcataatttgatagtaggtcagcattatttgatagagatcagcattgttactgaaactaggagcataaagggtgagatttataactcacccatctagattaaaatctgtctaaaggcatgacatggcactgcaggcggtcctgaggaaggagcagatgcgtgtccactccctggagaaggtggtggagcagaagactaaagagaatgatgagctgaccaggatctgtgacgacctcatttccaagatgaagagaatctgacgc

SEQ ID NO: 1992 - DNA, 600 bp, Bovine  MMBT23100
agtaaatccctagtgacctactgtttttcttttctagtgaagtttctccaagcataatcctatcacttttgacttgaatgaactagtcactgtctccagatgtgaattatagcaccacatagaggtttaattttctttttgtttaatttgaccttgagcaatcataaaaaggcaatatgagctccagttctaaactttatgcatcttgtaactactccacccagaatgattcccaagagaccttgtgaagtaaaagaaaaaaaattggccaaattttcctmctctacttttattaccccrgatattttggcatctctttcttcctmtcagtcagtgcctctcacactctagtgcacaacctagatggacaaccctatgcatggggagaaacttasaataataaatcccaacatcatcttctggctggattccctgctctaatgcttaccacaatgcctggcacatagttgacagtcatgtggtattggttgtttaaactactaactcaatgaattaatgaacagaactgccacccaaaagaaaaacagagtgcaccttccactgtcatttgtttggagttcaattcagggccagaagaca

SEQ ID NO: 1993 - DNA, 600 bp, Bovine  MMBT18518
caccttgactgcagasggcagttttgggacgtggttaaaattacaaactgagagacttctctggtggcccagtggttaagactccatgtttccaatgcaggggctgcaggttcgatccctcgttagggaactaaaatcctacatgctgtgcagtgctgtcaaaaaataaaataatagtaataataataaaaagactgcaaactgaatttatatcatgcctttactgcttcttaggcagggtactcaacttctctgtgcttcagtttccttgtctgaaaaatgggcatatgatagtacctrtctcatagggtgttgtgttgattaaatgaatcaaatatgcataaatygcttaagacactgtctggcacatagcacatgctgtgtaagcatttgctatgctttggtttcctctctataacctctaccatattatgaagttcytgaaggcaaggatcaaattcttttccactctcctcccaccctacactctgggacccagcacaggacrtgaggcagagaaggagctcagtaagtgtttgctaaatgaataaatgaatgaatatgttttaaatgataacttgtataatccattatagatct

SEQ ID NO: 1994 - DNA, 600 bp, Bovine  MMBT20387
tggtagtatggtattttagattcccaacacatgtaaaatttaggcagattctaatggtatgaatgacttaaagatcattttctgagtgcttctggttcttactcactaggctactgaattgcttctgtgtataatggcaacccactccagtgttctttctgggaaaatcccatggacagaggggcctggagggctatagttcatggggtcgmaaagaaytggacacaactgagtgactgagcatatagtttgagataggaattaatcatatcaaagtccagaagtaggctttaaggcaarggaattaataaacttcaggaccagaagggcccaggatagaccaacaaacattatttcctgtcaagtcttactctaaacycaagctggttctaagagcatacagcatatttttttaagtacttagaagaaaagattcaacaatcacttttagaagccaaattccctgatagctcagttggtaaagaatcttcctagaatgcaggagaccccagttcgaatcttgcatccggaagatctgctggagaaggggtaggctacccactccagtattcttgggcttcccatgtggctcagctggta

SEQ ID NO: 1995 - DNA, 600 bp, Bovine  MMBT19908
tgatggaaaacatggtataaatatagatattttattcaattttcctccaatctgtcacctactgagatgcaaatgcatatcgggactgataattagagatcattagacacacatctgtatttggctgttgcacaggggtaaagatggtggcaggaaccagatgttggggtgggaggatattatctcagttgttggcrgtgggagtctgaaacaagggggcagcaagaaagccacaaacaaaaataatcagagaagataactgaaatgagcgaggctacagaatcaaattggttgagggarcttagtaattaagaacagacctttcactggtaaagtctattacctacagtagcactacatttttgagttttttaaactcttcttgagagagcaaacacaaacacatctatatgcgaaggaaagctgtagtgcgcaggggtatatgyggaagagggtgctgagaaataaaatgaggcttgctagattctattattcttgctagataatcaaagctagattctttcacttcaaaccatcagaaacatttctactttcctttcctgagttcctacacatatttatttcaaaggtgaaaaaaaa

SEQ ID NO: 1996 - DNA, 600 bp, Bovine  MMBT18519
gcctcctctccttcctgtctgtctgtctgtcttcttcgctgtgtctctggcgctcgctgggtccagctgggtgctatgcgagcacagcgacttccggggccgccagtggctggtgggcagctgtgagatcaccaactggctgacatacagcgggacccagcgggtgggctccctctaccccatcaagcaggtgggtatcatggcgggttgagcacatctgggtcagcccgtctggctgtgtgtctgtctgtctgcgcgtgtcccacatttcccaaattcagtgtttatgtactttggtcrtaatttttgtcctactatgattcctcttgaaccgttacgtctttaatattttcctctaaatcaactcacttttttcttttttaacgttatctttatcctaaggaataatgtccataagatcgtgggtttgatgtgtgtgtgtatgatttttccttaatagacactgataaacacattaccattactttttaaacaagaaggcttatccacataagcctgaaaattatctcatgtaccacccattagcgagcacgcctcactttgccacgccgtgtctgtacctatgtttctgtgtgtctg

SEQ ID NO: 1997 - DNA, 570 bp, Bovine  MMBT21460
acaccttccagggggaagttgggcaggaaaaaccagactttgtgtgtacagctgaatattttctctaacttcatcctatgaaaataaaaaattattaaaaaccgatcttcttttaaattaggataataccgcggtttaaaaaatagccttgtcataagtgcttctccctatgaagtgcttctcatagaaaaatatacaaaatatatttacatttataaaaccttaaatagtaaactgtaaacagaaccgagtaaaatccaatgacttaatttaacaggttcaggaaccgtcttggggaaragaagagaagaaacatttgatgctgttttgaccacatcctaaggagtaatcagggcagtagtgtcatttcatttcatttgctttagccacagattttgcacaggtggcagaggtccctcgatacaaggtggtctagtccccaagttttgggccttgaaatctgattagtgttctgccttcaactggacactgaccatttaaaaattaagtcttcctatgtcttaacaaggggaaaataaagttaccatgtcctaggaagggacccagggg

SEQ ID NO: 1998 - DNA, 600 bp, Bovine  MMBT20241
tgctcccctcaaatttcttctcctcattccagccagaacttgggtacacaagcaaaacttctcatctctgcttaaaaccctttgactctggtccctgcctggacttggagaagagtagtgatgctcagagttggctgccatttgaatcaactaggaagctttttgtgtctcctggacataagcttgcatttcaggtgatttggcaatrtgtgtgctgtgtttatgagttgactccccrccckatcaaaggaatgataacagagaagagccttttgtgatgtgtcagatttccagccgacrgtgtcatgtgcaatgcactttcctgtaaatgctaaataaatacttgttgactgatttacaaggtcattttagatctagcttgaatactaagtcaaagtcaggctagaatcattatttatcatatcactatttctgcaaaccttttctcaaggtctggggttggctttcctcttggagccaggtcatatataatattggaaggcttttttttttttttttttttaaacaaaaatcagaatatgtcttactctgaaacttgcacatacagtataatgaatcttcaagcttgtgtcctttcct

SEQ ID NO: 1999 - DNA, 600 bp, Bovine  MMBT20324
ggtctgccattttctggctgtgaaattttggacaagttacttaaccactttaaaccccagctttaagaagtaaattaaccccagtaaattaagaagtaatagcagccacttcgtagagttgttatgaggctcagatgcagtgcaaatgtgtataaagtattcagggagtcacctggtatactataatagacactagaatagttgccaatattatyagcatacaatctgaggattctgtcagccaatcattagcaatctgttgtttgttgggacatgccagtgttctccagttgaaatcartagcaatctaaaaatggatagattattcctcatttaaatagtgtgttcatataagtgattgcttggatccttatcagaagttgctgttactgaaaaatgataaggctgactaaattgtgatagttgtcagttactaaccaactcccagaaatgaataagaggaacctatctctagttcctagtagaaggtatggacaaaatagtaggtgaaaaataatgtcttgaacccccaaattaagtaagcttwaaagagtacaatacctcaaagggtctttgcggtttaaaatttgtatgctgaga

SEQ ID NO: 2000 - DNA, 600 bp, Bovine  MMBT23219
ttcattgttatgagataagaaagaactgaagaactataatatattagaaaaaataaaggaaacatcacagatatgactaataaatgcaacgtgaagtcttagattgactcatggaaaagaaaagggatgtaaatacaaaaactgatgaaatccaattaacctccattgtttagttactagtacttatgtgaatttcttaattctgactattttactatggttatgcaagatgttaatctatgacagaagagacaagaatatacaattgaaaaaaagcagtctctttaataagtggtgccrggaaaactggacagctatatgtaaaaatgaaattagaacattccctaacaccatacacaaaaatgaactcaaaatggattaaagacttaaacgtaaggctggataatataaaacccttataggaaaacataggcagaacactctctaacataaatcgcagcaagatcttttttgactcacctctgagagtaatgaagatagaaacaaaaataaacaaatgggacttaattaaaatttataaagcttttgcaaagcaaaggagaccagagacaaaaatgaggtactatgtcacactggtca

SEQ ID NO: 2001 - DNA, 600 bp, Bovine  MMBT22499
aaatagtcaggctataacagagacagggatagactttaaaagcaaggaagctgagtggccatgtgtgtaacatgtttgtgcccacctggaatcactcaggttaaaaatgaactcagaagttgcagagaaaaakattccttccatgtgacttaargtagtttctctctaagggcagggtcaagattctggcaawaaggaaagggaacagcaagtatgtcaggcaccgtctggggccccatgggatggcacatggttctgccaggaaatttacattttccatttctctctgatacaatcatrcctcccattgcctcctgaagaaatcattatgaagaaattagtcacccaagacctacatgaaaagcagatgtaaaatgcaaataaaccccccaacactgaggctattctcttcgccccaaaagaatgaggaaggttctcaagagttatgggaaacagcacccacttaggccagacacctccacttaaagcaaagccattctgatggtcatccaatgctagaaaacattctaacactgggtgtgtcgcccatgctgcaacaacagaagccccccaaacaagtgccacaactagaggaagccc

SEQ ID NO: 2002 - DNA, 600 bp, Bovine  MMBT19646
tgttataatacctgatgtgttagtactgcttcagctgaaattcctgtcctctgtggacgtggataaatgttccaagcagtgggactgttcccatgcttctgatagtagttctcagatgcccgaggtctttcaaagaaacttgaggctaaagaatcctgatccaagactccacaaccccaatcctagataaaacactgaaatttattaaaaaattaaggtataaacagatgaaagaaaaaaaaggagttcagttctaatgttaattaatattaaagcaaataaaagtatgatgatcagcargtaaaagcaaatgatcagtcgacgggtatttaggttgcttccatgtactagstattgtaaaaactgctgcaatgaacactggggtgcatgtgtgtctttcaatcacggctttcttagggtatgkgcccagtagtggggttgctacygctctccagtagtgggtatttgttgcagtagtggatgatacagtagttcagttcctagtttgccttggctttcaaaagaacacatttgagtcagtcctaatgaggtagatgaacctattatacagagtgaagtcagtcagaaagagaaagacaa

SEQ ID NO: 2003 - DNA, 600 bp, Bovine  MMBT20238
gcacttattctgatgccagcagaattgtgggaagagacttaagagatttgtattttcctgaatctttaatctgcagaagagagcaactacactgaccaagtggcacattattattatttcaataattctttagwtgtacaactaattgaatcttggaaaatatggtgtattcacataaaaattgactcatatgattgcaaaaatgctgattatmacatagatctagaaattatagcaacagaattgayagtaaacaaaaagtaagaccaacaaaaatatcattgatggtgtttctacggrttaataataaaygtactctcaaacttataatttcctttgagggaaaayaatttttactcctttcctcattatggctatctggtggtttgtgacaacaatttcttcttgaaaagtgtctgcaataccagcactcaaaagtcttctcgtcagttttcccggcatctttaaactggacagctccagccctgattatacccaacccttcccacaaacccccatagccctaggccattggcagtgcacattctgttccagcagatgcgaggctgggtggagaaatttgcagtcttaaagaagtac

SEQ ID NO: 2004 - DNA, 525 bp, Bovine  MMBT20702
tgatagtcatgtgaattttctactatcaacaaagagttcctgtctccactaaaaatcatctgctcattctcttgccctaggccatctattatatagacttcggattacagttaaaatattattaaggctacctttagattttcattttcccaaatctaacacaaatattayatttattttctggaagttgaaaaatcttagtataagtagccattttttccayrttatttgtcacttgatgagttctacaaaaagaaagaaagaaagaaaacaagaactacctttattgttatttcattragaatagaaagatcacttttaagttgcatgccattcrgaagcaataatgttggtttcttttatttaaactttaaaatttggtataataaagaatctaattgggacaacaaaagtaaaacatgtaaaaaataagctacattttcctcccaaactctgtgcctcaaccttcctgaagagtgccatcctctcccacctgaaacaatcgatctattttggtttcactca

SEQ ID NO: 2005 - DNA, 370 bp, Bovine  MMBT18840
ggggggacttgcctgccaccaccgcctggggtccttccagtgggcctcttcctggcttgggaggaaaggggtgcagggcaggggctggccgtttgggagatgcccccactgaaggcatgaaacacccagtctgctgcaacccagggctatgagtgaccatgttgccgccctttctcctgcagtcatcctatgccgtgtctctgctgcgggagtgcgtgaagcttcggccctcggaccccaccgtgcccctgatggccgccaaggtctgcatcgggtccctgcattgggtgagtgattccrgtcgcagggcccaggtcctggcagcttcctgcaggagggtggcagcaggtgggtgcgtcttgctgtgtgt

SEQ ID NO: 2006 - DNA, 600 bp, Bovine  MMBT21701
taaagaaggaattaaagacagagaaaatgcttagaagggtgcctgccatgtggtaagtgctttgcaggtgttgggttaccactttttaattgtcagcatcattatcatttatcagctggggaggtacacattttttgagatttttttttttcctatggaataaggcagggaactggggctgaaccccccacacagtggctctttgagggatctgcatgagagaacgcaggagaaaggggcggtctgttggcttgagtgcagcagcctgcccagagggtcctcccttggggagtgggtacragggcggccaggctgcagccccaccctgggggccagctctgcagtcacctctatctcggcgtagctgcccccagcctcaacgtgttccccgtctgccacagtgtacttcaccagcttcccagccgaaggggatctcaggactgtggggtcattctccttctcaaacacgcacgtcttgttgccaatggtgattcggtaactggagagagaaggaggtggtggggacactggagggtaccatctaccaaggtgccggagtcaggcttctgacagtgtcttccctccctaacagcagccagg

SEQ ID NO: 2007 - DNA, 600 bp, Bovine  MMBT23163
tccacgaggttgaagaactggtgcttgtccagctcagtgatacggacacaacgccacgtctcatctcagccccgcagattctagtgacctcgtttttgcgcaccgcttgagagcagtttccggggcaccccaggaagagacccggctgtggctcaagaacacggagggcccttttgagaggttgtgcgacgcctgcgtcacagtgcttgacgcccgctctcgagactgagcaggtggtcgtcatggagacccgaaacaaggatggcgcctggcccagtgcgcggccacaggccacgagcrgagcgtcrgaggagggtgaggacttccaaggccagccgggcatctgtggtctcaccaacctgggcaacacgtgcttcatgaactcggccctgcagtgcctcagcaacgtgccacagctcaccgagtacttcctccaaaaccgctacctagaggagctcaacctcagcaacccgctgggcatgaagggggagattgcagaggcctatgccgacctggtgaagcaggcgtggtccggccaccaccgctccatcgtgccctacgtgttcaagaccaaggtcagccactttgcgtcccagttcc

SEQ ID NO: 2008 - DNA, 600 bp, Bovine  MMBT22838
atcgatatcttgttctgttttcccagtgggaacctgacttctagtgggtaacatagcaaagagctagaagagagtttcttgtaagtaaagtggcaggctgccctcagatgccaggaggtgctctgagctggaaagaagcccrtggcctggcaggcccctaggtgtccagaggagccttgtcacagagcatctgtgggtgggtgtcctacctcacgctgccttgggcatgaaackaacttggttttcagtaggcttcaccyttgagagcacagagagcctggcaaatctgytcatttctcrtcctaatccaagtgttggcactgctgtgcattagacgaagcttcttactygaggaagatcaatacataatattggaacatggtcttggagagagagtttatggacttgtaagaggcgttgaggcttttagcctgttgtatataaaacagatcaagaaaaacaaagcagaatacgggggatgggagggccttttgcttagactgacattaacccagaggtcctaagtacatggagggctgaggcaaggtgatctggagggaacgtgttccgggcagtgggaacagcaagtgcaaaggcccg

SEQ ID NO: 2009 - DNA, 600 bp, Bovine  MMBT20472
tcttcaggctgaaggagtttgaatccatggtagcccaggaaaagaaagagaaggaaaaacaaatggcagccataaagataaacactaaaaatatttcaccttgaaagtttatgcaaatatgtgcaacctcttcaacaacatcttaaagtttgctggggcccaaggacaaattccaggactttagaattgcaaccagaatgaaacaggttagacattaatgacccctttggccgcagtgttttccacagactcatagatagaaacgtggcaaagcacagcttcatcacacaagctstgacrcattccctaggtcagcttgccctttcatctgctctgagcgtcgggatcttgaccatgaccttgagatgagtccagctgattcaggtatatttctgcctacaatctatccaccaatatctaagcttatgtccttttgacarcaatgatataattttttgagaatgattccatccactgctctgtaaataccaaatccagttgactccacagtttttcagactactcagcatccttacatcctcccccatctgtctgggtgtcccaggtagattccaggtggacaggtaaaccaagcccgac

SEQ ID NO: 2010 - DNA, 600 bp, Bovine  MMBT21198
ggcagttccctgtggacccagttatatctttagagatagttcttgtccaaaaatagcaatttccttcttggtgaacgatacaccaccaagatgttctgctttcttgacttcctcataaaaatttccaaatcgccttacaacaattctgaaattacataccctggccaccccaaatacgagacagagtagtataaggggagagagccccagagcagggctgggcatgcttgaaaactcaactggccaagtttccttgttctagctctgcctccctgatgaaatgggcttaatgcaagacarttggaatggcctctcctcctggctccgacctgattgggttctgtaatgctaagtgtgagacctcatctttgcaaagatacggcaaagaccagaagtaaccacacaaacagcaaatatgatagacggccctgctctgtgtgtggacagcaagctcagaagtggctcggggagtccgtggctgccctaggggcgggttgtggacatygcctggcagtttttctgtgcaggtggcatcagtggttaacgacagcccagcctgtcccrtctcctctggagcgctgccctgcacctttctacccc

SEQ ID NO: 2011 - DNA, 600 bp, Bovine  MMBT22903
gttgtgttaaaaacagacctgagcctgtccctcctctgtttacttctacgctgtcgtttatctgtgaggtccagactccttggcgtggcagccaggctccagccttccccctccctcccacacaccttttattctggccaccctggaaggtgcagtcttctcagacacccttctctctcattaggaacagctaaatcctgtgaggaaaatatgttgacacccttctctctgtcccttggctcaacactctgtttaggctgccagtcccactctttctggctcagacacatgcccctcacrctagattttggccttctcatttgtctgcatccgtacaccttcacacccatctctttcaaagccccgtgctctcactggagtggtttcttcrtatctgggctcatctcctgtagagtccaagctatggaagtcagctcttccatctttctcattcatcttggtgtgctttgcaccggccatagagtgccttaagaaatgttggggttgaaaggattgtcagcagtttgctctgggccctgacaatagacgagtcatggttcccaactcacattctcagggaggaggaatggtagacacaca

SEQ ID NO: 2012 - DNA, 600 bp, Bovine  MMBT20451
ccaatgtctagcacaaggcatggcatgtattgggcgcccacaaatttgttgatgtaatgaacacacttagtaatcctcatttaattatactgggggttttcagattggctgttcataaggtgttaattttccctcaaagatgctgattatccttttggaagactgtcttttcagtaatccccagtyctgagtgtagccaatttaatgtcagagtcttctcgcatgagcacattcaattgcactaatactaagtataaaactgaccgacactgacttttgtctgtcctgtctggagcctgrtggagggtatgtgaaaccatgaattgatctgaaagcagcagcagtaggaagaggaaaagagaagagcattggcagccctctgttcttgtcttggaaatcccattttgatttctgatggtaccaggagatgttgacacaggagcatctgtgtggcactggccatgggaatgctgcccaagcacatgaggaaattctcagaaatgtctttgtgatgggaggagagacagttcttagatatctgtgtcccatctgtaggcatagtaactccttacaaattcaacctgataactcagaggccca

SEQ ID NO: 2013 - DNA, 600 bp, Bovine  MMBT21927
ttttaagcttttttttttagataaaactattccacagtatcactaagaatgtgttatgaaaactattcaaagcaaatataaagcagtgttattaagactcagagatattaggttacttwtataaataaagaacattatttacaaacattatttgctttwtcatagcctggctaacctagaaatttacactgtaacattctctaagcaaacttacctctcacaatgaygttggtggacttttttgcagggtttcccacattattattggcaatgcagctgtaagtgccagcatcttctgargtgatggcaggtatggtcaaagttcctccattcaaaacagtcttttcaggcagagtcccaaaggacctgacccatgtgagagaaggtacaggctctcctcctgtcgtracacatactaatgttatggcctctccaggatttacaacaatagggtcatccaccaagagtttaattgacggagacgctaaaagacaaacaaaagaacatgcacctatttagatctactagagctagacttcaacagtatgctttatatttacacaaacaattaaaatgaaatactgttctcttgtgccaaag

SEQ ID NO: 2014 - DNA, 598 bp, Bovine  MMBT20773
  misc_feature (1)..(82): n is a, c, g, or t
nnnnnnnnnnnnnnnnnnnnnnnnnnnnnnnnnnnnnnnnnnnnnnnnnnnnnnnnnnnnnnnnnnnnnnnnnnnnnnnnnnaaaagttatttattaatggacatattagccatgtagttcccataaaattgtgccatatggacactttgtccattactcaggcatatttgcaaagcatgtgtccaggatcctttgcaatggctttttgtattcagaaaacygcagacctgggagaaaagaaagatagggggaggagtattaagatgcagagaagtccttgtytctctggggaactagcrtgagaggtgcagacaccagggcgtgcaaactgtggcctgtcataaagcccctttgaatgggaacatggaggagctagagcacctccacctgaggctctcaccccacatttacagatgcttccaggagacttcttccccgaggccctcttcctctctggggagttaccgakccccacccttcaggaaggtgaccaagatgaacaattcccagaaatcaggacagagtgcagggcagccctccctgtgacctaggccttagctgacsttctggagtaacagggyccagagggccaggrtg

SEQ ID NO: 2015 - DNA, 601 bp, Bovine  MMBT21303
  misc_feature (1)..(1): n is a, c, g, or t
nctgaygatttgcaattttgaaagtagccaaaggtggcaaggaagactccgttggtcatattgacatgtcatgggacactgatgaacttgccagacttttcaatgaaaacaaggagttaccctcatcatctgggtcattatcatatggtcagggagcaatctggtcacctcagacaatgtggactagtctttttttttttttttwaagtatttatttatttgattgcatcaggccttacttgtgayrtgcaaactctttagttacagcttgtgggatagagttcyctgaccagagattgarcccgggccccctgcattgggagcatggagtctcagccattggaccatcagggaaatcccaatgtgggctgatctttaagaccaacacaacaaacctaggagcagtctaattttcagtgtgtcggaatgtggactcaggtttgaattgtaggtgaattgcgaggttatcagtcaatttgttatatcttcattactttgccaactgccttgaggtggggttggagctcaagagaagtagttggatttggtcataagcagagagaacctgactcctgcatccctctttctcactgaatcctac

SEQ ID NO: 2016 - DNA, 600 bp, Bovine  MMBT19112
cgcacagtgaagagctttatcttctatttaaaaactccatggacaaatccatcaagctctttgacaggtaaattaagcagggttccagtttccaaggagcccaactcatattccccttcaggagcttaactggctttaaaacctgcctcagaatttatgcgtctcggtcttcctcatggtcagagccaactcactgggagccacccacagctactgctgtttctcctggatgwggctattcctgtaacaggcagacttttcttcttgaacaacccacccagagggtaagtcattcctttrctgagcttggggaaagctgtggcagttacaaggcacattttggtcactgatggaccgtgacattaaagtcagtaaattccrtttggagacagagattcccagaccttactttcactaggattgargaaatcatagccccwgtccaaaaagaaaaaagaaaaaaagaaactacacaggtctctttcctgaagagtgatattctgaagggagtgggaaggaactaaatcaactaattatgtgtcagatatttattaagcatgtagtgtatgtaggtgcctgagacatgaaaatgaayggtga

SEQ ID NO: 2017 - DNA, 600 bp, Bovine  MMBT19663
cttattcctgaaggctcctaaactggcctcattctatcattagtagaaatgcctgagtccctttcaacctctgcatgatgttctccaggtatcagacaatcacaggtgaaatccttctttctctaacaactgacagccctcttcttggctgagggaggggaccctgtgcttgccttctcccctctcagggccctctgggcaaagcgcactgcccagcggtgggcagaagccccatgcartttggggatgagcctctgctcygtgtgtaacgtgggcagacacctaaccagcaccaccacrygcatycctctgccctatattttgacctcttcctctcatcgctgctraagtcctgtctggggagcacatttcagtttgcaaagtgccctggaaaacaaatatttgcttgggattgtgatcctgctggatgtcaccatgatggggcctagaaactggggagagaggcgggaaacctgggggcggccaggttccacttaccggcacctccactgactgcatggccaggtcgcatggaggcttcagggcccgtggccgcgtggcgtaccagaaggtggtgagcgccgcgaacgcgccgaagcc

SEQ ID NO: 2018 - DNA, 600 bp, Bovine  MMBT22897
gtgccttctgtttacaaatctgcaggcgagcctatttgtcagatgaactcagtgtggagaggagagacttctagttttgtccttctagaagaagaggcagtgtcacttccagaaactgaactgaaaaaccaataaatgatatctcagctgatctagattgtacctgtcattggcttgggacattgagaacttcctgatggctggagacacttaggcaggagtgcagtgaccatgtgtcaaggatattctcatggggactgagcagagagattaaattacgagacttggaggtcctttccrtgtccctgagtctctgcgtgtgtacagggacaaagtgtacgtcaggggaacagcacatggcgagcacacgaggtcccaggatcaggaagaccctctgctcctcacactcagcccttccatgccgaaayccttgtttctaaaaacaagggattaagttcttaggtttaaggaaacacaattgagtggatgctgtcatttgaaatcgagttatgcattatccatgcccgggactccctggcaccctggccaacacagcagacaccactgtcacctgggggcggctgtccagaagtgggcagc

SEQ ID NO: 2019 - DNA, 598 bp, Bovine  MMBT19215
agactctgaatcgctcatgaagctcagacgtgggcccacaataaaaawaaaaataaagacataatatagaaacaaaaaaagcaacagtgtgggaatcaaggaaggtagtccttactttttctggatttatctaggctgtaaattccttgagggctgcaaccaaatctgtcttattcgccattttctcagtagtagacaacagagggctccataaaactttggcgaatgagggaacaagtgaatgatttctgatcagagagatctagggcagaagaagcctctcattggacatgatgttcraaattggtttagaagaacaaattgttcttcacgttggacagtgggatacttgagaccaaacatctgaatgtcctggaaggtgaacatctaaggcgcattcagtcaatgatatttgacttcggaggcaggagtgtagatgaggatggaagatgagatgggaaagataagctggggccagatggtgaaaagtgtggaaggctttttatgaattatttgtagcatcagtctattctagccacctgctgatagcactaaagtgtagaaaagattcccacaatgctaaagcagacttctcttg

SEQ ID NO: 2020 - DNA, 602 bp, Bovine  MMBT22690
  misc_feature (1)..(2): n is a, c, g, or t
nntatgcatattaactatgtttaatatgaactggaaaagaccctgatgctggggaagattgagggcaggagaagaaggggaccacagaggacgagatggttggatggcatcatcgactcaatggacatgggtttgagcaaactccaggagatggtgaaggacagggaagcctggcatgctgcagtccrtggggtcacagagagtcagacacgattgagcgaatgaacaacaatctgagtcgtctraagaaaagtgaagatttggagtctggctggataccctttccatgggctcttccygtrgacaactctgtctcatgaatcatattccatccagaacctatctcctcccctgtatcctctctcaagttgttgtctgcaaggaggcatggatcttagctatttgaaactacccaattaatgaagaatgttggactctactcaacactaaatctactttataactttttgatgttttttatctggtgtctcaaacttctttaaaaggaaaagaatttcaaccttgaaaatggcatcagtaactactgaggacttttcttgagaacacaaagccacctcttattcataattagtttttcccag

SEQ ID NO: 2021 - DNA, 600 bp, Bovine  MMBT20685
tttctatgcatcagtagcccacattaaaaaaaataaaattaaaaatactcaagctttcacacttagccattttaaaatataaawaactatacagcatsggtgcacattgggaatggaaaggataaccttttcttgcagtccaaacaaatgtcttaatacaactggaataataaaatctaccaaataccaagttattatagacactcttataatttcttcagaaaaatgaattcctggggtccttgatagtcataagctctcagttcctcctctcctcagtcccagtgaaggtctacatartttcaggacaattgtaaaaaccctgagagaaaggaatgctcgttgccgcttggccaatggccatccagatagatgctacatatgtaagtgtgatttattaaaatgattgagtcagaatcttgttttggtctgtttgtttgccactgtggctaggctgggaatctagaaagcatattctttcccctgcactctccctccacctcaggaaaaagagagcagcattatttgtaaagactctggaaagtggttaagcgctaagttccagggcctcagaagcccttagtacagagcaaatgatca

SEQ ID NO: 2022 - DNA, 600 bp, Bovine  MMBT21670
gagaagatgtaatcaatgtgtcaaatgattgtggggggaaaaaaaaaaaaatcccagtgttcccctttagggtggatatgagtcctggttgtagagaggggttcaaacagttcaaaactcctatcaaattccggaggagagaggagaatccaggagttctaattcacacaaatgccatgmagctttcacagggcctccctttcccttccgtctacaggaaagtgagtggtattcaataaccaagttctmaaaccacagctyagtggggaaataaatcagagtccatggaaacggagtcarggagaagtcatgtactctagatcagaacaaagagaagctctggatagaacaagatagggggaacaaaactgcagtaaatatccagacgtgctaaggcaacrctcccagataaaaacaaacaaaactaatcaacccttaagagaaaggaacctggcgtgcagaggaatgataaaacccccactcttaaagaaaacataatccaaagcacaaaacagaattcctcagaaggactttgtgctatgaatcaagttaatgagaacatgcactcagaaaaatatgaactcaaagatgggatgatag

SEQ ID NO: 2023 - DNA, 600 bp, Bovine  MMBT21973
ttatactggccaaactttgaaatgtgctatttatttttacaggagcaggagaactgattcagacacttcaggtatggaccaaattccaccatatttctttgtgatcccttgtatcaagccgtcacctcagggccctggaacagacagagtagctaaaaacaaaggaatcgagccagacattttgaggcattccctttcctgtctttgcttccttctgagagtctgtcctacagaaatggcctcaaagactacattcatgctatctttcaagcagtaggcaccacttkgcttttttctgcrctgatagagttccctagttcccaggatctctaactcacagggcaggagccactcccaagctagctctgcgagcagaatcaaacatgatatggcctgttactcctgctgatttggaagggaagtgatcacagctcaatttcttggtaaatctaaaatctgctagcccctcttttcttcctgcttgtgtctttgtcttctgctctgcggtcaggtgatagaatttaatgttttcttctggcagctttttctttacrtattcccacatctcggggtcattaactggcaacaactgtttgaagt

SEQ ID NO: 2024 - DNA, 600 bp, Bovine  MMBT20095
ctcagagtgaatmctgyttgcacrttagcttttgatwttttagaaacaatcctggtggctcagacaataaagtatctgtccacaatgcaggagatccgggttcaatccctgggttgggaagataccctggagaagggaatggctacccactccagtattcttgcctggagaatcccatggacagaagaacctggctggctacagtccatgggttcgcaaagagtgggacacaaccaagcgactaagcagataaacaaaacaagcattcatagctatgctctaacaacaagtatcaacatratgctgtaaaaactgtggtctaayacattgggagctaataggtaagggctgaccctcctggaagcgagggctgttcttggatgtggaactttcagtactaaaaaactgggaaagtcctgggtaaaccagaactagtttgtcacatgagtcatgaggagaagagatggctaaaagatgctcatatgctcactttgyggagcagaagtttgatagatgctttagaaaagagtaagttggtgaccactaacattaacacagcaactcttagcagtggctgccacttaaggaatgacgtgtcta

SEQ ID NO: 2025 - DNA, 600 bp, Bovine  MMBT21989
ccagtgctgataaactctcataattcactcgaccaggggctgccctgtaaacagtgaaaagatgtaaagagaatccactgctggctgtacttttcatctgcatattggaggattcagtgacttggtagccacaggaatgaaaactagtgactcacaagagctctgcaaatagtgttatttttcatttccctgtggtgttgctattgttctcaattttatggatcacacaagttttcaccagacaaccttgttcttcccccgctgttttgaaaccatcccaagtrtagcccagggctgtcrtctcccattgggtcagtgtgagctcagcccagctcctcaaatccctcggttcctctggtctgtctggagtccctgttggagctttgttgtgggagaggaaggcagagagcccacgccttgcccagacagtctgaggcctggccrtggagcttgcagttccctagacactcagagttggacttggccagccattcctctgttgttacttttcagaggtaataagtgagattaattgcaggccaatctccagaagagaaggtagtcagggccaaatgcagtcacatgtttagaaacctgagg

SEQ ID NO: 2026 - DNA, 600 bp, Bovine  MMBT19703
tatttggccgcactggtcttagttgagatgctcaggatccccgaccttcattgcagcgtgcagggttctttagttgtggcctgtgggatttagctccctgaccagagattgagcctaggccccttgcattgagagcgtgaaggtttagccactggaccactgtggaagtcccaaaaagaactactgtaacacctgggtgggaaatacaccyggaatacgaagcgtgttccactgtgagcctgaggatggaggtggcgtcttttgttggaaggcgtttaatagygccccgtagcccggagryggcaccgtaccrtgcggctctgtgtgcttgtactctgttacctcccaagcgctgacactcaccttcaccaccttcagtctcagcattttattcttagagtctagaatgtcaggcacatttctctcattgcgtgcaaacctccaaattatgctggatcctgggagcagtggggaaaagattgtctggcgccttcatttcagaacccctgtgtggacacacagaggtgcacctccgttcacagtgcacctcgggtgggcgtcttgtggcagaagtaagggggagtttcttagccatcaagg

SEQ ID NO: 2027 - DNA, 600 bp, Bovine  MMBT21223
tcagtttccagtttgtagtccacaggtttttttttttaatgtttcacacctgsagctgctagccagtgaaggaggacgatacctgctttagcacaaaattatgttatacgtgtcattcattcatttcttcattatttattggagaaggaaatggcagcccactccagtattcttgtctggaaaatcctgttggcagaggagcctggcaggctacaatccaaagggccgccaagagtcggacgcgaccgagctgctaagcatactgcctgccactaccgcacgtggccgacagagggagcrcaaggattgctgctgaccccgggttgacacccaggctggctgctctctaccagaccacccygtgcgggtcccctagtggctctagtcagacctgcctggcgaggcctgagagaggtgacaagtcacaggaccagctcctgggcctggctgttccgggggctttgtaaacccaggcccactccgggggggttggcaccacttctgtttgtctgccctctagtctgatggctggctgtccctccctgcccttagccggtcaccgagccgctgagcagagccgtgcgcaggggcctttgccac

SEQ ID NO: 2028 - DNA, 598 bp, Bovine  MMBT20785
  misc_feature (1)..(49): n is a, c, g, or t
nnnnnnnnnnnnnnnnnnnnnnnnnnnnnnnnnnnnnnnnnnnnnnnnnacatcaaaatggtgttaagaatggaggagggaatgatgctactttgttgcctttctctgattcagagggactggcacccaggaccaagaattgggactggagattcctctgccacctcaaccaaccacatctcagggtaatttatttgatgtctacctccatttctcagacagagaccaaaggtgggcccctctagagagtgagtagtgagcagggcaaatgctgagtattattaacaagtccactgagarcttgaaatcagccaccagtgacgctggttttggtgccaggcaaagcccttgcaagcagtcccactgggctgctgctgttgcgatgggctacaacaccagactcccaccacctacctgattccccttctgcctccccagccaatggcagtgcacttctagcagttgcctctttgcatgaatctgcaccaaaattaaacccatcaactgtcaaccccgttgctggggctgctcccatgtcagcccatgtcatgacaaccgatgatagaagtgctgctattcaggcttcatggggagcatc

SEQ ID NO: 2029 - DNA, 600 bp, Bovine  MMBT18441
aacagtgtccatgagttacctgctccccctggaagcactccctcccttcccacttcctcctccttctcccccaccccaccactaccttcctctcagcctgagcaggtggggcccagtgacccgcccccaggacgcctgtctcctgggcagccgggtgaccctgtcccgccagtgcttggtcatgtcaccaccgagcccgtaatgagagtcaggacggaggatttatgagctcatccaggctccgcgtccgcacccggcagaggtgttttcagaaagcctttcccccacctccttccatcraaagaatggactttctgttctagctactcgtggatgccataaatcctggcatgtgtgtgcgtgcgtgtgtgtatgtgtgcgtacgcgtgcacgcgtgcacatgygggtgcctgcgggcaggacagcccgcacagcttggtggctggacgtgtggctctgaatcagctcaagaaggtgtctgggtgagaaggatgagacctaccactggtcccagcactgggctcaggcctcttctgcgccgagttgcagtagcagaacatggagccgaggggccggactcccaggcttgctccctcctgg

SEQ ID NO: 2030 - DNA, 600 bp, Bovine  MMBT19780
tccttgctacagatattttatargcaatgcttaaaagacatcatttaacactgtattttctattgataggcccaatgctgaaaatttcttggaaactaaaacaatctgcccatttgtttaaaaagcttcagtctttgagggtggatttgatttttgcaaatagccaaatgccactgagagttaaataccatgaacaagacaggtgactacatggggtgaaacagcttttttgcaaagccaaagtgtacctgaagagttatcatctascgtaaactggtcacaaaaagagtcctcaaaatrgccttgggagcaagagcatcactggtatcacgtgacctcctatggcgactgcttaaaaggaaacactcattttcatgcataagatctgatgacggcttaaaaatctggtttcatttctagagcatggctgtaaattaagtccttggaaatgtgtgtcttattttaaaaatagtatgttaaacaaaatatggagtgttygragcatagcagttaccaatccctctttaagcaaagcrctactcattaccttatctgttttgtaattgaactatggccaatgaaatgttracgtttattaac

SEQ ID NO: 2031 - DNA, 437 bp, Bovine  MMBT19894
gatgggtcagtatagccacaggctgctagcctctgggattgatgggacagggcagtagatggaaacactccattatctgagacatgagtgttttcagccaccatccagtccacgaagggatgtggtcaaggtcagggtgcactggatgtgacttcatcctcggggttacattcgcagaggtgtccagccatcgggaattaccttgaatggayggggaaatcggtgtctttcggaatgtggcacgacccaygaggcttcctctctagtttcaatgcgagacctgcctcctcctgaggtgcracgggaagtgggatccctttccagacaaagtaggggaatcgcccctcaggtcgagatcaggaggggagaaggggctcagattaagttgtgcgggaaaactcggtgttcctctcaagtgagacccgtgtgtcggggaa

SEQ ID NO: 2032 - DNA, 600 bp, Bovine  MMBT15670
tctattctaagccaagtccagtggaaaagttggctacaactgtaatctgttatcagattccccctggccactttttattaagatatgaagaataaactgaaagtgatgaggagatggggtctatttaatttgatataaaaaccatagatcattttttaaatgtcactgacatatcaaaggaaattgataaaaatagtgaggacaattttccagatggagagaaacccattttagcacagagaagctcactgtgtccaaacttatcgtgcagaaaggcagcggtagaagatatagctcccrttacaagaaagaggcaaataaccagaaagccaagcaacaccaggaacatttttaagaaaagatgtgctctgtttccctttcctgagagtctcattattagcctctacctgaaaacacatcaccaaaacggaagctcacatcacagttgctgtgcaccacgtgtagccatttgttagtcactcagtcgtatacgactctttgtgaccccatggactgcagcccgccaggctcctctgtccacgggatttcccaggcaagaatactggagtgggttgccattccttcttccagtggacaact

SEQ ID NO: 2033 - DNA, 598 bp, Bovine  MMBT23305
  misc_feature (1)..(147): n is a, c, g, or t
nnnnnnnnnnnnnnnnnnnnnnnnnnnnnnnnnnnnnnnnnnnnnnnnnnnnnnnnnnnnnnnnnnnnnnnnnnnnnnnnnnnnnnnnnnnnnnnnnnnnnnnnnnnnnnnnnnnnnnnnnnnnnnnnnnnnnnnnnnnnnnnnnnnaaaatggccctattgtggtcagtaaccccatccctacccccacgggaaaggagagtaagactggcagtctgttctgcctgtagctcttcagggtggctgggtgcctatctcttcctgggatttcataaagatcttgggatgaaagtggcagcrattctgttcttgccattmagtctagaggaccctaagctttaatgtctcatttcctgcctgagaggttcatcaggatgcagagctcagatcacttctttttttggccaattgcagctggaacttyatatcccttttattatcctctcctgctacagaatgagtctcatataaaattataagccatctctcgttggccctatttcaggtcagtgggtatgattttacctgaggcatttgcatttagactgccaaacaccatgaaaccccactaccattctgatcttaatttacaccccca

SEQ ID NO: 2034 - DNA, 600 bp, Bovine  MMBT22088
cattcgagactcctcttggcatggattacttttcacttgggaagatgtgttcatcgacatcacattttctgaagaacatcttaggagggaagtcaaatagggaaactgaataatgcagccacatctgttcattgcacatgcaaaatgctggctggttcgctgattatactcacctctcctccaaagaatctgtatttatgagcccactcaggaaagataacactggcatcttgcctttcaggcaaaagcctgtttgtgctttacttgtaagaaagcacaaggaaagaaatgggscgtcartaacactgcagctgggctctttgaggtgccccaagtcagagagagggaaacaagcattccattcaacactaaaatgcatgkgctgccctccagagcaaagctgcctgtcctcagcattcaccttgataatgttgccacaaacactgaaattttggtggtcgttacacatctctggggtggcaaagcaagaagtcagactgcccagggcaaggccaggtctcccacagagcctggatgagagggaggtcagatggatggtaaatarattggcaagaagaagcctgaggggacttccctggc

SEQ ID NO: 2035 - DNA, 600 bp, Bovine  MMBT19067
tttaccaactgagctattagggaagcccagttgtacctataggccagtctgatgccatgttttggcaacttgtccctgctccaagtattgttatgtagctttggctggtgttccactattttagtccaggaagtagttgaaggcacacacattttggctgcgtgcagattactctgagaatagctctcctgctccaggattgcaacaagcctacaacgcatcttttgaaaaaaatatttcccctttgccatcactggttgagacaggtcaggtctgacattgccaagggaaccacccgarggctttcctcaactctctaatggctgctggcttcatagaattttatccgtaattaaatctattttgtctaatttaagaacagattctggtaaagatttcagtttcagtgtgaaagacaggtagagttctttttagctgcaaacagtttagagctgtataatcttttactctcattttgtttaggtttttccaatttgactttgggcgtttgcttaatctttttgtgtctcaatattttaattttccaaaggagcagccaatttcaaaaacgtttgaaaaagagtatatattgttctaaaa

SEQ ID NO: 2036 - DNA, 600 bp, Bovine  MMBT22299
ccccacctgctgctcgatgcggccaaaaagaaaggattttagtatttgagccatcagaatggctgtatatcagctgaccatcagacctgagatgggagcaagggaatgatacaatcagatttatgctctgaaaagtggctctggtcacagccaatgtttgttcgccaggtattaatagattgatgggttataggattttagaatggatagggacctgggctgatttctttccacacagtttccttctcagactgggcccagccagaaatcacttgcttgcatctggcccctcgttccccrtgactgaatgtatccccagctcccccatgtcgtctgctcttggcccctgcagcccgagctgcctctgcccgagctagctgtctgtgctcggctctgtctggacacgcctgctgtgccttgctcttttctccccttaccagcaggagaactggcaatcttctgggatttaattacaggttccctgagggcttttcagcccttcacaaggctcctgcaggctgtcgctgggagcgtgacaggagcgtgcagtgatgaacagcggctccccggcatggtggctgtacccagtggccagcccac

SEQ ID NO: 2037 - DNA, 600 bp, Bovine  MMBT18967
rgtgaggactgccaaaggtcagccttggagcatgctgccagctccatgggaactaagtgttctctgtgggggctgaagagcatagataatgctggactttagcgttcaagtcagcagggctaagtgtgacttttgtttgataagcttggattttatgtcgttaggagcaaacaaaccataaaatagctgtgtgttttaatgggcattttggagcgcatcccagcttgtggggctctgcccaaggacaagagtgaaggaggcaggcaccgtgggagggggctgctcggcttccatacaccrcccgggctgtgagctgagccacgtggacaaacgtcttcactgcttagagcttccctttccttatctgaaaagtgggacacagccagcctcatttccactctgtcaatcaggaactaccgtaatgacccaaagcctctccacttagaaggctctrtaatgatgaaaacactaacagtgatcatgataaccaacttatcctgacaccacgtgccaggcgagatgctaagagctttattatcttttaaaattatcccagtttatatatgaggaaaatgaagctcaggcaagttcaaaactatg

SEQ ID NO: 2038 - DNA, 600 bp, Bovine  MMBT21902
tcctgacggtcttggcgttgccaaaggcctccagggcggggttggcctggatgatctggtcctccagggtgccctgcggaggtcaagaaggatggcaggtgagaggcctcctcctcctcctccctttctgcggtacaggcccttgraggacagtaggcctaccttgcctgtggcctgctcctttttgctgcggtcgccaatggcggcaatgaccgcgaagtattggatgactctcttggtgttgaccgtcttccctgccccggattctccgctgttgggacagtcgggcttattaggcartgaacaaacattatttgagaccacaagcytcgagtcaggagagctttatttggcagggggagccctgcagcaggaagccaccrgataatatgcatcccagccacaaagctgtgctctgacatacacagggtcaagggtagcaactaggaaagatgtgctagaagaagcggatttgggcaggtgggagacctgaatttgatctttgagttgggaagatcccctggaggaaggtatggcaacccactccagtattcttgcctggagaatccccatggacagaagagcctggtgggctacagt

SEQ ID NO: 2039 - DNA, 600 bp, Bovine  MMBT18949
ctaaagccatgtaacttccactaccatcagaagccttcacatactgaaatttaaactgaaataaacgtcctggtatttaaaaacgaaaaagatacacaccaccacaatatgaagcaaaagttataagaagctcgtaaatacttttgtttctgctttttatacctcagtcaaaggtgatgagtttcttaaaaaaaaaaaaaaaaaaaccaaaaacccttgaagtttggattttccagttttgcatcacatcctgcttcaggccaccctaaaacaaaacaagaaatgaacaaacaaaacccrccatccttccaatgcattctctgaggtctgcagcttgaaggccactggttttccctttggctcagttctcgtgtttgcctcttctttgccaatatgtttatcttcctcactttcaaactgcatttcccgtccagaaacactacctcaagcattatatttagcacttcgcacagaattcctcctgctgcatcaggaaacagagccctgtaagtggagggtgggatcccagggtcaaggtgtttcctggataacagctccatctgagctctgtccaaacttccaactcccttgccgtccact

SEQ ID NO: 2040 - DNA, 600 bp, Bovine  MMBT19328
tcaccacaagctttaggaacccccttamcctgatcaattcatctaagagactctgggggaaaagaatccccatctgcactcaggtgacatttcagatagcttgaaccccacctgccatgtaccttcaccaagggtgtgcatgtgtgttgaggaatgcttttgctaagaccacatatgaaagcacatcagagacctgtcagttccctctgcttgtacctcaacagtgccgctgagagttgacaacgcatgttctacttcctccacgatatatgcctccaccaccatcaggagtgaaggcargtggtagaaaccatccatcaaggatggaaccatctccccttcctctctggaggctctcagcaacttgcttattagcccctttctcagaagaggcagtcaataaataaaatgaaattygaaaccaaaattatgaacatttacacctcatttttttttctagcagctrgaactttcagggaataaaattatatatcttctgattagtgattaataaaagacaagtcacaattctttactgcattaaaaattgcactttaaaatgcaaaatcagtcaactctctcacttagggagcagagggg

SEQ ID NO: 2041 - DNA, 598 bp, Bovine  MMBT20196
  misc_feature (1)..(53): n is a, c, g, or t
nnnnnnnnnnnnnnnnnnnnnnnnnnnnnnnnnnnnnnnnnnnnnnnnnnnnngggataaacgcttgcctgctgcccgggcccagctcagaccctgctcactcctgtgtgtccagggggagactgaatgtgcttgcaaacgtcatcaggaaggagctggagcaaattttctgtcagttcgactcaaagctggaggcagctgatgaggtaagacatcttatttcttttagaaactagcatagctccaacctatgccagatcctggcttcatttatttctccagaaggacttatggggtccrggatcctctataccactcacaaaaaaagaaagtggccagtggctgacctcccagagaaaagagagacaagaggcctggcagcccccacagttttccccgccaggggtagggatgtggtcctctagttgagggacctgcttgtaccgtgggtggagccattctggaaaaagcctttccatccttctaggaatgagcgttctgggtgtagaaataacacaagacagggctgtcasagagagtaagtgtctccctgcctaggtaaaagcctaactgtttgtgccggcagggttctggagat

SEQ ID NO: 2042 - DNA, 600 bp, Bovine  MMBT21945
ttgcagtaaatgtgaaatctggtattattaacaaatattaagaacaagatagcagagtaattaaaattgcttccaggaaattttaattccctttggctttaaaacatggcagggaaaagcaatctggttactgaaggataacatcttttgcaaaggagatagttgcaaatcttgaaagcaagaccacctcagaagttttgaaaacacaaagccattaaagaaattgcccataattctgagtgaccatcacaatcctgattattatggaatgaatgtatgccttctcccaaaactgatacrttgaaaccttactcctcatgtgatggtatttaggaggtgggactttgggatttgataggattcaatgaggtcatgaggatggagcccatcatgactgggattaggacacttataatgacatgggagcttgctccctctgcttggcttccaatcatatgaggaagatacaatgagaagtcagcagtctacaaccaggaagagcactctcaccagaatctgacaatgctggcaccctgaccatggctttgcagaccacagaacggtgagaaataaatttttgttggttataagccacgtgat

SEQ ID NO: 2043 - DNA, 600 bp, Bovine  MMBT15375
tccaggccctctcttgtctttcttttcttttttcttcctccgacttctttcacacttttcttaggactcatggactaggcattcccactgtgccacatttttctaaatctttataaccacaatgaaaggctgcttagtaaaggaaaaccaatgggacaagatattgattctcaaataggaaacgagacctctgaatatcaaaatcaaatatctcacacaaatatcaaatatggttttttcaagttattttatgactagaagaaaattgcattaaatgtatagaaaggctscagtmattarttaataccatcttttcaatatsgtaattgaatggaggaagggcagacttttcaacaaatagtactggatccatcatgaaaaaaactcacacattatacaaaaattaacactaagtggattatagattaatgtagaacatcaaactgtatgtttttagaaaaaatacagataatatttggatctaggactaggcaatgggctcttagacttgataccaaaagcacaagcaatgaaagaagaaattgatacattggacctcatcaaaattcaaagcttttgccctcagaacagtgctgttaa

SEQ ID NO: 2044 - DNA, 600 bp, Bovine  MMBT21920
tctttcatgggaaagggagaatgaacataccacaattgttttttgataaacttgagatgggggccatcagtgaaatatagctggactgaacaaaatggttttgccaggggataagaaaatgataagggaggacacatggagagtgaagcttattcatttatctgaattttcctgagagaagctaaatttcagcaagttgttttgttttcaaaacatctgcccaatttkgttcttctgtgtttcttacaatcattttgatagcactgcttctgggtttgcatatatggaactgattatttrtctcagtgggagtgggtacatttaaatttcttcccrgctatggagaaaaaaaaataatgagctgctttatgatggtacaaagaggggtcaaagagatccaaatattagagagaatcatttccaaacacatcgtgattgctatttcttaaatagcagggtgatacttattttaatgctgtttaaatgcatcaggattcttccatactgttctgtgtacatgtatttatgggaatgtctacattctgtgcataatgcatagaattttgagctaaacatgtttcatttttacatagttatata

SEQ ID NO: 2045 - DNA, 600 bp, Bovine  MMBT21608
gagggaatggctgcccactccagtattcttgcctggagaatcccatggacagaggagcctgggaggttacagtccgtggggttgcagagtcagacacaactggggcaacttcgcatgcgaatgtgcatggtagcaccttgttttgtggaaaactatttggtcaaataatctaggctacaacacaactgtaattattctagaaagtaagatttctcagtcagcaatgttaaattcttcattctaatctaatgacccaatctgctatattctgcttcctatactgtgttattctgcttcctrtactgtgttatgcttcccatgaaacaaaaatgtctcccactaatgagaaaataggaaaataaaatgggtgtatgttatttgcttttgatttacggggttataatctccaggtcagtgactaattcttttgtgacttctcaaaaatggacaggacatttcagagctcttagtaaatctgtaatcayagaattgatttttgacaagacttgctctgtacagccaagctcttacaaagggacaagataaacttgtaaatcatttatccaagcaccaaggattgtaactatctccaaattctca

SEQ ID NO: 2046 - DNA, 600 bp, Bovine  MMBT18682
gattgatttgcctaaaggaaatgttttctcataaccagatttgattactatttattttttccatttaatcaataaggtcagttaaaataatcaatgtaatttagtcaagtaaagccagctataatttcagttcattttctgatttaaaaaattaataataataattcattcctacttaagattggagaaatgcttttataaatgcttgatataaaaataaaacatgtactgcagttgaaagtaagaaaaggaataagtaaacatgcatttcatgaattaggaaaaagatttttaagtccragtttagtttgagttctaactcttatacttagatgtgtaatctgaggcacaatactgaattgtccagcctcaattcctcattcctccaattataaaatgaggacaatggtaaccaccatgtaggatggtcacgaggaatctggatatgtatcatgtgtataaactcatcatatcatatcttacagttagtaagcaaatgaaagttatcacttcagtatagacagggtaaatcatggatgacactgaagacccacacctaacaaatttttgcacccaaatgttaccagagtctaatgattt

SEQ ID NO: 2047 - DNA, 598 bp, Bovine  MMBT18612
  misc_feature (1)..(55): n is a, c, g, or t
nnnnnnnnnnnnnnnnnnnnnnnnnnnnnnnnnnnnnnnnnnnnnnnnnnnnnnncttgttatcagtagttatcttgacccttatcatattattaaaaccagcttttcctctttttgttttcctcggataataatatgattctctaatttgcgcatactctatgtatgtttgttatttctcattatttagggacctcctggcttacccggtctcaaaggtgaccctggctccaagggtgaaaaggtgagartaaaataatgtattattacactgttgctatcctaattgcagaggctacrattatgcacattaaaatcactcaaaaggaaatttcaaggaattgctttgtcattctaaccaaggaaaatgctgtcaatccttagcttccaagaggaattcagaaaagagaaaakaatgatgaaaaatgtaccagaactcagtgytatawtagtcaatgttcctttgtaggaaccatatggagaaagcatatggttatactaaaataactattcagaaaataaacagaataacaaagtgcccattttttcatgtttttaaacatgaaaataaaaattttaaactagactgtccttcaga

SEQ ID NO: 2048 - DNA, 600 bp, Bovine  MMBT19803
atatgtaaataccaagatatgtaagtatttaaatatcagaaaagatttcacatagaagtagargatatccataatgcaacttactatctgcctaatactacagcacaatccaaaaagttagtgctacctgtcagttggaaatgcccaagaaataagcctttccccaccacactgaagaagcctgagcaggtctagcctgagtagcctggtctctgtcaagagatttccacagcagaagacagaattcaatcagaattcttcctggaaaagcccagtttgcctctaggccatcttaattcrgatgaaactgaactatgatttaaaaagaaaaacacaaatatttatagagttccctactgttatggagctgtcctgattgctacagggaatagaagatgtttttacaagcgctctatattttttaaaagaaattcatgttcacacaaaaatttacaagtaaattayaggaaagttagaaagccattgcaatagggaaaagtgatgaaggcccagcgtaggatagtaaaataggaatggtgactggggctttgaaagacacctaagaaccagattagtcttagtaaataaatgcatttagag

SEQ ID NO: 2049 - DNA, 600 bp, Bovine  MMBT19804
tgcaacaaaattaacaaaatgaggaaaactggcaaaagcactaagagaaaatatgggctgtaataagaataacaaaaggagtggggcagggtgggggctggagatgcattgggtctgactgaatcagaaaagatttcctgaagaggggacatttacgctaaaatctaaaaacgatgcaatgcttagattgacaggcatttggggaatatgatcctctgaagcagtaaagagcttgccttgttaaggagttgaaacaagaccaggatggctgaggcctagcagacaggccatgawaaaacrtgagggtttttcctagagcattgagaagcaattgaagatagttagagaaatgatttacatggcctagttacatctggtatatttttcttagttcctaaagcaaagtaattaaatattgctaacttaaattttatttgccctgaagttttccatgatgcatttgaaataaagttttcaccaaccttcattgtttgaacatgttaatgctacagcgaaacttgatttgcttgactgtcttccaaagatcagtccttactgatctctcataaaactcagaaccacttaagcatcctagctcaa

SEQ ID NO: 2050 - DNA, 601 bp, Bovine  MMBT23087
  misc_feature (1)..(1): n is a, c, g, or t
naagtccctttaaggtatcttcacctttttttaattcttgtttctttttgttgctctgattggataagtcccattgctgtatttgagttcactaatcttttcttctgcttcatgtatcagatgttgagccccgctattgtatttttcagtttcattactaaatttttcaggtctgtagtttctgtttggtactttcttacattttctacctctgttgaaattctcaatttgttgatccattgttctcctgagtttagtgagcatctttacgatcattrttttgaactctttatagagtaartcacttatgtcagtttcattaaggtctttttctgaggcttcatcttgttcttttatttggaacatatccctatttcttcattttccttgattctctgtgttggtttctatgcattaggtaaaatctacgcctttccaagacttgaaggagcagtcctgccctgctcttggttgtgtcttgaacatatgattgtccaagcagcctactttattcttagtgcctccaaggaggtgagcgtgtgccagacctgtcactgtccccaagagggcagatcttagcacctggattcaggctgattag

SEQ ID NO: 2051 - DNA, 600 bp, Bovine  MMBT21630
aacaaatatgccactctggtggggcgtgctgaccacaggaaaggctacgtctgtagggaagcagggagtatatggggaatcgctgtaccgtcctctcaattttgctggaaagcaatcttaaacatttttggaaaccaccaagaaaagtaaattgttccaagtttattctcagagtgcttagaaaagagcctgaaaaattaagcctgaagtagaatgaatactcattgcttgtatttcaaatgtgaagacagaaaagcatggtatagcagaaagtccagctttcaaacaagaaytgttgtrtctgtgacagagctccaatctaattatgccctagccactgatttttctatcaccacttcccctttgtttcagagacagcatccacgaccttctgtccatgtggtggaggaagaaattgcttcccagaaaggcttagcccactgcattttactagataaagaaaaaacaaaaagccattcgactctgacaagccgattattgtctatggaggagtaaaatgcctcccttaggactgcaaggtacaatatgttcaaacctttaaccactgctctgccatgagctgctatacgtgctcataca

SEQ ID NO: 2052 - DNA, 600 bp, Bovine  MMBT20455
tttkggggaatccrtgaactattatggaccacctcacctgagaattgcacttacacacaaaatttggcttctatgaagtcagaaaatactctgtgatgagatggatcccaggaaatgaatgcttgctctgacccagttcctgctgattgcattcaaaggacagtcaaacttatcttccttcaygatctcgcctttattgcttcagatactcaaatggcttgaccttctaaaatatggtattcgactcctgtctttggttagtaaaggatttttctaatattaatttagttacttactgcrtcatccatatcttggcattgtttctataccttaggtcacagggaattaatttaatccttcttctatgtgatgtctcttcccatatgtaaagacatctatgacaaacycagctgcttccatctctcttcttaaaatgagcatccctcagatctctcatctttctctgactcagtagttacttgtcaacatccctcttaaaaatcgggacctacgcttgatcacagcattctaggtaggttttgacagtgtaaagtgaagtatgattctgtcatctcttatgtgagacatataatgtcttaa

SEQ ID NO: 2053 - DNA, 600 bp, Bovine  MMBT21644
atgctattttccccatttaattatgtgtgcatttataattaattatgagtatcaattgaaaatatcaaaatctctcagatcagatatcatctctatgaagaaagktgggttgycatttgtttatgaagtggtagtgcactaatgcatataaatatatttataccttttccctgaagaaatcccttatactggactgtgaactttacccttaaaggagtgatatttttactcatctttgtatttacagcattgagcacagcgtctgacacggtacattttacagacaagataactgaaggraagtaagaaggaaagaagtgagagaagcaggaggggaagtggttgagtgggagggtgggtcttctgaagacgagtgagctaaatttcatttttgaagcagtattttcaatatgaatagcataaatattcccacgaacacttggttagtagaatctttaattcagtgcaaaaccaagaaccaagtgatcttgaggtttattcataggtaaggtaagttgaagagcaaatttttttgtttttgcagttaaagacaactctgtggtaaaaaagattcaggagcttcaggaagcgtgaaggaga

SEQ ID NO: 2054 - DNA, 600 bp, Bovine  MMBT21540
gtggtgtaagacctgcaaattagaacrctaagtctttccctgacatctagtgtcaatgtgtgaaataacagaccaggaaccagccacwcttgagaatgaagatactcatcacggagcactccttaagggttggctcttggccccagccctgaaggatccatcaagaagcagctggcagcttcacacctcacaggtagccctaagacagaaggatcgaggtgggatccraaacatggaatgcattaatttccttcttgtraaatatgcctgactgacccaagactgacatagcatcctttrggtttacttatcttctggctggaaaaaaaaaaaaaaatcagaaattatggcttcggtcttcataaactgttttcttattgcaggtcattttactctgagtcctctccaactcattctctaccttcacctgacctttttactcttaatttctctgctatatggaatttttacacaatgtacaatataggtcaacggatgtcaatggagaaaaagatgggtgggaatagtttctgacttctgtttcttgacacttgctatctagcaccaggaatgatgtactgtattttttagcagagggat

SEQ ID NO: 2055 - DNA, 600 bp, Bovine  MMBT21565
aatacaggcatattttagaccacctgcggactctaatctacgcaaatttatttggtacaaactcccttctacgtcaccttattcagtttaattccagagaggtttactgctaaggttgagcagccttaataagagaacagctgctctcatgggggctgccctgaaaggaaaaagaaaaaaatgagcttttgttagcttcttccctgtgaattcactgccatgaatgtgtatacctttcagacggaatagtcaccttgagcagtagagtatgtcctatgtctgattcaagtccatccttcrgccrgtgattcacctataaatgtcttgactcaaagaattaggttaaaaagtatgttaacatgtaaagattctcaacagtaactgatctgaacttaactgcaataaaaacaaygtagaaatagacaaggagataactttggtagaagagtaattttcaaggtttgctcttaaatattaaatagatgcatatgttttattggcttctatagaaagaattcagattgttttaaattttagtttatttcccttgttgagaatcttataattgaagaaagtgatattatactccatgcratctgc

SEQ ID NO: 2056 - DNA, 600 bp, Bovine  MMBT21518
gtgactctgtgtctcctgctttggcacgtgggttctttaccattagtgccacttgtgaagctcttcaaattatataatttaggtaaagatttaattaatataggtaaagatttaattaatataagtaaagttcttaacacaatacccagctcatagtggttctcaataaattactggggtgttttttatctatttttttcattaccatcatcaccatcaagatacacrtttgattacatgtttgactttcacaaaagcaattcatggagtgatccaagccaagtcaatacttcataagarttacaaagggaatcctcactccctgtattgctcaatatttgccctgcttccagtctcatggctggatcaatgaggcacaaagaggtgagccttaccctcagcaacatagtacgcagcaaacccggtgaaacgctcctcgttggagaagtccgaccggaagatcacctgcaatttactgtatgggatgtggaactctttcaccactggggagtttgaattcttgttggtcctccgtccacagagtttcccttcttcatggcctcccgacattatctaagagaagagtcaaaagaacccagg

SEQ ID NO: 2057 - DNA, 600 bp, Bovine  MMBT22953
tgccaaaaaatgcacattacaaaaaaaaaaaaaaaagataatgagataatttagaagaaaaaaaaactttgtctactaaggagaaaagaccctgtatgggactcagactgaacaggatcttcatggtagagtaggccagccatttggggtagaatgtaaagttgttcattaacctctcagtattatcattcggtgatcctggaaagatgacaacaataacagaactgaatcactgggggcacaaatagttctgctttgtaacctctttttacacagttctgacatgcccaagggaataarttttcctattttcctaagagagaagtaaaaaccacagaagcagtcagagatgaygatgaactyagaggagtgactgcaaagggaatgacttccctaaggtggtcagaggtcaataagactggtcaaggaaaacagcagttcacacagcagaccacagcaggtggattggtgcagaataggaggaacacagacaaaaaggcacagacatgttaagggaaaactaggtcagtgatgtataggccactaggcagtaatttagacttttgtgcgacactttactttggggattcctagggtcac

SEQ ID NO: 2058 - DNA, 600 bp, Bovine  MMBT21352
ttgttttctcttaatctagctaaggcatatccaaaataaaatgtaaagaagaaaaataaaaattgtcttcatggaagcaactggtcttccttggttgtactgagttatagttacgctggggtgaaataattgatgctgctcaatgagaaaaccaagtgccctcagaacaggttgatgtggcagacactgttgtttgcccttcttgcgaatcaggtagttagcttttgactctgtttagttcttgatttctaatactgacatgccattctgatcatttggcaaaattgaaaatcctttccrtgtttygacaatctggaaaaggtggccattttaatgtagtaaaggaagctgtggggttaatttcactctgatgatgacaatactctgatagcatttaatatcagtgctccttcacaaaactcaatgtccataaaagtacagagttaaaaaaaaagactcctgctgccttccttaaaggcctgttgtgacagtcccccggcccatttctttccctctgtgtccctcgatcgttgtttgtgggacttttcccctgagaaggcatttgtttcgattcacaggtagtgtctgtgataaaataga

SEQ ID NO: 2059 - DNA, 600 bp, Bovine  MMBT21554
aaacaaggcaaatgatttggcttttcatgagtcaatacatgttaccaatactgcctagttgttgattacaagagaagtcagtatggagcttaaagtaactcaggaattggcctctgtgaatagactccgtgcaacaactcccaataagataattttttttaagagaaaagacttttaaagaacttgagaaaacatcagtgctaactgaagtggtgtctgcaaagatgtgttgtaacttaatggtggtaagggcatatggagtagaaaatggtttactgggcaaatttacaaagcttgtrraagtataaaatgtttaaaatcaatctttatgcattacatgattcatcagcaggtattctgggggaactatttgaatctgtcatgttactgaactagttaagtcagtggtgaatttcatttactcttgcagttttaactatcattacttccagtaagtttttgctaggaatggaaactgaatatcctgacttgcccagctacacagcagtttgatatttgtaggaaagttttattgcaatttttttttagctcagaaccaacactgaattttctctgaataggtatcatttttacctatta

SEQ ID NO: 2060 - DNA, 600 bp, Bovine  MMBT20694
taccatttcacttgctgcatcattttataattacctatttctgtctccctgcttgaagacagggactcctatttgtctccaaattccaagcaccttctcagtgctgggcagaaggctgacaaaaaaacagtgtttaatttaacaaatgactatgctaactggcagttcagcttctccaataagtcatcagttacagcatttttttctctaaacgcatcctaaagtatcttatattgaatagaatttacaagttaaaggacaaaaaaattaataatttgcctaacaagtctttggatggtrtgcacctaatggaatcagtaatcttcatactcctttggcaaatctataaacactttaaaattttcaaattataatataaaatatgaaaatgatctgttggagatgatcaaatccactgagctggacagagtaatatgtcagcacctctgctcacatctacagcctggagctttgtgaaggtaagcagcaccttcatcattctggcattctattttagtctaagtctacatcagaagcctgccagggctcagtgctgataacaaagcactatcgcttttcaaagtgacagagcacagtgac

SEQ ID NO: 2061 - DNA, 600 bp, Bovine  MMBT21555
aaaacaaggcaaatgatttggcttttcatgagtcaatacatgttaccaatactgcctagttgttgattacaagagaagtcagtatggagcttaaagtaactcaggaattggcctctgtgaatagactccgtgcaacaactcccaataagataattttttttaagagaaaagacttttaaagaacttgagaaaacatcagtgctaactgaagtggtgtctgcaaagatgtgttgtaacttaatggtggtaagggcatatggagtagaaaatggtttactgggcaaatttacaaagcttgtrraagtataaaatgtttaaaatcaatctttatgcattacatgattcatcagcaggtattctgggggaactatttgaatctgtcatgttactgaactagttaagtcagtggtgaatttcatttactcttgcagttttaactatcattacttccagtaagtttttgctaggaatggaaactgaatatcctgacttgcccagctacacagcagtttgatatttgtaggaaagttttattgcaatttttttttagctcagaaccaacactgaattttctctgaataggtatcatttttacctatt

SEQ ID NO: 2062 - DNA, 600 bp, Bovine  MMBT20080
ccaaacatcaacacgaatcagccataggtataatgggtgatggtccctcccacttacagctccctcccacctcccttcccatcccaccactctaggggtttgagttccctgaatcatacagcaaattaccattggctatctattttgcatatggtaatgtattagaaaactgaagtacagagaggctaagcaatttacccaaggtaccacagccagtaagacatgcggctgtcatgggatgtggcagtctgattccagaacctgtcccttcaacactgtgattattagggagtggagtargatttgttttactacaaaccagttgtacatagatagtagtaggctactattttcaactgtttaattctttaattcactgtgtctcaaagtaaatgtttgggtctccaatatgattcatctgagtggtgttttttgtttgccttttcagcacatgctctccaaagtgggaatgtgggactttgacattttcttgtttgatcgcttgacaaacggtaagtcacccaaaagaattttcactaaaatacacaccataaaatgggattaattttgtgaaaaacaaaatttatttttaaacactgt

SEQ ID NO: 2063 - DNA, 601 bp, Bovine  MMBT22816
  misc_feature (1)..(1): n is a, c, g, or t
ncttgaaagtaaaaagacggaatgtttcatgtcgttatttgcaaagcaacygaacaaaaggtgagcaagataattaagtgccttgstgctgagtagaatttttcaaagtgggttgattagaggtctttcttaaaaaaaaaaaawttaaacatctaagtctaggaaatctagttgaaacagctaactcagttataaaggtggagaccagtttgggagaaaatcgacagtattgtgtgtatggtggcakatgttcacaatgatgagtttaattgtcagcaaaatcctgatcagttctgaatarttttagcattaatgatattttcctgtgttttaggtttttgaaaaatgggaatccaagcagacttaacatgtgatggcactaaatagattattttccagtgccttggttcctccatttttcagttgatctggataaataggacttgattcttttattttcccttttgcctgaaaaaataccaaaagcgagtattatcagtcttattataaaatgttatttgtaactgccaggcgaaaatgggatgtcatttcttatatctgcattttgtgtttcaagacatttctgatgataacatgagga

SEQ ID NO: 2064 - DNA, 589 bp, Bovine  MMBT21549
cactttacamagagaggtaggtacaaatggcaagttgctgtatctgtgtaatactcagacgtggtcctcacccattccccagagcccactcttcattcctgtataaacagagtggtttcaacaggatcttagagtatgcctcagtatttaccatttgcaaatatggaatctattaaatcacgtcttcagttcaataaacatctactttgtgtacatcactgtgttaagctaaagaagagttagacagctgagggtaatggccctgttccctaacacagtaaggargacataatttagaarcttttgtttaacatgaaaaactaaccataaatccataaaaaaatagaatatcagggatgaagtgtcatgactgctaattttttaatggcttaggaaaagacaacaraaggatgaagtattaatagatgtgataaaatgtcagtggctgattctagatcatatttgggtatatagtttttcttttctgtatatttgaaagtttatgtaataaaatttaaaaaagggaaaaaagacttaaccataaagagcattataaaactctacaaaagatcatttcaagggtatatag

SEQ ID NO: 2065 - DNA, 600 bp, Bovine  MMBT21536
gaaacttagggagaagtaatatgcccacaatcacaccactagttagcataggagctaggacttgggactatttagtctgaccccagagcaggtacactatactattctatatcataaataatggattcatttaaaataacttattaatttaatatgactgatgtgattcagtactataggcctttgacaaaagaaatcagaaagacygctttaaatcatttgagagcaaaaaaagaccaaattattcattctttttagaatgaccgcacatgtacatcatagcttaatgataaaataatraaaattatttcataaggaatcataatctgaaatattaatactataaaatgctatgtaatatactaattctattaaaaatatatttataatcaccaaacttattcccagcctttttgaaaaaacagttgtcttccatccaaacccataaaatcccacaaatccrtaatatttgtgtaactggggtcatattttgaaaataacttacgtgattttttttttctcctctgcctgcctggggaakcagttggccttggggatagagaatgtggcactcttcagagttaccaaagtgatgggaaa

SEQ ID NO: 2066 - DNA, 483 bp, Bovine  MMBT21548
acagagtggtttcaacaggatcttagagtatgcctcagtatttaccatttgcaaatatggaatctattaaatcacgtcttcagttcaataaacatctactttgtgtacatcactgtgttaagctaaagaagagttagacagctgagggtaatggccctgttccctaacacagtaaggargacataatttagaarcttttgtttaacatgaaaaactaaccataaatccataaaaaaatagaatatcagggatgaagtgtcatgactgctaattttttaatggcttaggaaaagacaacaraaggatgaagtattaatagatgtgataaaatgtcagtggctgattctagatcatatttgggtatatagtttttcttttctgtatatttgaaagtttatgtaataaaatttaaaaaagggaaaaaagacttaaccataaagagcattataaaactctacaaaagatcatttcaagggtatatag

SEQ ID NO: 2067 - DNA, 584 bp, Bovine  MMBT19886
ggaagcttagagctaaattacagtaaccacctccaggtgcatggaaacacttgtttatctatttctgttagctggtctttgttctattctttttcacaaaggctttgcaggagtagttgattgatagacgctaaataaatgtagcattatagcatgttctccttgacaaactgagcatcctgaaaaggggtaaacatcttatgcccacacaaatatgtatgtctctctgttctatgctagacaccaggtctacccacttggagtttacagtcactacattatgatcttctgaagctactrcagagtctttacaaatccccaaaagtttaggtctctgatctagaaggcccataactttaagaatctgcctccaaaactcaagactctttggaggcagcaggaattcttatactaacacggccattaccagtgtcagcatagcatagctggctcatcctagacttaacattttagaacaagaaggcaccttattcaatttaaccttataaatggggggaaccaagaagagaaatggcttatttaaggatacattgtaagctcatggcaggctcaaggtttcctga

SEQ ID NO: 2068 - DNA, 600 bp, Bovine  MMBT20945
ccctcgcttctaacatcttcagccaacggaaccgaactacactcagagaatactctgactgaagagacagaaggagagacaaaaagaagagataaaccaaggtcatggctgaaaaacttcagatacttttgcaaatcagaccgaaacagctatatcagctaaaaggtcaaagcatcttataggtaaagtcccagtggctttggtgctggaaagtatgactcctgccagaaagctccattcagatctacagaatgatggcttttatctatttagtcctacacctcccaaactttatcatcrttgtcttctaattggtcttgatgccaggctcaagggcctaatgaaatcagcaagcacaactctgaacggaaagaagaaaaccaacttgtgtttggcatttgataaaatgcctgtcctagagaagattcttgacagccccttggactgcaaggagatcaaaccagtcaatcctaaaggaaattaaacctgaatattcattggaaggacagatgctgaagctgaagctccaatactttagccacctgatgcaaagagccgattcattggaaaagaccctgatgctggggaagattgaaggca

SEQ ID NO: 2069 - DNA, 598 bp, Bovine  MMBT19790
  misc_feature (1)..(104): n is a, c, g, or t
nnnnnnnnnnnnnnnnnnnnnnnnnnnnnnnnnnnnnnnnnnnnnnnnnnnnnnnnnnnnnnnnnnnnnnnnnnnnnnnnnnnnnnnnnnnnnnnnnnnnnnnncgacttgatggacatgagtttgagtgaactccgagtatggtgatgggcagggaggcctggcatgctgcaattcatggggtcacaaagagtgggacatgactgagcaactgaatggaactgaatgttctaatatggttttatttctcattgtattcctgttctttgctcaatttccttatcgtttttcatgtctcarttgttttgcagaagttcctcctaaattcttgatgctaatcccttgtcagttgtagatgttgtaaatatcaaagtacagactgtcaccccatctgttaactttgtttatgtggttcattgactaaaaacatgaatcttaagatttatactttgtacacctttgatttaaaaaacttagaatactttctctactccaaattcccaaagaggaatttttaaaataacagtgaagagaaagaacaaatttcccttcatttcttcccttggtcagcattcatagtttataaaggcagcatttt

SEQ ID NO: 2070 - DNA, 600 bp, Bovine  MMBT22066
tttgaaatctagttggggtaaataccagtttctccttttttgttaaaataatataaatctgtatttgctagtacagtcagccttctgtgtctgtgggtgctgtgttcacaggttcaaccaaccacagattgaaaatattcagggagaaaaccctcagaaagttccagaaagcaaacttgaatttcccatgctctggcagctatttacataatatttacattgtattagatattaatagagatgatttcactttatggagatgatttgaagtgtatgggagattcctgggcctatatccarataaaactgtagttcaaaaagatacatgcacccctgtgttcatagcgctattcacaatactcaagacatggaaacaacctaagtgtccatcaacagagtaaggcataaagaagatgtggtgcttatattcaaaggaaaattactcagccgtaaaaacgaaggaaataatggcatttgcagcaacgtggatggacttagattatcatgctagatgaaataagtcagaaagagaaaaacaaataccataggatatttatatgtggaatctaagaaaaaatgacacacatgaacttatctgtg

SEQ ID NO: 2071 - DNA, 549 bp, Bovine  MMBT21271
aaaaataagtctatgaaatgtgtcttgcaaacttgatttattaatagatattcatgaaataaacctactagctatagagtgaaacaatataaatttctccctgcagttatatattggtatgcaattggtacaatttggtgatgaaaaacaaataggcatgagataaaaattggagccttgggctttaaggtaggagtgaaaatacatacacatataaataaaaatataaggaaaaaattgaactgaaawactaggcatccacaaaataaagatagaagattggaagcaaaaccttgggtrcttatattttctgggcaggaggaaaaawttgaagaactttacattctttaaatatagcatagtgaatttacatatgtaaagattatatatatataktagacagcaaacttattagacttatgtatattttaagagatttctgtaaggtaagaaactgctactgttgctgggaacaaaacaaaaattcctgccctcatgtacattatcgtctgcacaagtattgttcgagtacatataaaacatttacaa

SEQ ID NO: 2072 - DNA, 600 bp, Bovine  MMBT21552
aggtattctgggggaactatttgaatctgtcatgttactgaactagttaagtcagtggtgaatttcatttactcttgcagttttaactatcattacttccagtaagtttttgctaggaatggaaactgaatatcctgacttgcccagctacacagcagtttgatatttgtaggaaagttttattgcaatttttttttagctcagaaccaacactgaattttctctgaataggtatcatttttacctattattaatgaaaactgaatagatttgaaaaytaggtttgcagcagatttgacrtttcttagtaaatcaacttaaaaattgtaaggcaaaacagcacttatatgtgaaatttacacttgcaacaaaatcattatgacaaaactaatcttgtttaaatcacaagtaatgtcaagccactttatccacttcctatgctgtcaagttaaaacaagaagcaagatatccattcctacacaatttgcagtgggtatgtttttcaaactcaactgctgtttcagctacatttttggatccacttaactgtacaaatgaggagcatccatctaatcttcaatacaaagtaattaatctgca

SEQ ID NO: 2073 - DNA, 600 bp, Bovine  MMBT19056
ctgaaggcaacctagaaactaatcccatcaccataaaacctgagactgcaagccatgtggcccgagcagttctcctgggttcctttaccctattctattgctctctgcccaggcagcccttcccaataaaatctcttgctttgtcaacacatgtgtctccacaggtgattcatttctgagtgttagacgagagcccactttcaggccctggaaggggtcccccctcctgcaacaaaatgagagtgttcatgagcatatttgcctggcagtgagaaaaatctttgtgtttttattaaatcrtattaaaaatattcacagttaactcctactcacttgctcagaggagtttttgtcaacactttagtgagatttcttggctcaggcctttgtctggtcattgatatattaaattgtggcttaaaaaatatatgtatatatatatgtgtgtgtgtatgtgtatatatatatataattgtagtttttaatatcccccaaaccaaaagcatttaatatatttatataaatgwgttataccatatataatgctcaataaattgatgttttaaatttcatcagtctacttatttttataaaatttag

SEQ ID NO: 2074 - DNA, 600 bp, Bovine  MMBT20633
ctcaatcaattaatctatctacctatctacagtccatggaatcacaagagtcagacgtgacttagagactaaaccaccaccaaccrtctatctatccagctttgatatacttgttgctgaagaaytcagcaaacacaatgcaaaggattcctgaagccagccactgtgtaaggcatggagacctttctgtctctagaagtattcattctccctaggtccactgcaggctgtttttaaattaaggtggatcatacacatacaagacctacctcaaagttcattattggattaccgcccttrgcatcaagggaggaaccacactggttaaaatgatctggtttgctccacctaagaatctccggggttttatagttgacctccaggtactatctgacttatctttagaactctagtgcttccttcyctaaatccctttacatttaacaagtaaaaawatacgtactggcayaacatgccagtacmtagtagggcctcaataaatatttattaaataaatgaatgtttattattttcatgcctaattctgacttctgaagacagtgctaggtgtatctcctacttcagtccataaagaaatat

SEQ ID NO: 2075 - DNA, 600 bp, Bovine  MMBT18614
aacatgaaaataaaaattttaaactagactgtccttcagatggtaattttaaagatatatgtgctctgttgcatcaaataaagaaaataaaacatttttagagtgacattaatatttttgaattatttttgtttgtaaatatttcttgggtactgaaaaatctctgaagagtagaactcattttattttttttwaattttttaagcaccaaaaacattgtcttggattatagccaattagcaatgttgttctagtttcaggtgaacagaaaggacttggccatacatatacattatccartgcttattaaaccaaagaattttctgttgtttatttcaccaatattaaatttggtcattattggccttttagttaaaggaattcgctttaagtaaacacagcactgaaggtgatgctttcagaaagcattttgttcaataatatatattcctaatccttaatgaaagtctcatataatacaatcagtaaaggatcctattaggtgaggaggaaaaggttcttaatcctatattttattcagaaagggttaaatttttaatgtattttttattcttatatttcatgtatttaacgcagtta

SEQ ID NO: 2076 - DNA, 600 bp, Bovine  MMBT19854
ccctacttgcttgctctgctcaagccaccaactgtagacagcaccagtcctgggcaaagaccaggcagaaagggtcatgactttagatgcaattataaataaaaattcttacaccaaacctgaattttagcaaagacaagaatccacagagtatgatgtagtcatagaaaatgaaaaacacatcttgcccagagataacgtagatcctcgctgccttctacataaaccaatgataactgataagagatttagcatttcctcagactsaggtacatatagaggtacatctcctcacagaartgctatcaagcccagggttcggatcagcttggaaccacctcaatcataccatgttcctgtacgtgctcctggcttgtgygtcatgggtcttggaaagccattctgccccgatgaagataatcagtgggtctacccaggacaatcacacrgcagtctgtgctgagattgagaaagaactcatggctgacaacgttacatacaaggtaagtctgggtcttcatcaaatatcactttactctcagtggccctctgtgtttctaaccaacttttcctgcttccagggctccttcgaaaggcctc

SEQ ID NO: 2077 - DNA, 600 bp, Bovine  MMBT20518
actcactatgagtaatccatactttctttataatagagtaataaaactgtacagtctcccccaaaagactaaaagaaaaacataagccacccattcagctaaggaaagcagaagcagctgagaaggactgaactaaagcaagacagcttcctgaacactgctggatagggcatcagattacaaaaagggaaaacctaaaggtctatggaataatagagtgcagccagaagaaatttaaagggaaaggagaaagaaaaaagccttgacagaataatggcagccaatgccagaagccagtcrtcttacagaggagtcgagttacagaatctccctggcttcagaactggaagtagaccttgccccttttcagaacggtaaatcatattagaacacactgtactgtccgtctgaccaaatatttgtcaaacagtgagtaattgtgaagtccttaagaaattccaattctgacgcaagatggagaataagaatcttttttaaagacagaaaaaataacctgttttctcccctatttctcaagtgaatgtcatgacaagggtcacactggtctactctgggtagatcacgtgaccatcactcact

SEQ ID NO: 2078 - DNA, 600 bp, Bovine  MMBT18585
ttaagtgctttcactaactgaaaaaaaaaaaaagaagtacatttagaaggcattttccaaaagtacctaaatcagtctcaacttgtatgacaaataataaatttataaatggagttaaatttttatcatgggcatcaagagtagaaattgtcattcattaattaccaaagaatatattgcaaatggtactgatattatcagtaaaatctgcgtggaagtcactgattatctatgttatatgacaatttttattttctatttgtagtgtgaaatatagcaacaagctataaaacaaaggartcagaactgggaaaatgctacttctctgagtcactttattgccctctatggcttttgatcttaaaatatctgtaaaaatgaaagtaatatagagtagaaggcatttggaaagatttaatacttttacttacattctaactttcccatgtggtgataaaatgatgatgatgaagaggctgatgaaaaatgtattgagtattcacttcgtacttggcacttagtgctttccatgcattttactctagtttttaacaccattttggatggtgaatgcccaaatgtgtcacaattatgtaatga

SEQ ID NO: 2079 - DNA, 451 bp, Bovine  MMBT20865
caaaatagaaggaataggtccccttatattagtcactrcatgtacagagcattttcttactaaatttaaaattttcaatgccttaatgataaagacttatttttattttgcttcattctgtactttaaatatgaccctagttgtttctttgcaattcctttgttcccttcctcatattctttcttttgggcttaaatattaaagggagtcttatcagcacagcttgtttctagaaaggggaaggttgatgtttcttttgaaatttccccaaaggaacatcgtgcttatagctttgctccrtgtatagagattgtgtagtttcgtgatgtcggacctcctatcggccatgagtaactgagtgaattcaagatgacagtattttgggattagatcttacatttgagaattttatctgaaattgccaccacatgtacagcaccccctcccattt

SEQ ID NO: 2080 - DNA, 550 bp, Bovine  MMBT20509
caaaaaggatagatagtcttagttcaataataaagcctggtccgagagccttctatctttaaataaagtgctccagcactctattacctgtgtacagcccatctttgatttccaatctaagtctatttttgcttctcrtgattagcatacaaatgtgaaaaaaagaaaaaagtggttacatgcgtgacgattaggacatgcctttgacttgaatgtcagtgttctgtcagcctagaggtgaggaaatgaatggccatttgcgggctccttcgaggtgcatcttgtctgaaaatgactccratccatctccttttatttgcatgctwagttcatcacacagatcgcaagtctataagcatatatttgttttaaaagaaacaaagggcaacagcatgcagcaacttgttaatctgtaggagggggcctttcccttccttctgcacaggagctttgagtccaggatggagtccacacgtgggggccctgccctttcaagaaccacatgccaggtacagggatgggagggctgagtcctgacacagatgtgaag

SEQ ID NO: 2081 - DNA, 598 bp, Bovine  MMBT21528
  misc_feature (1)..(56): n is a, c, g, or t
nnnnnnnnnnnnnnnnnnnnnnnnnnnnnnnnnnnnnnnnnnnnnnnnnnnnnnnnttaaaaaaaaatagaaaaagtggttcaggaggagaaaaactggctttaggttgaccctgaatgcttactggctggggaaggcatcgtgacatgaagctaattgaactctgctttttctgtagcttttaatatgctgttatgaaaagacccgatgaacagtgcttttctggcatcgagtctctgggaggtgaacagtgataaatggcagatcaggaagctgaagggcagaaatcaatacttgctrtttactctgtagtaaattatgagaagctctggacgagagggacagatgctggttctcaaatcacactgcttgaactttagttgtttatacatttcctctctccccgaggatctgagtttctatttttgccatgtatgccctaaacatatggggctatccaycaggacaattaaaaaagtggcatgtacttcaacttaatatctgtattttcttctctactttctctagcttttctaatgatggctagcatcatttgttttgttgaaggaaagcctttggattgcaaaatggattaaac

SEQ ID NO: 2082 - DNA, 600 bp, Bovine  MMBT21910
attctgaatactccctaactaggaacactgcattacaatttattaccttactgatgacccttcaaatgtaataaagaacccagtaaatcagaataattgataattcagggtcatttgaagttcagctccacattatgtaataatgtgaaaaaatacatcgaggtaaaatttacctttatacagaatgatgtatktcggcacttcagaagctcccatttacaatcaacarcagaaatactacgtaactggagactggaattcagggctggtattctagcatgattaaaaataattcccacrtttattaaagctgaatctaattgcttatactgtaaaatttagatcgggggatgatatgcattaaaagtaatttatgttccagaactttcactaattcagactgacataacttccagataattcatacttgtgaagttttttaatcaaatactcaaagtaacagcattaccattgtttattaatattgaatgagcaaaataacagtgcaccaaaagttttgttttagcccttgtaatttaaatgatgctataattgtccaagtaggttttcctattatgaatatagcaatagataccatta

SEQ ID NO: 2083 - DNA, 600 bp, Bovine  MMBT18966
atgtcgttaggagcaaacaaaccataaaatagctgtgtgttttaatgggcattttggagcgcatcccagcttgtggggctctgcccaaggacaagagtgaaggaggcaggcaccgtgggagggggctgctcggcttccatacaccrcccgggctgtgagctgagccacgtggacaaacgtcttcactgcttagagcttccctttccttatctgaaaagtgggacacagccagcctcatttccactctgtcaatcaggaactaccgtaatgacccaaagcctctccacttagaaggctctrtaatgatgaaaacactaacagtgatcatgataaccaacttatcctgacaccacgtgccaggcgagatgctaagagctttattatcttttaaaattatcccagtttatatatgaggaaaatgaagctcaggcaagttcaaaactatgcccaagctcacagcgtttgtgagtgacagtgccagacccagcgaggcttcccaggccttgctcttagccactaggctttgctgtggagggctgaggatgatgatgtgagggatggcagtgatgaagatggcgatgatactgatgacggtggtga

SEQ ID NO: 2084 - DNA, 547 bp, Bovine  MMBT12665
  misc_feature (1)..(1): n is a, c, g, or t
ncattaattgctttaatagtttaaaatttatgcaaagacagttcatccataattatgcatgtattatacctttgggcatatgaaatgtaagacaattttctataatttttaagggcaaggtaacagatgacttttcagacttttttccagaggctatcaacaaataggttttttttttcccttcaaggaaataattttcaaacttatttcccttaggaggtaccccaggggcctcagagggtgttagaggtagtgaaagaaggtattatgtttaatccttcaactcacttcacacagagtrttaaactatttctaatagtgatattcttcacaaagtttggggtttaccacgaccaaaacacagatagaaaactattgctttaaggcaacctctagggtgtctgtctcaagatatataggaaggtatattgaaattctcagaagccatgtaaaaacaagtttaagtcatttcaacttaaaaaaaaattatgcaattctactattttaggatgaatgtggtgattccaaaaataaaaagcagtaataa

SEQ ID NO: 2085 - DNA, 600 bp, Bovine  MMBT19128
aggtcttgtttgggaagagagagaggtgagcttgaaggtaaggacaaaggcagattcctgttctgacctttcgagatgtgtgacttggggctggtttccctaagtccacgctgaaccctttgctcttgaacacatttagagatgccaataaatgccttgccagatcttgttaggactcaatgttctaacatgttggtttcctttcttccttctaactgtagcccattaggataaagaggacaaaggaaagaaagactttctcactcaaaaccctcatcaaaatggaactatgaggtatgrtaatacttgatgctgtaaatagggtttgacgatagataagcctcctctgtttcatttaacacacattctttttatcatttggaccagaaaggtggttgcaggacactattaataaaggaaccatcttcagcagagattctaggaataaagattttgacaagataaggagaaaagctggtgctgaagtcccctctttgtcaataggttgaaggatcctagctagaagcctttgcctgttacatgtcccgaacacatgtattcatgcaaattaatgaccactcattttcttttccactctct

SEQ ID NO: 2086 - DNA, 600 bp, Bovine  MMBT22361
cccaactagaatgtaagcttaatgaaggcaggsactttgactctttagtcctttgctgtatcccactgctggagcagtgyccagtacatcataggaactcggttaatttgttgtgtaagtgagtgaacaatgagtgattttcactcatccatccatttagtgcataccggttgagtgcctacagtatgcaaagacaaagacatcatagtccctgccttctaggacatagcagtcttgaggagatagacataaatagatacagatatataaacagatatttatgaagaagatttgcaggtrcagtgatagagttatggcccggatgttttctcaaatacagtgtcagagaagcagcagataatatgctgacattaagtatactccyttgcttaagaattgaagccacaaataaatgtgtgtgtgtgtgtgtgtctttagtgctttggcattataggatttcatagagtttggagaaaggctcaaaatagcttttcagtgatgttacagtatgacagaaaggtgaagaattcactttctttcccctcaaatgaaatagaagcagtggcatttctcccaggtgggcccaggcattgtacaaga

SEQ ID NO: 2087 - DNA, 600 bp, Bovine  MMBT23049
tttgtgtgcagaatggcaaattggcttccaaagctaattctgctggaaataaggggtcttgggattcgcgcacaagaagaattcaaattaagcttgtaaactcttaagaaggtagtagccatgctcttttattcaccgacatacattcaggacaattacagagctgtagtgggcacgttgtgaatcttgctcatagaaacgtttgaaccactttaagatgaccataaaaaggaacacaattgtgccatttgcagagacgtggttgaagctagagactgtgctacagagtgaagtcagttrgaaagagaaagtcaaatagcgtttattaatgcttatatgtggaatctagaaaaacggtacagatgaacctatttacagagcggaaatagacatagagggaaaawatatatagacataaagcmgaggaaggggtggtgggatgaactgggagactagaattgacatatataccctaytgatcctgtgcataaaccagatagctaataaaaatcctactgtatagcccagataactctactccatgctctatgatgacctaaatggaaagacagtccaaaaaagaggagatatatgtatacc

SEQ ID NO: 2088 - DNA, 415 bp, Bovine  MMBT21980
attgaaatggcctttctgtcaagtatggtatttataaaagttttctttgatgaaaagcctatgaattttgtgcaaacaacccaggcagggtcttagattagcgataacatttgtataggattttatggcttgatacgatactttacactcgatttatttgacccttacctgtgaatacgcagtgaaattcacattttamtgatgagagcaatgtagggaaggtgacttggcatgcttctgggcactagtgggcattcagcatgtttgctttaaaagaaagttagcaaaggaaaccagcarggtatttaacttgttcgaagtcacccagtaaatagtgcatcataccaagaactgaatttgcttctttaactaaaatattccatatgctctcattgtctactgctgtctttcaggc

SEQ ID NO: 2089 - DNA, 441 bp, Bovine  MMBT20512
ttttaagacaaggccatggccttagtcatgacttatgcagggttccccagtaaaggyrtgtgtgtaggaaaccctgcctgtttgcagacacacaaaaacacaacgtctatagccctaaggaatcctgtagcacgaaacacgtgtgaccgtgaaacagcgtgtgtgaagagaaaacgtgtgtgaggagaaaacaaacagacagcacttctaaaacttatttgaccacggaatcgttttttggttttttttcatataataaaactagtggtcccattctggtttagaaatacagggaccttrtatttcatggcttcgatgaagatgacctgattggggattgtccaacatgaatgaaagaaagaggaggaggagggggaggggagggcgagaagaagaggaggagggagacagacccagtgaggggaagagactccgttccca

SEQ ID NO: 2090 - DNA, 600 bp, Bovine  MMBT21667
tatatagcagattctagaattaacttaaagtaatcatcaagctacttgctgttccctcttctggaaacataacatgacaattttggggaatggatataaatgaaggcaaaaatattaatcaataacagaaggcctcttcatgaaagtattgtgtaacatttcatgtttggtattttgagagaaaaaytttcaattttattgtgctgcaaaatatataattatataagtcatcctttacgatgaaggcagctgatacamtgtrctatcacatctttgaaagtggctttaggtaggctggartaactctttgtgccttgccaatgctggatttaattcttctctcatataaaaataccagagtttcaagatattgaacaactgtttattttctattaacctacttaatatgaagatttgttatttcatagaaaaatcaaccttatgccatacagtgttaacatcaataattataaaagagtgaacaaaaatctctcacttttagctgttatctatttttaaattaaattatatacacaaaaaagaatattggcatcaactttaaattctgttaagccttggacaaagaatcatttttatgtc

SEQ ID NO: 2091 - DNA, 600 bp, Bovine  MMBT21523
ataaaaggatgtaactcaggaaaagccagatggaagaggtgaagagggcaaggtctggggaaagggcaggagctccatgccccctcccagcacctccacatggtcaccatcccagaaccctctctgaacccagtcctcttggatttttatggaggcttccttaaataggcatgattgattaaatcattggccatggattactgattcaaccttcagcccctctataatgaataccctctataatcacaggactggttcccctggcagtcaacctgaatctttaagtgtctccaaaagccrcctcattaacaacaaaagacayctgtaccacactcagtacttaggaaattccaagggttttaggaaccctgcgccagaaatagggaccaaatacttactgcttattataaattacaatatcacatctcctctcagctactgttttcctcttagtgctttgttgcctgctattatccccttcaatgtatttctctaggataccgcaacaggcactttctccttcttattgcatcccrtgggggaaacgggggtggggtggggtggacggaggtgggtgtgaccacaactgtggcgaaaaac

SEQ ID NO: 2092 - DNA, 600 bp, Bovine  MMBT18943
ccattgtgtctagatggtgaagagaagatggtaatatgcttattaataggttttcagaggttttgctttgcaacttttggacaccatggttaccatgtttacctggttcttagtcaatttcaaccagctctggtgacatttcctttatgtattggctttcacacagttcaagactctgatgttgctgtcacatttcttctcttttcygtgctgtgtactcatttttggacaagaaacattagcttgcagtatttttcaaagcaggttgaaaatgcttgagtagtcattttgttggaggartttatcacaggcgagagagttttgcatgggaaagtatgtattttctgatgagcaatcgctttgcatttatttttgcaggagctgcccccaagaatctaattttaggtatcatcaccagggtccatgtgtgtgtaattttgacgggatctacattcctttcattgttgaaattagttgaatgattctgtaattggctttaaaatgcaaaggagatcctcttgtagctgtattttaatttgccgagcttgggcttctgccactgatgtttatttttcctgacaagactgtaaaacgtgtggg

SEQ ID NO: 2093 - DNA, 600 bp, Bovine  MMBT19234
ttggcaaattaatgagagtcttgataggagtattcttgtggactattttcaatttagtaaggtatttccaagtttatactaataaataatttctatttatttaaagtgttgttgagaaagaacaaaagatacataacatgcctttgtttctgaaaaaaaaaaaatacattcagtaatttcctagtgtaacacatgtccagagaacacactgattatctttcaagtgtgttgtacttcaaatggcatgacctttagcctgtgaacctgaaatgatcactcttttgaacatcatgggcactratatcatgttctcctacttgaaggcacattaaccagaatgattcatccattcatttcattattatttatgcatgtgtgtgttcaaacttttgtcagttgtttccttcccattgactakgacccagacagtactgtcagtatgaatattttcatgaacaaaacaaaacagaatgcaatcactytgtttctgctttaagtaaagtcattcttggttttgttttgttattttatcaacaaaatgaataaatatatgatttataaaaaagaagttgatccaacatcttcatgcagttattctgt

SEQ ID NO: 2094 - DNA, 600 bp, Bovine  MMBT21566
caggcatattttagaccacctgcggactctaatctacgcaaatttatttggtacaaactcccttctacgtcaccttattcagtttaattccagagaggtttactgctaaggttgagcagccttaataagagaacagctgctctcatgggggctgccctgaaaggaaaaagaaaaaaatgagcttttgttagcttcttccctgtgaattcactgccatgaatgtgtatacctttcagacggaatagtcaccttgagcagtagagtatgtcctatgtctgattcaagtccatccttcrgccrgtgattcacctataaatgtcttgactcaaagaattaggttaaaaagtatgttaacatgtaaagattctcaacagtaactgatctgaacttaactgcaataaaaacaaygtagaaatagacaaggagataactttggtagaagagtaattttcaaggtttgctcttaaatattaaatagatgcatatgttttattggcttctatagaaagaattcagattgttttaaattttagtttatttcccttgttgagaatcttataattgaagaaagtgatattatactccatgcratctgcctgt

SEQ ID NO: 2095 - DNA, 392 bp, Bovine  MMBT22378
tcaactcaagtacaaggtctctatgaattatttcctgaggacccaggtcagagttaaatctctcctcttgtacttttataataatgatagctaatacttacataatacaaaccacatgtcaaatactacatatataataacacttaatctttacaaccaccctttaatcaatgaggaaacactttaagggagagttttgtggttttctatcaccacattttaacttccattaccatctgcaaagtacaaatacaattcccaccaaaccaggatcttaactgaggacagataacagggtcrttttcatctttgtcaccaaagcccaaaacagaaccatgaaataggtgatattctttaaatgattgatgaatttaggtaattccctttgtact

SEQ ID NO: 2096 - DNA, 436 bp, Bovine  MMBT20464
cgtcaaataaaactaagtgtgttcataaaaagaaagacctgcttacctggttactgctgtaaaattcaagtgctttaataaaagagattgtgcatgtagaacaaaactatgttattgcaatcaactgaagttcagtccactcactgatgtactcaatatttgttgagaattcaccattggtatgtccttccagccagcatacatccattcaaatgagtagttactacattttagcatcagtttttttatattggattcaatcggagattggcaaacagactagacttaggtgggacacarttcaagaattaattcattcaatcactgattcaccaaatacgcactgagacctgtcatggtccacacattgtactaactaataggaatacagccgggataagataggtgtgatccccgctcgaaggagttacactta

SEQ ID NO: 2097 - DNA, 542 bp, Bovine  MMBT20102
aatatttctatttcactaaactgttctttcaaatctcttgcacaaccgctttcagttatataggatttatcacaggaattgctggccctaaaacataaaatattacagaattgaactttatcatcctatttcatatcttccttctgtcctacatttaaatttggtcattgaggaagctgctgataatgatgtcatacatggtagaaaaccaaggtcccttaaaccatggtaccttttaatgatggtggaattaactgtttaaaacagtttgcagatccttggagatcaaagtgagtgccrgctcttaacaggagcacacgtactcctttgattgatctatggattggaatggaagtgatatatctgtgaagtaaaaactggggcaagattcgttgttcagccactaaagaagctcattttactctgcacagttgatgtggtcttacttgttcagttgatattttggcatggctcacataggccaaatatttcgagactcattttctcatacttttgagcttgcagtatttcataaaggaagt

SEQ ID NO: 2098 - DNA, 600 bp, Bovine  MMBT20457
gtatatgtcattctagtgaagtgcttttagaaattggttccctagtgaaggaaggattggraaacttagccctgtaagaaaaatcggcaggggaaatgtcaaatcactccagttctttgtcctcaagctctgacccaataattctgggtcattggaaagtgacctaaaaatataaagactcaaaatttcattcagttgggtacagtttcaaatgcaaacaccactgcatctctgcatgacatttagtgtttccttttttactcctcaggtctttgagtcccaggagaactcttcaggcargttttttacggacatacaagccaaatactttgagagtgtaaataaaacaacaacaacaacaaaacactttcactttagctcmtgggacccaactgtttcagttgctgcagcaggtagaactttaaagacaagcacaaaccagaggagaccagattctacattaatgttaggtcttcagttacaagctactttggagaagagtctgcagaactctaaatctcagccttggtccaaaaaaacaatacatgactcaaagcatctttcttagaatcgagggagaatgccgctggggcctggtgg

SEQ ID NO: 2099 - DNA, 575 bp, Bovine  MMBT20667
gacaacaggtgttcaataagtgacagataacacaagtgatgatgatgaagttcctcaggcttcatcagtgaacaatcactgttccttaaaatcagcctctcaggggtattaaaactaaatctagctttggagattcctagaatcacgtcaggaccacgtccagcttcttggacttcgtctttcttcctggactatgtcttttgagccttttaacacctaacctattttgctgctgttgctttatattttctggttgaggacagtgagaacgagaaagcaatgaccrttaaacaaggcagrggaaagatgatggaacaaagcaaggagggcagcatcactcaggaaggagagcagcagcttctgccaagttggggaagggggagggaaagctcacgggccatggtactcaccgcggcccaccaccaggcgtgtgggatactgggtgaagttagtgccctgcacgtcgtgctccacggagtagactgcggcagcgaaggtgaggatgcccatggtggatgaagagcatcaggcagcccacttgctggtagcactggcgcagcgtgaagccaaaggcg

SEQ ID NO: 2100 - DNA, 558 bp, Bovine  MMBT12813
gaagtaagtagttctagacagtaaggcagattcatttgcgggtagttatggcagctcagatttgaggggcagtcaaggttcctggcctcgcaaaagaggctggaggctggtttctctctcccggttggctgggccacacctctgccccatggaagtgtttgtggatccaacctgggcctcgtggtctgtcttctgtggatgagtccagctggcatggtccacgtggcacttaggagagggccacagcagagccggactcgggttcagggtctggccatcctgagctgtaaacagaccacrgaggggccgtggggctcctgctctggcctggctggtggcggagggygaatgggaaggcratcgcatcctgggccggaggaatcaccagcgtcatctctctttgatttaggttggctcccatcatctgagactcagcagaggcctggaggccagcgcccctgccttcgacaggtagggccgtcaagtccatccttcctcctatcagacagtggggtggggggccagggagggccagaagggggagaccccaaatgtgca

SEQ ID NO: 2101 - DNA, 598 bp, Bovine  MMBT20500
  misc_feature (1)..(111): n is a, c, g, or t
nnnnnnnnnnnnnnnnnnnnnnnnnnnnnnnnnnnnnnnnnnnnnnnnnnnnnnnnnnnnnnnnnnnnnnnnnnnnnnnnnnnnnnnnnnnnnnnnnnnnnnnnnnnnnnnacctggggtgaaagttctccaggagaaaataattcatggcctcatattcctcaggggcccttccgctttcaaattccagttacacattcaaatagctgttacccgagatcaggggccagacatgctgagggcctgcccacgtgggcatagccagcctgtcctaaccagggccccgcggtgtggggcrarcacacaggggctcagcagagatctcgtcaccacgtcccaggaattttctcagcccccagayrcaggaggtgaggtcaagaatccagaattggacatcgagctagtcatcttatcattcaataaggaaaattccccataaacaaagaagacatagaataagtggctcatgttaaggacaattatttatatgttatgaaatgtctgaactccgtcccctgagaacaaactatcttgatgtatttcttcagcttcgctgagaaaaattccacaataataaacatgagatgtcggccctttt

SEQ ID NO: 2102 - DNA, 499 bp, Bovine  MMBT20118
atttgaggggcagtcaaggttcctggcctcgcaaaagaggctggaggctggtttctctctcccggttggctgggccacacctctgccccatggaagtgtttgtggatccaacctgggcctcgtggtctgtcttctgtggatgagtccagctggcatggtccacgtggcacttaggagagggccacagcagagccggactcgggttcagggtctggccatcctgagctgtaaacagaccacrgaggggccgtggggctcctgctctggcctggctggtggcggagggygaatgggaaggcratcgcatcctgggccggaggaatcaccagcgtcatctctctttgatttaggttggctcccatcatctgagactcagcagaggcctggaggccagcgcccctgccttcgacaggtagggccgtcaagtccatccttcctcctatcagacagtggggtggggggccagggagggccagaagggggagaccccaaatgtgca

SEQ ID NO: 2103 - DNA, 600 bp, Bovine  MMBT19069
ccagggtattggtaaattatgttgatgaccagaacagtgctgtgtcatacaagtgtgatgtgagccacatacataatttaaaatttttaactagtcataataaaacattttaaaagataaaatttattttaatattatatttttaactaaatttaacttagtgcaaaatagtatatttttaatatttaatcaataatttaaaattattaatgaggcatattacattctttttttacacaaaatcttttgatatctggtttacgcttcacaccacagcatacctgaattgggactggccayatttcaagtgctgaatagccacaggtggctagtagttactatcttggacaatatggcttaaatgttttactaaaacaatttttttwaaaaattggcttcagttgaacctatttatttattcagtatgtttgtgaagctatttaaattctrtttggactgtatttcattagtaacatgacaagtttaattacttgttttagacttagatgagattgtggctttaatttcctaacatttggtgaattaatcatatagatgagacaaaattgtttgatgctccacttagctatgtcagatttg

SEQ ID NO: 2104 - DNA, 600 bp, Bovine  MMBT18450
aggctttctgcttggcactgagcagtgagcatgcctatggtcctctcacgagcccacttttaatctcattgacctctcgttatactacagcacataaattcagatttggagatcttatgttccatcataaattgggctggcagacttccgatcaacaagataaagctgtctcctgtgaggtgggtgttttattagtcttggcctcagtgctgcaggcagtggaggtggggcgggggmgggaggtctctggaaccctcctgtgctgtttcagatgggcctgatgctgctttttgccatcaygggtaccatggcatcccctagacccccatccccatagcatcagaatgagcagccacagctggacccccaggctaggcacgggaaggtcaatagggagaccccatgtgcacccaggcatgtgtccatgtgtgcccctccccctgtggtggakctttgtgagcttggccagagccagagtggggttcaggggtgggggaggcagctgcacatgcctgggcatcctgagggacaaagggctggaggaggggcccagagaagarcatccaggacgcagctccagagacatggcggcctggcctg

SEQ ID NO: 2105 - DNA, 600 bp, Bovine  MMBT22065
attcaaaggaaaattactcagccgtaaaaacgaaggaaataatggcatttgcagcaacgtggatggacttagattatcatgctagatgaaataagtcagaaagagaaaaacaaataccataggatatttatatgtggaatctaagaaaaaatgacacacatgaacttatctgtgaaacagaaacagattcacagtcatagagagcagacttgtggttgccagtgaggaagagcagtgagagggaaggactgggagtttgggatgagcagatgcaaactattatttataggatggataaayaacaaggtcctactgtataccacagggaactatatccaatatcctgtgataaactgtgatggagaagaatgtgaaaaagaatatgtatatgtataagtgaatcactttgctgtagaacaraaatgaatgcaacattgtaaatcagccatacttcaataaaaaaataaagttcaattcatcaagttcaaaaaaaaagtgtatgggattatgggccgtgggttctgtgcaaatactgtgctgttttatctgagggacttggtgtatatatatggggttcctggagcagccccttgttgatac

SEQ ID NO: 2106 - DNA, 600 bp, Bovine  MMBT19807
accacactgaagaagcctgagcaggtctagcctgagtagcctggtctctgtcaagagatttccacagcagaagacagaattcaatcagaattcttcctggaaaagcccagtttgcctctaggccatcttaattcrgatgaaactgaactatgatttaaaaagaaaaacacaaatatttatagagttccctactgttatggagctgtcctgattgctacagggaatagaagatgtttttacaagcgctctatattttttaaaagaaattcatgttcacacaaaaatttacaagtaaattayaggaaagttagaaagccattgcaatagggaaaagtgatgaaggcccagcgtaggatagtaaaataggaatggtgactggggctttgaaagacacctaagaaccagattagtcttagtaaataaatgcatttagagtacragagaggagttargtgagtcaaagttgtctcatttttaatttggagtagatgagataacattaaccaagawagaaaayacaggaatacaaaaaggttttggtcaggagataacacattttttttactttgctgctttgatttttaagatgggatttgaggg

SEQ ID NO: 2107 - DNA, 600 bp, Bovine  MMBT21387
cacggaaggccacatatatattatacagtctccttattaccaatcaatttgggaatatgatgagatcaatgagtggatttccttcacagamgaatggaaagaagcacatatrcgcaatatcatatataaacaaatattcatggaccaaagggcaagaatccggacaccatcccaagcgcgtcctgagctaactggccttcccaccgtcatgtctgtgcttctgcattttatcctctgcctgcagtacccatcttttattttctcacctaccaaactgctacttctccttcagatttaaayttaagctttgccgtgtctgtgaagctgtttttttctgacgcttaacaaaccctaaaggtttcttccttcaagcttattccctagtagcgtttatcacttggtaactgtaggtttgcaggactgtttaaccattgatactgtggattcttgaaggcaaggactcaaaatcttttcacttgtgagtcatcattgcctaggcattgcaagttttccatgaattttacaaataaggaaaaatgagatctagaggagtgttaagagacttagccaagctagtcagtggctgtaccaggcaagagc

SEQ ID NO: 2108 - DNA, 600 bp, Bovine  MMBT20770
attcttcttcttccccagacaggaaaagatgactcagcattttatacataaatgccaggtttgagtttgaattccattctgtattaaaaagaaagcgactgaagaattctggggaaaactgtgatgtgtaaaaacatggtatggtcaagaagggagaggagcagtcaggggaactgcaggattaggcaaaaggagattaaacccccttgatgaaaagacattctgaagaaatttcacaactccctaattccagaaatatttcatgggtactgtttgagaaacactcaaccaagtgttggygcattctgtttgaaatgtcatcctcttacttcattccctggtgaacaactagtcatcctttctagaggattattttctagtgtgtgcccagctgagaaccctttgagatacctccttgctggcagttgttttgtacaatgtggacaagctgtacccttcctctcaggcacaattttggctacatctttgagaatttggaatagaggcaggggtagggacaatcgctgcctataaccataatttgcagactcagaaattgtctacagtcatcttcctacatgggcttccctgtagctcagc

SEQ ID NO: 2109 - DNA, 598 bp, Bovine  MMBT18793
  misc_feature (1)..(130): n is a, c, g, or t
nnnnnnnnnnnnnnnnnnnnnnnnnnnnnnnnnnnnnnnnnnnnnnnnnnnnnnnnnnnnnnnnnnnnnnnnnnnnnnnnnnnnnnnnnnnnnnnnnnnnnnnnnnnnnnnnnnnnnnnnnnnnnnnnnntacctttgttatctctcatatatccggtgtagtaactgtgagattgagcagagggtcagatgcccatgtttccttggtgatgctgctgaggctcagagaggccaagtaatcatcccaacactctagtccatagaaagagcagcagccctgctagcgtcagagcaatcgaygaggaaactgaggctcgaagagcaaagggtccatccaggtaatctgatacctagcctgctctgctggtcacgtgacttttttcttatgtctgccctcagggatttacctgttcaggccaggaggctggtggacctgatgaagaatgatgtggtaaatctggggaaagtggcatctgggcctacttgaggtaggatacccagagcagggagaggcgggaggaattatggagacggagagttttggctctgggggaggatggggacacacgggaatccagagaggccaccttaaaaaaaa

SEQ ID NO: 2110 - DNA, 561 bp, Bovine  MMBT15021
agaacctaccctcacacactctcctcgtaattaaatgtcagatgtatacaatgcagtaaaataattagcatggcataattaccgttcagatggactccctcgtatatgccaaacacattgctgtactagagcacaagctgttaaaacaaattgagttacttaatttttacatgtggcagcctgttttatcatttcctcagatgcaaatgcttcattaatgatgcggtccttctgcgcgctcaaggctccgggctactgcaaagacagagcctttggtctccccgcggaggccctgcagaygaaaatccatgcaccctcctcttccacacgtgccctctccaatctcgtctccacagagtagcccagaggatatttgaaagccataaatcagatcgtgtcacatgcctgcttgaagaccgttcagtggctcccacttagataaaggccagaggccttctggagggagcttcctgaccgtcgcaggcctctctcttcccgtcactgtgctccagccacactcgttttctttctcttctttgacccaaggtcaaagggctagta

SEQ ID NO: 2111 - DNA, 600 bp, Bovine  MMBT21671
cacttgttcccagtgcctggattagaataatgcctggcagagaagatgtaatcaatgtgtcaaatgattgtggggggaaaaaaaaaaaaatcccagtgttcccctttagggtggatatgagtcctggttgtagagaggggttcaaacagttcaaaactcctatcaaattccggaggagagaggagaatccaggagttctaattcacacaaatgccatgmagctttcacagggcctccctttcccttccgtctacaggaaagtgagtggtattcaataaccaagttctmaaaccacagctyagtggggaaataaatcagagtccatggaaacggagtcarggagaagtcatgtactctagatcagaacaaagagaagctctggatagaacaagatagggggaacaaaactgcagtaaatatccagacgtgctaaggcaacrctcccagataaaaacaaacaaaactaatcaacccttaagagaaaggaacctggcgtgcagaggaatgataaaacccccactcttaaagaaaacataatccaaagcacaaaacagaattcctcagaaggactttgtgctatgaatcaagttaatgagaaca

SEQ ID NO: 2112 - DNA, 600 bp, Bovine  MMBT19939
cgactstggattgaatccatatcctctgcactggaagayggattcttaaccaccggagcctcaggaaagtcacatccatgacattattaaccaaagacattattagcaataggaagaagcccctagtcactgagcatttattatgtgtaaggcactgagctatgtgtatcacaggttattttcctatttagctctcagaacaacctcgtatggtataggttctttttatttgattgaggtatgacacagtgaactgtctagctctcaagtgtagagctggatgagtcgtgacaaatgcaygcatctgtgccccttgtctggccatgaccayggcaggcttgctcaggcccctkcccactcaattcccacaccattcgcactagctgtataacctcagattcgttttatctgctcaagaacttcatataaatggaatcatgcagtagtgtgctcctctagctctggcttctctgattcagtacaatgtttgtgaaattcgtccaaatgggtaagagtgggacacagtccttttccttttttttgttgagtaatattctattgtgcaactactaacacagttcatcattctcacactgaagg

SEQ ID NO: 2113 - DNA, 511 bp, Bovine  MMBT22555
ggtggggcctctgaattacagtcacaagaaggcaggtgcaggtcaagggaggggaccaaggccctgggcagccagggaagaaaaccagaaggggagaggcgaaaggggcacccttagatcagggcttaggagatcccttcagtcctccaggcccctcacccaagacccaccttccggaaactgactcagcccctcttgctgcttttgaatcccttgctattmgcaagcagcccctgggccccaaccgaaacacggcagctcaggattgttacgcaaattgactggtggggccctgagccyggctaattcctgtgtcttaatgagtgggaagatgaggtttttattcatcactggggctttaaaaattgcagtaaagtggcccactttataaagaaaaaaatcaatagctaaaagaaaacaggagtatgtaaatggacagagtgacaaaaagcaggccaattacccccccaaaatgagacacagttatggctccattaactcaattatattt

SEQ ID NO: 2114 - DNA, 600 bp, Bovine  MMBT18986
gattaagtgatcagtaggaattcaaataacattacctcatattaaaaacatcagctaatgatagcatcaaaaataatctcctaagaagagacagaggatttggaaattcctttaaagaggaagagatgtcttttgaagaatttgaggaagaagcgaagcagaattaaatgataaccaagaaatcaaggctgcatggtaaactcttgtgaagtgaaagatgtgtggtatttccccaaatctaaaagagttgttatggagtgaagtttgcatgctcaacacacagtgaggccgacaaggcgmaacatccgagtttggagcagagaaaggtttattccaaggccctgggtttcttgtgcctaataagaccccaaactcctggatgggtttcagcaaagcacttttaarggccaagagagggagagggagggctgtggttagttgttgcagacttcttggtcttggaatcaagaccgagactgactttgttcttgcagctgtccacataggtcagatcacagtattccttttaaacctccaataagacaaatattattmtctgttctgcaacattttatctctgtatgattggaccctaaaagg

SEQ ID NO: 2115 - DNA, 600 bp, Bovine  MMBT18885
aaaaccatctcctcggcctccccaagtagtgagtgctttgagtgctggtgggtcttatctccccaactccccaacttccttggtctctgagcccaaggaaggctgcagcacagaccatctcccttgttcaggcgccctgtatctgccctttcccagatggattttcatcattttcttacttagagctttgtatgttaatgcagcttctgttttcatgtaaatctagttttttgtttgttttttaaagtatttatttatttcactgtgttggtcttagttgcagcatatgaactcttgttkcggcatgtgggactagttccttgaccaggaatcgaacccaggccctctgcagtggagcatggagtcttactggatcaccaaggaaatctctaaatctagtttttaatttaagaattctcactcttcaagtataatttttaatactctgttctaacactctgttctggatgttttctattaaaggaaactgtatggttaaaattattaaaatttagattgtatcagagcttatgtatttataaacatattggtgcaaggtgtttagggtcattgggttgcaaggaacagaaatttaattca

SEQ ID NO: 2116 - DNA, 600 bp, Bovine  MMBT18838
caggcagcttcctcattaagagcactaacaagggcttcagcttcctttgacgtctggccaggacttgattagattcccaagctgctcctttgcatttggccagggaaacatcctgtcatttaaagcagcttctgcaggcagctgacctcgtgcaccctgggctgaycgctctggtaatcttgtttgtactctctctgcttcctgcagagatagcaaactgcagggaaggatggcagtgacaagctggtgataatagggactcataatagtggtggtgactggtgtgtggagtggtacttkctgccagcctggcaggtgctgtctgtccctgggggccccccgtgaacctcaaaaccttatttgatgggtgaggagtaggaagcatgtgtcatatcgagccattcatggttggatacatggccttgaatccataggacttgaatccaggcctgtctgacattaagaccctttccttaaccatacatagaggtaccgttgtctctctaagataaaattttggggtattcaagaatattgcgtgcacctcagcatagacaacactgacctaagaaatcaacgagaatgacattcattggcatc

SEQ ID NO: 2117 - DNA, 600 bp, Bovine  MMBT23184
tacccacagagaagtgaggtggtggtctggaggccaaggactaaagagatttcaaaagccagtccccctctgtgactaaggcctgcctgatgagctttctagtccttggtctgttcttggacagacctgggtggaccctccccggatagggcttggcaaggtctgagactggagacagggaaatcagggaaccagartctgtatgatgagagatgtgcctgagcttcagcctcctggatgccatagcagcagagtaaggrcagatctttgcactagatgtccttgggtgagcggggrttkctccaggagcatacaggcagctgcaaggccaatgtccaaacctggaatccagggaccagcccacatcaggccagtcatcagggttctccaaagctcaactggtctctaaggagctgctccaatcagggagtcatcagtctagaacatttattaagcaccagatacagggtctgggaaaacacaggkgaacccttgctttctgacagttggcatctctaagctgaaataatgggacacatggggatggcagtagagcttcatctcagctctaccactgctttgcatagtacagattttccc

SEQ ID NO: 2118 - DNA, 579 bp, Bovine  MMBT19900
cctggattgagagtcactgatctgaagcccccatccaagaccaaatgggccaaataattctgacggacactcaagttgacgaacccctgacctatgatattctttatgaaatcctcctaatggacaccccttctatacacacagctcttcccagggttacaggtggacaaagagaattgattccttttcccagatgaggaaggtgagagacagagagaggaaatgtctgctgcagtcacacagcgagtcagcagcagcaatgggctcagtacctagtgggtgcctagcgcccctggcatmctaggcccatgccgagcacccctggactcaaagtatttttgcagaagtcatggatttgacatctgggtgacccagagaagtgctcccacactcggtacctcccactagtttgtgacagtgagttctccttggctgcctgtatttgagcaggcaattctcatttcagagttggaagatccagtttagggaacttgggcttctcaaactccactaagttccaagatcacccctgaaagcttatttaaagtgccatctctagggccctagcccccagagagg

SEQ ID NO: 2119 - DNA, 562 bp, Bovine  MMBT19006
aatgaggaagaaacagtaacgtaaagctttccagggctctgaaaaggtgtggggttatctgattggccatcagtgcagccttgttacagctttcctgtctgctttttatagccttctcctacctgatggtggaatctggccggtcacgttgtgctgctagttggggatgtgccttttcgacccttgacaaattgtccactctcagatgctttggatgaggaaagctaagagccagaagtgctccagaagaacaaataatctctgatgtggggcaggagrggccaygttttgatagaaatkaaggcaattaggactatgaattgtataggacctattttgactgcttagagaatttgtttcctgtttgggtcaaaggtcctgcctggtgtttgaggttactgagaggacagggtggtgatgttgagtttatgtttagaaccctcagtgcttccaaggttctggtcttccccggaccctgtgagagcccccgggatggagggggatggcaaagcgcaccgcagaggagggccagggccagctgcagagcccctccggtgacgca

SEQ ID NO: 2120 - DNA, 600 bp, Bovine  MMBT21974
taaatatctgcggttatactggccaaactttgaaatgtgctatttatttttacaggagcaggagaactgattcagacacttcaggtatggaccaaattccaccatatttctttgtgatcccttgtatcaagccgtcacctcagggccctggaacagacagagtagctaaaaacaaaggaatcgagccagacattttgaggcattccctttcctgtctttgcttccttctgagagtctgtcctacagaaatggcctcaaagactacattcatgctatctttcaagcagtaggcaccacttkgcttttttctgcrctgatagagttccctagttcccaggatctctaactcacagggcaggagccactcccaagctagctctgcgagcagaatcaaacatgatatggcctgttactcctgctgatttggaagggaagtgatcacagctcaatttcttggtaaatctaaaatctgctagcccctcttttcttcctgcttgtgtctttgtcttctgctctgcggtcaggtgatagaatttaatgttttcttctggcagctttttctttacrtattcccacatctcggggtcattaactggcaac

SEQ ID NO: 2121 - DNA, 600 bp, Bovine  MMBT22539
caacaagttgacagctgattacatacaacttttgttgtggagcctggatgagcctctgtgtgtgctccactagctccgctcaagaccagagtgcacgctgatcatctctcctgggagctgctcccagcaccaaggtcatgcctctccgtccrtgcctccccttggcctgtggcttgcaccctgatgccctctctcctctgtttctcctgtttccagctgccttgttattctgctgagaggagacccagcgatgccttcttccattgtaaatgctccagctctttcctatttattctctcktgaccttccagaaaaactgtcctgtgtgaaggctaacccagaatagctgagtgcttagattctgaaaagaaagccaccactgagagtttccagtttggaacaataaaatttgacttcttagggtacccagcagccttgagatacaaatttttcttatcgtggttctgctttaaatgcaccttgttatggggactgtagtcctgcctctgattggggtgagactcattggtgatctgatgaggccatctctggttcacagtcaaagcctggttgttcattcccctgtggaatagctgttaa

SEQ ID NO: 2122 - DNA, 600 bp, Bovine  MMBT18794
tccatgaaaatcttagatttgcagaaaagttaaactagaggagattacgtatgtgtttaccaggatggctttgtgcaggaattgcagtaatttgaaaacctgaatcctaggtcaggccctgccacttcctggcataacctctctgcacctcagtatacatctctgtacaatggcaagatgtcaggttatgccatttcacctgtccctcgaggttgtcatgagaatccaatgggccatagactgtaaaccaaggcatatttagaaaggggaggcccctttgatagaaggagaggactsggkcgagggcagaaggccatcctgtccagggatggtaccccaggttgttggggaaccagtccccttcctagtttgattarcttgtgaacaggctcccaccrcagaacaggagccattccaagtcccattatcctgcacattctcaccctgcagccctgctattcacttaaacaccgcagctcccragtacattttaatctctgatcattagttacaagattttcttgttaattctgattcagcagattttgctgagacaacgctcttttttcccttttcattttggtcacgctgcacatagcc

SEQ ID NO: 2123 - DNA, 600 bp, Bovine  MMBT18829
ggcccacccagctcacctccaatttctggcctccgccgatacagcagcacccccacattgatgaaagcaaaaatggtgaagagagtgacagaaaaagctagcgtgccaggggacactttgaactgttccccgttggccgcgtggtagatggcggcgatggaccaggccacaccgatgcccaggaagacgttcaccgcgttgctgcctgtgacgttacctatggatgcgtccgcatactggtcctgggtggcggccactttgcttgcaaatgtgtctgaggaggaagaaaaawaagacaakgcgcgattagccayttacagaggtctgtctgtggagtgctggaagctgcagccgtgtactctggaatcaagccttcggttgaaaccctgagaccaggacagagctttgttcgctcaagtcccagcctgtgtcgtcagaacgagaggatccctaggtaacaggattcgagggcttggtggtgggcgagttataggcgactttggtcaagtccttttccccacagataccacagttctttgttgatggtaacaattctacgagggtagtaaactctagaggtaaggatagtcggctcagaga

SEQ ID NO: 2124 - DNA, 600 bp, Bovine  MMBT22836
cagcataactgcacagaaggtacagagtcccttcatccccctgccccccgacacacacagcaccccatcgatatcttgttctgttttcccagtgggaacctgacttctagtgggtaacatagcaaagagctagaagagagtttcttgtaagtaaagtggcaggctgccctcagatgccaggaggtgctctgagctggaaagaagcccrtggcctggcaggcccctaggtgtccagaggagccttgtcacagagcatctgtgggtgggtgtcctacctcacgctgccttgggcatgaaackaacttggttttcagtaggcttcaccyttgagagcacagagagcctggcaaatctgytcatttctcrtcctaatccaagtgttggcactgctgtgcattagacgaagcttcttactygaggaagatcaatacataatattggaacatggtcttggagagagagtttatggacttgtaagaggcgttgaggcttttagcctgttgtatataaaacagatcaagaaaaacaaagcagaatacgggggatgggagggccttttgcttagactgacattaacccagaggtcctaagtacatggag

SEQ ID NO: 2125 - DNA, 600 bp, Bovine  MMBT20949
agccacctgatgcaaagagccgattcattggaaaagaccctgatgctggggaagattgaaggcaggaggagatagggaagacagaggatgggatggttggatggcatcattgactcaatggacatgaatatgagcaatctccgggagatagtgaaagacagggaagcctggcatgctacagtctatggggtcacaaaaagttggacacaacttggcgattgaacaacagggattggatatggagctctagacctgctattgctggatttttcccacaatggatggctctgcagctgggakggagaaattaccatctgatacccatgggggctccctgggttcctccaaaacagacagagaaggtctgaatatactgaccttggagaagtgactctccacctccatttcaaactgtcctctacttgattagcttcaagaaacacatgcttaccaaagattaggccaggcatcagggctgtagctagacagaatccctacactgtctagagcagaggtccctgacttttttggcaccagggatcagttttgtggaagttactttttccacggaccagaagaggagtggtggcttcaaggtgc

SEQ ID NO: 2126 - DNA, 601 bp, Bovine  MMBT23185
  misc_feature (1)..(1): n is a, c, g, or t
ngggaaccagartctgtatgatgagagatgtgcctgagcttcagcctcctggatgccatagcagcagagtaaggrcagatctttgcactagatgtccttgggtgagcggggrttkctccaggagcatacaggcagctgcaaggccaatgtccaaacctggaatccagggaccagcccacatcaggccagtcatcagggttctccaaagctcaactggtctctaaggagctgctccaatcagggagtcatcagtctagaacatttattaagcaccagatacagggtctgggaaaacacaggkgaacccttgctttctgacagttggcatctctaagctgaaataatgggacacatggggatggcagtagagcttcatctcagctctaccactgctttgcatagtacagattttcccctctgagcctcaatgtcctcatctgtaccctgagaaaaagtgggggaatcgatgcttcataaaggcctatgaatctgaattggtaaagggggttcagaggtcatgagaagggatgtatagagcccagggtctcagagcaggcagagttgggatgctctttctgagcctagaaggggccctcctgtc

SEQ ID NO: 2127 - DNA, 600 bp, Bovine  MMBT20104
actgccagtgtcttagtcaactgttcaagaataaattgagaaatacgtaatcatgctgtaatatttcataagatagaagtctggactgaacctgtagtgatgtttcactttatattggagtttttcatttgtttttgttttaagctgaactctttgcatccactgtgtttctttcctgggcacaaaaaagaagtaacatgattatcctcctccttgagtcttggtttgcccagaacttattacagcaggtggagcagtgacctcagtgatcagggcattccggttggtagataagactcktccccgtattcacagacaagggttcctgtggttgttggatcttaagtgcgtttaaaactataaggagctgtttgttgctttgatgaccagcatgtgaactgttctatcagaaactgtagggaggatcaccccaacacccstaatcctgaatattcttgcctgagtctcagcgagggggtcacaagagccatggcaagaaaaagagtatgcacatagtaagggcaagagggaactggggctcttaatgtatttggagaagacatgtggggacacatacatattgaaagacaccattaataa

SEQ ID NO: 2128 - DNA, 600 bp, Bovine  MMBT20918
ggtgagcacacctggataggtgcacatagggaatgatcctgctccaggagagaaaggaaggagttacacggctttcttcccctcaccgccctgccccctccaccctccaggcggccaaaactacatcgtctttgggcaccccagattggccacggtctcactaaatgacccatggagggtccttctttctgtgattccttttcctcaagtagaccatgggcaatgtcggtctgtcccagcgcacctaggaagggtcccggaactgcacagaagccctggcaggggcccctgctgtgcaamagcaacacccatcagagccccttggaagagattcctcaaagcctaacccctaaagggcagagaatctgctgtaatgctatgttttccccaggctgctctaagggaccattctcacatctttcaagcccgtccactgaaaagaggagaaaaatagcccttcctggttctgtttcagccaagtcctagcactggaccccacgtgtgccacccgccagacggcgtctcccagggacagactcagatgtagggaaatccatcctgacgcctctgggccagcgacaggaaagcatttatttctgc

SEQ ID NO: 2129 - DNA, 600 bp, Bovine  MMBT22647
acatggcaccgctgcaacttacattgcccttctcaaacaggtcggtgttattcctgcagttgtagagcagccgctcccctgtgtcccccacgtcaccgtaaaggcagagatagacgttggcatccgttcccgcaccttcgagttccccagtgcacaccgtcacgcggtaccgggccactggcaggtagagggrgagaccactgactgccagcccctgctcccagcrctggccctgctgctccccactttcaagcactgctttcccctcctccatccagctctcatccagggctgaccttkctccttccctgggctgcctcaggacaatgaagggccagctcagctgcgaatctctgtcccagacacttcagaggttcctgctcctggctaatcatcagaactccatgggaaatgtttataagaattccgattcctgggccctgcctcagacttctcaaatcctagttcttgagctggacgcctaaaactgcattgttcacaagctcccccaggggactctggtgaagctggcagtgtttgaggaccacaggtctaattcaaacattttggcacttgattccattccagcccagtagactt

SEQ ID NO: 2130 - DNA, 598 bp, Bovine  MMBT19619
  misc_feature (1)..(128): n is a, c, g, or t
nnnnnnnnnnnnnnnnnnnnnnnnnnnnnnnnnnnnnnnnnnnnnnnnnnnnnnnnnnnnnnnnnnnnnnnnnnnnnnnnnnnnnnnnnnnnnnnnnnnnnnnnnnnnnnnnnnnnnnnnnnnnnnnnaaaagtcttgaggctctggcttccctttttgatttgtgcattaatgctgcggagttgacagcctgcttgagagaggctgaagagaygygtgttctgcacatctgaaatttattcctttcactctggaagatgggacaccacataacggccatggagaagtaatttttaccckgcaacgatcttggcaccagttccagaaagacatatggacataatctttgggacatttgtagaaccttcccttgaggactgtctttgcaggcttgggttcacttcaagacctatggcactcactttagcttgggtctgtttctacttaagagataaaaagctaaattgtattccattggaagaactaaaaatattaatgtaagagcaagtcatcattatgacacatatcaatttctcacttctgaggtggtgcacagaagcagggccctggataataacccagccatgattaggagaaa

SEQ ID NO: 2131 - DNA, 600 bp, Bovine  MMBT21962
caccttgcactatgcatttttggcaatttaggaggccaagcaaaggcccttggcttttgaacttttctgctttcttagtgtttcccyatgagataagatgttaaagggctagaggatttctctttaaagatttctggtgaggagatagggaactgactgatactcacatgsctgctgcctcagcaacttcaagtccatatttctcctttcccatgaagcctctcttgcccgttttgtttaaaatcacagcctgttccaacaccttatactaaatcccctttactctggtttgtctcccckagaaatgattactcctggacatgcagtattctttaccacttactgtgttcatcgtctgcctccattgtctgccgtaacatagactcctcaagggcaaggatttctagctgttttattcactgtgtatccgaagagcctagaatgctgcctggtgtgtagttaagtcttgacacagagtccttgtaagaatgagctaacagcccagcaaaaggagagatgatgtagtgtcatggtgaaaagcttgagctttggagtcaaatgatcctggatttgaaccccagctttgcgacttaccagctc

SEQ ID NO: 2132 - DNA, 600 bp, Bovine  MMBT18922
caacttctcggaggcctacgtgtttcaggtgacaacatgtcccagggagaggtgacaggaggtgactttcaaaccgcaaaatgacatttggacttccattcaaatgaggggtggtggcatctaaagagagaaaggctcactccatctccaccagtttgcaaggccacgrccaccagcaggrcctggacgctggccacccacacagaaggcacgcaagagagctggggaagcygcgtccaggggaccgaggtgagtctgggtttgaggacagagactgggctttgcttcccgttggcaagmggcaaatacagatcactggtaccactccaaacgctaggcttctcgctgaatccgagtgcaaaatgacaatggtttccaagcgactcctggaaataaactgtgggtaaatagcatctacttaaagcctggaaacccagcttcctttggtttgtgtttttaaatgctttgacgatgtggtttgcttctctccaagaacaaaaagaaaaaaaaatagtaaataaaggctgacagcggagtgagatctacagctgagctctgcgtatcgtccgccgtcacctgggggcggggcggtgggggacg

SEQ ID NO: 2133 - DNA, 598 bp, Bovine  MMBT19630
  misc_feature (1)..(241): n is a, c, g, or t
nnnnnnnnnnnnnnnnnnnnnnnnnnnnnnnnnnnnnnnnnnnnnnnnnnnnnnnnnnnnnnnnnnnnnnnnnnnnnnnnnnnnnnnnnnnnnnnnnnnnnnnnnnnnnnnnnnnnnnnnnnnnnnnnnnnnnnnnnnnnnnnnnnnnnnnnnnnnnnnnnnnnnnnnnnnnnnnnnnnnnnnnnnnnnnnnnnnnnnnnnnnnnnnnnnnnnnnnnnnnnnnnnnnnnnnnnnnnnnnnnattgtcaggtataaaaggcgtcagagggaggggagagcacgcgggctggcagaaggcaktgtgactagtgagcagtttcgaggacatccttcaggtcaggaatgagggatgtataagactgagtcctgtcttcctttctcaaatactgtgtgaaaagacacttacctctggtggtggttcttgatcattcttccacgatgcatctgatcccctatccctaggggaacaaacaaaggtcaaagggtcaaagtacttattaagattctgttaagtgcttataacctaatagcatggaaaataaaaaagcaaaagacctaagctcaatcttaatttgcaatatataagacaataagagaa

SEQ ID NO: 2134 - DNA, 600 bp, Bovine  MMBT22395
attcatcttacccttttccctcaatcttactttccagtctgcaaggcattctcccggatgagaagcccaggctggaaggagctactctagtgaccaggggctatgctcttggggtctgggtcctattgggaatcagggccctgagcacaggagggcccagaccgcccattgcaggggtcagacaggttcagggatgtcccccaggttggcctctggcaacygtgactctcagggctgcytgtctgcccacacctgtctgcaccaccaggtttttatcttkcctgaagtttctaagaggckccctgtgtggagagtgtgtgacagtgattctttcacaagcctgagggtgtgtgagtgagctgtgcctggcttcctgctgactaggatggggttgccaggccaggttgcgctcttggcactgcccactgctttgctggcctctgggccatagcatccatcactagggtcaccgtgctccctgttttatcgcctctttcatgaggttgggatcagtaggaggtccagggtcctccagcacagatgactgaaggccgggtctctcagtccacagatggactggatgcagggttcatccaagac

SEQ ID NO: 2135 - DNA, 600 bp, Bovine  MMBT18926
tccttatctgtaaaaatgcaccgcgcgcygcctctctaggttgtgaaaggcactagaaagaggcgtgtgtgcttgaggtggaggcgccagcaccgtaaytgttctyagtgggtcagcggagcggccagattggctgaagctcttcgtgggtatttagcattatgctttggaatccaatgtgcgttttgtacacgttgacrtggagattagccagaattggcattcatctgcaatttctatcgcagctaagtcctcccaaagagatggttttttttatgatttgctgctttctcataaaakccagtgcctgcaacgcaccaaggactcttgttctgtcgggacctgaatgctgtctttatctgggaaatgtctacagataaagggcagggctagggctcagccttccaggtgtcccatcgcacccctcctcctttcccatcctccctactcacaagccaggacccgcccctgggccgagggtagccgggaaacagggagtggggagtcttcgtggaccactgagaaggcaggaaggccttgggggggggaagacctgggcaggttctagattctcagcaagtgtagggggtgctgggggag

SEQ ID NO: 2136 - DNA, 598 bp, Bovine  MMBT22377
  misc_feature (1)..(38): n is a, c, g, or t
nnnnnnnnnnnnnnnnnnnnnnnnnnnnnnnnnnnnnncccccataaaattaagcccctaaagcacagcttttgatcacatcactgccctgttacaaaatgtaagagagctccccatttactatgacataaaatccaaattccttagcatattattcaagatactataagaagcagttctaagctatttgtcctggtatcccatctcctcaacttcaactaagtaatctaagctaaaggcacataaatcwagttacgyttcccaaacatatcttacttgtgcattagctgttcagatctmtaatctaggtctgtggaaatcctatctttaggggtcaactcaagtacaaggtctctatgaattatttcctgaggacccaggtcagagttaaatctctcctcttgtacttttataataatgatagctaatacttacataatacaaaccacatgtcaaatactacatatataataacacttaatctttacaaccaccctttaatcaatgaggaaacactttaagggagagttttgtggttttctatcaccacattttaacttccattaccatctgcaaagtacaaatacaattcccacca

SEQ ID NO: 2137 - DNA, 600 bp, Bovine  MMBT21592
atagttttgttacacagcagtatataatgaagcactccccatcacccttttagaagcaataataataatgagtatcattactgtaagaggaaaatggaaaagatctggaataaaaaagacaaacgtcattctaacaaaccgaggatactggacaccaagtctggcatctggccctgsagtgaacagagttctttctatcctcttactgtgytgcattgtgtatcatgtgtactcacattatcaagaggtttggcaagtctttacttacagtgcatgaccaccaaggactaaagtcctttmtactggcagcgtgtcactcacagtgtgaaacaactcagttcacaccgtgagtttctgagaaaatatttctcaggtcttataggagctgatcagcttacagagtcaactgatatcaacaagcacccagttgactcccaaccaatttgcgcaaaaattaagattctcaagtgggttagttttcgcatgtgaggctttcattgagatgctcttgggttctttcacattgccccaggactcatgccttgggagccagtttataaataaataagttactctattctcaaaagactctagttggaa

SEQ ID NO: 2138 - DNA, 600 bp, Bovine  MMBT18848
tccacaaaacatttaataaaatgcccagggtgcttagaatcttaatacaagttcacagctttaaaaaaaaaaacaaamaaaaaacactgcattgagccaaaaaaatgagttacatgctgttatctttacaagtcacaaaatgagagggctagcgtaagaaagagggagaagagcacaccaatgttaaaagagaaagaaagaaaaggtttggatatcactgtgcattattgtctttgaaaatagatacttgtccccacaaagtcttctgatgacgtgaaaagaaagttctaaggaatttckatttgtttgacccgctcccactgtccacagctcactcagctcacccagtaaaccctgagggtctgtttcactttttccttcccacacaagcatcacactgacagtgtggcctttccaaaccaccactggaaacttcaactgaattgatcatatatcaggccaatcttgatgccagaaacctgtgacattgtccctgccaggaatgacaaccctcatctgccaagctggactcattgcctgggcaagtgaagggacaaaattttcacttcactccatctggagcaacaaattcaggacaca

SEQ ID NO: 2139 - DNA, 604 bp, Bovine  MMBT21836
  misc_feature (1)..(4): n is a, c, g, or t
nnnnataatcttgaggatgaggattcatccagtgaattatggggagacataaaccttcagtctatagcatcatttcatatcttcttgctatctttgattattttagcacatacaagtcataagtagcttgatactaaaatgataaatataagcccattcttgtgaaaaattttaatgtatatggatgatgccacttttataattttattttcagtaaactgatagaggtgttattatctgttcttagatcctaatgcaaagtmasttttagagtctcatagctaaamgtagctaattttagaakagtgacacatcacacaaaataattgtgcccaaaagactaaatttaagttaatgctgcaagagagttgaaggtttcaagagttccaactttcaaaacactttctatagtaactttaggcttttggcactaatatcaacaagtagtttggtgaagaaatattttcagtctaagctcaataaaagtggatctaaatcaatgtgtatactttgctaaatttagcatattaaatcacttttggatttagaaagttgtatttaaactctcaatttcagagaaacttttcttttacctttaaattta

SEQ ID NO: 2140 - DNA, 600 bp, Bovine  MMBT18613
ttgttttcctcggataataatatgattctctaatttgcgcatactctatgtatgtttgttatttctcattatttagggacctcctggcttacccggtctcaaaggtgaccctggctccaagggtgaaaaggtgagartaaaataatgtattattacactgttgctatcctaattgcagaggctacrattatgcacattaaaatcactcaaaaggaaatttcaaggaattgctttgtcattctaaccaaggaaaatgctgtcaatccttagcttccaagaggaattcagaaaagagaaaakaatgatgaaaaatgtaccagaactcagtgytatawtagtcaatgttcctttgtaggaaccatatggagaaagcatatggttatactaaaataactattcagaaaataaacagaataacaaagtgcccattttttcatgtttttaaacatgaaaataaaaattttaaactagactgtccttcagatggtaattttaaagatatatgtgctctgttgcatcaaataaagaaaataaaacatttttagagtgacattaatatttttgaattatttttgtttgtaaatatttcttgggtactga

SEQ ID NO: 2141 - DNA, 600 bp, Bovine  MMBT23289
aatcataacaaaacataaaaaaacataaaacaaaacataaaaaacaaaaacaaaacataaaaaatcataacaaaaaatcataacaaaagaaacataataaaaaatcataacaaaagaaaacaaagtgaatgacaagcactggaaacaggatagatgtgaataaatatgaggcatttttagaatttttgttaaaaggtaaccctttaaagctaaaataatgtcaatgtagtacaggatctataacacagacaagcaaaagcttcataccttttgacrgcacaaaggatggagtgggagaaktaagagcattctgtcgtgaggttcttacattacatgtgacgtggtataatattctttgaagaatctctgtattatgttaaagttgaatattgtaaaccataaagaaacttctaaaaagataccagaaaagaaatataactaataatacaactgagaatataaaacagaacattataagaaatgcatactctattcaaaatgtagcagataaagaggaatgtagaacaaaaactaaagatacaaatagaaaagaaatagcactaaaacagaaaaacctgacagacttaaatctaaccatat

SEQ ID NO: 2142 - DNA, 598 bp, Bovine  MMBT18981
  misc_feature (1)..(108): n is a, c, g, or t
nnnnnnnnnnnnnnnnnnnnnnnnnnnnnnnnnnnnnnnnnnnnnnnnnnnnnnnnnnnnnnnnnnnnnnnnnnnnnnnnnnnnnnnnnnnnnnnnnnnnnnnnnnnnaaaaaggggggggggtgctcaaagaaatagatttctttaggcttttattattgggacttactaaggtccctaactctgcactttgacaacttttgccaaatttgggaggttcttatattgttatttcttctaatgtattttctgttcttttytctacctcttctcaaactccaatattaggaatgtgttatktttgttttttaactttcctatactgggtcttcgttttggcacatgggatctttagttgcagcacgtgggctccacagcatgtgggctcttagttgcagatgcggaatctagtttcctgaccaggagtcaaatctgagccccctgctttgggaatgcagagtcttaaccactggagcaacagggaagtctcccagataggaatgttaaaccttctggtattctctcccaggtccttcaggatctgtttactttttaatctttcttttctgcattgctcaggttgttttcttcctattag

SEQ ID NO: 2143 - DNA, 601 bp, Bovine  MMBT21899
  misc_feature (1)..(1): n is a, c, g, or t
ntggtgattggcattctgtccctggctgccagccgcccactgggcacgcacacaggcagtgccatcgatttgtatgcagtgctaagtcattctttcgcccagctggctctgtggcagaggtgcctgaccacagccytgatagcagccaggaaggaatcctttgttgaactgttcactcaagtgcttgacttttygactctgtttgctcacagatctgctgtaaaaactatctaaagccattcctctttctaaattcttcattatgatctcttcaggctactttcrgacatttgattttccktctctaacagacaagtgtttgatgttttgcttatttgtttgtttgtttktttttggtttgtttgyttgacaggaacccaaagatgagttacatgttttaaaactaccatccttcatattgcttaaagtttctacagtttatgaaggtcagcttgatattacctaaatactggaagtaaaccaagggacggatattggaatttatacttaacctctatacaagattttcagcacatgctcatgagaaaaagtataatataagactaataaagatacatcaacacatagagctctggtcttt

SEQ ID NO: 2144 - DNA, 600 bp, Bovine  MMBT23246
agatctgcataactcagtaaaccagtattttccaaatgaccaatataagatatttcagaatcatgtgaaggtaaaaaagatccatcctaaataccaatatacaccaatggatttttacagagtaccaaaatttcattgatatggtttcagattccacattgtgccttatcttttaagaaacctccacctgctgagttctgatgtaatatcaaagaataccatggttatttgaaaaggccattaaagtacctcccttttccaactgcctgtttatgagaggtcagattttcttyagatatktacttcagacagcatatctaaacagactgaatggagaagcaagtgagaatccaattaaattctgttaagctagacattcaacttgcaaaatatgtgtgtgtgtatatatatatatatatatatgaaatgatacttgcaacttttattttggaaaattgtttttttcattaaaatgctattcatgttcatgtgtaataagtttattatacttttagtggttttaacttcagatatagtaatactgataaatatagcctatataaacaaaagttctttggagtccttaatcattttttagag

SEQ ID NO: 2145 - DNA, 600 bp, Bovine  MMBT20042
tttttgctattaaaaaaataaggctaatgaaagttatacataagtttcaatttttccttctgggtaactaacttctctcttatatgagtgattaagccctaccaaatgattgcatttgtacattcactaatcaccaccaaggaatacctaatcagcagcataagaactataaccaaagcccgtagatattagctcttaattgtctgaaaaatactaacactcagtttatatttttaaagaaaaataaacctctaaatttctgatttcattcacttaagttagagtcttcagaccactttkcaggagagtggaggggggtgaaaactaagctatttccaagttgaagatgaatctagtcaaaagggtatgatctctaagcaatctcctaattcccaaggatatttacaagacctgtgacctcttatcaccaaccaattcaaatgcataaaactaatcagccatcaaactgaatttattttaagatggtttgtatatttatgtatacagaggacaaatacaattatgcaattaggaaattcaaggaggaaaaggaggggaggttaacaccttgggagcatactcatgagtcaaaggccttga

SEQ ID NO: 2146 - DNA, 600 bp, Bovine  MMBT18781
aggcttggttttgccagctcatttaccattggtctgcaggctttccagctcccagtacaactgttgtcatcccagtacaactgggatgggtagcatgttgatgcccagatttctcccctctggttttggattcagaggcttggttttgccaactcatttaccattggtctgcaggcttttcagctcccagtacaactgttgtcatttcccagtcttgtgactccctttcccatggctatggtagggttttgacagggagtaagttgaaatgtgcatatttgagctgccatcttagcctakgagactctcaagtctctttcaaccattgttcaggtaagataactgggaactaatacaaatccaactgctcttctttyaacatgccccaggtttttcagcaattctcttacagtgtaatagtacctcaaactgaacttcaagtgtgttctaaccagtacagattataattgttacttcttttgtgttagacacccaattcacacttttccaaactgggttagacagggagcaatgcccctcaggtgatcaacagatattctgaaaagaagttgggaaagtaccacatatccatttctcaag

SEQ ID NO: 2147 - DNA, 600 bp, Bovine  MMBT18528
ttttggattttaaagaagttaaagtgtgatgacattagaacagatacccaacagcaacgatgacaaaaactctrtatctccttcttgaaaaaatactccgcaagtgaaaaaaaacagaatggggctgactataaagctattgatcagtcctctgtttcaaacaaaaagaggaacacattatctcacttctccaatatgtttaaacacagaaacacaaattcacraattattaactgcacaatcatttactgttttattagtctacagcaataaggtagaacatcttttgtatcttctaamagtcagaaagattcaaggcacttcaaatttcaggtggcttgtgtacagttcccctgcaaaaacactctcccaacgaacaccagccagacctcttcctgtttttcaacctcgtatgtttactttcacatctgctgtgaaagataaaagcaacaatggggacatcaaccacatgtctgcgtcctaccaacccggaaatgaagctctgaagccagaggtgctgtgaaatgggtctttagaaaactcacacgcaagcttaaaactcttacagcgtaggtctgaatcaaatccaaaggtagacaa

SEQ ID NO: 2148 - DNA, 600 bp, Bovine  MMBT19324
agacgaaggcttcatgcctacctaatgttaaaaaaaaaaaaaaaaaaaagctcgtattataaatccatgcagaaactccagtgttaaaagaaaaacatgccactagcccaagaagtagacactatcattaagcaatctttaatcagaagattaaaagatagttttctagatagtgggtaatgattattttctagaataggaggaaaagctccgaaacaagtacaaaggaaatgaaaamacagcgctgttaaaaaactccctacaagttgcaatgtgaagaggaactacatactagaaggktcatcttggaatgcaaaccataataatatttgagagaacagccattacttgggaaatcgagagacatccgagcacagagcattcaatacagacagtctagctgaggcaactgaaaatgattcctctcaatcacaaccatagttaattatctgcatgctgaagctcaatatagtaaattcaaagaataactgtgaaacgtggacatcccaatctaactgcattgtgggttttaatggaaaagaggaatttccagttatattcatcaaggtcactggcaactagacacttctcttttgagaa

SEQ ID NO: 2149 - DNA, 600 bp, Bovine  MMBT20565
tgcaggaaatgacctgcaacagatctggcatcgggaaggccctgctgatgactgtgtttgcatygagctccgtgggacccgaatcactacaaaagtgaggaagggcgtggcatgggtgctgtagggctatatattgcaaagcaatgtgcgttcctctctgtgtattaggtttcagtggccttaagaggctgaaagtgtattgaggagmgcataaatakatagtaagcaaatagaatagactaggtcctctaggtccatttgtgaatctttatggtaagcacctcaggggctccaggcttkcttgcaatcaaagtcaagaaatatttcacattcagaaatactttttaaactaaaggttttgattgtccccacataaaattttaatagcatattagacctaaaatttaaactccaagatgaagtattgggttggccaaaaagttcattcaagattttctatgagacagaaaaaccagaactaccttttttttttttttgctaacctaataaatcaggaaaacagattttgtttcctgccttcaaaacattaaatgccttgtcagatttatgactcccaaagtggaatggcagagccactgc

SEQ ID NO: 2150 - DNA, 412 bp, Bovine  MMBT23201
  misc_feature (1)..(1): n is a, c, g, or t
naatttattcttataagtatcaattattacatttagggttaaaatccttttcttaattataaaaaatatgtttgttgcaaaaaaaaatttttttttatatagaaagtcaaagaattttagaaatcacttgtggtcccacaactccttgattaccactgttgacatcttgtttttaccactttgttttcaataatgccagatttacaatgaagaaatcttggatcttctatgcccatctcgtgagaaagcccctcaaataaatatacgggaggatcctaaggaaggcataaaggtgtgtttktctctcatttgatgttattttcaaatgttggccacttctaactgttcacactccctttatttgccactgtggttttaaatgactgttagtacctcagtcttttaagttctg

SEQ ID NO: 2151 - DNA, 600 bp, Bovine  MMBT20381
aggacatgtgaggtgatcgcaggtgtactttgctgatgggaggggcataccgataccgtatattagaaagaaatgtgcacaaatataaacacctttaaaagtcctcattcattggtccaataatgctagttctaggaatccagccagaggaactatcccattggtgatatagagtggtatgttaaggatactcactgtagctttatgtattatagtaaaatattgagaaaatacagacatgatcaaggatgggaaatatcaaaacacgttcaagtacttctatatgatggaatcagactkccagtgaaggtgatgctttagatgtawttgttttctaagttgaaaagtaattgctctgtgacaacctagagggtggcatgggatggaaggtgggagggaggttcaagagggrgggacttatgtgttcccatggctgattcatattgatatatggcagaaaccaacataatattgtaaaacaattatcctgcagttaaaaataagtttaaaaagaaacacaagtaatacatgcatattgtttaaaggtttaaatagtgcaaaagagctgaaataagaaggaggtctctcaactcattggag

SEQ ID NO: 2152 - DNA, 600 bp, Bovine  MMBT21073
ctccattaagttgcacagtgtttttttacaacttctctttctagttgtgggttgtaaattttccytctgctgagtcctgtagctggctgactgtttctcattatatttgtaggcctcagggaaaaaaaataggcaattcctttatttgagaatcctgacatttattagcataataaaactctcaagatgagattgcagttttccagacagtaatttcatttgcaggacaacttacaaggaatttattttaaggccaggtaaaacctaaaatctatgagacatgcagaaaatgcgggcccmaaataaaaggaaataaatgagctgggcatgggaaactcagctgttgtctctcacaagttaattaggggtgacaggaacaacagctcagggaatcgagttctcaacccatcctggtctgctttcaaagctgctgctgaagagaagtttcttcttgttagttcctcctaacacctagcaaatcatcacatcctatccccttgacacttgaaaccatcrtcactgttaaagcagttgtcaccagcaataccttccatttcacrggactctcatgtttatcatttgactgacctgccaagaggc

SEQ ID NO: 2153 - DNA, 600 bp, Bovine  MMBT22048
gaggacccagtgcagcaaaaaataaacaagcaaaaattactaaaaaataatcatagaggaggaaggagcatcagccctcagccacctagcaatggtggaacagggattcaaaatcatggcaaaggaagccatgmcaaattacttgccagctaatttcagcccacttatwcttggataatagtggtcaactccattacttctctgggataatacatgcagttttgacataaaccttcaaagctttgracaaagacattcagtgttcgccaggytatgattgttggaactttgttctaggakctattaataaggctgctatgaaaaaagaggttctgtggttgaataactgggaaagactacacatgacaaacccctttgtgaacagtgataatgcatattcacatggtaagggctctggcagcctgcagctaagaaaagtactgagcttgcttaaccccgtttcctaaacgtattccagcactgagcacttattagtatttcctcaaacaccagcttgggggaaactggctttttaaaaaaaagtaactaatgatggaagttacaggcaccctaacacgattgtgaaagagccattttggc

SEQ ID NO: 2154 - DNA, 488 bp, Bovine  MMBT12374
ctcagaccccccagtgtttcaccgaagacaatgctcttacatttgtagtggtttttaatctgataagactctaatttgcttaagtcttttaaataagggttttaaatgtttctagccattttcttattgaatttcctctaattccctcaagatcataaagtatatgcgtaaagtaaatatctcctcccactgcactgacagccgatgacctataactaagtcaatatgaatccagttcttttctgcccaatatgtttactaatcatattccaataccttttcttaaacctcggcatagckacagtccccacaacagcacatgctcatgccttcatatcacaaagaaactccatcacatcagagaatgaaagattctcctccacagtgaacatactctcttccttgtttcttcaagtttcaaatcctggagttacaatttttgggaaggactctgagggttttcaaaactcagaagagctagaagctcc

SEQ ID NO: 2155 - DNA, 600 bp, Bovine  MMBT15552
tcatgtattccctggaatcttgtgagcctacaaatagcattgtaattatgacttcaaattttcataaaatgctatcaaacctgaaaacctcccacaattctatacttgattctaaccacaggttgattgtctttaccgtgatctcaaaagaggaaaatacactttgttgaaggaatatgattaatcagttaatgaatgctattttccccatttaattatgtgtgcatttataattaattatgagtatcaattgaaaatatcaaaatctctcagatcagatatcatctctatgaagaaagktgggttgycatttgtttatgaagtggtagtgcactaatgcatataaatatatttataccttttccctgaagaaatcccttatactggactgtgaactttacccttaaaggagtgatatttttactcatctttgtatttacagcattgagcacagcgtctgacacggtacattttacagacaagataactgaaggraagtaagaaggaaagaagtgagagaagcaggaggggaagtggttgagtgggagggtgggtcttctgaagacgagtgagctaaatttcatttttgaagcagtattt

SEQ ID NO: 2156 - DNA, 600 bp, Bovine  MMBT13096
ttagatggatctcctcttatactattcctaatgtggaatgtttaggcgagaggaggtgaaatattttaaggttacaatgagttttaactgactgtactcaaaatattcctgctgcatttttattgttttctagtggtgaccttttattggctttctccccttttgtttttaccttctaatcactttaaataagcccaggtatgattcagctaccttttaatttttttcgctatcttctgttaagtccagatctttgttttttgtacagatgaacttactgaactcacttgcatatcatakaattgtaagtttggttgtgttgaacatcatttctcaattgccatctacacagacttggcttctttgccttgaaaaatagccaagatttattgagcattttgcacatgtgccatagactgtgctgttatatatattaccttattccatttttaactctctgaagtatataaaatattattaccatattcattttacaaacaagaaaactgaggtaacaggagaagttgagaaacttgcctaagttgcaactagtggagtgagtctgggaatttgggaatcaatcccagacagtgtaactct

SEQ ID NO: 2157 - DNA, 602 bp, Bovine  MMBT18864
  misc_feature (1)..(2): n is a, c, g, or t
nnggctccttgcctgttgcccaatcagtaaggccaggcattttatgcattaggtctccatgcccatgaattcagtgacagtaataaactggtttcagagggacgttgaagctaagctcaagtataaaccacagtggtacacagcagtaatattacatgtttcttgaaacacacctgaaaaggcaggaccctgctttacaaaatcatytgccaaagtatgttcttcaaaacactagttctacaggtgttawaagctcttcttccttgatccctacagaaaagggttctatggccaagtaaatktgagaaatgaaataaaattaaatagcgttattcactgcaggatttttcagagtccttaatakacgtgttaggaacctccaagtcttgtttagggtttgatatgaaatatttcctgatctcacttcactatggaacccttctttagtgaatcaattctggggattagtgttcagtggaacacatcttgggaaagggtgtccaaacatgcatttttgtgttagacataattagtgatgatatttaaggttaagaaatgacaaacacagcaagaatatattttagaaatggcaatattcatta

SEQ ID NO: 2158 - DNA, 600 bp, Bovine  MMBT20544
tggttgctacatttttgttttctttctacctagttctgcttttctgtcatggcttacaatatcatctttcaaagacaatgctgaaagttctctggggacttgtgttgctttattgagtaatctttgatcagattgtaatggaaatccctgmaggtgatataaaatgtgtacatatatttgaatacataaaatatgtattttttttatttcatccatctttgacatgtctaaatatggacttatttagcatsttggcctcmaaacaacaggctcatcttgggggcatatttcaaaagagtkatgattttaaaaattgatgatgaaaataattggatttataaattctttgaaaatcagggatcctgtctcaacagcartagtaaaaactgctactgaagtatacagaaactgagactaaagatgtataatgtccttgtcctattaaatatgttttaaattgtgttaaccatcatgatattcacaagcttggatggcttaaatgtttactactaatacagttgtttatttaaactgagagataatttgtatataaaagaaatatgtgattctacctctattgacatttataagtccaacgag

SEQ ID NO: 2159 - DNA, 600 bp, Bovine  MMBT23173
tgtctttgtaagtcttgagaactaagaatgctttttatgggtttcagtggttgaaaattgtttttgaaacagcaagagcaaaagaaggttaatattttgcagcacatgaaatttatatgaaatttaaattgccatgttattaatgaagttttattgagatacagtcacatttattcattttaggtattgtccttggctgcttttgcactgcaatggcagagctgagtagtcgtgacaaagaccacaggacccatgaagatgaaaatatttactctctgaccctttacaggaaaattttgmtggcccctgatttaatggaatcccttcctgtcaaattaagtgagaaaataatcacaggatttggcaaagtcactaagatgcctggtgatctgttgttagggattttcatagtaagttttcctctcatcctttgattttccgcttccaacttaaaacttcctaagaagcaattcggtgagaccatggttcctagaacattcacctggaaaaattgacgagaccttcaaggtgagatataattctctccaaggttggggaggagaaatggctgcagggactcaaggacttcccggctttcat

SEQ ID NO: 2160 - DNA, 595 bp, Bovine  MMBT23578
attatcaattcargcttcccttttgttatcctgttagtacaatctcctcaacctaggaaataggagtcatttgagttttctttttttcctcccagagttggagaccaaacctacaaccaagaatacgataccaacagaggatttttctaaaaaacatttatcacaggatgccattgtagagaaactcacagagaatggtctatgggaccccataatgggaggattatggaaatggggcgacaggatactgagactgcagtatagtcagcagagtcctgtaggccaaaaaacagttaaacmcaagaaaatccccactattcagaaaggctttgagtttggaactgttcttcttccagaaccagaagttatcacagaagagccccatggcaaataccaaacacatgatggaaattttacagagggtttagatttgaycacagatacccatctgaggaaggaaatttgcaaggatacagaaggcagcaaagtcayaagccctgcctcagaactcactttagagaaaaaacccaataagaaagaaaaaccctataaatgtagtacatgtgaaaaggccttccgtacaaggtcattaaaa

SEQ ID NO: 2161 - DNA, 600 bp, Bovine  MMBT23488
acaatggtttccaagagctatcaatcacatctcttttaaaaaagaaaacattttcatttctgaagggctcatacctgacaactccaattaatgatatttccctaccccacccgcaaatcactatactaaatgcattatttcaccttagaataggaaaatttaaaaatgtaattaaaaaattacactctctatatattaatattttaacggtcatgtttgatagcaaaattacaaaattaaaaccaaattctacattcaagggacaaatgtcttcactgttttatttaagagtctattccmttctttgttgttttctatctccatattttaaaatgatgatcaaaggtcaggagtcaatccaaaaaaccaaagagcttgtctgtgatgccctcccacccagctccctgatcatgttaattctccctttaccctcctccctttttatctctacgctcatccttttcgtcacgtatctttacattcctttctcaccatattattcaattacgtctactcgttacacccagtccccctttttattctgaacgctacttgacctatacccttatattctaacgtcaattattaaagcctctcccc

SEQ ID NO: 2162 - DNA, 598 bp, Bovine  MMBT23477
  misc_feature (1)..(1): n is a, c, g, or t
nccgcatgcacggcagggatttcggattgttgtgtattactcccttttccattcagagcctcctatcacttgcttctagcaacacagayaggcattaccttctctactgcagggcttgtctattgatgtmagagaaatctaggagttggttttgtcctctgcgtctatactgagccttagtacgctcagctagttttagtaatttctaraacttaacmcacagacccagaattatgaaggcagatgtgatatggcggcagcactggctctgggcactgccacgcactgctgaaagtggastcggagtccatctccactgtttgctcatcgcaagtgctaatctcggagcaggggtcacagtcacggtgccagtaggagccaggcaggaagccatggtgtagagtgggtggtgtggaaggcagcagggccgggtggagagtggcagcctggaggacacacactgagtagatgaggccactcacatcctgctctgcttcatcactgtcacgtggcggggcgtttaaaacgttattcagctggaaacccatctatgccccgaattcagcccttgggctgccagtatttctcttctctgcct

SEQ ID NO: 2163 - DNA, 598 bp, Bovine  MMBT23582
  misc_feature (1)..(207): n is a, c, g, or t
nnnnnnnnnnnnnnnnnnnnnnnnnnnnnnnnnnnnnnnnnnnnnnnnnnnnnnnnnnnnnnnnnnnnnnnnnnnnnnnnnnnnnnnnnnnnnnnnnnnnnnnnnnnnnnnnnnnnnnnnnnnnnnnnnnnnnnnnnnnnnnnnnnnnnnnnnnnnnnnnnnnnnnnnnnnnnnnnnnnnnnnnnnnnnnnnnnnnnnnnnnnnnnnccgatatgagaacagtgggaagtgttgttgggggtgatgtctggtttgtggagtaaatgggaatcaaggaagtagttayagcttttgaagaasctctctaaagaatttgactctaaaaggaatgggaaaaggaagaaatatttgagaaacttggattgtagaagggttacygggaataaattttttttaataggaagaaaactccttgaattactgctatggttctttgctcaatcagccacccttaaccctacccccttcttcctagaaaataaggccaatytgcaagcagttaaaaacatatgttcattatcaattcargcttcccttttgttatcctgttagtacaatctcctcaacctaggaaataggagtcatttgagttttcttt

SEQ ID NO: 2164 - DNA, 598 bp, Bovine  MMBT23509
  misc_feature (1)..(155): n is a, c, g, or t
nnnnnnnnnnnnnnnnnnnnnnnnnnnnnnnnnnnnnnnnnnnnnnnnnnnnnnnnnnnnnnnnnnnnnnnnnnnnnnnnnnnnnnnnnnnnnnnnnnnnnnnnnnnnnnnnnnnnnnnnnnnnnnnnnnnnnnnnnnnnnnnnnnnnnnnnnnncctcattattatgacatttaatcccacttgtaattgggtcacagcttaaatctaaccatcttcctgggctttccatgactgatttagcccatactaatatcccatttcttttcttacatatcactcatcaactttatcatactgstcaacaactgtcattcacctaaataaattatgtaactgtttcttttgtaagccttacctcagtgagactgtaagctccctacagccaagcactgtgtcttaaacatcttctttctctccatgtcatctattamgcttgatcacttcttaatgggtagaaaagaggagaacactaagagtgggcacaaggggaacagtccctatgaattaaggtgtgtgtatgtaygcatatgtgtacatatattcttttttcagtttcctaaacaaaattttccrattggaaaatactccattctact

SEQ ID NO: 2165 - DNA, 598 bp, Bovine  MMBT23363
  misc_feature (1)..(73): n is a, c, g, or t
nnnnnnnnnnnnnnnnnnnnnnnnnnnnnnnnnnnnnnnnnnnnnnnnnnnnnnnnnnnnnnnnnnnnnnnnnggttggaattctctataatctatagtttattatgtcacctaccagttacagtgacttctaactccttgtttccaatttttaatactacttcttcttttctgtttttacatcctgagctttgaccaagccttgaacagtatcaacagtaagagtgtaccctttctcttgctctgagtcttatkaaggggaaatctatggtgtcaatcaccctttaggaaaagatgacyatgaaggagtctctctgattcatctcttttgcagtgtctccctcaggtcaaggagcagaggyaccactctggctggagacckgccctcagcccacctcagtcccagcccaatttatcaggcccttccttaggcttctcattattacayactaaaatgtttggttttgtctccacagggcaggccragtcttcacagaaaattgaagacttgatggaaatggtgaagaagttgcagaaaggtcacgtgtctcctctataactgaggctcagcccgaggtttggagtcaggcagaagtgg

SEQ ID NO: 2166 - DNA, 561 bp, Bovine  MMBT23389
gcgatgtctgggargagctctctctgctgctccaggtggatcagtggaggcatacttcaagcctcagcctaggagtgtcctggcaacaggaagatcaacaggatgcagaggaggacaggaaagctatccaaggactgagkggtgaggacttttttcaggtggggggatgcacatacaggtgtattcgtctcattttggaaaatcaggaaggttgaagtggttttgrcaggtatctgttgacragactcagaattycagacgtctgagtggagaggggtgcccaccatgaggctgcagccrgagtgtggatgtatgataygactacatgggagtgaagacttggggccaataactcagyagagccaggggcaagaggggamgtgtgagtgctgtcaggagaccacgtcagaggctgtgcagacatggcagtggcttgggtccaagtggccggggctggactgagtggagggcagggctccaagggaatgagatacgcgctggactagagaggaaacaagggaaacagatatgactttacacttttgcagatcatggtgatgg

SEQ ID NO: 2167 - DNA, 598 bp, Bovine  MMBT23478
  misc_feature (1)..(212): n is a, c, g, or t
nnnnnnnnnnnnnnnnnnnnnnnnnnnnnnnnnnnnnnnnnnnnnnnnnnnnnnnnnnnnnnnnnnnnnnnnnnnnnnnnnnnnnnnnnnnnnnnnnnnnnnnnnnnnnnnnnnnnnnnnnnnnnnnnnnnnnnnnnnnnnnnnnnnnnnnnnnnnnnnnnnnnnnnnnnnnnnnnnnnnnnnnnnnnnnnnnnnnnnnnnnnnnnnnnnnnccgcatgcacggcagggatttcggattgttgtgtattactcccttttccattcagagcctcctatcacttgcttctagcaacacagayaggcattaccttctctactgcagggcttgtctattgatgtmagagaaatctaggagttggttttgtcctctgcgtctatactgagccttagtacgctcagctagttttagtaatttctaraacttaacmcacagacccagaattatgaaggcagatgtgatatggcggcagcactggctctgggcactgccacgcactgctgaaagtggastcggagtccatctccactgtttgctcatcgcaagtgctaatctcggagcaggggtcacagtcacggtgccagtaggagccaggcagg

SEQ ID NO: 2168 - DNA, 598 bp, Bovine  MMBT23470
  misc_feature (1)..(60): n is a, c, g, or t
nnnnnnnnnnnnnnnnnnnnnnnnnnnnnnnnnnnnnnnnnnnnnnnnnnnnnnnnnnnncagtagtcagtttatggatgacatcaaagggcttccttgctttctgacttctggttggttttgttcaatggaagaaaccrgtaagaaactgaacagtgggaagaatatgaaattgggatgtttattccctttctctcctgtcaggtggcatggttcctctcttgcaatgcaatccactgcatgtgtaagtgttacctgacctctttatgtaatcctatgggaatttcaagctcagaaaaytgcacaaatgctgatactttggctactgctattgctgtgagtgacaaactgtcctttgtctctgacccaggagttttgtgtcttctgccaggatccttgaaactagcaggataatttgtcagcttgcaagctgagtaaaaactcggttagatcttcacacaatggagttctccactagctccttttgttatattttgttttgtcttgtttaaacttagtcacatcttaataaggagctcctttaytaaactctcttcaaaytacccagcttgaatgtgccatctgttttctgctttat

SEQ ID NO: 2169 - DNA, 598 bp, Bovine  MMBT23393
  misc_feature (1)..(223): n is a, c, g, or t
nnnnnnnnnnnnnnnnnnnnnnnnnnnnnnnnnnnnnnnnnnnnnnnnnnnnnnnnnnnnnnnnnnnnnnnnnnnnnnnnnnnnnnnnnnnnnnnnnnnnnnnnnnnnnnnnnnnnnnnnnnnnnnnnnnnnnnnnnnnnnnnnnnnnnnnnnnnnnnnnnnnnnnnnnnnnnnnnnnnnnnnnnnnnnnnnnnnnnnnnnnnnnnnnnnnnnnnnnnnnnnncaagaatctggacttaacagattccatcagtttcttccaggtatggatcaattgaagcagatcatctccttaggccrgcttatctacaaccagtgtgaggagatgaaatactgccagaaacaatgccgacgtctagggaaccgcgtccagagcctgctgcagcctctgcaaatgctccaggaccaaggagagaggaacctgcccccccagataactgccgcgctgagccgtttccaggatgccctagaggaagctaaggagcggatagacaagttcagcaataagtccaatatccagaagtttctaacagcagggcatgacagcataatctttggtggggtgaaccagaggctgagcgatgtctgggargagctc

SEQ ID NO: 2170 - DNA, 598 bp, Bovine  MMBT23402
  misc_feature (1)..(71): n is a, c, g, or t
nnnnnnnnnnnnnnnnnnnnnnnnnnnnnnnnnnnnnnnnnnnnnnnnnnnnnnnnnnnnnnnnnnnnnnntttatagcgtatttctcatgtcttattcgtttaataaatattgcttgaaaccttactatttgtaaaaagggatatgaagaattatttagaataaaagaaatctgacacattatatttcatcaaatgacatttgctggctatctctttccctgaaatcctttttttaaratgagaaaagtaaagagaagaasmgtkctccacctaggacatactaggcactgtgaatacygttaacaaactggatttctgttgtaaactgaatgtggtcaataaagagttctctaggggttatgctagagcgttaatgcttatactcaagtagctactgattattccctaaatatagagggtgtgtccctatggcttaattcacacttttgatagaccaatttccaattaaccagggacatttgaattccatttttgtgccttgtagtgctggcagtcttcccagatgggaagagatagtgtactcattaagctgagggtgaggctatcttcccaatcattaataaaatgtacaaaaa

SEQ ID NO: 2171 - DNA, 453 bp, Bovine  MMBT23511
  misc_feature (1)..(71): n is a, c, g, or t
nnnnnnnnnnnnnnnnnnnnnnnnnnnnnnnnnnnnnnnnnnnnnnnnnnnnnnnnnnnnnnnnnnnnnnntttatagcgtatttctcatgtcttattcgtttaataaatattgcttgaaaccttactatttgtaaaaagggatatgaagaattatttagaataaaagaaatctgacacattatatttcatcaaatgacatttgctggctatctctttccctgaaatcctttttttaaratgagaaaagtaaagagaagaasmgtkctccacctaggacatactaggcactgtgaatacygcatatgtgtacatatattcttttttcagtttcctaaacaaaattttccrattggaaaatactccattctactatcggataaataactgaaatttcctgggaacaacacaaagttaacatcataagtaaatttcccagacttcctatcaaaaa

SEQ ID NO: 2172 - DNA, 598 bp, Bovine  MMBT23464
  misc_feature (1)..(51): n is a, c, g, or t
nnnnnnnnnnnnnnnnnnnnnnnnnnnnnnnnnnnnnnnnnnnnnnnnnnntttttcccgcagccgtcccggggctcatacgctacgtggccgtgggcagctctggggacgacatggaccggctggcccagcccctcccttcagacggcaagggggcacaggtaggaggaagccgccgggcgagggcaccggagtcccacggagggcctggggacaggataggccccgcgaaggctggggctgccgctgcagtcaacgggctgggaccctgtgactcagagtccactttctttttgaaaygtgttattttaatcagaattatacatacctgtagcctgaagtgtcagagcattctatagtgatggctaacaaaatagaataaaaacaaaatatagccttctggtgggggggcacaccgctgacccttcccaagctgcacttcaggctggttctgattgccaaataacacattaagctgccgccttgttaaaagtgctttctggaatcgacgtttagttgatttacagtgctgtgttagtttcgagtgtccagcgaggcgattcagccatgtatgcrtatgtatgcgttctttctcagg

SEQ ID NO: 2173 - DNA, 598 bp, Bovine  MMBT23576
  misc_feature (1)..(17): n is a, c, g, or t
nnnnnnnnnnnnnnnnnccgatatgagaacagtgggaagtgttgttgggggtgatgtctggtttgtggagtaaatgggaatcaaggaagtagttayagcttttgaagaasctctctaaagaatttgactctaaaaggaatgggaaaaggaagaaatatttgagaaacttggattgtagaagggttacygggaataaattttttttaataggaagaaaactccttgaattactgctatggttctttgctcaatcagccacccttaaccctacccccttcttcctagaaaataaggccaatytgcaagcagttaaaaacatatgttcattatcaattcargcttcccttttgttatcctgttagtacaatctcctcaacctaggaaataggagtcatttgagttttctttttttcctcccagagttggagaccaaacctacaaccaagaatacgataccaacagaggatttttctaaaaaacatttatcacaggatgccattgtagagaaactcacagagaatggtctatgggaccccataatgggaggattatggaaatggggcgacaggatactgagactgcagtatagtcagcagag

SEQ ID NO: 2174 - DNA, 460 bp, Bovine  MMBT23579
agaggatttttctaaaaaacatttatcacaggatgccattgtagagaaactcacagagaatggtctatgggaccccataatgggaggattatggaaatggggcgacaggatactgagactgcagtatagtcagcagagtcctgtaggccaaaaaacagttaaacmcaagaaaatccccactattcagaaaggctttgagtttggaactgttcttcttccagaaccagaagttatcacagaagagccccatggcaaataccaaacacatgatggaaattttacagagggtttagatttgaycacagatacccatctgaggaaggaaatttgcaaggatacagaaggcagcaaagtcayaagccctgcctcagaactcactttagagaaaaaacccaataagaaagaaaaaccctataaatgtagtacatgtgaaaaggccttccgtacaaggtcattaaaa

SEQ ID NO: 2175 - DNA, 532 bp, Bovine  MMBT23572
cttaaattcaccctttggctaagatatctaaaattgactttgtgtgcaaacacatactcaacaaagaaaggtcaattgtagaaatatatatacacacaactaaaagattaaaaagaagtctgagtaaaattagctgtattctttttttgtcaatgaaactgatacagtagatttattggtagtaaatatttactttctgcttgtttccctctaaacttccacactggtataatacactgataatctgatacttcaccaccataaatatagaatgacccccaaaataaaaaataaataaaycagtgagttataaattaaagttgtcagtaaggtacagcaaggtgaaaaaggatgaaaacttaaattttcaaggccagtgaataacaatactgatgctatattccatgcatcaatcaccattaccacagagctttgatacctacactgccaaatatttcacagacagccttaatggtgatgaatagatgtgccatagcactgaaactgaaaggagactctggtaaacaaaaaa

SEQ ID NO: 2176 - DNA, 403 bp, Bovine  MMBT23581
gaatggtctatgggaccccataatgggaggattatggaaatggggcgacaggatactgagactgcagtatagtcagcagagtcctgtaggccaaaaaacagttaaacmcaagaaaatccccactattcagaaaggctttgagtttggaactgttcttcttccagaaccagaagttatcacagaagagccccatggcaaataccaaacacatgatggaaattttacagagggtttagatttgaycacagatacccatctgaggaaggaaatttgcaaggatacagaaggcagcaaagtcayaagccctgcctcagaactcactttagagaaaaaacccaataagaaagaaaaaccctataaatgtagtacatgtgaaaaggccttccgtacaaggtcattaaaa

SEQ ID NO: 2177 - DNA, 598 bp, Bovine  MMBT23537
  misc_feature (1)..(223): n is a, c, g, or t
nnnnnnnnnnnnnnnnnnnnnnnnnnnnnnnnnnnnnnnnnnnnnnnnnnnnnnnnnnnnnnnnnnnnnnnnnnnnnnnnnnnnnnnnnnnnnnnnnnnnnnnnnnnnnnnnnnnnnnnnnnnnnnnnnnnnnnnnnnnnnnnnnnnnnnnnnnnnnnnnnnnnnnnnnnnnnnnnnnnnnnnnnnnnnnnnnnnnnnnnnnnnnnnnnnnnnnnnnnnnnnnttctcggtcgacagcacctgttcacaccaacccccactgggacttcggggccttcaggcagctcgatcgcctggtgygggagacccacctcagcttctccaggtgactgtggtgaggctacctggttcctggaatgagggtcacagcctctccagggtgggcgccaggagggcacgggggagagtgggggcctcagaccgtgtcaggggtgggggtcatgggcggcttccctgggccacgttactctagggggagccccttccacmgctcgtggccctcagactgtccccatattctggcccttcacccccaggtttgctcaccggtttgtagatccgggcacgtacgtgtttcaggacaacgggcagcccgaga

SEQ ID NO: 2178 - DNA, 600 bp, Bovine  MMBT23551
actggtttgagagtttccacattccccactcagacagcagcctagatgctcctgccctccattgactttgccttaggtcacatcttcaggctccatcttgatcttgatcttggtctttgccttctctaaaggctcttcaactcaaatctgactcttatctctcacaatcctcttgtcttgatgtttcaacagtttcctgggtttccagcctgctctctttgagacttggttgtgtgagccttcaactcagtccaagctcgtgcagagatttcctgaggctctgggttttcctggctcacrtttccagagtctccagctggcatgatgcccccaataagccagtgagrmacacacttctttatcggccctctttccttctctcagttcattctccaagaatagtctccgaggtcagccaaattgcctgggcccrctccctatgctgacgatctggcaccctcyggtggtcatggatgactgcgccttggctgtcagcgagtttcagagcgaggtcctacttgagaatccctgggcctgttagggccctccagtgacagttaaaaagagctgcttttagaatctactgtcagatcttggcaa

SEQ ID NO: 2179 - DNA, 423 bp, Bovine  MMBT23506
  misc_feature (1)..(125): n is a, c, g, or t
nnnnnnnnnnnnnnnnnnnnnnnnnnnnnnnnnnnnnnnnnnnnnnnnnnnnnnnnnnnnnnnnnnnnnnnnnnnnnnnnnnnnnnnnnnnnnnnnnnnnnnnnnnnnnnnnnnnnnnnnnnnnntaaggcataggatatatatataaatatatatataagcaatcattgaagacaacttgttaaatgaataaaatatgaaatttggatgaaggttttcacatgccctttttattatgaattttcttataatttctaagatttaagatgaccaactacttttctacattcttataaagcrtctcttcagtgtgtattttctggtgattgctcctggatgttttcccacattcataaaatatacagtttataagattcttgttactgtctgaacaatgatttgctgttctctatattaactgaa

SEQ ID NO: 2180 - DNA, 600 bp, Bovine  MMBT23365
tctctataatctatagtttattatgtcacctaccagttacagtgacttctaactccttgtttccaatttttaatactacttcttcttttctgtttttacatcctgagctttgaccaagccttgaacagtatcaacagtaagagtgtaccctttctcttgctctgagtcttatkaaggggaaatctatggtgtcaatcaccctttaggaaaagatgacyatgaaggagtctctctgattcatctcttttgcagtgtctccctcaggtcaaggagcagaggyaccactctggctggagacckgccctcagcccacctcagtcccagcccaatttatcaggcccttccttaggcttctcattattacayactaaaatgtttggttttgtctccacagggcaggccragtcttcacagaaaattgaagacttgatggaaatggtgaagaagttgcagaaaggtcacgtgtctcctctataactgaggctcagcccgaggtttggagtcaggcagaagtggaatcaattctaagccacctgattcaccaccttgggaaattaatatctttccttcccctcttctctgtgtttatttatcgcctta

SEQ ID NO: 2181 - DNA, 598 bp, Bovine  MMBT23362
  misc_feature (1)..(118): n is a, c, g, or t
nnnnnnnnnnnnnnnnnnnnnnnnnnnnnnnnnnnnnnnnnnnnnnnnnnnnnnnnnnnnnnnnnnnnnnnnnnnnnnnnnnnnnnnnnnnnnnnnnnnnnnnnnnnnnnnnnnnnnnggttggaattctctataatctatagtttattatgtcacctaccagttacagtgacttctaactccttgtttccaatttttaatactacttcttcttttctgtttttacatcctgagctttgaccaagccttgaacagtatcaacagtaagagtgtaccctttctcttgctctgagtcttatkaaggggaaatctatggtgtcaatcaccctttaggaaaagatgacyatgaaggagtctctctgattcatctcttttgcagtgtctccctcaggtcaaggagcagaggyaccactctggctggagacckgccctcagcccacctcagtcccagcccaatttatcaggcccttccttaggcttctcattattacayactaaaatgtttggttttgtctccacagggcaggccragtcttcacagaaaattgaagacttgatggaaatggtgaagaagttgcagaaaggtcacgtgtctcct

SEQ ID NO: 2182 - DNA, 600 bp, Bovine  MMBT03603
acgcaagtttagaggggatgattatttcctaattccatagattcctgtagaattttcctcctaaggaactggccgtaccttcgttgtcactcttgagttgggtgtagaatgttcaggattgtggacaagtcagatatttgttgtccccgtacgccacacaagtgaacaaaccacagctaccccacagaagactggtgagtcaggacagataccacaacttcagctttgctgtgctggtgattggggttaggaggtaataagcaaagttatgattcattgcttacaagtgaattgtttctmactaggctgtagttgccttcagtctccattccaggagggctcccgtggctgatggggagagaggaaggaaggataygatgacttgttccctccgtccttgctctgagagcctgggaggcttggtgaagaatgtgaggaagccaagcctccagtgcgtggagatggttgggaatgttatacagaaacctgctgtgtatcgttactactcctttcccttggtctcctctgactccctgggtgaaacaggagagctcagatggcacattttgtaaatataattttcagcagagagtcagacac

SEQ ID NO: 2183 - DNA, 600 bp, Bovine  MMBT01324
attttacaggcaggccaatgtagctcatgcgctggggctccttagccctcaggattttagtatagaatttacagagcaaacatagacagcgagggataaaaccacaccgtgctatgatgggaaaaggacgagttctagtttcaaactgttttcattcccaggatctactaagcataactgctacttacactggtgcatctgtagattgtgtttttgatgacacagacttattttgcctattctttcaaaacttcatactctttgttttcattattctttaaaaaacaaaaaaacatgtgstagaatgtttagagaaggcattcaaaattcaatgcaaaaaaaacaagagcaatataatttatcgtactgttggattcaacaaatttgtttagatgttccaaagcccatggacatgaatcaatactggattaaaagatcagaaatgttagcatatgcatactctactamtttgctagtgtttgaattaaatgagatcggagacaacacattattatagtctctgtgctctgaggttaggattgaagatgcctaatgatgcacttggacattactatgtattatgtgtgtatgtgcttaagt

SEQ ID NO: 2184 - DNA, 600 bp, Bovine  MMBT01910
gaagctgtgatcttgaaaagaagcagaatttacctgggagaagcaggaaggaccttctaagacaaggaccagcacatgcaaaggccctgtggtatgcagggccatggtggaatgaagggtttgttcatgtagctgctggtgccatgtgctaagacaggaaattctgcaggaagagcaggtttagctggatgtggccaggaagttttcatatatgagtttcagaagacgtcatatgatacagaatgttattagcaacccaggaaagaagaaagtcctgacagtatcagacaaataataatracgctaatacttattgaatatttactgtgtgccaggcactgttctaaatattggatctattaactaacttaaacatcacaacaactttatgaggtaggtactatgcttatttccattttatagatgagaacatcgagaaacagatggaaaaacataaaagcacagaagttttggtcatatgatacctgaatatgtaaaggcaaaataacttttaattatttgatgttttcattttctgttacaatagtaataattttacagaaaatttgaggttctccaaactggggactatgtactgaa

SEQ ID NO: 2185 - DNA, 600 bp, Bovine  MMBT01494
cacctagtttcttttttacaattagtagagcatggactagttaattggttaacagttyttcctgctgtgttcattttcatccacacatgcctattttagagaatttctcagggtatttttttatcattgaaatcatataatttctgatayttagaatttaggcagcagcttaatgaatttctgtaagattcatttccaaaacatggaatttgtgaaatgttaaagtatgtctcattcatttcagaaaatgaaccaccctggtgttgaaattgaatagttgtatccaaaatgtcacaaaargggccgttttcctgtaatacatcacttttctgtttagattgaaagtgataaagagggcaaggcaaataatagatgatatgcttcattctgagtgcttttttactcaaaagaaaaaagaaaaactcacagccatctgttatctgtgtgtcagtttgttgcaagtgaatgacatttttcttttttatttgagaagaaatttatggaaaagctgagcaaagttaactttaaaatatatggtaatattaataaagtacctatgtagatattaaagcctcattatgttttgcatatctggacttg

SEQ ID NO: 2186 - DNA, 600 bp, Bovine  MMBT02399
ccaaaagcagcagccgggagcgcaccaggatgtcatggcctccccggaacacgcctgcaagggaagagagaaggcaggcgygtaagaccgaagggggctgcagggctgggctgagggcagcgtgccacagctggcagaggcggctctggggtgagacgggagctctcacacccagtgtgaggcgctgggcacgtcactgcacctctctgagctgcagcrtcatcagtgacctcgcagagatcagtctgcccgtcacgctgctgccaagcccaaaacgactggacgtgtgtggttctgtgygacatcaccgaggctctcacacatgccgacctcatcgaagctcacagaccgagggacagccccaccgtggcaaaatcgcggtgcaggtgtctgcaaaacccaggggacagggctgcctcactgcgggcttgggggcagccagctgtgagcagggcactggagcagagccacctcctaaccctgtttataaacactcagaaaaaagcacttcccttcgttcactgtttcaggcgcagtaagcacattggctcattagcttttggagaaacagcgatcagaaacatttacatatgaaatgcc

SEQ ID NO: 2187 - DNA, 600 bp, Bovine  MMBT00758
attgttagcccctactatttgcctggaataagaggggttgaaaaatacaccgtgtgaattctgtcctcttggaggtaatatttttatttggatgataagccttatttgacgaagctaaacaaaattataagacagtagaagggtgacttagagcctttgcatttgcaaatcttccacaagtattgtgcacccaggttgcctcacatctggtttgccaaattgctaaataattaatatacaaagtctagaaacttccctatattttccaaaatgaagcagtaacatgaaggtattcacttytactcatactctaaaaatatattygttccaaaggaattaccaacaacatcttctacagttctttaatatagaacacataattcaaargaacaatgcctgacatccatgtttctggtcttcactagatacgtatctttcaccagatttgtcttatatccatttactctccaagaatctttcacttgagtcataccaaattccttgttgttttcccaatactgtatgcagtgttatacctccatgtctttgcctttaatgttcgctctaccctcaatgtccttctacccttcttgtatgttc

SEQ ID NO: 2188 - DNA, 600 bp, Bovine  MMBT01752
aatggcaatgattatcttagccaagtttgagtggcctaagggcaggggtcttattttattcatttgagtattcccagctcccagcacatgttgaatctcaagcacagttgaactgaacacatcactaagctttctcacttgcttaaaagagagaatgtgatcacagccctaatgttagcacctactattaaacatgatgtttagatttctcatttatggcagaacagattgtcaagacatctaagtgagcaggtactgacttagcgatttgccattttatttagagttaaagcaaataargttttttgaccctcttaaatggcatgatattttttaatatatataatgacaaagtttaataggttgtgttttggaaaaatgactgtctggaatcgttttcttgatcacaaaattgaatgttcaagaggtagagtttggkcccacttactccaaatctgctgtggaagtcaaatgcagaagagccattggtcttctgtgaatactagagaacttgcatattttttgaccaaaaaaaaaagaaatttcagaatttatttttatgagtgatctgaaatcactattctgttaacgtaatttctg

SEQ ID NO: 2189 - DNA, 600 bp, Bovine  MMBT03249
catgtgcatgtgctttctctctgggcggcagcatggtgggaaagtgacaatgtagactcaggagccagactgcctgggtgcatttcacatgtacagagtgatgatgatactaactactgcacagatttttgagattcagtaagaaaatgtttatgtaatattaatacagcatctttcacaagattagagctcaataagtacttttaattcccagctgcttgctgtgaagggttcaggttaccccagccatgcctcatgacaactctgcctccttgctggggatggggtagggtggactcwgtactttggaatggattcttgtattgtttgtccaacccttacgtygacaaagtgcctgtgacttgtctccaactctttactccgcagattatacataggacaactgagagagagggtggaccattcccacttggcacctttccgttgagctcaggtattccttatagactgtgtctgatagccttttaaagaaatgataaggaaatgataaagaataaccttccattaaacatttcaactctagggagccactctgcagagttctcatttgctcattgattctaaaaagtgtggtcagtt

SEQ ID NO: 2190 - DNA, 600 bp, Bovine  MMBT03646
acaccctctccagcatttattgcttgtagacttttggattacagccattctgactggtgtgaaatggtacctcatagtggttttgatttgcatttctctgataatgagtgatgttgagcatcttttcatgtgtttgttagccatctgtatgtcttgaattgaaaaatgaatttagaaagaccacaagagacagaatgacttctggcatgttaataaaagaaaattgatgctttgcattttttctactgtctaaaatgtgtatatccattaggtatttacatctgtagtcttaggcaaaawgatcagttttccatcaatgagaagaaatccgttccccaggtgtatattatatgtgagcrtgcttgtaattttcttgctgacaccacaaattctcaataagcctttgactattgaacttcaagttctaacagttgattgggagagaaggcatttgaataccaattcagatcctctcaactcagtagaaatctgtagtgctagttatttgatgagagttgaacactagcctcttctttggaggatttgcctccatgcggtgaaacacatgaaaatgggaaatgttttgttttagaatgactg

SEQ ID NO: 2191 - DNA, 600 bp, Bovine  MMBT04471
ctgcctggctgccagcaccgggagaccacgtggatgaaggaaggcacttaagaaatatgaagtgctgtacaattttcaggtggtatcattatttgaaaacacgttacccacggttaagggatttggactttggaggcagcagctaccttgttgatcagattttctgaggagagctgcagtcacccccttagggctccaaatgctgtgtcaggtttttcaaagccaattgataacaattaagtagatgccatgttctgcaagctgtcttttgtgggagttgaattctagctttctttcctwgtgagcctctgtacataagacttgctatgggcagtcaccttgttggagcttttgaatgcctctgaaactatactrgggtcaagtcatttgatgtgtgtgggtgttatctgcattgcaagagaatattctagaaaagtgccttttgctcatgtattttaagcattcccctaccaccagaattgatgtgattcaatcctatacacttgagttgtgaaaytggacccaagacagatagraatgacatagtaacagaatgttctttaaagaagagctgattacttcaagcttttggtagtaaag

SEQ ID NO: 2192 - DNA, 600 bp, Bovine  MMBT05152
ccaatttccctagttgtaaaattaggtgaaagggtgaatgatccttagcatccattattcatctgaaattctaagaagcggttgttatatacctttgagaatatgtttatgtattttaaaatttcatctgaaattatagtgtaatcaatgctaaagatcattgataagtgatacctacaggaagcacatgtaacttattttcatttgtccttcatcttctttatgaacaatatattactatgtctttttctagagaataactaatccaggagacttgtgatgacagataaccctgtgatwgtgactattttttttttaattgaagtatagttgatttataatgtgttagtctcacatgtacaaaaatgattcagttattcatagcagtagtattagtcactcaggagactgtagccaccaggctcctctgtccatggaattctccaggcaacaatactggagtgggtggccatttgtgtgtgtgtgtgtatatatacagatttacatrcatgtatatttcttttcagattcatttcccttatagattattacaagaaactgtstatagtaytgtatgctatayagtaggtttttattggt

SEQ ID NO: 2193 - DNA, 600 bp, Bovine  MMBT04062
tttttttctttttaatgtgtatgttcttgaggcaatgactttttaaaatttattttctaacctttcttccaagtctttatcttctcatatcaaagaaaaggaatgagactgtcttcttttttcactgcaggctttttcaagatacccagaaatgaaggattctttaatcgattaatcaggctcaaatacatagtgccaaaagcaaataaaacaatggcacctaaatttatatagtgtttgagaagcatcttcacaaacttcattttatttgatcatcacaaaaaaactttgaggtgggcmggtccgctatgatcaccattttatgagtagagtaaaatcactatgtgagcacagcacattcaacagcagaattgaaactagaagccagttctcaaatccctgtctccagtgctctccttccctaacacacaaacgcctatgatatgtagagaactgtgtaaatatctctcatctcacttttatatgtttatatattctagtaccaagatagaagtcttctcagtrttactcaaataaattggtaaagattttatgtcttctgaagctaagtgatatataaggaatgaaaactaatttatc

SEQ ID NO: 2194 - DNA, 600 bp, Bovine  MMBT05994
tgtttgtatcatacagcttttagaggactgtcctatacttcactacatagtatggcttcgtggaagggaataaaagcacagtggttaaatgtacgaactccagagttaaaaccacttgggtttgtttcctggcttcgctatttatagtgctactgtcacctaggataagttaattcatctctatctcatctgtaaaatggtgataataacaaagtctaacccatacgatgatggttaggaagattaaatgagtttaataaacataaagtatttaaatagtgcctggcatgtgcctggcakgtagtaaattcccagtaaagattagtcgttattatcagattagaactatcactttagggctggagsaatttaatggtaaagtggatattaaataacgtgaaatgcagaaaggtggtagcaaaggccagagaagaaaaagccatcaatttgtccattaagctatttgaataactgcagaaatttctgctgttttacagttgttcagcaccagctaaacaggaggtgatccccaactcacagcaattttcagttaatatgcttagaactgtaaaacaaataacctccaagcaaatcagatag

SEQ ID NO: 2195 - DNA, 600 bp, Bovine  MMBT08697
gattctacttaataccagaaacttaaatacaaatatagtgtattatttttatattgttgtcataacaaattagcacacaattagtggcttgaaacaacatgaatttattatcttatgtgtctgaaagtaagatgctcaaaatgaggtcactgggrtaaaatcaagatattggcaggattgtgtttcttttggaagctctaggggaaaaattgtttacttgccttttccagtatccaaagactgtgyacatttcttggttcatgatcctgmmtcattccaacctctttccattttgacaamtcatttgctgaccgtaaccttcttacttcttcttataarcacaactgtagttatatttaggcctactaggataaccagatttcttaatctcaaaataatgaacttaattgcatcagcaaaaccccatattgcatataaggtaagatattcaaatgttctggaaattaaggtatagacctatttggaacaccactattaggtctattagacagagtgaagtctctgatgtctcgcagtatagaaactactctattttttcagccattgtttatcaaacagaaattttatcycctggttaaa

SEQ ID NO: 2196 - DNA, 600 bp, Bovine  MMBT07905
atgtttatacaaatttaaataagagtaccaagaagaataatagagattcaattatcttttgtaattccaatctttatagaactgtttggcagaacagcatttttaccattaaacaaaattacttttaagaactgtatttaatttgtagttatttgattccatttagactattgatctttgaacaaaatgtctatttgagaattattcctaccttgtgggatcaattgaaagcaaaatgtctgttttgccacctaaaaattttacaaggaagaaaaattctgatataaggacagcaaaatscatgataaattaacttctactcagacatgatgaagaatatgaagagtgtgaaggcaaagagaaaagtaaagaggaatcttgcacttttctaaatgcaaatatcttattcttccactagcctcatttgaaaataagaggatacttagtgtggcaaatatgcagcatataattggaagagctgattatagagaaagtagaattcctgcacataatgttcagggttttttttgttaggcttattcatatatacattatgtacaaaaattttatattttaagtgtacagttcygtgaattttga

SEQ ID NO: 2197 - DNA, 600 bp, Bovine  MMBT06228
agatatcagaaattgagatttaggaggtgaaacaggtatcagaaatgaaaagatctagaatatgagaggttatagctgaaatgaggyggaggatgcytaacaacctggatgcccttaacaaacttcccattgagaataactaaaaacaatgaataaaatatacaattatattttaaaatgcatcaatgacctgctaataatgtaaggccaaaatgaactcaaagtgaggtccyagtgggatgacccaggcactgatactggccttaggactgagggcttttgacaaatcagaggatcttsagttccagtgttcacagcctttagagatatggatgatatttgacaaagcaaaagagggcagtctcaaagacaatcctacataaagctcaaaagggtatactagaaataaaactgttcccaaagcagacaacaaggatatctacttatcttaaaatttggcactggtaaaggggaaaaaaaaatctttcctgaaagtttctaagtacaagstagccctcatgtgtgagttttcttactggactagctctacctcagtagtcttcaaaacttcaagctgagaattcagtttaaaatggtcct

SEQ ID NO: 2198 - DNA, 535 bp, Bovine  MMBT04969
cctatatgcaaatagaagctttgaagcaaatgcctaaaacacttgatagaatgatgtgtgtgagatgcagatttacgttttggattactgactttatggctatgatatatccccccccgccctccccccctgcagaatgttgttctgcccattkatgaacaaatcaaacacatttgtttcttcaatgtgttctaaaaatggcttttaaaatgtgcctttattcacgcagtttacaagaaaataagtaggactgaaaccgatgcaagctggggacattatttctcccaacaggcctgtccygtagggcctgagaccggaagtgcacacayatgggtatgacaaggagtggtgtgcctgtgcgyccaggctcagtgtttctggacccctctggcttctcctggcacctccccctcagagcacttcctaygctccagtcacaaaaacgctggcctttctctccccccctctacttgctgctcttggataacccttctcatcttcaagaccgagtcaggggggccttccccctgctttc

SEQ ID NO: 2199 - DNA, 456 bp, Bovine  MMBT03264
tcaattcaaagagcataaatactaaaacagttacctaagaatatttagagaataagaatgatctacagagaaaaacttactagtcagaccacctatttaatagataatatatttaaaatatttgtttgaagcatggttgagctggcaggaaacttagggaaacaactcataggttgaaatgacaaggatgtttgattccataagagtaggcaaagtcacagtttgttttgagggcatttgctggcacctggcagtgaggtgcttggtttataaaggcggtgtactcagaggattggagayaaagcctagggctcaagcagaatgggaaattggatcagggattcccacatcaatttaggacccttgaagggcagcatcttccttgagagatctaaaaataaggaaggcatgagatgcaggaaggaatggttaaacctgtgggagcctaaacaaaaa

SEQ ID NO: 2200 - DNA, 600 bp, Bovine  MMBT03908
gggaggattgagggcaggaagagaaggggatgaaggaggatgagatggctggatggcatcactgactcgatggacgtgagtctgagtgaactccgggagttggtaatggacagggaggcctggcgtgctgcgattcatggggtcgcaaagagtcggacacgaccgagcaactgaactgaacagaactgaacccttgattaagtaaaaacctgtgtttcacagagtattttatgtttgtttgaaaataatttttaacaagatgcatagccataaaacattcacatttcaggtatacattaytggtttctrgagtgaaattaggatggcagcctttaaaaaaaattcatatcctgattgtagcagagattctttcttttaattaagaagctcaccagacacttgcaaaaaccatcccctaactaggtcccttgtgtctcagaattgcttgtactatgaatgaggggaatcgcttaatacaagcttattagacaaccgagcggcttggaggttccccactagacctttcaataaggcttaatcaaccaagtaagaccctgatgaggctggcaattagacttactgtatttttaaacggagttg

SEQ ID NO: 2201 - DNA, 510 bp, Bovine  MMBT04199
  misc_feature (1)..(1): n is a, c, g, or t
nttgcgaccctgtggactgtagcccaccgggctcctctatccaagggatttcccaggcaagaatactgaagtgggttgccttttccttctccaggcgatcttcctgacccagggatcaaactcacatctctagcactgcaggtagatctctttactctgagctcctagggaaactttcccaacctgacttagataacatgtttttaacctttattaaacatgccatgaatggtaatcactctcaactagtatgttatttttagtacattcaggtacttctgacctactagttgagttacaygtttaacaattcattcggttgttcctaaacctgtttatatcagtttacttgctgtagtccttacataacttaaacattatgtaagcctatggaacacaaaagcaaagagttatatctatgtaaatgaagttgagtgcaagctgaggagaatgactcaataaaggtgagtcattcttttaaaaggtattaaattagataaaggtagacat

SEQ ID NO: 2202 - DNA, 600 bp, Bovine  MMBT11281
ggtctgggtttatagtctgagtgggaaaggcctagcttcaagctcgggtctggcagattctgaagcctgattcttctagaaaaggctcagggttaaggattataattccaattggagaatgaagaaactgaggcccagaaaggtgacagggctctccctgtgaaggtggctccatccagtttaatgggagagcgctgagacagtacagtgaggggtatggagcaggacaagggaattcaggctgtgtctcctgtttctgtttgggctgagtctctaggaatcctttactgagcccttggytaattccttgcatgggtcctgggctggtctgcagtttccatggagactgcctccatccatccctgaaatctcattgtgaccagtattaagagattaactctgctcagcagccctcacagggtcttgggtgccagagtggctgtgggagctcccttaaggatgaagaggttgcctgctgtgtgcgaccccataacaccaggaggaggatgtcagactggggccagggcttcccccgggacccctcaggtatgatcctgacttcacatctacctggagaggaggctgagatggtgggagaga

SEQ ID NO: 2203 - DNA, 600 bp, Bovine  MMBT07815
tgtttcagaggccagcctgagtgaatgccagagaccagttaaaagactgcctcaggaatctaggcaagagatgctgccctggaccaagatgtaggtggcagagagaggggaaaagtggagagactccagagacatttaaagggccttgaagatagcatttgtctctctgcaggagagccaggcccctgggggttgggattctcagagatcgtgccacctggagtgaggaaagagtaaaacagttgccagttgagagcagaagatgtcagaatcaaaaggggcatccttaccccaacctcygtgcccgtcactgtttcaaggttgcagttgggcctggagtcggcttcaggaccagtccaagagtcaggattgcagggctagtgggtggagaggcagctgacctcttgaacttcttggaagtgctatgatagcaagggyagattaaagtttcttctggctgccagtttcagaaatcaaatcccaccatcttaagctaaaatattggaatttattggaaggatcaaaatcaccatagacagtaactgcagccatgaaattaaaagacgctccttggaagaatagctatgacaaacctaaaca

SEQ ID NO: 2204 - DNA, 600 bp, Bovine  MMBT06233
aggaaatgcaataatcatatccaaatttggaagtactgatagttcagttatccaacctagaccacaaagttaaacagccaaatggaaactggcctatgtaggactttgaactgggccttaaggagaatacatcaacaagctgtgcagagaaaatctcagtttcttcaagttttataatttaagatactataaaactttatatttgaaaataaagatgtgtgcttcactttttaaatcttgtaattcataattaattactaacaatcaaggaaaacacagcctgtaatgtttaaatttcaygcctataaattttattccctgaatttagtaaacagaaagacattctaaaactattaaatattgcttattggttaccctccccatcactccccatgaatcaatgactattaagaaagtaggttaggctaggagcaatgctgaacataatggatactggaaataataatgttaagaagcaagatgtggagcaaatcaataaatcaggaagggaatcacctacccttaactgataacaaagacaaggtcaataataacatctcacctctaataagttttaggcattgtgataaattctttata

SEQ ID NO: 2205 - DNA, 600 bp, Bovine  MMBT05668
tgactctttgtgacccccatggactgtagcccaccaggctcctctacccatgtaattttccaggcaagaatactggagtaggttgccacttcctcctccaggggatcgtcccaacccggygatcaaatccatgtctcccgtgtctcctgcattggcaggcagattccttaccactagcgccacctgggaagactatatatgtatatataaatatacatgtacattgtgaacatcgtttttcttcaacaaatatctcaagaacacgcataacttcagatgaagaaccttcaagctctttcyaggacagatatgtaggtcttgatacaattagttcaaaaatatactcagggcctccatgtgctcccaacaagaaggaaaaaccaacagagcttaygttaagtgtatccctggcttcacgtgggatcttccaaagggtctctcataacctatggacccttaagcaggaagggcccttagagatccttttgygtaatgtcttcatttcacagataggaacaaggatctagggacattagcagcagagctataaccagagtacagctgtctaactcgggtgttgttgattctctgaatggcata

SEQ ID NO: 2206 - DNA, 600 bp, Bovine  MMBT05992
tgaaaatgaaagtacatataaatagagcacagttgaaaatagaggaggtgagctaattatattagaagaaaaaataatttctaaatatatgggtaagagtgtgtaggcagagatacctagagaggacctggggctagacctattgtgtgaccagcaatgtaaatttatttaaggagcaaatgagaggtgtgcaaaagcaagagcaaaccatggctgaacagaaatcctcctatcctaatcagctctggtagaagtcagggtgggtttaagtgctgaaaattttatgttaaggaaactggyggaggatatttaatagcaagtcaaaaatataaatgggatgaaaaacccgcatgagggaaggataaagaaataatgatgccatggatagcagaaggaaaggctgcaatgagatttayttacccccmaaaaatattgttaaaaaaaaatggagatgatacccaaatagctttacttttttactgtaaaatctcaggggaaagctctcttatacctgwcactggggccattttcyatcagctttgtagggacaaaggaactgaatttggcatccttgatggtctatacttcgtaaataattca

SEQ ID NO: 2207 - DNA, 598 bp, Bovine  MMBT03359
  misc_feature (1)..(12): n is a, c, g, or t
nnnnnnnnnnnnaacggtttagaatattctttaaagaattcttcaagtgcataccaatcaacacatatctttttgttcattttgactgctaaataaaaattttcttgcctctttcttatttgcaagctgctcgggcctaagaccatgtcatacttagtattttttgccaatatatactcatatatcttactcattcaagatgcttggataaacactgaataacttgaatttacctaattcaaaggtatttaagtaaaatttataatttgcaagaaaaacttaccttaattctttcatttrttattgttcctaaagaaacaaacagtcaaaactttaaagcatacaattaccaccttgtttaatcttatctgacagcttagtaacttgacagaacactaaaaagaagaggtggtttaggaacatgcaggcaacaatttaaggaaaacacctgaggcaacaaaagattttgcagtttaaaatttgaaaggctttgaaaatttttatttccaaggcacagtggcagctgtgtgtttattatcttttaattttgttttgccagaggacaacagggctagttccagaaaaacaaatccactcc

SEQ ID NO: 2208 - DNA, 600 bp, Bovine  MMBT04891
agtgtttagaagcgaagatttgatgccaagtctgatacacaatcctcaaccaagagaggaatttcaacactgacaagctattttcatgctgtgattaaagtcctcatttaattatataatttgtctaataagacaatacttctaaagaaaatacaaattgatgagcatatctataatgattaagcatgtaaaatataaacaataatctataaagcatatatttctctcaatatttccatcttttctccctcagctccatgattttttctctatactttcccaaaacagtataaatacatrtgtgtatatataatattttcaattgaatatattcttaaaaagctgtgtaaataaatgtgcattctgaaatgtgcaatatactgtaagacctttcttttcatgactgcatattgtctcaagcatttttaatttgttgcatggcagatttctggaatcaaatagcagctgtttggggaaagtattaaacacattctctccaggcccactggctgttgttttgctttcatatcttctcaccataaactatatggcagctagagcagaggagttgttaacaaaatgtattttcattgctagcta

SEQ ID NO: 2209 - DNA, 600 bp, Bovine  MMBT07828
ctgaactgaactgaagtcataatcctcatctgattcaaacaactgggtttttgtttttgttttttgtttttctatcaactggtgatcctagactgcacgagctctcgtgattgaattgtcaaatagaaaaaatgagactctattttaaccacagtccctgggctctccatgctggtaataaatattgtggtgcactctagtggtagaatgagatagactagatctagaagtgcgctaggattagcagaagtcattgttattttgaaaaatttaccatccattgtggatttcaaaacatgrctaggggaatgtttcatgtacaaggtggaattcatgtaagaactttgcccctctctacccagaaaatacctggagaaaaataactgcatttytttaatagtaaagcatctcaatttaaatagaaatattatgtgtatttcagaaggcttgtgatcattttatttttaacagaagtggagtttattgttatcttctcatagtgcagtaagaagtatttttttttaaggatttttcaataaaaactgtcagggttgagagtaggtgcatgtgaataaaacaaaaatggacataaatataaag

SEQ ID NO: 2210 - DNA, 598 bp, Bovine  MMBT09537
  misc_feature (1)..(119): n is a, c, g, or t
nnnnnnnnnnnnnnnnnnnnnnnnnnnnnnnnnnnnnnnnnnnnnnnnnnnnnnnnnnnnnnnnnnnnnnnnnnnnnnnnnnnnnnnnnnnnnnnnnnnnnnnnnnnnnnnnnnnnnnntttttttttctgttaaagatactcaaggtaagaacctttaaaaaaaaaaaatctcatagttgggagatgtcctatggtgagagaaccatctcatgtataaatttgattgcatccaaaaaattcagtagtatctctggtttccagaatctctctggtacagttatcacgaagctaacagacrtgttaagtataaacctcttcctaatcaggcataaatattggatgatcattgtcagtagacttgatgcctgcatcgatattaattgcacaaatttcaggcaggattaggcagaatacaaggaaaaaaaatcagacagaccagaagggaaaggtttcttaagctattttagaagcttagaagtaaatcataaaatgtcaagctacagaaattggctctgataaatgtgattttttcctgaattagttcactaagcttttatcctttttgarcactttcagtcaatcctaaatactttaaa

SEQ ID NO: 2211 - DNA, 600 bp, Bovine  MMBT10149
attatctgctaattattagaaattgcatgttgttgttaattgcataaataaattgttttatctgaaagccattaaaaaaaggtttggtgtttgaagcatatatggttttgatgttcctgtataaaaacgttaaactgtttaactctaaaataatgacatgctgcttttaagacaatttcttagactaatggattatggggagggtgggggtagggatccctaaacatgtattttactttatttctgtgagatacttcacctgattataaatctgcatgggaagcaagattgcaaatattyaccaaatgtattagaacaacatccatatgatgctatagttttcttttttaaawccttagaaagaagttaatataaacattccctttttttccccaaaatagtcttatttttttaatgttccttttttaaaaaatatatttcattcatgattggctataagaagactatatttgtatgaacagttccctttgattttctatgaaataattcagaagagtgtaatggatactctcacagaatttgagggcaggacgcctctggaatgagtgggtgcctcaggggtccactccccgggaggca

SEQ ID NO: 2212 - DNA, 600 bp, Bovine  MMBT04835
attcttggtttcagtgaccataagtcatagatggccagtagtacactgtttcttttcctgttctttgtcactgcttctgtccccatggcaggcacccaaatgcccactgtctcatggggcacacttgttgagcttcagagggcactcagtgacctctccctgccaagtgccccccccagagaagaaatctgctgaggctctgaggccctgtctcttgctccctgccctcatccaccaaattgggtgacctagtccatatccttttgtggcctaaataccctcagccaaaaagactcatakaggctcctaccaagatgatgcctacttcagcccaggctccacctgaggtctccatttgaccccagggaactgccatatctccttgtcaagttcaaccatgagacggcacactgaccccaccccaacctagcgctcgtccacacttctgccatctctcccctgctccatttcctcacaagcaatgtcacacattctgagggtttggggtttaggagcccaccaacgttcagagaacagactatcacccatttctcagtgtggagagaagaacagtctgagcacctcagtctcacaggcagt

SEQ ID NO: 2213 - DNA, 600 bp, Bovine  MMBT07105
cagtttccgaggcaactacttatcaccatgggtgtagggtgaaagtagccttagttaccatgcaaacagtgggtgtggcgatgttccacaaagctttctttacaaaaccaggggacgggctggatttggccccccagccatagttcacctatccttgatctgcaccatcaaagcattaaaaaggcttcatgtcaaattattaaataattttaggcctaaacacagtaaatataaccactataaagttgttaaggcagtatttctaaaactatatttagagagctctgaagtagtaatttktattagtttatagactatagcagctaataaacacttcatttatttaagtcttgaagactataatgacacagtttcttcacagtattacaataaatgttttcaataactaaaaagacataaaagtatttaaatattattatgtagtatatattaaatgtcttatttctaagattaagtggactatctttactaaatggaagaatctcaaactgaaaactggtcatattctttcaacaaaactaaagctgcactcacacatatcaaaagacaaaaatcactgccatttgtatcaaaaaatta

SEQ ID NO: 2214 - DNA, 600 bp, Bovine  MMBT07597
ttgaaaataataacgtacttcagctctaacggctagcaatgcatcagatctctatctcagatctatgaaatttcaaaataacttattcctctttgcctgttgggcaaattgttaaccctacatctgcattccttgtaattttatttgcactgtcctttgagaaggacacccagttctttcaaaggtgggcattaggatactgaatttttttctttctggaagaaatatataattcttagatattctgagttctgaaccaaagatatttccatatttctaagaagttgaaaagaatggtgktgtttcagacttgcaaygtaaacattgactcagtccatcttcatagagaataaacaggtgaatgaaagcacccaaaggaattgtgagaccaataatatgcactccatcctgaaatgtgactgcattataaaatgcaaagtgggccataaacaaaatgagaatctggtcatcctaccccctttccacctggattcacaactcacttctctgatcacattggcatgcgaaatttttgtctccattaagatgagccagccatgttgggaatgttttttgagcagaagcaaaaataaaatgcta

SEQ ID NO: 2215 - DNA, 600 bp, Bovine  MMBT08698
atttttcatgttaaactgaagtggtgaaattatctgaactatggcaatacttaataccttacaaatcacagatctttatctctagccctttcagtgtcatttcctttatgccttagtcacatattaataaaccgtacgatgtatttgcacctttataagtaacagacgatgttcaataattgctgatattttggcttgtcatataatcactaaatatattaattttaatgattgtaattccaagtcacttatttcattacattattttttacaaagtatttctcagttctgttcctcttkgagtcctagtgagcaaatgtccaaatgtgaatgttgcttataaccctattcttgcatatacttatattaccaccaaaaatacattaaacagttttatctgaagacattttctattacataagaaatgtggatgttttctctgtttaactagcactttttaaacttgtgtaatttcatatttggctatagttccatttttttcccctaagcagcagagaagatatcatttactgtttctcagttttctgtaacacacatcaagaactcacatacttagtttccaagatattttacattgtg

SEQ ID NO: 2216 - DNA, 600 bp, Bovine  MMBT01383
atctgagacaggacatcccttggctcttatccaccattttattgtattacaagtagtgtgatttattgtgacaacaaaaaaaatacaaccacctccccaaaagtcccaaatgctcctggggtagtactgtgcccttcactcaatagcaagtcattctattagcaattacaattagcytctactaacagactygagagacaatatttttctctcaggtaaaacaaatctggaagcagcagtcttgggctgattttttccaagtctcctatcttttcttttccaacattcctagtactgatwtccatccttaagttcatggtcacagaatggctgctggaaccccagctactgtatctatgatttagttaagataaagaaagaaggggaaaagtcaggaagagcaaaaccatgtagtaaatgaataagtctcctttagaaatrtttctagaagtctctcccaacaactacctttatatctcattagctacccctgtcctcaaagaggcctacaaatgtaattaggcactttgctgtctctaataataatcagttccatagtgaagaagccggagtgaatggacattgggtaggcagccagtc

SEQ ID NO: 2217 - DNA, 600 bp, Bovine  MMBT00513
aggtaggagctcagagaagtgaactgacttgctcaaggtcacacagcttgggcaggacacccagaagagagctcttctcaccacactgcctctctggttatgcagtaatttggaagattactaaattgatgactccaattccagtttaagtaatattcaaatacccaacagagacttgcagctaaggctgaaagagcatgttgtgatggaagaggtctgacgtgggaagcatctaaaatctggaaattcgagaccttccacgagggaaaaacaaggagctgggatgttttagagcgtgawaaatggctttgtgctcaaggagggaaaacccaaaagggaatctggatcactgactgttcccgtaacaggagaaaaggacaataaacacatcagacactggattttacacacagagtcatggggggaatgctgaggatccaagctgctgagggtagggggccccagatttctaactacccccaaatctcaggttgtctgagatcccacccagcagggcactgaccgggaggggcagagccactgtctgccaggatcttaccgattacactcgtgtcagctgtcagccgtaaacaaatgact

SEQ ID NO: 2218 - DNA, 600 bp, Bovine  MMBT11530
tgtgaaattatttgttctagttctgtgaaaaataccactggtagcttgatagggattgcaaaacctcagtcattcttaacttgcttctcagaagatccttgtatgtaatcagcagaatagtacaagggcacacaggagaagaaaaacaagccacacacaaacagaatgtggtaaagttgggcataagttacagggctttaaacctattttataattaaaaacttggtcaaacatttgttaagatataaaatataattatgaaaaggtgaaatatcagaaaagaattcactgaaaataccmaaatcagacttgttgaattatttatttccagactttgcttatcctgcatacgaaaaaaaaaaaaaaaaaaagctgagtgggaaaaaaagcagattagtagattctaatagcttaccaagcaagctttgtcaattagtttgcaactgctgataaaagcacaaaaatgtgtactagagctgtgagatagtccatgaaactgttaaagtgtcttttcctggtattaattgcaaatgcaaaaattgacattcagtaagatttactagtaatttctttccaaataaatccctcataatctttctt

SEQ ID NO: 2219 - DNA, 600 bp, Bovine  MMBT12079
cccagaacacaggtggaacagcccaggatccaagctacaacctacagcagagccatcacaggagcccaaccccaatcagccaaaaataagagtcaacagacagactcatgagggtgagaataaatacctgttgctgtaagtccaggagttttgttacacagcaaaaggtgattaatttttcttttaccatttgatataatttcacgtttcttacataatcattcattttgctcctttttttctcataaaaaagcagtgattgaagcatctctgtctttggtacacctaatgatttttatytttggatcaactattttaaatttatragacctacattatcattaatagcaatgcttctgttttccttttgttctactatctttctaaaacaaggaaaatcacaataaagtatcaaggaataatataaacattgctaaaactcaactgttggctggcagatagatctcccatatgacagccaacgtgttaagctattagctgataaaaaggggttattaaaggaagtcctgctgctgctgctgctaagtcacttcagtcgtgtccaactctgtgcaaccccatagacggtagcccaccagg

SEQ ID NO: 2220 - DNA, 598 bp, Bovine  MMBT11932
  misc_feature (1)..(88): n is a, c, g, or t
nnnnnnnnnnnnnnnnnnnnnnnnnnnnnnnnnnnnnnnnnnnnnnnnnnnnnnnnnnnnnnnnnnnnnnnnnnnnnnnnnnnnnnnnctttatgaatgaggtggcattttaaagaatggttgaagtctagaaatcagaaaaggtaaaataaaacagagtaaggacagtttaaaaagtagaaccattcgtggtgtgttaaggaaacatccaggtgtccagactgactgtagcacagcatcggtgaagaataatgagagatgaatctggaaaaacaggtggaagccagatcactgagtgcyttaaaatgcagcctaacaagtttaaactgtaggcagtggaaggtactggcagtttccgttttgtttgtttttagcagatggctgaagttattagagttctacttaagacagaataaccttatattcctgtgcagggtgaaatagacaggaatggaggcaaaacaggtcattattctgtgcagaaacaagccctgaatctaaatgatgatagtgaaaacagaaaggggggaactaatgggagtgaaattatcgcccttttcgatatcttgaaataaaatctttccacatttacatgtgc

SEQ ID NO: 2221 - DNA, 598 bp, Bovine  MMBT13148
  misc_feature (1)..(53): n is a, c, g, or t
nnnnnnnnnnnnnnnnnnnnnnnnnnnnnnnnnnnnnnnnnnnnnnnnnnnnncagaaagccccaatttatactcaaatggttggaaacacatccattactcattttcttcctttttggaaaaaaactaactatgttgaattgcactgcatcctttaagttattcttagaagaccagtgttcacggagatggttaacctctgctattcacatggccactgtgagttctacatgctttagtgataatactgttctcaccatcagatttatttgctaacagaggctcttctcaatgacacaygctcagggaatatttgtgacggtgactctgatgaagaacagttggctcagatgacattataatcaaatatcttcaccaacwcactttgagaaaaatcagtcgaatttcaataggcacatttcaacaaraaaatacttttgcattaccaggctttcttgcttrggctaagaggaaacacttttatagtgcacatactattatgcccacttttataatgggtcattatttaataaaaataatttcaacatatatcataaattgagtttttcttgggcctaatactgcactggaatacctt

SEQ ID NO: 2222 - DNA, 600 bp, Bovine  MMBT11545
ggaataagaggggttgaaaaatacaccgtgtgaattctgtcctcttggaggtaatatttttatttggatgataagccttatttgacgaagctaaacaaaattataagacagtagaagggtgacttagagcctttgcatttgcaaatcttccacaagtattgtgcacccaggttgcctcacatctggtttgccaaattgctaaataattaatatacaaagtctagaaacttccctatattttccaaaatgaagcagtaacatgaaggtattcacttytactcatactctaaaaatatattygttccaaaggaattaccaacaacatcttctacagttctttaatatagaacacataattcaaargaacaatgcctgacatccatgtttctggtcttcactagatacgtatctttcaccagatttgtcttatatccatttactctccaagaatctttcacttgagtcataccaaattccttgttgttttcccaatactgtatgcagtgttatacctccatgtctttgcctttaatgttcgctctaccctcaatgtccttctacccttcttgtatgttcagagaactactcaagacgcaactc

SEQ ID NO: 2223 - DNA, 600 bp, Bovine  MMBT11736
atgagagagaggctctttttttgtacttgcccagatctttcttatatccccctgccctaggaaaagaagcccaggaggctggagctggcaggtgcgccagggcctgaaacgacctcatgagcatatccctgagaaaacacaggattctggtccctgaacacatcactggagccacgccaaggacatctcttgatttgttaggaaatctagagaagtggagttgggcagaaaggacctggatgccagggacctattttgggcaccgaggaaattggtctccaggagaaatttagagcaccracaaagtcatcatcacaaggctctgggaagcctctgccccagctccacacatgtcctgatctctggctccctgaggcaggctagtctcagatatgcccacctgtcctctacctttttctccttcttcttctctgtcccaggcatgatttgtcttttgggagcccaacatatgcactgggtttggattttaaaaagctcttttattgactgatattccttagcccttctcccagtcaggagagagaagtttgaggagttcctaggttctgaccctgcgaagatggggaatggtgtgatgag

SEQ ID NO: 2224 - DNA, 600 bp, Bovine  MMBT12280
gcagatgagaaktttgtattcttgaatacattaaatcaagccaaaggcctgatatgataagcattcagaatttcttttctgagatggatccccccccccctttttttttttttcagaaaactagtgaaaatttgtctcagatttaacagctgaaaccagatgcatttatgaaagagctggcaatctatatgcaatttgagtgctctgtcccaaaacaaagaggagtagaaactgtaagtggccaataaatatttgtcaagtatgccttgtgaagatctatcccttgtttcattttgattragcaacactttctgtatatttgttgtaatgtgattctttccctctgagttaaagcatgttcccatatcagaaatgggtctcccttcaaagagtttttagtctcagtgggacaaagacaaaactttatcatttttataatatgcaaaaactgtagaaggcttatgtaattgaataacaaaatgaacactagaggaaaagatgaagaggtacaggaaacagaggtatcaaagagatttgtgtagtcaaaagacagaagtatgatcacaaaaaccatgatagtacgatcaactcaagtcacag

SEQ ID NO: 2225 - DNA, 600 bp, Bovine  MMBT16287
tatttctcttttcataatatattcagatcattctccagtaatcagggatgctcaacactgccttaagacacagtaaaatcgccatcactggaggtcaggtgtaaagtgtgcatgatccttaaaaagacagtatttcttgaatgtcttaggaggtagacttaatggtcttgaagacctgctctagtcataacatcctgattctatgggttttttggtaagaacttttaatggcttatacaaatagagttacagatgrtggaatctcaggatggcagggaatatatcttggagcatgaatgsctccaaccaactrcatctttttaarttttacttggawaaactatcaaaatatgacacctgcagccccagagatatgtttattttacagttaacaaaagagaaggcaactgtttctgaaagtgactgttttgcttcaagaatctcaatctaaatgtatgtgtctcatgggaaatggagaaagaatatatgctatggacatctgttttatttttattgcatttttgccttttttcaaaataaaacacatcattggaggagtttaccattcccatttccatgtagcttctgataggctgtatt

SEQ ID NO: 2226 - DNA, 600 bp, Bovine  MMBT15584
gcactgcaggcagattctttaccatctgagccaccagggaagcctatgcttcatcttagctacttttccccacctggcccctttccaccaggctcctgctcatgaaactgccaccatgcagtcatgtcccacagggaactctgtcctctttgtcactgccgacgcaacaacagtggatgtcactgcagctttctgggtcacacacctcatttgtgccattcgcactttcagtcccttttatcatttacaattctccrgtgactctcctcactgccatatcttaattttaatactagacaytacattcattccttggcatcatcagagaaaacaaagcacaatgccattaatcatttccactgggcagaaaaggagcctcaaaacacagtgtggtggaagacagggttcaaacttcctacctcttcctcctaccggctgtgacagcggaccaggtgctcaatcttctggagctttgctttcctctggttactgacataagaaaaggttgccatgaggattaaactggacggcatgtcaactgtgcctgcaaatacacaagagacgccaactgcaatcctcctgctgggtccccgctcacgc

SEQ ID NO: 2227 - DNA, 598 bp, Bovine  MMBT17706
  misc_feature (1)..(161): n is a, c, g, or t
nnnnnnnnnnnnnnnnnnnnnnnnnnnnnnnnnnnnnnnnnnnnnnnnnnnnnnnnnnnnnnnnnnnnnnnnnnnnnnnnnnnnnnnnnnnnnnnnnnnnnnnnnnnnnnnnnnnnnnnnnnnnnnnnnnnnnnnnnnnnnnnnnnnnnnnnnnnnnnnnnctctgtactccaccgtggcaggaaggaaagatgggacctttgctgagggctcaggagtgtggtctcagaaccagggggcctgcctttccatctaagcgctgaccctctccagccatgtgaccttggacaagacacatamtctgtctgggcctcagtttcctcatttatatattttgggaacaaaaatagttcttatttcataggattcgttaaaggtttaagaattagtrcatacaaaacgcttagaactgtactcagaacctagaaagcatcatccatgtagtcagataacagagaggaaagccctggtgttggcatcaagccaccagggtctgtaccctggtgctgctgcttatgactgtgaccttcagctagaaacccaaacctctccgtctcagtttgctcctttgtaaaagcagaatgtgtgctaagtcgct

SEQ ID NO: 2228 - DNA, 600 bp, Bovine  MMBT19779
ttctcataattaataacaatgaatttagtcctgtccttgctacagatattttatargcaatgcttaaaagacatcatttaacactgtattttctattgataggcccaatgctgaaaatttcttggaaactaaaacaatctgcccatttgtttaaaaagcttcagtctttgagggtggatttgatttttgcaaatagccaaatgccactgagagttaaataccatgaacaagacaggtgactacatggggtgaaacagcttttttgcaaagccaaagtgtacctgaagagttatcatctascgtaaactggtcacaaaaagagtcctcaaaatrgccttgggagcaagagcatcactggtatcacgtgacctcctatggcgactgcttaaaaggaaacactcattttcatgcataagatctgatgacggcttaaaaatctggtttcatttctagagcatggctgtaaattaagtccttggaaatgtgtgtcttattttaaaaatagtatgttaaacaaaatatggagtgttygragcatagcagttaccaatccctctttaagcaaagcrctactcattaccttatctgttttgtaattga

SEQ ID NO: 2229 - DNA, 600 bp, Bovine  MMBT22154
gcgcatccctcagggcccacgtggagctcgggtctgcagcaggaaccccctgggataactccgtctgtcctgaggcccctccccagggctgcagcagagtacctgacttacggaaaagggcgttcttaactctatgcagtgagtctggcacccctgggctgcccagtctcccgctccctgtgtcctgggctgcgggcagaggcttggtggggttgatcgccagaygggtcctatgggtgaagagtctgcaggcctccatctgactgtgctctcaccccttctctgctgtctctctgcagrtgtccctctgaagagtccctgagcctgcttgcaccccctagaggtaagcagtggacgtctggggtggtgggtgaggagaagaccggagggtgaaatgtgtgaggggcaggttccaggggcctcgtctccctctgcttggccctctctgccatcttttctttctttctttctcctcttctgtctcccagagcccctgccctcctccagccatgaccctgggggtacttctgagttgcagaaagcagaaggggtttgggatcagctttcagggaagaaaagaggagagtggttcctaggtcg

SEQ ID NO: 2230 - DNA, 600 bp, Bovine  MMBT21843
gtattatttttatattgttgtcataacaaattagcacacaattagtggcttgaaacaacatgaatttattatcttatgtgtctgaaagtaagatgctcaaaatgaggtcactgggrtaaaatcaagatattggcaggattgtgtttcttttggaagctctaggggaaaaattgtttacttgccttttccagtatccaaagactgtgyacatttcttggttcatgatcctgmmtcattccaacctctttccattttgacaamtcatttgctgaccgtaaccttcttacttcttcttataarcacaactgtagttatatttaggcctactaggataaccagatttcttaatctcaaaataatgaacttaattgcatcagcaaaaccccatattgcatataaggtaagatattcaaatgttctggaaattaaggtatagacctatttggaacaccactattaggtctattagacagagtgaagtctctgatgtctcgcagtatagaaactactctattttttcagccattgtttatcaaacagaaattttatcycctggttaaaattatgttttcaaagaaattgttttctggaatgttttgg

SEQ ID NO: 2231 - DNA, 600 bp, Bovine  MMBT20471
agagacatagactttaacttattaagtcattgtatctgggagtgctttgttacaccacttagcctaataagcctaaatgaacacagaatcgaatcatctcattgtgtggaagaggcaaagagactgtgagagttcaagtgctgacacacagccatcacagtccctgtggggctggtgctttgtggggaagtaagagtgagtggcrtggggagatgggataagtaaattgtttctgagtgtgacagccaaattttgtgcaaaacatctaacatatgctaagatttcaagtcaagagacttrgagaaccagaactctggattttcaagtacttgcaagttgagctccttgattttgctctctgactctttgtcccaatacacacacacacaccccacattccacaaacacataccacacacacatcacatcacacacgcacactatctctgtcatatctaattcatctgtagatccatgagaatatgattattgtgtgaagtccatgagttttggagctgtttgtgatgcagcatttttggggcaatagacaactttgacaattgcataaataatgaaagagttctaattgtgattctagtc

SEQ ID NO: 2232 - DNA, 600 bp, Bovine  MMBT21029
agaatcaaacagcctccacacagttcttagttcctgtacatttcttagttattgctttttacactttggtaaattatttctgttccctttgattaagttccctcatcaatataaaagataggatcatgatagcacatacctcataaggtgytctggacattaaattagtatacctaaaactctgtcatttcatwttataagttgtggctaatattaatttgttcaaaagttaagcaaaaacataattttgtcattctgtgagcttcaataattcattaatttgaattcaatttattcttygtaagttgaatatagggcyttggatatcatctgaagtkyaggttacaattaaattgctgattacagaggatcactaaagatatttgtgctatgtaaagaagtctattatctgttctattctagtttttcaatgtcagctgcaatctctctaaaaaagttgaagtcagcctttattttaaaagcactttaaacacttccgtgaaataatttgatgtattggtattaatgtaattctcatggtacagaagaataaatgggctgttaagaatattgaaaaaattagggaacactgaatttaaa

SEQ ID NO: 2233 - DNA, 600 bp, Bovine  MMBT18663
gtgtgtggtatgtgcatgcctgtacgctgtcaaaattcagacccagtcacacagctggtagtagcccgtttctcacaaaagggaycatattgcttataatcctactgccaaacaatgagtattttttaaggccacttgcctcattctttcgggtccaaatgaaatctccaagcaacacaaatgaaccacagtgtccaggaaaatagagataartccrttaatagaaacaaacattaggtttgtttgagtaaaaagaaatcaaagatacatgttagctatttcctgatgaaytaatgacaygatttaggagaggaaggtggcttcagagatgcttgggaacctgggagaactgagtggatggctgatattgggaggaactgatacttagacacacttatgtggtgatgcctccagtcccagggcatgggcttttggatttgttttgtcttccctgcagaggtcaaaaattgaactgggccagctacactatcttttcctgttctcttcatgtccaaggacacccatctaagagaatattggccccgattcaaggtcatgggcagaatgaaactcatgggccccaaagtggtcaacttatga

SEQ ID NO: 2234 - DNA, 600 bp, Bovine  MMBT21851
attggaaggcttgcacatgatggtgacatgcatctgcacagacacagagtaaagcagagaatgagaatgaaggttttttaaatgtatttgtttgtaattggaggataattgcctcacaatattgtgttgcttcagccatacattaacatgaaccatccataggcatatgtatgtcccctycctcctgaatctccttcccaatcctaccccatccaaccctctagattgtcacagagcaccaggttaaagaaaaaagaaaatggaaaatgaaaatctggttctttttggaattttatctcytcttcttaactgagggctttycaggtgactcaatggtaaagaatccacctgtcaatgcaggagacatcggtttgatccctgggtcgggaagatcccctggagaaggaaatggcagaccattccattcttcttgcctggaaaagcccatggacagaggagcctggccaggtacaatccatggagtcacaaaaagggtcagacacgactgagygattgatcatgcacatgctcttcttaactgaatactagtccccaagttcagtgttcttgtattgatggtaagctccttgaggacaagag

SEQ ID NO: 2235 - DNA, 600 bp, Bovine  MMBT20009
agcataagcatggaatgatttaaattttttaaataatggctactagtttcaccctgttaaaatcccctttctgctgagtagccaccttccttaacaagatgtcagtttcgattccattattttaccctcatgtttggcaattaaaaccatctcatgtcctgtgtgaaactttctgttttctccagttcttgttgcttgggttgaggaggtgagaagtggtttgctcacccacttttttctcccccctccctttttcctccgttttcacccctctggcctgtgctcactacaaaagctggrggatttgggtgcgactttacattcttggtttcagtgaccataagtcatagatggccagtagtacactgtttcttttcctgttctttgtcactgcttctgtccccatggcaggcacccaaatgcccactgtctcatggggcacacttgttgagcttcagagggcactcagtgacctctccctgccaagtgccccccccagagaagaaatctgctgaggctctgaggccctgtctcttgctccctgccctcatccaccaaattgggtgacctagtccatatccttttgtggcctaaataccc

SEQ ID NO: 2236 - DNA, 600 bp, Bovine  MMBT18468
gaaggaaaaacaagccagcgcttccctggatgagaagttagaaaatgacagtagtttaaaattcatggggactttcctggtggcccagtggttgagactccaccttgcatcccaggggatgtgggtttgattcgcgggggcagggaactaagatcccacatgacttggggggcagctaagcccaaacgctccaataagagaagtccttgtcctgcaacaaagacccagggcagccaaaaaaaaaaaaaaaagcaagcaacaaaataaagcagcagtgactgctcccagatcccaggcacrgtctagagtggatccatcagagttctgacaaaggagatacrgatgaagatttatgtcaaggagtgggctcatgtgctcacaggggctgttaggccaggctgaagtctgcagggcagcctagcaagctggaractcctgggccagagcagacactgccatccaaccacagaatttcttcctcttgggtcccagctggactcttaaggccttcaactgactagatgaggcccaccaactctcctggatgatcttcactcagagtcaactgatggtggatgacgacccacctgcaaaacgtca

SEQ ID NO: 2237 - DNA, 600 bp, Bovine  MMBT21852
tggtttccctctcygccagctctayaaggtggacagaggggagctatcatcatcacctctggaagcttgccactaactccaaagatgtctcacatactaaaaacaaaatgaccagaaggaacctttgatccctataagagaaagacaatcccttttactgaacctattaatggactcagctgaactcacagagctgctgtttccaagcaggatttgacgctataagcttccagaargtagaattctcctggtttctgcttgtaaagtacgcatcagtgtctcttccacagtatgtcttgrtacttctgatggtaatgatcactctgagtgatttggttaagctagatactaattctccaaggaagcattactcgtgtctggagagaccgtactgatcaaaagattctaaaagtaggaatctggttcagcaggtgagcctggcaaatactgcaagtccgggaaggcatggttcaaaatattcaaccagttaacatatgaggaagaagatagatccacacaagacaccagagatgagtcctgtgaaaataaagggaggcaatgatctgggctgacaggctcaagcagggattttcagctaaa

SEQ ID NO: 2238 - DNA, 600 bp, Bovine  MMBT22105
agtcatggcatgtgggatccctgatcctggggaatgcaggatcttcagctgtagcatatgaaatctagttcactgaacagggcgagaacctgggccccctgcattgggagtgcagagtcttwgccactggaccacccaggaagtccctgctctttttgcttaatgttctctgatcaaggaaatagtttccatgcaattcagctttctgttttcttccaatagttkgcttagtttacatgttttcatacaaytggcttggagggagtattttgacacagacattttctcatttatcagaargctctgractaggcagattycaggctctgtggggagtgagttataagaatgtaagagaagaggatttgcctttatttgtggttatggaaatatttctgcaagactttcacaatgaactttgtcctacaccaactcttctctctcgactgatgcttatagaaactttttgagcatggcaaaaaagaaagtcacaggtattccaactcctccattcccacaactctcagacactatcacatacactcccaatccctgcaatataccccaccactgggatataatcttaatttgtaaagttgt

SEQ ID NO: 2239 - DNA, 600 bp, Bovine  MMBT21505
cttatttttaaaatgtgttggttcgtttgggaaaagaggttaggaggggttaggmggccaactgaaggtgagtcaagattctcttccatctcagagaaaggaaataaaaccacagatggaaagtcaaggtagagaaagtgctgactgacttccaaatcatttactcacagttctttttttttwmatttttttattttgggataattttaaacttatcaaaatattgcaaagacaatagagttcctgtacatctttcagccagtttcccctcaagttagcatcttatttaatcaagctacrcrtgtcagaagtgagacagtgacacaggggccacactgttacctaagctcggtgtcagcagttcccccattcctgccctgttgctgtttccggagccaatctaggaccccgtgttacttttaatcatcatagctccttaagcatcctttggtctgggtcaatttcccaggcttctcttgtttcttatggggcttcccagatcrtaaaaaattcgcttgcaatgcaggcgacctgggttcgatccctagattgggaagatcccctgaagaaggaaatggcaactccagtattcttccctgg

SEQ ID NO: 2240 - DNA, 600 bp, Bovine  MMBT19150
ctcctccgtccatgagatttgccaggcaagagtactggagtgagttagattatagtaactggtgaaagagaccttgaaatatgctaaagaaaataaaaggaacttctttacagagcgaagatcatgttctcagagtacagacttttgaatgaattttatagtactacaggtaagcaagccaaccttccacaactgtaacacagaaatcttcacaaacaggctgctgctgcaaagtgtatcacaaatacatgtgacaatattgtcaaggcaggttattttctatttctactgtacctctcrctacctcggtcaggaagtaggggaagctgagaagagtgaaaatgaataggagacatccatgctcctgctgctactggctgctgctaagttgcttcagtcgtgtccaactttgtgcgaccccatagatggcagcccatcaggctcccycgtccctgggattctccaagcmagaacactggcgtgggttgccatttccttttccaatgcatgaaagtgaaaagtgaaagtgaagttgcccagtagtgcccgactcttcacgaccccatggactgcagcccaccaggcccctccatccatggg

SEQ ID NO: 2241 - DNA, 600 bp, Bovine  MMBT22096
acagaactataaagtaaagtatatggatgtaaagccattatcctccagttaaaaataaatctagaaaaaaaagaaacagcaaaaagtaaagtatatggaagttctaccaagtcctaagtgttcctatgttgaaaattttgatgcttctaacatcattacatacaaaattatttatagaaattaatcttttagcagccctgctttgctggggcyctcagcatgaacttggtttccttggcaggtagtcaagccctgtttccatgttacattgacaccccaagccagttgtttctgggaccrgggtctgaagggttgtttatgcatcagagtaggggaaattgctctccrtgggtgggggtggagcagggagagcctgcagaagacaggagctcagctgggataatgagccagtctagagagagggaagaaatgaagtgggaagtggagaaaagagaagaggtgggagagaggaaagagaaaaagcaagaaagatgaagggagggtgacctttaccaggtgacagctgacttccaagggagagtggtggttgaggactagagctgtgggttctaggaagtggctctctagctgtgtgagttt

SEQ ID NO: 2242 - DNA, 590 bp, Bovine  MMBT22091
ctaatctgtgctcctctccagctgtttcactgaggaaactgtcccagccaggccttatgcttctgttaatactattctagaaccctggaaagacttttctacaacattgacatacttgaattttatctgctgtcagagacattgctcaaattttatttctaccatcaagtctttcctgattttatataattggagtggatcttcctttttctctctattctcactatrccttatgtatatcactctatttttgcaaataattttactttgtaaactgcttattgtgtctctycaataytrtattgtaagctccyagaaggcaggaccatgcattttcatttttgagcttctttcagtatctagtatgatagcagatgctcagtaggtaagtgagtgataaaaagtctaaataattgtaccttacttttggttctttacttttccttgacatgcgttgttgccttaatttctaacatgagtgaaagtaggcttacaacttcagcattataatttcaaatttttaataagtctatttaacccctctatatttctcttcattttcatcacattatatattagatagaagagca

SEQ ID NO: 2243 - DNA, 600 bp, Bovine  MMBT20883
cacaccaggcctccctgtccatcaccaactcccagagtttacccaaacccatgttggtgattgagtcagtgatgccatccaacgatctcatcctctgtcgtccccttctcctcctgccctyagtctttcccagcatcagggtcttttcaaatgaggagaatggatacacatatatggagagctgagtcccttcactgttcrccagaaattaccacaacattgttaatcagctataccccaatacaaagtaaaagtttaaaaacaaaagaaagaatcctctttccaatgaaggggatgcgrcttagatccctggtcagggaactaagatcccacatgctgtggggtatagccaaaaaaaaaaaaaaaagkaaagaaaatctaatagtacttgagtgtaacatgtgttttaaaaccttaattttttatgatgggaaatttaaacatgcatgaaatgcaaattgactatgatctcccaggcgttcatcatccagtttcaacagttacaacattttaccattcttatcatatctccttacctctccttttccttttttggcaggggaagacactttaaagtaaagcccagacatcatatcatta

SEQ ID NO: 2244 - DNA, 600 bp, Bovine  MMBT20145
tgggcttccctggtggttcagcattaaagaatccrcctggccatgcaggagacagttcagtgcctaggttgggaagatcccctggaggagggcatggcaacccactctagtattcttgcctggagaatcccatggamagaagagctatgggattcagtccatggggttgcaaaagagtcggacacaacttagtgactaagcaayaataattccatttctgcacagcctcygatgcccttctctgttcgcatctacttaggtcacttaataaagaggccttcggcagagatggagaagccygagccagaaaagaaggatgatcctgccccgttaaggactcgtggagaagagaaaagagtagtgaccatttccaggctgagagaaaccttttcccttcgtcactcgactgagaacaagtccccggggtccgaaggccactgatccgaggcggggtttctccgaagcagaaaagcagtgcccagtttcctagagctttggggccccccctgctcccagaagcacatttctgaacctggggaggaagggaggacttctgctcaggggccccacgacttgatgagcagagtggagatggaggag

SEQ ID NO: 2245 - DNA, 600 bp, Bovine  MMBT01820
acaggggtaagagatatagagagccagtcataactggtttgttcaaactgagcccagagccaggagacttgtgacaggaggggcagaaaggccagatcaacttggcagcaagagtctcaggctgttcagaccagttgaacatgctcgtgggagcaggttgcatcctggggggaaccaggcccaaaaataacggccttacccagcacgagggtgtcatgactttggttttctgaggctgactcatttcgacacagctttgcaaagatggcaaatatatactgtacaagtttgtctgcaaaytagaaatcaagaacatggatttttatgtcaggtggcagactgtaagcttaaaaattagttctaatgatggaacattctacttattatggtatagagcaccatccaattctttcatggatgtctgaaatgatgagaatatagtaaaagagagaataatatttctcaggaatctgtggacacctagaggtctaaagacattattttcaggtccttgtattttgtggttgctgctactgctgctaagtcggttcagtcgtgtccgactctgtgcgacctcagagacagcagcccaccaggctc

SEQ ID NO: 2246 - DNA, 598 bp, Bovine  MMBT10352
  misc_feature (1)..(45): n is a, c, g, or t
nnnnnnnnnnnnnnnnnnnnnnnnnnnnnnnnnnnnnnnnnnnnncagaatcgtaaacaaatctccaatgccaagatgaaggggctttcctctgattcatgctcaggaagcagatggtcactactctcatgggataacagcaatattcctggtctttccagacccaggaggtcagtgatgattccactgattctcatstcttcaaaaagacttttttttcttgaccacatttatcagctataaatgggctctaggactcaataataccaaytcaagtcatgaaacagaattcttctattytgcttcatatggtttgttgctggagagacaaagatgccaccccacctggaatggcttcctcttggtaaaggagggttctctttgttgcaagccaaataaagtaagatgtayrctctgaaagacaagccacattctctggaatttcccaagagaamcttgctgtgcatttctgcctgtatatacatctgctgtgactcttaacatctccttaaataattctcacaagccagttcatgatacgtttttatgtatgcccaagtgagatctttctatatacaaaatccaatttgaacttggg

SEQ ID NO: 2247 - DNA, 598 bp, Bovine  MMBT23441
  misc_feature (1)..(176): n is a, c, g, or t
nnnnnnnnnnnnnnnnnnnnnnnnnnnnnnnnnnnnnnnnnnnnnnnnnnnnnnnnnnnnnnnnnnnnnnnnnnnnnnnnnnnnnnnnnnnnnnnnnnnnnnnnnnnnnnnnnnnnnnnnnnnnnnnnnnnnnnnnnnnnnnnnnnnnnnnnnnnnnnnnnnnnnnnnnnnnnnnngtttcattactatataacattatagaatccttgcccagaagaatattagtctctatttctgcaaaaacatgtggtttattwwtttttttccagccccagatttagataagggaggaatgttttmagttgttactcaaagaaaagatatttaacttttctaaatcctggtgtgagtttatgtatgtatttccttcgaagttttatgatgctatagcttcttttaaatgtttgcacctctaaccttttcataaactctgtctatgattcatttaaacaacgtaatcaaaattgccattcttatgaggttcctgagagtggatagaatttgtaatattaatcagacaatttggggcccttatatacataaattgcactcatagaattgatataagcgaagaattagaatgggtggccacaaggaa

SEQ ID NO: 2248 - DNA, 598 bp, Bovine  MMBT23373
  misc_feature (1)..(211): n is a, c, g, or t
nnnnnnnnnnnnnnnnnnnnnnnnnnnnnnnnnnnnnnnnnnnnnnnnnnnnnnnnnnnnnnnnnnnnnnnnnnnnnnnnnnnnnnnnnnnnnnnnnnnnnnnnnnnnnnnnnnnnnnnnnnnnnnnnnnnnnnnnnnnnnnnnnnnnnnnnnnnnnnnnnnnnnnnnnnnnnnnnnnnnnnnnnnnnnnnnnnnnnnnnnnnnnnnnnnncgcgtagagcatcactacagagaaggggatcagcagcatcatgacacagcaaatatacatcaccatttcataggcagctttgtcaccayaggccagcctcagcatggtgggtgcctcacagaagaagtggttgatcttgtgtgaagcacagaatggtagagtcattgttataggggtgaggaggaagctatccaaagcaccaccaaaccaagagctggccaagatcatccaacagacscgatggctcatgaggacaggatagcggagagggttgcagatggccacgtagcggtcatatgccatgagtcccaggaggaaaaattcggcccctacaaagcccatatagagaaagtattgggctgtacaggcaataaaggatatggttct

SEQ ID NO: 2249 - DNA, 600 bp, Bovine  MMBT06433
aaataatattttacatgcttcctggatcaaagaaattcattttcacctagtgggtgtagccaataattttggcaacaaagtggaagaatcataaaaacaaaaaggaaaactaaaccccraagaaattttggatatatcgcagataagaaaaaaattgtagaacatgaggacataatgtaccaaagaagtcagcaatagtacaatttttttttgtacatagttttgtgttttctcagtcacacaaagttcagaaattttggaagtggacttcactttttaagacttctggagttaacattycagcatttacttaccaaattccatctcgagacaattttcttctgtggttaagctgtgactttgaaaaatatgctgttacacaagtaaatttgaacaaataagaaaatatgttaatttgaaatgcctgaaaatgtggcttaagccataagaaattgccatttcttattggtatatgtatgataataacatcatgcatgactatgaactagctctgaaagtcaatttgaaaaaacaaacatgtttaagaagtaaaagcagcagtgattttaaaaactcctttcaaagtttattttaacttta

SEQ ID NO: 2250 - DNA, 600 bp, Bovine  MMBT02231
ggttgtcttcattgggtacacaatttttagagttgcatttatttttaacttaacacaaaacccttgcctgcaaaccactcaaataattgcagtgaaaagaatatcatattcaccagtataagatctgctcttttgttttcctcaaagacaggatttctttcaggaaaatcatgcattgatgctttcctaaagctgggaatgttaacataaggcactcctcatttctgagtgtcctgcccattcccacctccagaacctgacaaatctacttaccagcatgtcaagtcacttctcttgaaraataaacaccagaaagtaggaggctcaagagtgacagaaatttagaccgaaattcagaaacggacatctaaagttaattacagccctgtcattcacagttatcacttcagctttcattttttctatcaaaactaacatatgtctcctacttttttctctgcgagattaatgtcctcttattcttagttttaaatttctctgagtatcagtccatggtcactttttggaaaataatcttaaacatgaaatcttgaaatgcatttttgtttggcaaattttataatgaaaaagtctgggcaa

SEQ ID NO: 2251 - DNA, 600 bp, Bovine  MMBT08423
aagagaatgaaaattcctcaaaaaactaaaaatagaattacccgatgatcaagcagttccactcttgggtatatatctgaagaaagcaaaagcactaattcraaaagatacatgcttatcaatgttcacagcagcattaatttttcatcagtagaaggcattcatttttttcaagtaaaatttatcaagatcagaaccagcttcatgggaatgtgacctgtgcaatcagtcacacaggctctgctcttaaaaaggctgycacttagttggatcctgtactcgtttaatgctctgctgtcmctatcttgaatgcttagcaattttttttaacaaggggccttgcrttttcattttgtactacttctccccccttgatttattacattctaaacaaattaactgacattctaacataatccaggctaaaacacagtacatctacctggaataagccagaagttaagaaactaggcaaaaggcaaattcagatctcctgagaatagtcaggttatatgaaataagatcaagcaacaattcatactccttactatgagccctaagactctaggtaatctagaccgtgcctacttctctaacttc

SEQ ID NO: 2252 - DNA, 600 bp, Bovine  MMBT08023
tatcagggactaatcatatgttcatcaaacattaatcaagctgttgctctgtgctaggttctgacctaaaggttggggtatgaagataagtaagttgctgttatcttcatcctagaggtgtctaatccagcgggaagactcacaatatttcctcagcctcccctgaaaaataagagcagtattttcacagccattgatcaagagaaagagaagggaggtggctggcatgcactttgttagctctccagggctccctcctcctgagacctgagtcgcacaaggaagcagattgcaagaaayccagcttattggtacctcccgacactgagagggtttagctacagcactttttggagctcttcaaggtagtgataatgcttgacaacttctgtggttctctgggttcactttataaagaggaaggggaaggggctcactctgatatagtgaccctttatttggccccttagagccacagagatctcttctggatcacatgccttacaggcactgtttgggtcatttcacctaggtgaggctaatccatcatagcaagaggaaatctactgtttacctgtttttccattattatagtgtagc

SEQ ID NO: 2253 - DNA, 600 bp, Bovine  MMBT05397
gttacagtgattatgttaaatttttaagaccttggtaaaaaaaaaaaaaaaaaaggagaatccacctcacttctactattctgaagcaaatagcagatctaattaaaaatttacccaggagaatgtcagtcagacaaaaacttatgaagaaaaactacaacataaaaagtgaaagcaagcataacaagcaaagtaagatgtaaaggtatgcctttgaagctacattacaggaagcaaaagaaagcttttaagcatatatataatggataagcaaaaagatcctactgcatagcacagggyactatattcaataccctaaaataaactataatggaaaagaatatgaaaaagtatctatatgtataactgagtcagttttctctataactgagtcactttagtgtatagcaaaaactaatacaacattgtaaaccaactatacttcaataacataaaattaaaaaaaagaaaactaagtaaaaactgctttgctctcccaagaaaattaaatagactcaatgagagataaactcacataaaatggaatatgacaggggttaagtcaaaaaaagaatatgagagttaagccaaaaaaaayct

SEQ ID NO: 2254 - DNA, 525 bp, Bovine  MMBT18597
gttattcagcctaacataccccttgtctgaaaatttgctaaaactgaaatctatttactactatctctaaacagaccatcaaaggatggagattccaaagacctacttttgttatgactagcaactataaacctaggtttctaaagaagtttattttcaaaaagagctgtttgggggaacwtctgagaacatacttcctgtttttagactaatagatatagtcttcaaaaatcctgaggttcagatttgaattaaattttatcatgttcgttttgtgtgttgttgaatttctaagttatygtgtgcttctgcgttcttttgaattaatttatttttggtggccctaggtctccattgctgcgagccagctttctctggttgcagtgagtgaggactactctctagtttcagcgcttctcatggctgtggcttctcttgtttgggagcacaggctccagggtgcacaggcttcagaagttgcgtgcttggcttcagcagttgtggtgcacaggcttagttgccaca

SEQ ID NO: 2255 - DNA, 600 bp, Bovine  MMBT17546
ttattgctaatattattagtcttcaaacttcactagttctcatcctttctagtttctgagccttcctcaaacagattactatggtgaattctcattcacctcaaatatttccttctgctgattaaaggaatcatgctttctctatttcagcctgctgtactcattctcaaatatcaatatatgtatccaggtcagaacaatatacattatttggccaaagtcacatttatcccatttttcacagcttatttttttcataaaaagttgttttgtaaaggttgtcatttaatgagggcttayttggtgattgatatataaaaagaatttaataaatgcatgaccagaaatagttttaggtaatcatcattatccacattttgtattcagatcaccagagacttgaattaagcattatgcaggagttttaataaaggtaggatgggatcagaacatagaagtaagttacatgtccttggtcacatagtgaggaaaaattgcattagtcaatcccagaactgtctgattctcccaccttcatagtaatcttcctaactaattccaagactctcaaaatcagcaacagctgaaagatctttcttc

SEQ ID NO: 2256 - DNA, 600 bp, Bovine  MMBT13708
agactaaggaatgtagaggggaaaaaaaaaaaaaaagatgtttatcctttcctcctcctttagaattccagactcctgtcttctcttcgagagccccagaactctctttcctcctcagggaccccagacttcttatcaatctacctagaaattgactgtctcagtcccaagatttaatttttaaaagctgttttaggttcacagcaaatactgagcagaaggtgcagatatatcctatatacttccttttcccagatatccacagcctcctctgccatcaacatctcccacyagatggtmcatttgttacaacggatgaacctacatagacacatcatgaccatcctaaattcacagctcacctgagggttcactmggtgctktactcctgtaggttctgacaaatgtatgtgagctaaatgcacctgcgctgaactgaaagcaggagtcggagggagagagataggaagctgttgacttggaagatggaggagggggccattcgccaggaatgtcagtggcttctagaagctggaaaaggcaaggaagcctagaatctccaaaagaaagacaaccctgccgacacctttgattttagcc

SEQ ID NO: 2257 - DNA, 600 bp, Bovine  MMBT17853
actcagtcactttgattgtgtccgactctttgccaccttatggactgtagcctgccaggctgctctgtccatgagattctcctgacaagaacactggagtgggttgccatcttccagaactcagacctacgtcttttatgtctcctgcattgacagatgggttctttaccactagcaccacctgggaagccrcttcccatggttatatagtatgtggtaagtctaggaataagcaggtgtctgctattaggctgttattgcctgttgctgttctcatctcttatttcagttgtcttgtcrttagtatttatttagttaaaaatgatttaattcccattttaacatgaaaacttgaagtttcaatgttgcctgtcttcaaagtcttagccagtgttgatcactttataatgatctccttataatagaaataattgaattactgtgtagtgtattagaaaataatgcagtattgtaggtcaattatacttcagaaacaaactcagaaaacaagatcaaatttgtggctgccagaggcagggcatggtggggtgaattggatgaaagtggttaaaaattatgaacttccatttttaaggtaat

SEQ ID NO: 2258 - DNA, 600 bp, Bovine  MMBT19737
tgtttgggaagaattcattacagtccattactgaagttacagtataggtatgagtgctcttgaatcagacaagaaagtcaattaatttgctgccatgtttcctatgtgggaagtttctaaatagaagttatatttctggggagcatgtttagatatgatacatttaaatgctccctcctgatgttttgtttgtttgtttctttgtatgttagtatgcctgtgtgaaccttattttacagaatgcattctgcttatattacccaaatagaggatggtggctttgagaactgaaaaagcaartaggtatgttttctttgaattgaatggaagtttctgttcagctctgtcgaaaaatgcacattacatactgcatggcatttatgttgaaatcaggtatgagtaatgtgagaatggaggttgagttttgacagaagattttgcatttattacctctttcaaaagaaaggtaatgaagcaagaaatagtcacaaataataagaagcagttgaatacacaacaatctccactctcctttaaattttcaacctctgtggagaaatatgcagttctttcaatcttatgttaatatatggaaagcag

SEQ ID NO: 2259 - DNA, 600 bp, Bovine  MMBT04037
tttatcattaataacgtgtatacagtcctggagaatactacaatatttactttagttgcttactatgctgtctcttattagtgtaaatactgccaagcatgacttacacagcaatggatatcttagtgcacttgagtgtctgagacctgttttcaaattttaaacatatccaaatttcatgcagatttttctagccaagattgtgtttagttttgttttccttaatttatttttaatctgcaaaacgtaagcactgttgtgagtgggtggggtgaaattggagactggattctattttcrgaagcttgaatgctgacccttacaagccattttgtatgtgagactgaatgtgaactagaacttagaattcattgacattgtatgtttcaatctctactgaagattaagatagttatcagactgagtcttttaaatacggagttttgcatccaatgaaatcgtttatctatctctcaaaattaaatactctgttcaatagataaacttccaaaagatgtctctaataacagcaaagtaaaagctgatggtgtgtattcacgttttcatgtaaaatttggtcttaccaaggcacttgatttc

SEQ ID NO: 2260 - DNA, 600 bp, Bovine  MMBT09141
tgtatttgggtgtagccagttaacaatgtggtgggagtttcaggtgaatagcaaatagcatatatctgttctccccccagatcttacgtactttaaaattttgagtgtttggatcctaactttaggatactctttggtaaattatttagaatgttacagacagaatacaataagcagaatgactagaaatttatacaggcaggtactattacttattactcactataakataaaaagtgcttcttttagttcagtgtttattcataacctttttcttgattaaaaaacaatttccgtttkgagtgaaaaacaaatgcactatgtttaagagtcttagggtagattgttttaaggtaataatcgtcaatttatattattcttttcttcttcttgaattggtttaaattacttggtttgactttaaagtggttttggtagttacattaatatatgttaatattaaatgatgctaatgtttacgtattctgttgtttagggaacagactttggaaattagaatgtagataccatttgatgtatttaatctctattccatttcagaatctcaaaactttacaataattacaaattgtacttctg

SEQ ID NO: 2261 - DNA, 600 bp, Bovine  MMBT04021
aagtggacagttcttgattatttgctaaaatttccatttgaaaaagttatatttcattttgacatgatggtgataaatcactgtagacagtggaaaatatcacatgctcaaaaaataaaagtacaatgggtggagtactgatgccatgtcttgtgaatacatattaaaatgtgtctaaaacaatcttttaggtagagtgtttattaaataatcagtgattcatacaaattaagtgcttggtaattatttgaactttaagtttgtataatttattcataactcttacttttttttcttatrtgctaagtgggaaagataagccagagaaagaattgtgtctaatccaagatctaacactgtgtaacaacttttattccttctgtgtatccttcactgagcctttagacttttgatagagaaaaacatttgtctctgatgtccttattgtattaactaccatcttaaattcttggtattgggctcaagcaaactgttaactcaaactatttgacgtcaccttctgctggttatgtatcagataccaactaaagcagaaagcacacacatccctgatctaattctgtattggtaattaaaatt

SEQ ID NO: 2262 - DNA, 600 bp, Bovine  MMBT17907
ttgccaaaaatatactttcagaggaaaaaaagcaaaaaacaaaaaaacatactcttggtattgatcctgagagaagccatgtttcctggatgacttgaggcttcaccttggccttgggaaactaaaacattatagctctcttgatttttaatagctaaagtaaacactgtgggagattttggtcatcaaatgacatcaatactaccagcatcatcactatctattcaggtctccaaattgaaagtcagcttcaagaaaagccatcgtgaagaaatatcctcttctccgagatcagaagarcctgagtggactgagaaaggccaagctggaagcagctagaggcaggagttggctctttactgaaacaaatattccttattgaaccctgarggagtgatgggttctaggaaaaccagtaatagccatctccaagttgaagggaaatgatagcagagaggataccctgaaataaacactttgtgtctcccagaataggtggaaatcaatttatctgaggaacaaatgggactgattaacaaacagaatgactggactcctaaggggttttagagttaattgggaggaggttaaggagttcta

SEQ ID NO: 2263 - DNA, 600 bp, Bovine  MMBT18627
ttctgtagtatgttacacattgtactaacactgggcaatcctttggccattcatgtaagttaaacaccaacttttctagggatagacatgttaatatttgtatcaataaagccaaaccttatctgcccttccttttttatcctgagttctatttgataatcaaacaatagcaacaggccccttgagggctaaaaaggaataatcttttgtctgagtctcaaatccattcactttggcttaaggaggaagctgctctcctggctacctggcttaccagcttagtgccctcctttttcttcyaccatctttctccaatctttactctttggctattgcctcagcccctcaatcaactatggtgatttttctatgttttgaagccagaatttcatgaaaatgtcctctcatataattttactatcaccctcagtccaggaattcacaataaccatgttaaggaaatcttatattctgacctgatttttaatctattgagtccaagaagctcagccaaccagaagccagaggtaggaatgcagatggagagtcaaaatcattcttggcatttcaaagacaacacagactaaagaaatgctattg

SEQ ID NO: 2264 - DNA, 600 bp, Bovine  MMBT19466
tttcattttaagataattaagaagggtgatatattttccccagaagtttacaaagcaacattaaaaagttatgtatattttaatatggagaaaaaattattaatattmaactagattctatgagattgaaatttcattttagttatagttttggtactctggaaggtacattaattccttaagacaatgttatgtattcttcaactgtttcagactgaagcatatttatataactattacttatktccaatataatcatttttttctcctctgaaaagttgctgatttctcctcactctkatggcaaacatgtagtaattattgataagacattcaactaragaaaaacattgctaaaaatattatcatgattcataattaaaaatctctttctgggtatcctagtcaataattcaaattccctgcagcattygtttctgccattgctatttttaagacttacagaagcctgctgatcaagacatagatttacatattttgcttttaatgtattattgcttcatttctcttatattctatacctttgtgtacaaccatccatgttgagaaaactctccttatgcagtgtagaagttggaa

SEQ ID NO: 2265 - DNA, 600 bp, Bovine  MMBT08021
gtccactggcccacttagcatgggggacaaaaaacccaggctccaagataatatactgtggacaaatttgactaagatttgaagcttatgagggggaaaagtttttttttttttttttttcccctgggtctttcttctaaatactgaattaactttctggggattactttagaaaaacctcatagtaatagcattaataatattttattgatcctaatagaaaaactcaaaaaccctaaagcactcaaattttgtgcasacacaaaagaacatgctagaaagtgaaatgttacagtgtgyttaatgttgttaacacagtaagtgtttctggatcctcaaggaaartattagaggctcagcccaatgtatagtgtgggaattgtgacccagctttccttgggaaagttagagagctccctttcaaaagttttcatctcatgaggtctgaaggtattgcatgggccctgcttggggaaagaggaaagtctgagtgacttcaggttgagggggtgaagtagtgacagaggctrtaagccacagctaagctcactccacttttgggtggcaccccacataataatttggtcagcagttttctca

SEQ ID NO: 2266 - DNA, 600 bp, Bovine  MMBT13384
aaaaaggaaagaaaatcaaacattctggtacatgtgaggaagacaggctgactctgagtgtccctctcggagccagccccagagccctccagccccagggttttaggaggctctgtaaggagagctgcaggaggctgaggggagcccgggttggtggtgaaggagtaccaagggggaggcagtgactgtgaggatcaaatggagataagtccgggaggggccaaaggacacctgcatgattgggggaggcggcatggagaggggccagaagccagtgaagggagaggccggagcttggcygaagtcaccctcagaagcggaaagctgctgcagtgactatgtttccccaggagagggctccaccttgggaaaatggctgcatctccatggttccgaggatctctgaggttccctagagaagccgttcaagggtggggcatgggggtcccttgcctcagttggaggaatgggagccagggacggtggttgggggctggctggctggtgatggttgagcctaacctaaccatgttagaagcaaggaagggaccaggaagagcacagagccacagtggccaggattcatgagtggggacagaa

SEQ ID NO: 2267 - DNA, 600 bp, Bovine  MMBT14493
gtcgatgtagggagactaggaattaatctgtattttgagacaaagaaagggggtctaaattaaggcagttttgagacctttcagtgggccataaatagagcatggtgatctctttgcaccaagagatgaggggcagcaagaagttcaggtgccaaagggcaacagcttaagagagtgatgaataatgatactaacactaataacaaagcaagtsggggagaaaatgtttctttgggacatagtatcagtaatgcttagaacatcatgtggaaatgtccgggaagcaactagagatcttgrtctatagctcagaaatggtggatgaagcagaatcgctccaaagcatgctcctttagcctttagtttgaagagactaaaaatggtcctttagcctagaatcaatggtttccctaacatgataacacctactttctttctcattcccttttaaaaattgryatgatgttaaatattttctttgcatgtgtcaactaatactaaggtgacaataaaacttactgtataaataaagttagggagggtattaatatggcagggaaattggtatagactgagactgtccttggcacactgaaacat

SEQ ID NO: 2268 - DNA, 600 bp, Bovine  MMBT16570
gcccaagtaactatatatgtaagagtacatatacatataagccatgcttctgcagttaaactagaaatttccatgtgttccttcatagatattgttttatactcaatgaaatgcagtgtcactatattagagcctgatttctgtttgctttctgtagagcactctttttttaaatcccaaataaaggtacaatttcattttaagataattaagaagggtgatatattttccccagaagtttacaaagcaacattaaaaagttatgtatattttaatatggagaaaaaattattaatattmaactagattctatgagattgaaatttcattttagttatagttttggtactctggaaggtacattaattccttaagacaatgttatgtattcttcaactgtttcagactgaagcatatttatataactattacttatktccaatataatcatttttttctcctctgaaaagttgctgatttctcctcactctkatggcaaacatgtagtaattattgataagacattcaactaragaaaaacattgctaaaaatattatcatgattcataattaaaaatctctttctgggtatcctagtca

SEQ ID NO: 2269 - DNA, 600 bp, Bovine  MMBT04043
aagtctcctaagggtggctaacaggcttcaaacttccttatgtctgcctttggtgtctgactactgctattttcttcctattttaatatgaatgttactgtttcttgaagtatctggactgtatgaaatttactatatatatctctttctacctactcaaataaagaggtatatatctccaaattttatagacatatgtataaagatccatgatgcccaaatcattaaaaaattaattttaaaagtcaacattgtgcattgtagtttttacaaagttttaaaaagctaatttaatagacygctctatccttccatgtttatattctcttatacaaaataatttccaaatataatcactatttcttcttaaatactgtcctttatcatttaaaatttgtaacaaagtactagtaaactagaagtcaaccaaatcttgagtataggagatatataacttagactgatttatatttaatatttatgacaaataatttggataatatagtagtatacttcacaaaaggcatttgtgtgcacttagtaaaaagtattgtgtacttcatttgggtacgcttagtgttcaattttatttttgtttat

SEQ ID NO: 2270 - DNA, 600 bp, Bovine  MMBT07388
gagcaaaaaattcagctctagagtaagtaccatatcaagattaatttatgtcggttatggttatgtagcacaggtgatattcagccaccaggacaatgaatgtgtcaaaatattttgaatgacttcaccttaaaargagacaaagacaagcatctattaacacacagttcgcagtagaatattatctctttaaaagcaccacaatggaacgctttccagagcacaatctttgaataatgttttaaaatattattttaaacacactgaagaatatttcggattaagttggtgagcattttyactaaaatacagagcaaatcttccattaccgtttctgcccctcccccaacatctgcctaaactgccactaggggtcagtatgaagacacagttctccaccgtcggaggaaaatgggctgcggaaaacctttccccgtgaaaagccctaacaaagaccataactgcacagctttagcattaccaagtccagcccgtacatcaggtctggaacatgagtttgcattttttcctgagactgcattttaatgttgtaaatcacagtggattatttctatggtcaatatttctttgattaaaaaa

SEQ ID NO: 2271 - DNA, 598 bp, Bovine  MMBT09330
  misc_feature (1)..(11): n is a, c, g, or t
nnnnnnnnnnngatcttgttctcctaattgctctagtggcccctgggagtgaacaggagcctggggtggaggatgttcttaggttcatgtttggaacacagtgtataatgatgctcacattccatttataggaatggcaaggaatttactctgtcaggaagaaaaatggagataacgtacaacaaaatgtgaagataatacctgtcattggacagggagggtaagtagaaaaaacaagtacttcagtcagtataccatgtttggcttattgcagcatatgctttaaatacttaagtaagytaagaactgcacatggaaacttctaagaaggactggtaaccaggtcagttaccaccaaagtgtgaccttccagggtggcttccccatggtcacagcccgaccctcctgctggcagcccagagccaccagactccaacagtcctgcttaagctgtgtgagcacatacataaaagatgaaagcatttaaatcygatgccacctcactgagttttgtgccaagaacactcactgggactctatatttaaaagttttctgtctggcttagcaggtaaagaatctgcctgcagtgtaggaggc

SEQ ID NO: 2272 - DNA, 598 bp, Bovine  MMBT12480
  misc_feature (1)..(52): n is a, c, g, or t
nnnnnnnnnnnnnnnnnnnnnnnnnnnnnnnnnnnnnnnnnnnnnnnnnnnnctttggtaaagaaccccctgccatgcaggagatgggctcaacctctagtggggaagagcccctggagaaggaaatggcaccccactccagcattcttgcatgggacatcccatggacagaggagcctggcaggctaccattcatggggttgcaaaagggtcagccacgatttattgactaaataacaatactatattcctatatwattataaactataataaatatgacatagccttgtagcagaatytttactcatatattcaattgtttgttattgctagatccctagaaatagatttactaagtcaaagaaaatgtgatatgtaaatatagttccccaagttgcctattgtccattttattttgatgttattttgcttggtatttccctcctcttttcccccgatgcttattcattctttatctctcaagttgaaagctgctttagctaaaagaccttccctgaacatttgatgaagaatatagaagagtatattgagtttgttatgtttattatagcaaactttttttttcacaatactcct

SEQ ID NO: 2273 - DNA, 600 bp, Bovine  MMBT16692
cctagcaagctttatataaattagcttttatttaattaacctttattcagtaagaattttcattaaaacttcttgtttttatatgttatgcattctcttcataaaaaatgaaaaagctttctagaaggtttttttttggtattattttattttattttttaactttacaatattgtattggttttgctctgtggcagattcatgaagtttttcttttattattaatatagaaagctgaattttagcctatgtagaagttaaaactttggatgatgtcatttatagtcaaggtcacaccaraagtatattataatgtagaagctaggcctctctggtgagaaccactcaagtttgatatagaaaagaaggacataagaacggctcttctctgggaccgtcaccaattgaaaacaacatgttcctgtccacagataagcccacacagactatgcaaatgtagacggtggcgggggtgggggggccccataatcagatgcagtaggtggaaacaaatatgcttgaaaagtgtgaatttatttaaaacgacagacagctcaagaagctatactttttagaaaagtgcatatttaaaaaaaataa

SEQ ID NO: 2274 - DNA, 600 bp, Bovine  MMBT17737
cttttcaggtcctatagtccattatcgtaggagatacatttgaaccagagggtgggagatgggggctttataaccctcacgttatacctgtaaactgctgtctgatgatgcaactgtaagtctcaactcatttatagtttgacaaggtgatttttgtgtaccttgttcagatgatcatcacaaccttatgaggtaggtagtgggtttcattagaccattttacagggagattaagtagttcagaactttgatgtcatgaagctggacctaggacttgattctgactcaagacggagggcycccccacattccatacaccatctggtgggatggactctgcaaaaaatataacaccccacctagggtgaccaagtcatcactattggcccaggacttttccagtttaaaaactgctgctgctgytgctaagtcrcttcagttgtgtccgactctgtgcgaccyagtagatggtcgcccaccaggctcccccatccctgagattctccaggcaagaacactggagtggcttgccatttccttctccaatgcatgaaagtgaaaagtgaaagtggagtcgttcagtcrtgtccgactcttagc

SEQ ID NO: 2275 - DNA, 598 bp, Bovine  MMBT18891
  misc_feature (1)..(29): n is a, c, g, or t
nnnnnnnnnnnnnnnnnnnnnnnnnnnnnttttgaccctagttgatctttaccttcccctggtcttaatctgacttttacaccctgcccactgctccacccccatttaagagcatggagaccatgttatctccttagacctcaaaccacctgtggggtcaacatcactattctctatttttcagatgaggaaacagaactaaagcttaggtaaacttgccagtgcagctagaaagtactggaactagacttttatctcagttctctttgattttaagagagttaagggctatagaagatyagaacactattcagtccaggagacagatgctgagaaggcacataatcaaactcaatcagactctgcaagtcatgtggctgtgaggaaggggaatacttagtttcttaggcagttaggaaactagatgactttctagtaatcagaaaggggcacttttacgagaagcaagaggaagtatttctttatctgggggaggagtgggggacggtacatgtgaaacttattattcccatgagggagcagtgactgcaaaacatagatgaaaaagagatttctgtccacagatgatggttaattg

SEQ ID NO: 2276 - DNA, 598 bp, Bovine  MMBT19683
  misc_feature (1)..(128): n is a, c, g, or t
nnnnnnnnnnnnnnnnnnnnnnnnnnnnnnnnnnnnnnnnnnnnnnnnnnnnnnnnnnnnnnnnnnnnnnnnnnnnnnnnnnnnnnnnnnnnnnnnnnnnnnnnnnnnnnnnnnnnnnnnnnnnnnnntgagccgtctttagagttggcatacatactgtcctctacccgtcctttaccttaaagatgttttaatagaagccttgactcagtcacccactgtaacaacacctgtcctcgccaaggttacaaggctctgagacagatcctggagggcaagcacagccctgcctggtgctgrctgcaggcaggcaggaacaccacgcttctgcccaggggcgggcagcccagtggatggagaggcgatgtgaggatctggycgcattgcattccatggggccattagacagagccgtatgagcgattttacaaggcaattcccaagtccaaatcsgagtattaaatgcagggggtggaaagcaaatattacaaaattaatctacttaaaacaggaccatgaatcttattacatttccagccactatacgttcatgcttaagcaacagatgttaatctttggcaatgaaattgcttccacc

SEQ ID NO: 2277 - DNA, 600 bp, Bovine  MMBT22181
ccagcctgtatgagaatgccagtttattgcatcctcgccagccttaggtataagwtcttgtttggttttggtgttattagctatgggagttgaattttattaagtggttttakagtatttcttgaaawwtttttttcctggtgttttcattattctgcygtcttcctcaatattttaaaagatatttatttctttatttcactgcaccaggtcttagctgtggcatttaggttctagttccctaaccagtgattgagcccaagtctcttatgttgggagctcagagtcttagccactggrcccccagggaaatcccttcctcagtattttgccatattattatgggagcagagtaaaggaggrttatcaatagacatatcaccaagtttacaaaagaaaagagctagactcgatgcttcatagtttcttctgtgtctttaatctgtgttcatcctgatggacattttcacatggattatctgctgtcaccagaaattcagtgtatctgaagctgaatacccttatttgtcctctaaaccacctctccattttcccagtcatttgttgccagaaaatatttttaaaaagaaagcaaatgga

SEQ ID NO: 2278 - DNA, 600 bp, Bovine  MMBT08637
cctggagaatcccatggtcagaggtgcttggcaggctacagcccatggggtcacaaagagtctgacacgactaaagcgactgagcatgtacacacagctaacttaatacctatcgcaaactgatttttcttataactgatttttgttagcagttaaacctgtcttttctactgtcacctaatctacatctttttaaactttttctccaaatagggcaccgtaaaacaagcttatacaaatgctccagtggtagacaatgaactgttacgactgagtcttcgattatttaagcgaaagackatgtgccaagccccaggacctgaaaagactgaagatgataaactttcacagtccggtatccaacaggaactctgtgtrtcttaagactgaagtccaggtacatttgtggtactattttccttcagcagtgtgtattctttttcaaagttctttggtttgacaagcattattagtgacaaagacagaaaagacttaccagccatgctaaaatagtgatgaacttttttaataaagtttaaagacactagtttggcgagcttaagattttacataaatttttacactgtccaaaataatgtg

SEQ ID NO: 2279 - DNA, 600 bp, Bovine  MMBT19733
gctcatgaatatatatatactatgtgatatcaagttaggttccagttttgatcatcagaggtaagaaaagtaaatgattcagttttccttttatgaaaaatggatttttttttacttatttacttttaacaggaaggaaaaatgtttaaatatacagagacttgcagatatacagagatatacagatacatagagacttgcagatatacagagatctcagtttccctttggaaacatactttactgaataataaatgttaaaatagtaacattaaaattctgcaawgccygccttttttyatttagcaagaaaaaataattcctgtaccctcaccaaggtctaaaatgtraacatattaaatggtgtttcgaagttaggtttggacagcgcccttttcagatccttttatatgtgtaccaatttttttcataaaatattgctrcttgttattaaaacaatattaatattagtgactcaaatactttggccatctgatgcgaaaaactgactcgtttgaaaagaaactgatgctgggaaagattgaaggtgggtggagaaggggacgacagaggatgagatggttggatagcatcaccgac

SEQ ID NO: 2280 - DNA, 600 bp, Bovine  MMBT21403
atagcccttcactttcccagtgttgacaactgaagagacatgaaacaacacttctggcacaaaacatgaaacttaccactctcgtcatcaatattgaaccttccaagaccactgccatccctgatggagtactggatctccccatccctccccgagtcctcatcgtgggcagtcacctgcagcacactggttccaatccgtgagttttcttttacagagccaacaacagcaaagtccgggaaatagggagtatggaggttttcattgacatccaccacttccacctccacaaaggacacrgatgacagagagacaggccgccctttgtccttggcccgaactgtgaggttatagaactgctgcttttcatagtcaagctccctgctcaggcggatggcgccacttgctttatctatttcaaatctcccgttgtaatcattgaccaaagaatagcgcacttgaccccccagtcccagatctgggtcatgggtctccagccaagcaatgacggtgccaacggggaggtcttcaaggactttcacactgtagctactgggaatgaaagctggggagcagtcattgacatcatccaagaaaacc

SEQ ID NO: 2281 - DNA, 598 bp, Bovine  MMBT01061
  misc_feature (1)..(100): n is a, c, g, or t
nnnnnnnnnnnnnnnnnnnnnnnnnnnnnnnnnnnnnnnnnnnnnnnnnnnnnnnnnnnnnnnnnnnnnnnnnnnnnnnnnnnnnnnnnnnnnnnnnnnntgcctgtggccaagttcagcagctcaggccacatctgtgatcatccccaggatacatttctgcgtctggggccattcccacggccgtgtgccagggctctgccctcataccacgactagaaatcacaattttccaggagatagtaaccttgatagtagccgatgttaactgacttaattgcgtctcttcgattctcacgragcccttggtttttgctgtgttccggctaaccgtatgccttcacgaacgtcttgttcgagcttttggccgctgcttccagggggtgttgctcttgatccatgtggtagagccccctgggcctcaccgggtggcgagtgtgcttgcagtatactggtggcctgaacctgggcaagcgctttcctgtcccccagggacyttaattctgcgcgctccaacctctcagcgtcttccttcaggatccctgccttcggtgcaatgctataaaggcttttcccacaacagagttgcgggagcatc

SEQ ID NO: 2282 - DNA, 600 bp, Bovine  MMBT21493
gaaagaccccgagagtttaaagtatggtcttgccctatagaaagctcttcctctcccagcaaggccttgaatggccatcgggtcaccaggaacactgccaagagaaataccctctggcagccactgacccctcccaagaaacagtygggccttctgttctctcccgcatgccagtgcccatctctgtcagccacctgcacctgtcacgggggtcgcagctccggcacagtgtgacaggccacctgtcacctttggcgatgctgggagctatggcagcttcagagtgacatggggccgggmtggctcatcatgcaggcgtgcaggggacaggaacttgagttgtstcctgggggcccgtcccagtgctgcacagggagcgaccgycttccttccctgccccactgtcctggtcacagaaggagaacaactgccagttaacctccccgtggctttgttctccacatccgagggcccgcacttttctgtgcctcgcttaaggatgctggagtctaccccacgatcacaggaagtgccatttctttggggagctggactctgaagcctttgtcttgcataagacactgggtccgtgtgtctggt

SEQ ID NO: 2283 - DNA, 600 bp, Bovine  MMBT03201
acggtcacagctttggggtcacgagagaactcatactggagagaaactttacaaatgtgatgagtgtggaaaagcccttacaagacattcatatcttacgcaacataaaaccatccacactggagaaaaaccttacaaatgtartgagtgtggcaaagcttatacccagtttgcaagcctcacgaggcatctgaaaatacacactgaaaacaaacatatgcctcacacatatggaaacgcttttattcaaagctcaaagttaaaacaattcagacaaaatttctgcatgtattccagccytactcagctaatgggactctatcagggtggaaaaacacatacagatgcccagcagacacatgaaaagatgctcagcatcattaatcatcagggaaatgcaaaacacaaagtcaatgagatcccacactatagttagaaagacaataaataacaagcattagcagtgctgtagagaaaagggtactcttgggccttggtgctggtattgtaaattggtrcatcatttatgcaaaacagtatgaaagaktctcagaaattaaaaaacaaaaaacctattatgtgagccaggtttcgcacttc

SEQ ID NO: 2284 - DNA, 600 bp, Bovine  MMBT19740
ttgttctttactattggattttagaagacccaaatgttttgttgaaatgattcaacctacattttgcagtgaaaaccttgcaatgtgtactagaacatgaaccaccttactacagatttggagaaaatcttgaagaagcaaaagtaatctcttctttggctgagtckagattaaacttttaaattcatttatattattccacaaatatttgccaagcaattgctctgtgccagagattttgcatgcaggaatgctggtgagaaagaacagcgtgagcctttgtttgtaatgtgacaagtrctatgaatctgtgatgctcatttgttctctcaaggatttctcatctttatttaggcacaggttttaaagatgactgtgtgatgccacagccctttgcatctgtgagtgtttagcaacagtgtggcttttctactgtgttatctctgtgggttcttcagaatattcctgggttgtgctgtaatggtgctgagcatcagaggaggtggcacttgagtctgtttttttgaaatatttgctttctgttcaaagtccaaattagaagtgatcacccagagtgaataaatagcaatatcatgacac

SEQ ID NO: 2285 - DNA, 600 bp, Bovine  MMBT00870
cacacaattaagtccaaatgactatagaaaatcatggctccagctctgcttcgacaccctgctaaattatgatttggtgacacagatttctgccaggtacgctgacttacctataaacacacaacttgctttacactgtgtatcagatcttagtgtgtttccaaggttcgtatttctgatatgggcatgagaagtcacagcaacacaggagctgagattcaatcagtacttggaaaaggaggaacaattaattttaagaaaacctccaggaagaaactcaataatgctgtagaggtgaayaggtgtaggaatcacttttgtcctcacttttaaggacttgtttaaaaaaaaaaaaagtcatctagagttaaagtcaggactgttccacctccagaacagtgactcttaacattagaactaggacatcttagacctgggagaatatgaggaaagctatcacttgttcttggttggcggggcggggggcagggggtggggagcagtgggaaggtgcgggagtacataatgccatgaaaatgttcatatatttttaaatctctgaacttgccatagattcaaagttagaatctattttagact

SEQ ID NO: 2286 - DNA, 600 bp, Bovine  MMBT01469
caggatgacagcagaggggaacaagatgctaaggaatggagtgataaaccgcagcagcagaaaaacaagcttcagaaaaagaaacggtataaaagcctggagaaatgccataaaaacacaggtgatcttaaaaaaaataagattctttctgctcatcaagctgggaggcccaatcagattaaaattgagcagtttaagtttgataaatacattctgagaaaacatccaggttttcattatataaataacacttcttcagattctagacactcagaggatagtgagctgctcacagatacraccaccaacatcctttctaccaccacttctcctgtggaatcagatatattgacccaaacagataaggaaatgactttgcatgagaggagcagctcaatttccaccattgacactgcccgattgatccatgcttttggccatgaaagagtttgtttgtcacccaggcgaattaaattatacagcagtatcaccgaccaccagaggagataccttgagaagcggagcaagaaaaacaagaaagctttgaatacaggttatccccaaattacttcagagcacaccagaaggaaacacatccag

SEQ ID NO: 2287 - DNA, 600 bp, Bovine  MMBT04063
cttaaaaatatttccagtgtggacatattttaaaggtcttccaggggagaaagcaactacttatttacaacrttctgctgggcacttattcccctatagtcactggatggctcctattatctcattactctttaatggataataaggcatatttagaacagaagagaccacataggagggaattctgcatgagattgtcacagggcgacctaggtggaaaataacagactattagtgaaatgccaaactggaaaataagtacctgaacacaacatctgcaaggtaacaaagatagagaaygacactgaactgtttaagctctaatcaatctaaaaagaatgccaaaaatagctaaaacaaggctggggacctgttacagtttaaaaagtgtttgcttgcagttagttggagtattttccattcagccttaaattcttttttttttttttcacattctcactctaaggctgtttgtacaataaccactaattattcttttcttatataaatttcaggtgtcacttagtctcttagttgtgtccaactctttgcaaccccaaggactgtagcccaccaggctcctctatccatggggattct

SEQ ID NO: 2288 - DNA, 600 bp, Bovine  MMBT04311
gccaccctccatcagtctgtccttagtgggagttggagcctgagtgactatggtcaggcatgggggctttccatgcctacrttaccaaccccagcagcagccctggacaccaagactgaggtaagcatcccaggttggcaatgcttggtacatagagatccacatcattgctgggagggctaagcattgtctgtagactccgactgagggagggtattggaagcttatatctgcactatactctttcctgattttaatgtttatctgttcatcataataaacaataaccataagtgaaasagcttttctaagtcccragtccttttagtgaagaatcatagggtggtcttggggagctcgaggacaaggatgagcatatccatgaagttgatcaaactctgtcatcygatytcattgcacagaggaggaacatgaagcttgaagaggtggaagtgacttgctcaagatcacacagctggaaaataacagagccaggtatccaaatccaggactcagttctgttcagttcagttgctcagtcatgtccgactctgggaccccatggacagcagcacgtgaggcctccctgtccatcaccaa

SEQ ID NO: 2289 - DNA, 598 bp, Bovine  MMBT08638
  misc_feature (1)..(60): n is a, c, g, or t
nnnnnnnnnnnnnnnnnnnnnnnnnnnnnnnnnnnnnnnnnnnnnnnnnnnnnnnnnnnntggatatgttaacgtcttgagtgtgacactggtggtttgagtgatttttggtgccaacggtttttaatgggtgtgcttagtagccacattgaactagaggctgtctcttctccatttattctctaaaaataaaagcaatttgtgttgcttaattgtactgctttgtagaattgtctgaactacttgatgtcctcataaccatacaaatgaccgttaagttatggaggaagggcttctgtytgcaatagaaattcttataaagttgctatgggatatttattccagaaactttgttgaaactcagtccttgaaacttgtaacatcagccttgattaattgtcattattcaacgatattaagaaccgttgacaaatgataaacataaaagccattcagattgcaaatggattcatttatcagcatacttatcaaaacctaatttttcttaattaagtatgtgctaagttgcttcagtcaactctttgcgactccgtggactgtagcccaccaggctcctctgtccacaggattctccagg

SEQ ID NO: 2290 - DNA, 600 bp, Bovine  MMBT16698
gaatccactgtaatcaggagatcacctgtaatgcaggagatccaggttagatccccatgttcgatccctgtgtcggaaagattgcctggagaaggaaatggcagcccactccagtattcttgcctgggaaatcccgtggacagagaagactgccgggctacagtctatgggcttgcaagagtcagacacgaactgagtgactaaaccaaccaaccaacccgcctaatacaacatgccaagctcaggtggagggagtccccagtgtagcaacttacactgtttaaagctcgggatgcattytcccatagaaatgtgtacacatatgtggggagaaccctcattcccaaccccaaagcagtctgtactggagggagcacagtcctgtcctcacagaaccaaccgtcacaggtcagggagctgctctggacacttgagatgtcccctggggatctcagtcacccctatgtagagaccagcatggcagttcccagcttctcttctccttctcccacccttgggtggcttttttgggtgactttgggtgactttcccagtgcaacagccacttttctttccccacactatctcaaactttctcag

SEQ ID NO: 2291 - DNA, 600 bp, Bovine  MMBT17572
gcaaggagagagaattccctaaaatggggccagggctggtctcctgggaagaaatgtaaggaccttggagacaatccaaaacatggtaaggtctcactgctcccaattcaggatttgactcaggtctgttttcctttcctcagacttttatctaacagggagacagtatataaagtattccatctgcttcctgaactgactctaatcaaacaagacatcacagcaggttggaaataggcatcagtggtagatctatcctcagttatctgttggagagaggagagagtcgaggatgaagtrtaggtggtcagtgggcacctccagatgacatcagccaaagttttatttccttctctagggcatctgtccccaaaagtcatggatggatttgaaggtcactgttttatctcatgcatgcatgtgctaattgcttcagttgtgttggactctctgcaaccctatgaaccacagcccgccaggctcctcagtccatgggatactccaggcaagaatattggagtgggttgccatgcccttatccaggggattttcctggcccagggatcgaactggtatctcttatgtctcctacactggcag

SEQ ID NO: 2292 - DNA, 600 bp, Bovine  MMBT13695
cagtaktcttgcctggagaatcccagaggagcctggygggctgcagtccgaagggctgcacagagttggacrcgactgaagagacttagcactcacactcacacaaccaattaacaaacaatgttggcacagtttcaggtgaacagggaagggactcggccatacatatacatgtatccattctcccccaaatcccctcccagccaggcttccacattaatactgagcagagttccatatgctatacagtagcagaagtattacttaacaaaacaaagcaaatatggtggatacaaataytgtttttctttaatttagaaacatgtggatagataagtcctcacaaaaacctttagaaaattttaccaaaacagaacactggcgtttaagtaggaatattcccttttattaaagttgcttaccattttttaaagctgctaacaaagcaaaggtacaagcatccaaaatgtttccatcatggttgaggcaaatgagatcacagtacaaaacccaagcaagctaaaacggagttgacaaagaaattaaagctttctgataggtataatgtggtatttgtttctactcacaaaccacatcctt

SEQ ID NO: 2293 - DNA, 501 bp, Bovine  MMBT18631
agagaaaatatttgcctgtgagaccctgcctgtctctttggacttctttgtaatggttaagacaacccaacagggctggagtcgttagtgattcagaatcggattagccaggactggtggagttactttctcagcaaagggtttcatattttaacatttgtttcccatgacagtttgcttattcttaagttttggcagccatgagcaaatggttgtcaggttttttgttttgttttgttttaagacaaaactccaaattttattttgccaatttaataaactgtattctacctaccactycttctgctccctctgtaattattgatcaaactttgtttttcagttgtggaagtactatgaaaagttttcttttgtaccctgagatatttataattttgtgtaagcacactgtttacagaaaatctaagtggtgcatatgttaactcaaatacccttaaaacacttaaaatattttccaataactaattctccccccaaggg

SEQ ID NO: 2294 - DNA, 600 bp, Bovine  MMBT10382
tttactcggtggtttgttcattgtcctcatcttcttgaagattgagtctaggagactggggactttgtccaccttgtcctagatagtacccttgatttctggaacagtgcccatcaccggaggatctcattaaacttttgatgatcttttgataagtgatgaatgaatgagggaatgagggaatgacttcattcacaaaaattctagagtaattggcccaaacaccatgaagtacaagggtatctcaatctacagaggtcataaccctgctagctgctcctggaggcaagctgatgatamtgcagtggtaagcatggcagctctccagtctgaatctctaattataggccaggttctgagtaacagaaacagaacatattcacatgcctaatacagacaattataactcaacatccaaaagctaactgaatgtatcccctcatccccaacttttcattccttttctcagctcatgatattggcaaaatcaaacaatggggtaccatcctagattttttttttttattctccacactgccaccctcagagatatcattctaaaattccatgtcctcagtggaaaaaaaaaaatttctagta

SEQ ID NO: 2295 - DNA, 414 bp, Bovine  MMBT18814
ggctatttctaaattttgttttctttttctgagtcaaaaactaataagaaacagagtaaagaatcttttactgattccactgttgacttccctgccagtagcttctattattcccttggctgatttgctatagcttattagaactcctcttagatcttgataatcaagaccctctgcctctgaatttttggttgacacctctccgcccctcctaggaatgtttgctttctgctgcagccaggtgtctaaggaccaaccctagtgtccattgtccttatctgtgctctcatattttgtccrttgctctccttcctttcttcccactctgcattctcatctctagctcctttctgacttcttgctctaaaaattctcctagacttaatgggatctccatccctccccctaactccc

SEQ ID NO: 2296 - DNA, 600 bp, Bovine  MMBT00764
aaagtttggggagcatgtgtatacctgaaatttaaaaatgttaaaaattattaaaaaaaaaaaaaaaagaaatgaaaaaaaaaaaagaaataaagttaagtaagtaaacaatatttcctcaaagccaaatcctaaaacaaggatttttgtagagcttgtgagtgaaggatagttattacattttcatatgtttaaaaaatcaaaagaataatatttcaagacacagaaattatatgaaattatagtttccatatctataaacaaagctcattcatttgtatattgtctgtgactgttttktgctaaatggtagagttcagtagttgtagcagaggctcaaaggcacatattgcttcccacctctgactgttgtgctgaaaattcctgtgaygcaattataaatggacaaatgcttcaagcagaacatatattgacttgctgtgagattttattatcactgcatatccattgtatcaaaacaaaaaaagaagaaaaaagtcgactttgaatgttgtatttttaaggtacagtggaatgtggattattttgtggtcaagctagatgtcaaagttttgtgtttattatgtgatgacacgacag

SEQ ID NO: 2297 - DNA, 600 bp, Bovine  MMBT03659
cagggggtgcgcatgcacgtgcatgagagagctcaagatggagagagaggagaatgattgattggagagaagggatgcaatctgctattaacagcccattaggttccaagcacgtgactcgaaccacagggagcgaactcctgcactttcggatctcaggggccagcagcctcttactgtggctgcccctgagaagccctgctctagagaaatggccgcagtggtgcagggcsggggtttgaggggtgggcgagggccatcacccccacacttccctaactgactctgcctgtttttcartgactcaaaaggccagtgaggtgagcgtctcatagtccaaggctaataatgataataaacctgcaagaatgaaattgactctatagaataaaattttaaaagtaaaacagttctctacagttctctgtcatttctgtctcagattgtgttggagaaggttgaacacaattttattgagaaattgattgtaattggcactctgcatgctctctggcagaggaccctgaaaacaggctctcctgacatgccgatgtcacttctgccaccaacaccctcgccaataagcccaaattaggggcc

SEQ ID NO: 2298 - DNA, 600 bp, Bovine  MMBT09474
caattaacagcaacaaacagagatttgctcagttgtgtctgactctttgtgaccccatagactgaggaccccaacaggctcctctgttcatgggattctccagccaagaatcctggagtgggttgccattctcttctccaggggatcttccccgacccatggatcaaacctgggtctcccgcactgcaggcatattctttactgtctgagccaccggggaagcccctgacacggtgaagtaatgcttaaaacacrtttaaaatcagtgcatatttcacaccacacagcactatgttctastgttttatggggatactccaaaagagtaagagaaaagagagaccaaagtcaacaaagcacagatgtcaaaattgtaaaaaatattcagtatcactgcagcaagccgttcaatcaatgctggctgactcaaaattactagtaagaacagcaaaacaaatgacttggtttcatcgtgtttgtttttatacaaaatctaatcaattgatgtttgcagaaaatatcttgtaaggttcaaagtataaaattccttaaccaagtttcaatctgttttgaacattccatttgaaacgggaagtcagc

SEQ ID NO: 2299 - DNA, 600 bp, Bovine  MMBT11575
tccatccatccgatggatctgcgccctcctcgggaagaagcacagtgctggccactggagtctttgtgtgcttgggtttctctgcgcctggaggaggcccaggatgggggtagctgggctgctagctgaggccaagctgctctgagcaatgtggttgtgtttactgggagggtgggagggccgggcctgcttttttcctgccttccaggaagataaggcagaaagcggggatgaaggatagaatgggtaatactctgaaaccacaagaaagggtcctggctttcgtctctgccctacagytcagacatgctcctggggcatctgggagcagggaatggccccacccccactactctggggtccctgctcagggaagctcagaaccctcagtgggctccccagacttccatctcccctccagtgtcagttcacccacaagctgtttcagctctctcactccccttcggasccctagttttcccttccaggtgagcccagcaaccctagagccaggcttttccccttgctttcctgtaccagctaaagccacagggaccctgggcaggtgacatgacatgcatgggccttgagggctggctg

SEQ ID NO: 2300 - DNA, 600 bp, Bovine  MMBT11807
ccacaggactgccagggaaattccaagtcctttcctttttatgcaaactgttctgggattcctttcactggtctcacctaacgtaatctcytctgggaaaccatccctgaccaactgaaatgaatctccctatattccctataacatagtcccctatatataagccccataatacaggctcccgtaatccttcacagtgcttactgaactttgtagttttatcttttttgcggttaaatatttagtatccattccctggtggctcagatggtaaacaatctgcctgcaacacagaagaamtggattccatctctgggttgtgaagataccctggagaagggaatggaacccactctagtagacttgcctggagaattccgaatccctggtggctcatgtggtaaagaatccgcctgcaatacaggagacccaggttcaattccttggtcaggaagatcccctggagaaggaaatggcaactcactccagtattcttgcctaagaaatcccatggacagaggaagctggcgggctacagtccatggggtcgcaaagagttggacacgactcagcgattcacacacagacatacacacatcc

SEQ ID NO: 2301 - DNA, 600 bp, Bovine  MMBT11882
agaaggattttactatcattgtatccaaaggtacgtatcgcttggccactctgaaaatgaggaccagtggactagmcaaagattcagtttattcctagaatagaaagaattgagaatgaagatgttcttgtatgtgctttgggtgaaggtcagagagttagatcacagaaccaaagaatattcaggtaaaaagaggtttaaaagtaaaatggagaatcattttatcagtgagaaatccaaggctcagggaagtaactatgaggttgtctagctgtttatcctacattccttgtgtctaaycactttataagcaaaggggatattttttaaggataattaaaaatagagtttattaatgtatggcrtaattaagaagtcaccttcagaaatataagggaaaacatgtagcttaaatgggatgtttgcacgatgagaaacgcaaacctagatgcttaaaaattctaagtaaatcaccctgctgggaacagctgaacaacaccttttctccacaagtaggagctagtttcattctcgaataaccagccactttgggcagtatgcccattgtgtcactgatatagcccggtgataaattggtaa

SEQ ID NO: 2302 - DNA, 600 bp, Bovine  MMBT12345
aggcactactggtaagaagatatcttatatcatttgtagaagaaaatgagctacagatcagatatcttttttaacttaaaaytgctaatttttcattcaaaggattctttggtagtactcagaacaaaggttttggatttgggactggttttggcacgacaactggaactagtactggcttaggtactggtctggggaccggacttggatttggaggatttaatacgcagcagcagcaacagcagcaacagactagtaagtacaagaggttttcattttcagatatgaaaccataacaaygtagataatattatttagtcactgttcaaaacatttgagtagataccttttttgggggaggagttataaatatcatattccataggattccaaaagctacttctcatgttcaaatataatgatagcaactggggaaaagacagattggcatgattataagacctctgtgtttagtgtcattctattaaagtttttgttkttcgtaaacatgacacaggtatgtaaagctgtacagaaatacagcttcacggattgtttataagatgaatgccctttgtaaccactgcccatgtcaggagg

SEQ ID NO: 2303 - DNA, 564 bp, Bovine  MMBT13862
aggcactactggtaagaagatatcttatatcatttgtagaagaaaatgagctacagatcagatatcttttttaacttaaaaytgctaatttttcattcaaaggattctttggtagtactcagaacaaaggttttggatttgggactggttttggcacgacaactggaactagtactggcttaggtactggtctggggaccggacttggatttggaggatttaatacgcagcagcagcaacagcagcaacagactagtaagtacaagaggttttcattttcagatatgaaaccataacaayacctggttggcagggctcgggcctaccacggcctcgtagggtggtgggagctcagcagggtacagcaggccggggctgttgatggcgacgccgtacaaagtgccaaacggggaggaagcgaagtccaagtggaggcccctgagcagcagaaggaggaaggtcaccctctggggaaggagccggctgttcccattgccctcagagcaatcggaacaattccccacacagaattcttgggtgtgtaaaaaaaagcctcattcacta

SEQ ID NO: 2304 - DNA, 600 bp, Bovine  MMBT15628
ggttggatggcatcactgactcaatgaacgtgagtttgagtaaactccagcagttcatgatggacagggaggcctggtgtgctgcatccatggggttgcgaagagtcaaacaggactgagtgactgaactgaactgaatatagggaatgactgaatatagtgaaagaccttaagatttcttctgattttcaattcagaaatggaaatagcagtattagtaagattgattctgattctcataacattgtatatttacctggcaatatgttcttgcattttaatcctgcagcataactaacmtttgactgaggataggaaactgaagatagtagacatgatccttgagtgcactttgtggatcaattttttatataaattttagttttgtttttcctttctgaaatttttagataactatcaatcaaaatgcatggactttgtgaaatatttaatttgtaacactgttgaggaaattgagtttgagctttgataagtattagataatatattgtgaggatttatgaccaacatattcaaatgtatttttgtcaataattcttgaaggcccttttttgctaatgtattagtgaaagaagcctc

SEQ ID NO: 2305 - DNA, 598 bp, Bovine  MMBT16889
  misc_feature (1)..(97): n is a, c, g, or t
nnnnnnnnnnnnnnnnnnnnnnnnnnnnnnnnnnnnnnnnnnnnnnnnnnnnnnnnnnnnnnnnnnnnnnnnnnnnnnnnnnnnnnnnnnnnnnnnnttatcagaactgagaaacgtatttatttatctaatttttcttttgttgtatctgactgtgtcactccagttaaaataaaaccaccttggtgaaaataaaggcgatttctttgcatttactggattatatgtcacagcacctgaaaaggtttgccatccatgtggagaccatgtaagcagttatgaccgctgtctcgtctgcaragattacctcttccacgarraggaggaccgtcctccctggcatgcagatggcactgacctacgcagccaagccggaattgttccccttacacaccaggagcacgggactcgaggctgtgagcrgctttaaagaaacccagatacacattacatgttgattgatttaaccaaatgagtggggctaagattttaaaatgctgagagtccaactgagggcagaaaagcttcaccagtgaggtgaggcatcacacctatcagggctcackcccygtgacttgagagaagggagttccataaa

SEQ ID NO: 2306 - DNA, 600 bp, Bovine  MMBT18710
ctaagggacccaggactccacccaatcctctctgctggccacaaatgggtgtgccaaaggctttggaaagcgattgcagccctggagggtcacctgctgggaggctgggggaggggtaagtgtgcccagagaggcaacttattcagtgatccagaaaatagaggagattcttgtttttttctccctctcstctctcctgtgcccactctcctcatcaccatcaccagggctccactgttcctctctcccttcgagatttcccattcttctctgccttcaattggaagttcccttagagascctctggccaactccttcttacccagcctcagaatatggaagggacttgttcccacatcatgcctggttgatgtcagggccagccttggagccctgtgccttggtgctggatccatggctacagtcaactaggtcctccccttcaaaagcatcttccccctgatttcacagtattcaaatcaacaatgcacataaatcggagtgctctccactccatggaggaagaaagwcacaactgggccccccaccccaagggcagcctgggcccccagttctctcccacctgcacagttcagtctt

SEQ ID NO: 2307 - DNA, 600 bp, Bovine  MMBT18809
cccttgtggctcagctggtaaagaatttgcctgcaaaggagacctaggttcaatccctgggttgggaagataccctggagaagggaaaggctacccactctagtatcctggcctggagaattcccatggactgtatgtatagtctctggggtcatatgaagtccaaagaggcaactgtgttgaaaattagcaattttaatcaatggtgaaagcacctcttttttttgttgttttaacaaagagggttactgcagaatgaatcttcacaaacagtgctttatttggtcacaggatccatgrtccactatgaggatgggagaactttattggatgctaatctaacatctaaaattatatttgtctgctcttctttcttgccatttatggtgaaaaatctgaagccagagcaccgtaaatgttttgcttctcatttctagtcccatcccaatttcatttycttgcaatgagaggaagggttggaagataattagcaatgtycttctcccacatttaacatctctacttactgtgctstatgttaccrcttactctgaaaaattcagtatgtagcttgaatgttgttttaggcttttctaagtt

SEQ ID NO: 2308 - DNA, 600 bp, Bovine  MMBT19755
atacagagcctattttaactctattttatctgatcattcacagataacacctcttacaatctcttatttccttacaagtgaaataagaaaagcaaacttgatggtcataagtctagtttccaacctagtaaagaaatgacatcaaaccctacagcaacttcagccttctcctgctactgcctttatgttttatggaaccacctatattcactgtggaattgtaataactaggcaaagacgaacaactttggatgagaaatgttgaaataaacaatgctacacttctgagtttatatccartagtgtatcaggccaggaactggagggggaaaagtggagtcctcagattatgtctagagaaatgttaatattcccagactatcagccttctgcatctggcctgagtactgttcctcccctggcagtccaccgtacattgctagctagggaggttattagaatgaatttattatcctttggtagtcattaacactgactgcagtggacagtaaatattttacactctttgtgaatgggtctggaaaacagtttcagaatttttcaaagtgacttttgggggcaatattctatatcggggac

SEQ ID NO: 2309 - DNA, 601 bp, Bovine  MMBT20811
  misc_feature (1)..(1): n is a, c, g, or t
naaacctctcaaaaacgcaaactaatccatagtgacagtaagcagatcagtggttgcttgggaataggggcctcaggagaggaaagagggatggattacaaagtggcacaaagaaaatttgaagggtgatggatatgtttgctattttgattgtggttatgggttcatgctatattcttatatcaagacttatcaagtacacttgaaatatgtgcagtatattgtacgttaattatacttcaatgaaactgtyaaaaaaaaaaacaaacctraggaaaagcagttaatcaactggcaagcytacagaaatgcagatttatacccttcatctactgagatttccatacagtctgtctgactggaccactcagttggttagtaccccaggtgttttgatayggactgcagagctaattaaaactctaacctgactcaccacacgggtgaactataggtacaatccctgtagcttctcccaggtggaggttttattggatgttctgaatgagatcacctgcttctaaatacctgttacagtcatgsgggatcatgggcaaggccatactgcctcatgcttgaaaatgttataaattggggaaaa

SEQ ID NO: 2310 - DNA, 600 bp, Bovine  MMBT12329
tcattttagttatagttttggtactctggaaggtacattaattccttaagacaatgttatgtattcttcaactgtttcagactgaagcatatttatataactattacttatktccaatataatcatttttttctcctctgaaaagttgctgatttctcctcactctkatggcaaacatgtagtaattattgataagacattcaactaragaaaaacattgctaaaaatattatcatgattcataattaaaaatctctttctgggtatcctagtcaataattcaaattccctgcagcattygtttctgccattgctatttttaagacttacagaagcctgctgatcaagacatagatttacatattttgcttttaatgtattattgcttcatttctcttatattctatacctttgtgtacaaccatccatgttgagaaaactctccttatgcagtgtagaagttggaaacaattcttttaattatcttttgtgctgaatatttgtagctgaatatcattttgtgtgaatatccacaagccatttgcatcagactagaaactcttcagttaagtgactctccagagaatatatgctattttg

SEQ ID NO: 2311 - DNA, 600 bp, Bovine  MMBT00767
tatcttttgtttattagcatactgaggataccctaatttggaaccaacagcttctttaaaaatgttgaggtgaactcttaatgcatctagctgcatacagaaccaaagaagcagaaaaatatttaatgccattatatgcttggtgtctgattttcctgagtgccacagaatgggatatcatagtcattgtactcaagtaggattttccatacccctactcccacacaacttcatctgagcaaacatttcctacagtgggtggagagaaaataaaaagtcctgtttaaattcccctagcgytgtgattacagatcctttgatttaaaaatgaagctgtctcctcttttctgcacactattttctatgtccatttttatcctaatctctcccaggcctagttgacctaagatcacctgtaataatgctctgattatatttgtaggcaattagaaacgctsrcttccaaatagatggatctgaaatagtgctgctgactgatggggaggatagcactgcaaagtcttgtattgagaaagtgaaacaaagtggagccatcattcattttattgctcttggaccagatgctgctcaagcagtcaa

SEQ ID NO: 2312 - DNA, 598 bp, Bovine  MMBT01347
  misc_feature (1)..(3): n is a, c, g, or t
nnnagagctgcttaaccttcccctgacatattcttatctatgagttcagctcctgaatttttctgaaatttgtagcttatacatcccttaacctttcaaactcttaaatataaaatgtataaaggagaaggatgctgactgaaatcttggtggtttaaagtttcaaatagcactttacactcactcataagaagacaaaagtatcccacaatacactagcctgggcaaaaagccacaggagtgtccattgatctaataagaccatcccagctggaagatcttttggaaaataactgaatygcattttaactccaaygcttctccatttgaaaaatgggaactctgaggcccagagggattcaggaccagccccaggtcactaaatcagcaaaaggcacagtagtcagaagaccgaggatccagtgycctattttctccactacagagttgtttgttggaaaaagtatatttctgttttggcattcttgagtctacagattcctagcataagttttggcataatraagtatggtgttgtaatcttcttcctaactgtaacccttcttcagtcctaaaawccatataaggaatttgatct

SEQ ID NO: 2313 - DNA, 600 bp, Bovine  MMBT01605
aaagaattgtgaactgtagcgaatagacctggagggatattcactcacacacagactcactgactcacatattttttcttcttccagccacaaatattcactgtggcctcctccctcctagaggccagctgagcaagaaagaaagaaaatcaaatcctttctgttgtagaatgtattggttatttcttatggccgttaaaggctctcactgaggaaggccatctgtttatacagtgaggtccatgcagagctgcctaagcagaaatcatgggtacagtaaagtcacttcatagtgttgaragacttggctgaataaaggggaaagtttaaataaattaatgcctgtctatggaatgaagcagtttgaatcctctaaaatgttatttatgcagaatcttaatgatgatattaaaaaaacagaatatagaattatatacactgtatgaaatgtatttttcaaatgtgaaaaccagtggaagtgttagttgctcagttgtatctgactctttgcaaccccatagactgttgctcaccaggctcctctgtccatggaattctctrtactggagtggrtagccattcccttctccagggcatctt

SEQ ID NO: 2314 - DNA, 600 bp, Bovine  MMBT02278
tagggcggtttttaatatcaacaaattgaaatcctatcatctaatatatttgtttctcaaaaaacagcatagatgactgaggttttgaatctctggatgtaaaactctgaaagaggagagagatgccttagtgaatctaaatttacaatcttatggagctaagctattggcctctgcccatccatgagaatttcattttcagaactgagatgagcttagtgaaagctactactgacagagggaaagatggcatcaactaatgacatgaaggaagtagttgtcactctaagtgagtgtttyagtctactttgctattcaatagtttcaaagaatctttttttttctatttaaacaaccagggaattaatttagctaggagaaatgcatctatgaattgtggttatgcttctacaaactaaattttgccagtagagtgtaactctcccacagagttttatagaatgagaaactgggtcagtgttttatatgactggcttctcctaacaaagtaacatgatactcccattttgctgaaactgaagaccaagaagttataattttgtagtaaagtttataattttctttcccaggcattttgct

SEQ ID NO: 2315 - DNA, 600 bp, Bovine  MMBT02734
accctaccccactcttttcttttccaacccaaaaactcaatttgaaaagaaaagggaagatattcagaggtaagagacaataaaacaaaaacaagtaagtagtaccatagaccgatgtgttaatttattaaaacatgtattcattaggcaactattatgtgactaaggttgtgttatacattgcagataaaatgatgcaatccccatttgtgattccagccattttaggttttgtaaattggagattctcgatagtgattagttcaataaaatatgagcaatagtttcttggagatctakaatttaatagggatgaggaaagaaatatagaataaaataaatattttgaaaacaaaattgataagactcagtaacagaacaaatkagtattaaaggaatatagcagtaaagaaaaattccaaattatatttttctttggggagttcatagatttcaagaactctggcagttttgttttgttgggatattgtttgactccaggatatatcaatcatgttttaattttagtaatattaacaacattaaatttgaagcccacttcaattttgaaagcatgaggagggaaatattaaataaaaa

SEQ ID NO: 2316 - DNA, 600 bp, Bovine  MMBT03085
attaataaaaaagagttcacactctcatgtagaagacagacaagtggataagtggggaaatcaatgattaagtaaaagggcatactgggacctcagaatccaggtcaggttgaagggagtaatgttggtgtcagataaagctttcaaaggaggtggtttgaattgattcattatcctgctctttatttccttcattccccaaacatgttttaaggaactattgtgtttcaggctttaggcttagccctgggattaaacacaggcaagtctccatccagtatatgtccctaagaaacttayagtctagcccagagggatagacagcaaataactcaacattaaaattgtgttggggcgcacaaggcattgttgatgctatatgccaagggttgtttcagaggtctagtttcttaaatgttttttttcttctttttcctattcaccccagtcttttggcactttaagcacctttcaggatattccacagaccatgccagataaaaatggccatctcaaactgcatttatattttatgatattctccagaggaagaggctatcattcaaaccacaatatgtcaagatggggcaatgtctccac

SEQ ID NO: 2317 - DNA, 598 bp, Bovine  MMBT04789
  misc_feature (1)..(56): n is a, c, g, or t
nnnnnnnnnnnnnnnnnnnnnnnnnnnnnnnnnnnnnnnnnnnnnnnnnnnnnnnntctaccatgaatgagacgctttgcaaacagcatctcactcaacagcctcatatcctctttactatcactcagaccctgcctccattatctcacttaaattgttccagctgaccttatggtggcttccagtgatgttcctatgacctcttttactttcttttatgtacacttaactcttgccgtactggcctccttaaaattcttcacatgtgccaagaatgctcctatctttggacacctgctstgcatgtastgtttcccccagatgtccacttgcaaactccctcagctcattccatttatcactgaaacatcacttcttgatgaggattccccaaccgttcaaatttaaatcacattgtacccttcctacagagccttcccattctttacactttgctttatattttccttttcatttgatttttaacatactatatgatttccttattatgttyaattcctattgtgtatctgtgacatcaggcaagaatctttgtcttattcatggacacgtcctaactgcccagaaaaagtactgg

SEQ ID NO: 2318 - DNA, 600 bp, Bovine  MMBT05648
aaacacacttaaacatgtatataaacacccacgtgtgtacacatacttacaaatacgtatccatacctcctccccgcataacacatacaaccacatccacacaggcacatacatacttgcaaacacacatagctttccaaggctatctcttgtctttagatgctctgagttgatacctttgggaatttctctgacttcttatcaaagcaagtctctttggggtccaaaatgtccctaaacttttagagacatcctttcctgagtctacctgagtgatggtggttgaccctaggagagacygggaggcaggtacagcccacaccaagggctccctcagctctgcccggggctctggctatctggggagatagagcctcctgtgccccactgagggyaggttgacagccatggcaggccaggcagcactagtagctggagtgtgtcatcagctgctgtcggactgtggggacaggggtaagggctgtgtgctgagctccaacagcacggggtggcagggagtgacatctggctaccaaatggcctataggtgtcaagaagccatggggtgagggtgacccatgccggggcccccaggcgggt

SEQ ID NO: 2319 - DNA, 600 bp, Bovine  MMBT05934
aatagaaatcaaccmatccttttttgtaaaatgattaaataactaagcacagaaggaatcataaaaacattcacatgctttgacccttattttctctcctagaaacctaccaaggaaacaatttgaaagactgaaaaaatgatatataaaaatgtatttaatagcataaaaataataaatgcccccaaaggtaaaaataagtctatgcttaaggaaattagaggatattagacagccatgacccactccagtgttcttgcctggagaatcccagggatgggggagcctggtgggctgccrtctatggggtcgcacagagttggacacgactgaagcgacttagcagcagtagcaacagcagcagacagccatgaaaaacaatagtgaagatttcataatgtagaaatggtgagcacaggctgttaagtaaaagataaagttagcaaaatattgagtattataactaaaatgtatttggtgtggacaaaagttagaagataatgtggaaaaataaaaacagatatgatcgaatggtaaaggttccagttgacttgaaaaaatgtaatgactggaagaaaaattaggaaaaggataaaagtc

SEQ ID NO: 2320 - DNA, 598 bp, Bovine  MMBT07143
  misc_feature (1)..(179): n is a, c, g, or t
nnnnnnnnnnnnnnnnnnnnnnnnnnnnnnnnnnnnnnnnnnnnnnnnnnnnnnnnnnnnnnnnnnnnnnnnnnnnnnnnnnnnnnnnnnnnnnnnnnnnnnnnnnnnnnnnnnnnnnnnnnnnnnnnnnnnnnnnnnnnnnnnnnnnnnnnnnnnnnnnnnnnnnnnnnnnnnnnnnnctgcagcagcatagtcctttagaaaatgaagcattgcccgtatccgttttgaaacagcagtgcatactgctcaagtccgtcaaagctcctgtaaccgtccaagtccaagccgcctggcctygcctttcccctcctttctgccgggagtacaggctgctgagtcacgcctgcccggccagtctgtccttcccggccgcgcggccaaggtcccgcctccggccttcctgggcgagcagccgctccccacacttgtagagtcctgggctggggccagccttcccttgtcgccgccgggcccctcctcgggagggaaccgcacctcctcgccgctctccacgcgcccccgcctgccagtctccacgccgcactccggcgccctccgagggcgcatccacagagccagccccgcgctaggcgcc

SEQ ID NO: 2321 - DNA, 598 bp, Bovine  MMBT07183
  misc_feature (1)..(23): n is a, c, g, or t
nnnnnnnnnnnnnnnnnnnnnnnacaccaaatcttgagtaaatgagttccctgtatatgatttgaagttgtcttcccactaagggattttgttcacacacttaaagcctacggagttcccatgattttactattccagaattcctctccatgatttcaaaggtttttaaaaatcatacatcatccttcatggtcaatagacctgaatttaaatcattataggtattaatttgaacaagatttaacttctctgaacatccttttccttggatgtaaatgaggttcacagtagctcgcttaygagatttctagtttgttaggtgggatattaatacagaggaagaaataggcaacattttgcctgagagttgcaaaagcatcgaatatcagttacccctgtggagctcatacctccccctaatcctgactggatgtttgactctctcgtgctcaatccctttatttctttggaggtcaaaataatgaaactgccttcagaaataaagacacagcagagatgaggagtgaatgattagagtatttgcactttcatctatgcagagaaacacagtgayagtttgtctcttgtgttctgtttt

SEQ ID NO: 2322 - DNA, 527 bp, Bovine  MMBT09349
aatttggtggacatttttgaaagagttgaagaagaaatagcccctttccagtcctggttacccttctgttcccatgcggcctccctcccagcacagacacccttcccaccgccctcatttcactctgctccccgctttatgtggctagtgcgggagggaatttgaacagttcagctgttggaaccagtggtgagttcttggccttggactctcacttcagctccttatgaggcatctatacagctttccttccaggtccttctgaagtcctgcctcctctgtgaagccttccccacctcytcccatccataattttctgtgttctttaattgtttcgtgctgcttttattgtctgtttggtatttggttatttccgatgtgacttccccagcacagcactgtaaagcagttatcccccaattgaaaaaaaaaaaaattcttccccacaaaaaagtgtgggcttctcaggacacagaacacataatcctcctctcgcccacctccgtatcacctcacagggctaggcc

SEQ ID NO: 2323 - DNA, 600 bp, Bovine  MMBT10383
gagcagctgaataccctgggttgtttcagatcacacagtgacaactgcatcattttcctcatgctctttcctcagcctttagctgacaaactctcagtcttcctgatcaaatgcagtctgttctgagaagcctaatgatttagtttccgtcgagttagtctctgtaatgacatagatcgtgttcattcatttattcatttaacacatgctcgttgagcaccttcttggtaccaggccattgtcctagtcacagaagatcaagtttcacccaaatccagaacaaatgaatgaaataaggtyagtattctcctgaggagcttccactcgatgggaggagacaagtgaataaatrtgtaggcagacaaatgtggtataatttcagataataataaagcgaataactatgttagaactggaactatacagaagagcaggagctgggtcttcttgacattcaggtttcttggggctctttggactcatttgcaggatatgagaagggaaatttctgaggaagagtgtcagatttcactttaaccagagtgggaaaggaaatatagaagctctcacccctgctttctcctctgggccagcatcgtg

SEQ ID NO: 2324 - DNA, 566 bp, Bovine  MMBT10647
cccagacacttgatgcagcattcaaagcagcctggacccaggggggagaaaacatggctggtaagggtaaaacgcctacgacttcatgaagaccgcgcattaacagagaaggtcgactcttccctctgccccgcgtgctctttgggtaacagctcagcatcgcagaggctaagaggagctgccctcatctgcttctgtgggtgaggacctgggggcttcaatgggaaatgaagcttaatttgctcggggtgtgtggcagagcagctaagtgacaaatggttatggagtaaggcacaactstaccgcttcctgattgacccagggtttgaggttaggggacccctgctcaagtgacaatgagaaagcagtcaccccactaacaatgtcagaagaactgcagtgaggcttgccgttctatgaagacaagtgaccatcaagttccccccagcctcacccttatggggtttcaggtagctatttctctattttcgcagcagccaatggctttccccagcctctgacctcctgggcaaccagaagagtcaaatacagtaattacactattg

SEQ ID NO: 2325 - DNA, 598 bp, Bovine  MMBT10651
  misc_feature (1)..(172): n is a, c, g, or t
nnnnnnnnnnnnnnnnnnnnnnnnnnnnnnnnnnnnnnnnnnnnnnnnnnnnnnnnnnnnnnnnnnnnnnnnnnnnnnnnnnnnnnnnnnnnnnnnnnnnnnnnnnnnnnnnnnnnnnnnnnnnnnnnnnnnnnnnnnnnnnnnnnnnnnnnnnnnnnnnnnnnnnnnnnnnatccacctacacacaagctgtgttctcatcaacctctacatacctctataccctccttccacgccccccctctattttcctgtaactgaagtttccttgtctccttacaaccacctctgcacatccamattctaccattctgtaagactcgtttcaaatgcttcctcttccataaaattttccctaggcccacaagtaattccttctctgtgaatagctagtggacctgaactatgcctttcttaaggcacttagtccatttccccttgacagagttactggcatttatgccatatcttcctgtacagagatcttaacagcacagtctatacatcctaagaagcccccagagcggattacagcagagccaatgaaaagacttktagraaatatttgtggactgaatcttttccttccttattttta

SEQ ID NO: 2326 - DNA, 600 bp, Bovine  MMBT11548
aaagttaagtaagtaaacaatatttcctcaaagccaaatcctaaaacaaggatttttgtagagcttgtgagtgaaggatagttattacattttcatatgtttaaaaaatcaaaagaataatatttcaagacacagaaattatatgaaattatagtttccatatctataaacaaagctcattcatttgtatattgtctgtgactgttttktgctaaatggtagagttcagtagttgtagcagaggctcaaaggcacatattgcttcccacctctgactgttgtgctgaaaattcctgtgaygcaattataaatggacaaatgcttcaagcagaacatatattgacttgctgtgagattttattatcactgcatatccattgtatcaaaacaaaaaaagaagaaaaaagtcgactttgaatgttgtatttttaaggtacagtggaatgtggattattttgtggtcaagctagatgtcaaagttttgtgtttattatgtgatgacacgacagctgtgcttaaaaaaatactatatacatcaacactattataccaagcacttgacacaatattcccacttcacagaaatgtaacagaaaaatg

SEQ ID NO: 2327 - DNA, 600 bp, Bovine  MMBT11879
cacatgagattaagtgatagtgtcaagaagtacattatctgaattgatattattattttgaaacatgaacctgtttataggttcaaggttaaagtacctgaaaataatgtcataatggtgtactgccacataacatggtagcatgtgatttatgatgacaaagcttctatgttgtaaataaaaatgctgattaagcttgcaaggtacagtatttaagaaattataataaaaatgtttaacacagagatgagaaagcataatttgtggatttcacttctcttttccacatggaactctcascagtgaaatgtctaaagtcagctcaattcttagtggaaactattgtactctgaaagtaacatgcataattatagactaattgaatgttttttcccctttctctgtgtcagcagaagtaaagaagtaaactactaagctcaatcagtatgaaaacttacaaagttaccatataccaaattacttttggtagcaaccaaaaaaaaaacactttcattgtgataagaataactattcctatccaaaaaaaataacttttaatttatgttttcattcttaatgatttagcagtgtttactattt

SEQ ID NO: 2328 - DNA, 600 bp, Bovine  MMBT12327
ggtccatgaagggaagagggatggcactgtgagaacatatgacaaaggcatcccatcttgtctcaggtcatctggaggctgcataacggtaactaagccaagaggggaagcaggagggcaatgacacaaaacyggtaacaacagaagggcatgaaccatctggatgtacttcaytggtggtggtgggaagcaatcttggacggcatcatggagaaraaagactggaaaaatccacgtagtaggaagagaacagaggaaaagggaacatcatgaattcagaatgaacctaatgaattttgsgaacagggaracaatgatgttttagaattgtttcagtcatgagcagcagtcactcaatttgaacgaccaaagaaaacaaggacattaccaacttgagttgctgaaaaggccttggcagcaggacaaaagatgttgttttacatttctcagctttatttttcttcactcaagcagtggaaagacagaagctctagatattatcgtaccagctcagcaaactaaagaaggggagcacttctttccccaaagacccagggccaactctaattggctcagcgtatatcacatcctcctagctga

SEQ ID NO: 2329 - DNA, 600 bp, Bovine  MMBT12468
ttatactcttatgattctcatgttttgtattaggtttgttgaatacttattttaataaacactaactgaagaactaaaacaaaaataagaattttctcctttatcaaagagtttaattttatatatttcaaatggaagaatataagtaatgaatgcacgtgagctgaggttrcctattatacatatttttcatctacatttctgacaaagattccattttcttatttcacagcttcacatagaaaagcaatcacttataaattttcaagtggaccaaatttgcttattctaccaacaatrttaaatgcagaaatgaaaatcaaagtccatgttgaatgtgttatttcacctcttaaaatatatcttgtggtcttgccagataagccatgttgtaacatctttaaaaataacatgacatgtattctgaaatggaggcatttattctaaacagctcagatctatctttgatgtagttataagctaaagggcatgtgaagaagaaaaaaagttgtaacttaccctataccttagaggcggggagattcaaatgataaattatttacaggaattaaagaagacactgcaggctcttgacgctta

SEQ ID NO: 2330 - DNA, 496 bp, Bovine  MMBT14327
tggcgtttacaacccgaagtgaacatttgttaacagtgacccatctttccactggtgaaagcgggaattctggttaaattcccttagctaaataccccagctatttctttcactgggttacttctgtgttttttcttttgccttcaaactgtgcccccacccccaagtttagatggtcattctccttttttaccaaatttgaaataataccgaccttcttccaaatgcgtccgtcaaaagattgcaacagaagcatcttggtccctagtcttttgttctctgcacaaacttgaagtaaaygttcaagtaggtttctgcaattggattttaagtgctaataaagcattctgtgtacaaacctctttctagagtgacaaccattacatctcttattggttcagcactactttgctctctgaactagagagatttttcagcagcggagcatatagcaatagagaaactgcagaggaattgtcctgtttgctttaatgga

SEQ ID NO: 2331 - DNA, 600 bp, Bovine  MMBT17858
ggtgcactggtgtgccaggcacccagctgagcacttgatgaataactaccccagggaacggcgcttctcagtcacctaggaaacgtcagtccagtcttgattgcttctctcatggtcacagaactgactctcagtggatcctatgttgtaatatttgaactgtcgctagagatctctaaactcagaagctgctgagaaatacctacaaaggtgccggatagaaggcacgctccactgtggttcttagctctctagctggaaaagaatggcttttccacagctgttctcragtaaatgtckacctcgtactgagaaatgtgctcatctgcgagcctgttgtcttaagtgctttcctcttcttgcagggtaacgccgtcctctgaaaaccccagtggtgctacttctagtgtcagccaaggaaagccttctttaagacgaattaaagggagactgcacaggagcaagagcctcgatagcatcgatttctgtgaactcactgtgagtggatggtttaagacttttattccttttcaaagcatatgaaaaaattgaattttaaaaaatttcaytaaaaggcaacaggcttattttgtgttaagc

SEQ ID NO: 2332 - DNA, 600 bp, Bovine  MMBT18619
cggtccgacccgaaatgaaaagcttccctcctgcgaagtccttcctcggggcgctgtgcagcgaggccccttgggcggtggcaacgccgtggccccggaggttccgagcggtcctgtggggcccggcgctcagaagtgatgaattgatcagatagacgaggccgggcttgtcccgcgccattgattatcgaggcgattctgatctgagccyggcccagggcacggccgcccgtggcrttggggataacgtgtcaacagtcgacagcyggctggggtctttggcgggcgtcgaactagccrtcgccccgcccgcaggcgccgaagctgaaaggggacagagaccttgttctctgctgcagttttacttttctaggcgcctccttttttttttttttttctttcggtccgctttgtcattatgactcgcgtgtgataccaacactggtgccctaggtctaaagacactatacagcgcctgccggtgaaggcatgtaggtgtatacgcacgtctgaagtgaactgaagccgctcagtcgtgtctgactctttgctatcccatggactgtattctaccagtttctctgttcatgggattttcca

SEQ ID NO: 2333 - DNA, 600 bp, Bovine  MMBT20801
catgggatcacaaagacacaactgagcaactgaactgaacctctggktgaatcagattgagttttttgaaagaacctgtttatcatcttcrggaaagttctagttgaaactggaaaatttttaattttattctagctcattacgtattatagggacttcaatattgttcattcaaaaattcagtacattttagaaactagctattagttgaccttagctttgtacatgtttgttactttgcaagagtactcttaaggctcaaatcaagttaaaattagggtagatggtgtgtacctatamagtcagactaaagctgtatttttttcctgtcgacacttgaatagaaaaaagtaacctaagaatcatgctacagtgtacagtcttattcaaaaccacatatactatagtatttttaaaacctggaaccaaaatgtagaatcattgtgtttaatagcagttaaactacatctgatattacttgtatgactctgctgctctgtttcagcttttggattacattagtggtatgagaatgatttttatatttaagtaagatacactgcttcactgcacagatggtatcagttttgaattacagta

SEQ ID NO: 2334 - DNA, 600 bp, Bovine  MMBT20808
gaggatgagacggttggatggcatcaacaactcgatggatatgaamttgagtaaactccaggagttggtgatggacagggaggcctggtgtgctgcagtccttggggttgygaagagttggacacgrctgagcaactgaactgaactgaactgagggtccttttatttcctttgttctgccatcctattccaagaccactgtccttgaggtactttatggtctaagatgactggacctctagtagagggcaagagaaagggggaaagggctaaagctccttacctactgtctatctttcragaagcctttctgaaagtcccatgcaacagcttccacttttctctcactggctacaactttgtaacatggccaccccctaatagcaagggagtctggaaaatgtggtcttttttattgggcacattgccatgctgaaagtgaaagtgatagtcactcagtcatgtyggactctttgtgaccccagggactgtagcctgccaggttcctctgtccatgaaattctccaggaaagaatactggagtgggttgccatataagtattaataaaagcagtgttctcatactaataaggaaagagg

SEQ ID NO: 2335 - DNA, 601 bp, Bovine  MMBT20810
  misc_feature (1)..(1): n is a, c, g, or t
naaagtggcacaaagaaaatttgaagggtgatggatatgtttgctattttgattgtggttatgggttcatgctatattcttatatcaagacttatcaagtacacttgaaatatgtgcagtatattgtacgttaattatacttcaatgaaactgtyaaaaaaaaaaacaaacctraggaaaagcagttaatcaactggcaagcytacagaaatgcagatttatacccttcatctactgagatttccatacagtctgtctgactggaccactcagttggttagtaccccaggtgttttgatayggactgcagagctaattaaaactctaacctgactcaccacacgggtgaactataggtacaatccctgtagcttctcccaggtggaggttttattggatgttctgaatgagatcacctgcttctaaatacctgttacagtcatgsgggatcatgggcaaggccatactgcctcatgcttgaaaatgttataaattggggaaaatttaattttgaccttataaagtcacactatgttgttatatttggtgcttcctctgcctcctttgcccattcctcctcccagagaagggcttttactag

SEQ ID NO: 2336 - DNA, 600 bp, Bovine  MMBT21024
agtcagagggctgtcttcctaaatagtttggtttttattaacaggtaagaaccaaacaagcccttttccccctcctccaattcattttcccacaagcactaacatgctgctagaaatattaaggttattaaatctggatcaatattttgaacagatcttttggttctttagcaaagagcaagacctaaaggggagggacacggggaagataaattttgataasgactctaaaggagagatagaaaaagggattagaagcagcaaagagtcttgagccagggatagaggtgggattgggtygggagttcagggcagagataagggaacacagagaaaaatgtagaccagaaataaagatgaagttactaaaaacaatttttcctatctgtcagaagaggtttacctggtccttctaaagttcagtaataagcaaatgactcagtaattagttattctctgtgaacaacccccaatatcacacttcgagtaatgtctgttgaacagcaggaaatcctaaagatgttgggtttcagtgataaagcgaaatgtatcaacactttcaagttgcttgtcttaattttgcctttctttgctccagca

SEQ ID NO: 2337 - DNA, 509 bp, Bovine  MMBT22069
aacaattttttaaagctgggtaagtggagatacttcctcagaattgcatattaaattcactttcaattaatgtggttcagcgttttcttcttatgatttgtatgcttggtaatacttttaaaattaactgtgcctctgacagacacacyacatacttctaagccgccgtaatttttctaacactgtatctttataacagtaattgccttctttctgaaagaatatgcgtctgaatgtagtgacacttcatttattacttttcttatattacagctacctcagcatattagatttctttcycccttaacgacttttttctattaggagaccatgaagacccccagggcagagtaagtccattaacgaggaggcacttcagaggcagcaggaatttctaacatggacatcagacagttcttgtcaagaagacatctcgtcaagatcaggatatcttccatttcctgtgaactacagacgcttttttaaaaataatttttaaaatttattta

SEQ ID NO: 2338 - DNA, 600 bp, Bovine  MMBT22071
ttccttttcaaagcatatgaaaaaattgaattttaaaaaatttcaytaaaaggcaacaggcttattttgtgttaagcatttttcagtaaaaactggtttacccaacagattaccaagcggtgtaactttcttaaccagtacccatagttacgtttatgataagtggttcataatgatgattctggttcacagaccaagataaagatatgtttcctgaactctacaataaaaactgagttaaggtcagtggatgaagtaaatttcttggaaaatcacaaatccacatgttaatgtaggtayagacctaagtatttgatgaaccccaaacacccaacttcctggtagttctggaaaatagaggtgcactsctattattatattaggacagatcctggttcagttaacggtgggtgttttcttttcgttcttggtggttaacattagtggtcttttttcactaggcaaggtaacaggttttcacaaggcatatggtaaatttgtgatgtctttagagaacaccgccacgttcaggccccattgtcctttcctgttaattgtgttgtcctggtctagaagagctacttaatgccataaaggaaa

SEQ ID NO: 2339 - DNA, 600 bp, Bovine  MMBT22890
attctactgacatccaggcttcctgtgggctcccaggggctttggccttgaattctttgttggagtttcatcttcccacttcacagctgagctctgggcctctatctcattccccacctctgcaacagggaatgttgcttgagtatgtgtttcaagataattgcaaaatttaggaaaaaacaaaacaaaacaaaaaaaaaaacacgatttggtgtgaacatgcatgagcagtggagctcggtggggggttggagatctctgctccattcttgggggggtagcaggacgtgatgggtgtgytgctaacacgcacagcctggttctggattcctgctgcagattttatcaggaatttatcagattttccagtgatgcagagtgtaagttaagatgttatctgcagagtgtctgccactatccctggctcagaggtgactttgctgtaatgctcatgaaacttaagctcccagaaacttcatatgcagcaacctgttccaaggccctgaaacggaccttagcaagtttcattaacatttatttatcctctttcttagagggcttcaaaaacatacttaacctccagttctacagaacatggat

SEQ ID NO: 2340 - DNA, 600 bp, Bovine  MMBT01003
ctctttttgtcatagtacatatccatctccaaaatatgggatgactcccttaccttttcccctcttctatcactcaaaatatgggatgactcccttaccttttcccctcttctatcactcaaaatatgggatgactcccttaccttttccccgcttctatcactagaatataagcacaaaggaattttggtcttttttttttttttttatcactgttgcatcaagaattgtgcccagcatcttgtgggtatttaataaatacttgttaaataaatctttgtttcatatttaagaaagaarcaatgaaagttgcatctgcctacataggtcttgtcaataggcagacttcactttagactgagtgtatgggcagctgtccaccaggagagccagccattgcactggaactctcagggaatagattggagaggaatttgtactggggtgtaaacacccgagttctttccagagacttaattctgaaaagtaattgtgatacaaaattttatttggagtattaaacagatatctttaataaggatggaggctgcagagagagaaagagaatagaaatcagaagtaattccacttaatagatgg

SEQ ID NO: 2341 - DNA, 600 bp, Bovine  MMBT07555
tcaaggaaaagagaacttggtaatagcttgttgcagctttcattttgcttctccctggactgggaaaggacagtgttctctctggtggcccgtttctctctcccatgggccctgagtaggttgcccgctgagcttgtgaacacagtgggcagagcagagttcccacggcacacaaacacacctrtgtcaatatgacaatgaacttgagagggcttaattgrtctatggaaacaggaagcttacattttaaaaattattggcagttgcatcttacttagcatcactctggtaaatgtactrgatgggagaattgcttaggagatgtcttaggtgagagcttgctgcttctctgactttgtcaaggatgacagtgatgactggggagttgggcagctccagtaaaatcgtgggctctgttcttcccaccaggcagagaggtggccactgggtgcactggcagatctttgaggatgaacataccaccacatcratgcctrtttactaacrgckgggcagaactgggcctattagcttgcttcccagttgggagaatgggcagtgtaatgaaaagaaccaaggcttcgtggtcagaccatcctg

SEQ ID NO: 2342 - DNA, 598 bp, Bovine  MMBT09152
  misc_feature (1)..(48): n is a, c, g, or t
nnnnnnnnnnnnnnnnnnnnnnnnnnnnnnnnnnnnnnnnnnnnnnnnttatgatcccccttcacagatgaggaaaccgagctcacacatcctgagtgtgtgccttctgggctcaggcctctctctggctggagccaccaggcttccrgcaggagcaggggttcaaaccagctgtcacgtgtctggctgaccatgacagtggcctgtagctgaaacaggccagagccccctgcatactcaggctccctgcccctgcctcctgctcagacagggctgagacatcagtgcccacaggtttgytgaatggctgggagagattccaaagaaggcagaaaggccgggaacagggaactggcctgttggagggcctgggactyacctggttggcagggctcgggcctaccacggcctcgtagggtggtgggagctcagcagggtacagcaggccggggctgttgatggcgacgccgtacaaagtgccaaacggggaggaagcgaagtccaagtggaggcccctgagcagcagaaggaggaaggtcaccctctggggaaggagccggctgttcccattgccctcagagcaatcggaacaattccc

SEQ ID NO: 2343 - DNA, 600 bp, Bovine  MMBT01643
caaccagagctggaaaagcgccacctagtgctccaatgtcaacattacatgtcaacagaggactgagcaaagcactgtggtctctggcaacgagcgcatttctcaagtgaaaagataaagacagaaacctattttaaaattaagtctcagaggctctcaagtgagacycaagttttgaaaagtaattgcacccccaaagctcaggatttccaagaaatatttattttatttttcatgccaataggaaagcgggacaccccagagttatgcacaaaggcattttcttctaccagcacaagrgatatacggccaaggtgaaaagtatagatctgccttaatttcttggaaagcccttgaaacgtaggttcagattcyagagacttcacatgagtctgccttccccaccctcaaggatccgagttgcacttgctccttcttggtcttactcygtgccctcttgcagagttcatatacagagcctataattaggcgttcaccacgcttgaaagcatatgttttccacaaccataccactaacctcagaaaacatactctacataaatagacaaaaggccacgaagaaagayttgtttttaagtt

SEQ ID NO: 2344 - DNA, 600 bp, Bovine  MMBT01646
tccatgggatttttcaggcaagaatactggagtgggtcgccattccctcctccagggtatctttccaacacagtgaccgaaacctgcatctcctatgtctcctgcattgcaggcagattcttgacccactgagccatcgggactatagcctccaatagcacaaatccactctagtcttttgaaaccagagtttaaaagttttggtgttgatgggaatatgagtmcctgattagaaactttctgtccaaataaatcaaagcctaaggtggggaacaatatggaaatacacttctcctttgrtggkaacaaagatactaatgttacttcagctccctttggagaaaataggccttgaattattctccaaaactcactgaaataatcagccttgttggaacaataagggaaaggaagaaagaactagtcttccagggaaaatagtggctccttcgtgccccatgtgagctgaagtagcttggctcwtcttagctctggggtgatttgtgagagcttttggcttaacacattatctctgaaatatcaccaagagtcagagaatccctgaacagtgggcaataatctgcttggagttttgaaaat

SEQ ID NO: 2345 - DNA, 600 bp, Bovine  MMBT05607
atcaatggtgaaagcacctcttttttttgttgttttaacaaagagggttactgcagaatgaatcttcacaaacagtgctttatttggtcacaggatccatgrtccactatgaggatgggagaactttattggatgctaatctaacatctaaaattatatttgtctgctcttctttcttgccatttatggtgaaaaatctgaagccagagcaccgtaaatgttttgcttctcatttctagtcccatcccaatttcatttycttgcaatgagaggaagggttggaagataattagcaatgtycttctcccacatttaacatctctacttactgtgctstatgttaccrcttactctgaaaaattcagtatgtagcttgaatgttgttttaggcttttctaagttttgtgtgtttctggggcattactaatggtttaccttaaaatgcagaaaaactattatgaaggagactttaggataaaagcataatcccctctaggaaacaaaccacttcactaaaatgccgttgttaagggatggggtggaakaagcagaaggaaggttagacagtgacttagaaataaatatcaacatttgatgtca

SEQ ID NO: 2346 - DNA, 600 bp, Bovine  MMBT08461
tttggccagaaacaataatacttggagctggaatagatggcacggagagagggtgagacttttctcagaaacttgaaacacaaaggatggcrgggatgagcggagagcggggcagggcctcaaagtagagtttgcccggtggctgagcagcaggcaggcccttcctgccgaaactgactgtgtgtgtatgttagacaaaagctctacaactttactactcactcttcatagctaatcgcagtctcttagttttgaagrttccaccagcagggrggccacacgatgtctgtggggcgctcrggcaaccctaagacttaggcaagaaaagaaaagagcagaaaaagagggatggagatgatagagggaaaggaacaaatacagagcggttgatgcaccctggcagaaaatctgatttaatcagtttcaccctcttgtcagtactggaaaagacctttattcccatttaatagattaggcaaccgaggccagagtggtcaagcaaggacttattactgcagagcacatggctaatgactgtgaaattaggatggcaagatttggaaaacaaaactacaggacacccagttgaatttgaattcc

SEQ ID NO: 2347 - DNA, 600 bp, Bovine  MMBT13231
aatgaggttcacagtagctcgcttaygagatttctagtttgttaggtgggatattaatacagaggaagaaataggcaacattttgcctgagagttgcaaaagcatcgaatatcagttacccctgtggagctcatacctccccctaatcctgactggatgtttgactctctcgtgctcaatccctttatttctttggaggtcaaaataatgaaactgccttcagaaataaagacacagcagagatgaggagtgaatgattagagtatttgcactttcatctatgcagagaaacacagtgayagtttgtctcttgtgttctgttttgcagataatgtcaaataggacagaataaaagaaaagatgcaagatccttcagactcccctgtctgtctagaatctgcttctctggccctgtttttgccccagcctctgggtctcacctttgtgtctcccctttctttctgcttctgattctgctcttactcacattagacaacctgaccccccatcttcacctgtattcctagctttcatgtgacaaccagagtctggttccttctcattcttgattcatctgtttaaaacattatagaagatttc

SEQ ID NO: 2348 - DNA, 600 bp, Bovine  MMBT14495
gttacaatagttccagtctgtctggagacttgcagtgagcctctgtagtgacttagctacaaaatgttaagaaaagctattcttcagcagcagagacactgggaaaattactgtcaaaaagggtgagccccttttaaaagcacgatgccaaagcattttgatgatggaatactttattttgtaagacatcagaatgctcatttcataatgttaatgcaaggagctacttcttttaatccccttttgtagatatgcatcaagcaacaaaggtttactgtttagcatagggaactatagtcratatcttataataacctatgatggaaaataatttaaaaataaatgtgtatttgtgtaactgaatcatcttgctgtgcaccygaaacattgtaagtcaactatatttcagtaaaaaaaatatatattaaaaaaattcccttttggagtcagtaagagtaaagataatagtgggggttctgcatgaataaaaagattgataaacattatatattttgaaaatattccacatgctctaactttcaaaagaaccttcamttgttctatggccamaagacaaaggataaactggggaaaatgttc

SEQ ID NO: 2349 - DNA, 598 bp, Bovine  MMBT14966
  misc_feature (1)..(141): n is a, c, g, or t
nnnnnnnnnnnnnnnnnnnnnnnnnnnnnnnnnnnnnnnnnnnnnnnnnnnnnnnnnnnnnnnnnnnnnnnnnnnnnnnnnnnnnnnnnnnnnnnnnnnnnnnnnnnnnnnnnnnnnnnnnnnnnnnnnnnnnnnnnnnnntggggcgctggcctctggagcaactgaaggcgtttcatagcaacctaaatcttaacggctgaaataggaaacagagcaaagaacgtggaaactaggtcaaggaggaaactctggtaaacctcctgaaatggctgacgtttcaaacgttacaattcctcktatcagtcattttcaaaaggaaagtatgtattcccaaakggtatcctttccagaccaaaacaagacatgtaagcagacaggtatggagaaatagagaaacaaaacccaagtcagccacgcacgcctcacctctgtactgcccagccttctrtgtctgtctctcctgagctgcactgcctcctggacatgtggtgtcaggaaagtgggatccacttgacctgagatgagaagtatcagtaaggaaacaaattcattcacagcttgaggtcattatctttaatccattttagatggattg

SEQ ID NO: 2350 - DNA, 600 bp, Bovine  MMBT16227
ctttcaggcaaactaagatctcatatgctatgtggcatgtccaaaaaataataataatttttaaaatagaaatacagagatgagcagagtatcattctctcttcccgggcccatagatgggaggatgatacataaaagcttcacttagaaactctgttgacatataaagagtttcattttcaccatggatcactccaaggaaccagaccttcacagcagctttcatcagaatgctgctaactcacacatggttggttgaaaccattctaagagtgatgaggacaactgagcatctgtaayaggaaagaatatttctatgcactgaatccacccaaatgatctcattgtttttattttcatgaatcaaaagtgctttcatccagaagaaataatgacttggtaatgtagaaaaggggaaacatgacatttggtttgctttattaaggacttggcacataaattataaatgagcctttgtacatggtcactaagagaaaagtaaactgtgacttttatattcaagagagcataaaagcatcaaatgactgctggtcctctgagatggaagtcttaaaatctgtagtctgcctgagccctctt

SEQ ID NO: 2351 - DNA, 600 bp, Bovine  MMBT17139
aacacgactgaagcgacttagcagcagcagcagcagctcgctccctgcgtctagttaacggcaactgaatggtcagctgctgattcactggatgctgtttagtttgttctgtcagctgtttattcatctgtaacttcctgttaagatgcagggtgtgctttttaaagaagccttgcacagcataagttttattttgggactggatgtgctaatatataaagaggatctccgggagttatttagccccatgagctattttctctgagcaaaattttgtggacactccctgggtgccaggcrtgcttcaggacaccgtggtgcagcagtgaatgagactgtctcagcctcagaagcttgccgtccactcctgcaagacgagcacaagcgtgagtgcagtgaagtgtggtacacgtgcaaggggtgcggggtgcagagcagggctggaaactcccaggaagcaaactgagggagtccccgyggcagaggctctgggagggaatttagcaacatttcagctgtgggtgatagtggtttgtgtagkcgcttagtcatttccaactctcgtgaccccatggactgtagcccaccaggctcctctgt

SEQ ID NO: 2352 - DNA, 600 bp, Bovine  MMBT18807
aacaaagagggttactgcagaatgaatcttcacaaacagtgctttatttggtcacaggatccatgrtccactatgaggatgggagaactttattggatgctaatctaacatctaaaattatatttgtctgctcttctttcttgccatttatggtgaaaaatctgaagccagagcaccgtaaatgttttgcttctcatttctagtcccatcccaatttcatttycttgcaatgagaggaagggttggaagataattagcaatgtycttctcccacatttaacatctctacttactgtgctstatgttaccrcttactctgaaaaattcagtatgtagcttgaatgttgttttaggcttttctaagttttgtgtgtttctggggcattactaatggtttaccttaaaatgcagaaaaactattatgaaggagactttaggataaaagcataatcccctctaggaaacaaaccacttcactaaaatgccgttgttaagggatggggtggaakaagcagaaggaaggttagacagtgacttagaaataaatatcaacatttgatgtcaaggcattaatccctttatacctggtgatctgtaggg

SEQ ID NO: 2353 - DNA, 600 bp, Bovine  MMBT19044
ggcctaaatacttagcacttacctagcctagtctagaacttgaaaaaaggggcgatcatattcccttgtggaaggaccccagtgtactacccaaaatggatactgttgatctttgtttcagtcttattcagtaggacctgtggctttttatcagagtaactatcctatttggaaaaggaaataatcagaatactcctggactactagactattgcaattcaggagacccaaaatgccactgtggcccttcrgtcagaaaagaaccttaaggagattaggtaatcaatggagttttagctsagatttgcctcacagtgggtccagtggggtccccaagcctgtcttgtggttatgtccccaatttcagagtacataattgcaatggttatactcagcaagtggcagaatctccaaaactttctgttgaacactcattatttattgactttcagccggtggttccacagtttcttctacctggaaggcccttgtagatgtccataaacatccaggtccacattttaaggtcagtcttgtcttgcccattatatgcagttacgttgggattatcagacagagtatctgggtatgcaaaagcag

SEQ ID NO: 2354 - DNA, 598 bp, Bovine  MMBT00867
  misc_feature (1)..(20): n is a, c, g, or t
nnnnnnnnnnnnnnnnnnnnatatacatgtatccattttcccccaagctcccctaaaaggctattttctatgtcatgggattgtctgaagattacatgagctaaggaatatgaaagtgtcctggcaaatgtaaaatgatacacgaatcatgaatattgttttatcatgcactttttgaattctacagatttacctattaaacaataattatttatacataaagtgccccaatatgatacaatcgtggtcctagaactccaaagacttcataattaaaatttgtttcactttaaagaaacmtttgtattagcaaaaatatttttatcaaattaaaaatctttgtctgaatccctaattttttatcagtttgttttttttaaacttcaagtttataccatttatgtgttgttaaatcaatcagtcaaaatatggctgttttgatgactttaaatctgaagttacaaataacagttgaatctcatgttagtcaattgatctctgtttttttgttttgaagatataatattgagaaatcctaattacccagaatagaaatcaaaaaacttattttttwaaaaaaatcttgctttaaatctaa

SEQ ID NO: 2355 - DNA, 600 bp, Bovine  MMBT01680
tcatcacctgttgctcctttgtcatatataggtcctcccgggagggggtaacacattgtgccctgcagacatttactctaaacagtttgaaggagtttatttgatattttaaatttagttcttgcaagtaaagtttagaaacaaagcaggaaaaggaacattgaacaagagggataataaacagaaaccaaggtattctttatgtcattcagttctactaagatcaattgaagaactattatatgaaatacataatattatgtacctagttttaggagtttaagttataatctctctctrcagtgattcaggctgtttgttgactttgaatgctaattaatctagagacttagagtcccagataaggtaggcatatatgctggatagggatgcaagggagaattaattaactctcaggctaccttactcttatttgaatgcactatttacaaaccattaaattactaacttaagagatggtgaggttgcagaatgtggctttgagtagtttgcaaagaatactgtgtactgtaaggtctgcctcattagacaaaatatttgtatcattggaatgtctccttgaaaaaccatttgataaag

SEQ ID NO: 2356 - DNA, 600 bp, Bovine  MMBT02712
gatccactggaggagggcatgactacccattccagtattctttcctggagaatctcatggacagtggagcctggagggtcatagttcacagggttgcaaagagctggacacgactgaagcacttagcatgcatgcatacaatctgattcagttcttacatattaaacagctgcttctctgtttcccccccactgtttcatcgaattctcatgatgactctgcaatgcaactactatcatccacagataaaagataaaattacaaaatcagctcaaatttacctgctcatatgagaaagaytcaaggcttgggtccagacatctccaaacagtgataattgtcaaaatactgtttcaaagagggacctgagctgaagctgtggctttgcctcatacaatctccatgacctcctggccatwgcttagtcctctgaagcctcagtttctttatctctaaagtggtgatgatgaccagctctgctcatctcatgggtgtgaggagagaagcaggtgaaatratataatagtgaaaacttgtttcttaccagtgtccttggcagtgagtaagagaatctgtttgagtcattctgctctttaattt

SEQ ID NO: 2357 - DNA, 600 bp, Bovine  MMBT02740
tccattgattattcatcttttgtttttgttttgtggtttaaataaattttgtatctagttgaatttatcagtcttttattatggcttttggcttatgagtcacaatagaaaggtctttctcatttcaaggttttaaaagaattctcccatgttttcttgcagaacttatagttgatccatttggaatttatcctgatatgagatataaatccaacttttctagatgaaattccagatgtcccaacacctagactatttgttgaatagtccctctcttcattggtgtgagatgcgcctttygttgtctaataaatttccatatagacttggatatatttctggattttctattctgtttcagtcattgctgtgactgyttatgtgccagaacttgatttttgtgtataggtgtgtatattttatcattccattttcccctctattagtttggaattctgtttttagtgttcactttgtatgttayaagacagtttttatttacttttttatggctgtgcagggtcttggtggcttcccgggctttttcctagttgtgccgagctggaacgactctttagttgtggagtgtgctttctgggg

SEQ ID NO: 2358 - DNA, 598 bp, Bovine  MMBT04108
  misc_feature (1)..(146): n is a, c, g, or t
nnnnnnnnnnnnnnnnnnnnnnnnnnnnnnnnnnnnnnnnnnnnnnnnnnnnnnnnnnnnnnnnnnnnnnnnnnnnnnnnnnnnnnnnnnnnnnnnnnnnnnnnnnnnnnnnnnnnnnnnnnnnnnnnnnnnnnnnnnnnnnnnnncttctcagcagtgttctgcaatttggggaggagtgagtatctttttataaaatcacttagtgagtccctttggtaagcctgtacactctattacgctgaggtttagtgtataagaaaaacgtggtgtgttggagtttgcctgcttgtgttactytttctcctttacatgctgtggtagcttactcagccatagaaaataaattcaaagctgtttaataataaggctaytgttgtgtagtagaaactaggcattatggcagtaagtaaataccttatacatcaagaatatttcaagtttctggtgaaatccaaagtatcacaagggcttcattatgcccttgctttcagcccacaasccctctgatcttaatgactcccaaacagagtcatccaagattttgtcccatgtagggtcactgastaagtttgtgatgggtctctgtgtgttctct

SEQ ID NO: 2359 - DNA, 600 bp, Bovine  MMBT09308
cttatagactgttttgttttatcatccttattaagagacttctactgcgtcatgttcctttattcagaaaattacatgctatcatgggtgtctgattgtcagtgtatttgacctaagcaataactggaatacctgttgtatttgcttttgcttgtaactttagaaattgaagttccgatcttaaattgagcccttgtcctcaagtaaacaaatgattggaaacaagatttttctttttcagtgctactttgttgaaaagtcgaattggtttcacctaccaaataaagcctgatggtgctraccatcttcattgttggactgcacagtttaaatgtgtattgggggctataaaaatatacatgcataggctaggcttgatcttcttgagctgaaaatttcacaagaataataaatgtgaatgtaaaaatcgtttacataggatatataaacccaaaactagaaacgttttgtttcatttctacatggttaataacgtaagagttgctccctcttcaaagaattattttgacaccagagataaagttttggtaaaggtagaacttgtggtaccactgcctgatcagctttttgatgcctgag

SEQ ID NO: 2360 - DNA, 600 bp, Bovine  MMBT10577
aaaccaaaaataattaaaaatatgtttttaaaaaaggaaaccagattatccaagaggggtcgaacctagaaactcagaatgtaggtgtatgtgcggtttggatggtcatggggttcacagagccccgtgtctggagtcccttgtcccagagtcagtgccccctgcttggtctgtggtgggggaggggctttcctgtcacttcagaagattgtgggtcacaaggcccgaatttggtgagtcttgaaatcagccggcccaggycctctggtgacccgggtctctcttatcatatctagagasatgactccaatatcaacgatttaggctttccttatgggttagcctgggaaccacaccacattgtttggttaaacctcgagtacggacggacttaataatgaactgttgggccagtgctacttgcttgacctccagggctgtctttkgctgccgctccctctcccccagagcagtgtcctctcgggaaatgcagctgaccaggctgcatccgtgggaaggcctggccctgctgaggctgcaggaaatgaccctcttagcagccacgagctgtgatccagaggacaatgacagggggacgga

SEQ ID NO: 2361 - DNA, 600 bp, Bovine  MMBT11754
tctttgctcatatctgtgcttttggctctaaaaatcttaaggatggttttaaaaattagatgtgattaaaaggtaaaaatatacagaaataaatgttttactgttattgtcatcaacaaatgggcttcctccagtgtgcagcaatgcatttttttctgagtccttgaaacagaaaagctgcggcttcttgcattagacgaagcttgcacgtggatggcaaactacagcaatgtctaccgatgccgggtgtggarcattcgtgcttcaaaagttcatttgtggttgtttagaatggaggcytcattttcacaaacgagtaatgttataaatggtggctagattcttgagttatctcacaaggctgtttaattaacaatgtcttagagtacatttctagtttatcaggtggctgaagtaatgcatatattatgccagccactgcaacataatcatcaakttcttgatcaattaaggagtgtttactttgagccctgagaactgtctcctgacagcagtactgaatctgtcactataggttctagagtatgtaggagttgttggaaaatttcccatattttaatagctgagaaagctggtttg

SEQ ID NO: 2362 - DNA, 598 bp, Bovine  MMBT12503
  misc_feature (1)..(65): n is a, c, g, or t
nnnnnnnnnnnnnnnnnnnnnnnnnnnnnnnnnnnnnnnnnnnnnnnnnnnnnnnnnnnnnnnnntaaaatagggagggagacatagagtttgagcttttaaggttgactttttgactctgaaaagaatttttaatggcaacataagtaaggctgaagcttagaatctgcctctttcaaggtctccaaatagtcacagaaagaaaattttcagctctaaatgtggcccttattataaaatgcatcatttatactacaaaaatcattttacatacatacaaaaaagattaactagttaaartggagacaaaatattggctaaggttttaaaatttcttataaaaataatttattaaaattggactacagaagacagaaaacatttcacaacttcrtattgctcattgttgccctgaagacatcatgaaacatacgcaggtccacagcatgggcttgggcacaatataragaaagctaaagaaacacaaccctttccaaccaaagactagagttgtaactagtggacttgtgaagctctatcacccagtgtccccaggagtcttccttttttagtggaacctgtaactaactttaaaact

SEQ ID NO: 2363 - DNA, 600 bp, Bovine  MMBT14803
gactgaaattaagctgtcctgaaactgactctcccatttctcaagattttcccatacatcttgattttctgtgtttaactcagcctatcactgagagtcttcctctttcagtgaacttctttcaatttgggggaaatgaaaagatgataatttcccatatggtcaatgaccagaaagcactatctgtgtgtttaaagcctatttgaacaggacaaaaagaaaaataatttttaaaaaacggaggggatggagactttttttaaagtgctatagctgctccttaagatcactaatttcttsggttgtagaggaaattttgagagactacgaaacttaattgattgttatcaaaagattatacagataactttgaaactgttaggtaacattcacacccaccaattctcctaaaccaatatcctggaaagagctgaaatttacctttaagttatgaagtaaaggtcacagaattcttgagaagcattctgaaaacaattaattcactattttattttcaggtgccaagaaaatgtgaaacyatgagaagcatttttaacatgtcttttaaatacattatcaatgcattattacaaagaaatg

SEQ ID NO: 2364 - DNA, 600 bp, Bovine  MMBT15899
gcgtacgcattatttcagtcgctcctttcaccgttctgctgatgcttgtggcgttacgccacgcacagatgaagagactgagacgaggtttccatgaatgacttgcagccaagagccacgtcacagcgtgagcccggggtttctgactcttagatctggagccgtttgtaagttagaacatgagtgagcagttctcagaaccctggagggtctgggagcacagggttggtttgtatctcttatcaccaaaggaatgaatttcttaaaattactgggttctggggcaggggagtgtcttcrttttgtattttggttcaatggcagctctttccgttgtttgagggactcatccattttttctaaaaaaaactgtatgaacgttactattatctcaaacactgatgtgacagatgtcatgtgtatgactttcattttcataaaaacctgttggctgattttttttccaagtgatattttaaattgtcatttggaatgtatttgctaaagtttattctggtagcatgacttcattgacgtgagtatcaagagttcaagtaaacatcagccttgctcattcaggacctaatacgtctgactgtc

SEQ ID NO: 2365 - DNA, 600 bp, Bovine  MMBT17408
atcaacacgtttggtttcaaaaacattaaaagaagaataaagaaagaacgctacctgtgtgtggctgcttctcaaatacccagatattaactctgaatgtctgtaaactctaacacttttctcattgacattcttctagtcaatgaagtagatagtacaactaagacagtacatttttcccgtgggactcaataaagctatttttattttgaatggaaaataaatacagcccataaattttgtttatttttttctgagtaatcctttccatttctcaaattctgtgattctgtattttgytatgtctttccccacccagaacaaaatactctaaaatgagctattctacaaatatcatatttgtagaaaataataaaattgaaattgcctaaaaatactctaaatgcttttgaatatggttacattctgacatcataggaaccctgtgaaatagttattataatcctgctttacggtgagagaccagtaagagctggaactcagtgcggtctaattagaaataccaagcttttcccaccatacctcttggcctcctcaaagtgtttccygaactatggacagttacatgattttagggtg

SEQ ID NO: 2366 - DNA, 600 bp, Bovine  MMBT18603
ttagtttttaatccttagaattttagcaatattttggatagattagtggttctcaagattagttgcacattagaatcactttggaaagtttttagaaaaaagtaccagttcctgggcttcacttgtgaagattttggtttaattgattttgagggtgtgtttggcagggctgggtgttggtgtttctggattttgtttctaattcttkaaatcagtcatttttggcaccagggactsattttgtggaagacartttttccacagactgagatggggtttagggatggtgtggatggtttykagatgattcaagtgcatacatttattttactaccactgatgtgacaggargcggagctcaggtggtaatgtgagcaataggcagtggctgtaaatacagatgaaacacctcctgctgtgcagcccagttcctaagaagccacggacttgtaccaatctgtgaccyggaagttgtgaacccttgcttccgatgattaaaatctctggctagtcattaaaatctaaccactggaatagatgccccttggaatcctgtataacttgaactacttagatatagtccttatgtttttaggtatc

SEQ ID NO: 2367 - DNA, 600 bp, Bovine  MMBT18758
gggagaagaagatgagagagaaaataagccagaactaacagcctccccatataaggagtttttaaaaatcatgaaactcaagacatgatgagatagttcttcacacccatcaatatgaccattttcaaatatgcaaccaaccaagcaacaacaacaacaacaacaaaaaaaaacattatggagaaactggaaccctcatgtcttgytggtaggcctataaattggtgcagccactgtggacagtggtatgacagtttstctaaaatttaaacatagaattccctatgatccatcaattcrcttctgggtatttacccaaaagaattgaaagtagagatgcaaacagatgcttgcacacccatgttcatagcagcatcattcacaatagattaaagtggaagcagcccaagcgtccactgacagatgaccagataggcaaaatccggactcatgtgtgaacctagaaggacaaatactgtgagtccacctgtgtgaggtcccgagaggagcgaatacacagagacagaaagcaggctggtggttaccaagggcttggggaaggggaatgaggagttagtgtttaacgggtgcaaagggtca

SEQ ID NO: 2368 - DNA, 600 bp, Bovine  MMBT18808
gttactgcagaatgaatcttcacaaacagtgctttatttggtcacaggatccatgrtccactatgaggatgggagaactttattggatgctaatctaacatctaaaattatatttgtctgctcttctttcttgccatttatggtgaaaaatctgaagccagagcaccgtaaatgttttgcttctcatttctagtcccatcccaatttcatttycttgcaatgagaggaagggttggaagataattagcaatgtycttctcccacatttaacatctctacttactgtgctstatgttaccrcttactctgaaaaattcagtatgtagcttgaatgttgttttaggcttttctaagttttgtgtgtttctggggcattactaatggtttaccttaaaatgcagaaaaactattatgaaggagactttaggataaaagcataatcccctctaggaaacaaaccacttcactaaaatgccgttgttaagggatggggtggaakaagcagaaggaaggttagacagtgacttagaaataaatatcaacatttgatgtcaaggcattaatccctttatacctggtgatctgtagggtgaatggaac

SEQ ID NO: 2369 - DNA, 600 bp, Bovine  MMBT18825
agttcctgacagagctggaggcatcaaacgtccgttagtatattttgactgaaagtttggggctgaacctgatcatatccagtctacacttaccccatcaagtgttcatgctacactgtttctgtgagataggcaagcatttggataccctctcccgccttaatttatccgtatttcctttcggaccatgaatatcttcactgctgtggcataccgctacagagccacacaaagcaaggccgatytggaaatacagagtggaaagactgcctcttgttttattttctataaggccctcckgaaagcacatgaaatctggggattgtgaactctccttccacgsaaaggacaaaataaaacgtgattcaactgcttgaatttggcctgaaagggagagcgctgagcactgggaaagaagggagtgggaagtaggtggtccagctgggaacagaagcagcagagacagagctgataattaacaaaccactgcacactgaaccatgccttcatgctcacaggagtggaaagacagcaccaaaggcccatattttggagtgactttaaaattcatgagtttaatcagggttcagcaatataaat

SEQ ID NO: 2370 - DNA, 600 bp, Bovine  MMBT19478
agctatggaacatcttatccatgttttacaaacagatcggtatgtctctaatgatttttctccctaatttttcttaaaattttaattaatttgttttagagtcactgttccagaaatgattaaggctactaagtttttactttcagttgtcattttaataaacagttattgggcactagatccaaaccattgtgctaagcatttaggacagacataatctaaaccttcagggattgagagcttaccattatataaaaatggaatgaagtaacttgtccaataaaggtttaaaatttggartttgaacaaattaatgtattggttttcacttaggtatactatagcatactattctataatatacatattatatgttatatcagttatctagactttgtctttctgaggggagagaagtaaactcatactaatagagggaagtcttaagagaagagtcactcagcctagtttttgcttttttagtttctctttaagagagcatctgcatctttgtttttaattaacaactgtacaggaataactttagatcttatctctagttaaatatatctttcaatctttagctgctcagtttacatt

SEQ ID NO: 2371 - DNA, 600 bp, Bovine  MMBT19754
cttactgatgttgtgaccttggagagctaaatagcttctctgaatctcatattctttgcaaaaatgaagcaataagacctcatatcttctagggtggtgtatgagttaagtgagataaaatatgtgaagccctggaatatgacctgacaatgttaagtgtttagaggacttcaaattgctccctccctttcctgtgagcatcaccacaagtgaaaatgcaattatgggagaagaaaggcaattaaggaacactcaattttcctagcttttataaatcaagaacatatttatgagctataytatagtgcgtggaaaaaaygaaaagaacaaaagacaaaaaccaggcacaagatctcggggttctcttgtattatcataactgtaaaaggcatttttcattggccatttaaaacctggtgttcctgaggcctgtgaggaagtgcacagatcactcactctgcttcaggtattgacattcctgtgaagaagagatatttcctataggattattactcatcatgactgaagttcaatagataaattaaaaacccagccactcctcagctctggaagtgactcactgctcaaggaatgctctct

SEQ ID NO: 2372 - DNA, 600 bp, Bovine  MMBT22067
cagggtaaaatataggtgttctaatattaccatcacttactgtaaccacataaaattattcaggtatcagagataaagtccatgagtaatattcctcattaaaagagactggacatttgaaagaaaatctgataactaatagcctatgcgtaacaattttttaaagctgggtaagtggagatacttcctcagaattgcatattaaattcactttcaattaatgtggttcagcgttttcttcttatgatttgtatgcttggtaatacttttaaaattaactgtgcctctgacagacacacyacatacttctaagccgccgtaatttttctaacactgtatctttataacagtaattgccttctttctgaaagaatatgcgtctgaatgtagtgacacttcatttattacttttcttatattacagctacctcagcatattagatttctttcycccttaacgacttttttctattaggagaccatgaagacccccagggcagagtaagtccattaacgaggaggcacttcagaggcagcaggaatttctaacatggacatcagacagttcttgtcaagaagacatctcgtcaagatcaggat

SEQ ID NO: 2373 - DNA, 600 bp, Bovine  MMBT22744
cgtggccctgcccctggccgggggcccagtgggccagagagcacagtggtgcctgaccttcrggactggaatgcagcttgggtgtccccaggctcttactcccgagctttgggggcatgscygggacccagggagagctggctggcccagctgggctgatcaatatttgtgggttcagtttagatgagggggaagttcccaggaacacctgggctgggctggtgaggacaggctgcccctcatggaagcagagatgggatggaggccgagacagtttycacgctccactacccggggaayrcccagaaagggtctgaaggggtgcaggctcacatggctccagatactcctgctggggttcccagatgtggctggggacgggtgggcccagcacggacccyggacggggacagactgtgcctcagctctgagctcggtgccctacagacttcctaattctccaaatccccagaccagtcttcctgtgagtctgaaggcctcagggctgcctcccttccagcgctgagatgagctgtgttcctgtgatcgtgattttggggtgggggcacaggataggaaaaggcctgcagctgggttcag

SEQ ID NO: 2374 - DNA, 598 bp, Bovine  MMBT22766
  misc_feature (1)..(170): n is a, c, g, or t
nnnnnnnnnnnnnnnnnnnnnnnnnnnnnnnnnnnnnnnnnnnnnnnnnnnnnnnnnnnnnnnnnnnnnnnnnnnnnnnnnnnnnnnnnnnnnnnnnnnnnnnnnnnnnnnnnnnnnnnnnnnnnnnnnnnnnnnnnnnnnnnnnnnnnnnnnnnnnnnnnnnnnnnnnntcttctctggtttccttctattctcctgtcggtgactctggcatcttcgtcagtgttcagtcctcctaggtggtctcttctgcctcaccctcacctgtccttacttactctcttctccatccttctcccrctctctccttaggttcccagaaaactcaaacctctgtactcttctgtartttttggtctttttcttctgtttctactataatgatgtttctctctgagtaaaaatagtagagggccttttacatttcttttagattgggaggagcaatcagaaaccaaagatctaactccagagcaaagcctgcctgtagaaaaatcatcttcrggggcaggaatagaggatttggaggcaggtgattcctggtatacccacacaggagagtcttctgatgatcccctggagtcgcaacaggtcaagc

SEQ ID NO: 2375 - DNA, 600 bp, Bovine  MMBT23279
agcaattaattaatctgctttaggaacctaagtaagtactagctgaaatttaagatgtaaaattggaagtcatgagtmcaatgaaggttagaggaaaaaagaaatgggatatgaaggagagtcataatkctgctcagaaggtcaggccaaatagtgcaatagaccttttgtgcttgaattcatgggagttttcttcctcagattaaagttatraaaaggagtttttttctctccttgatggctatatttaacaggagaatagttgctcaaatttattatttggcccagtwgaaaaaagtrcaatgtaactcaaagtctaaatcaatgtaatttaaaatataattatgcatgtatgggagtgtccatggcaagttagatgaatgtgttctaaagaaagaataagaatccagggattgagagattcttgttaaataggaaagaatcaataaggagacaagtttcctcattaagagatgatcgccacatttctgaaaaaaatgataaagtgactgaaaaaaaagatgacattccttatggagattcataatgtcttaaaaaaataataatgttttttgcttcgctgggtctttgtgtctgtgc

SEQ ID NO: 2376 - DNA, 600 bp, Bovine  MMBT00751
atatttgaatgttttcatacatttaaaaagtgtggatcagtggctcattagtccacataataaaaaaatttccaatcaaaatagagaccactttactgacacagttggttaacttagcagggggctagcaaactagtgactttttcatgagatactgcagttttatttctagtgtcacctattaggtcaggattcatatctgctgttaagagaatttcattttttggcacatgaggccagggggtgttacttttgaagcagttccctcctacaggtaaaaagaacctgggaggaacccayactgctagctgcgagagcacacacagttactgcgcaccgcactgttaacaacattgttcaggcgtcacgtggttttgtcttagaaaaagttttatgtgacrtgatagacctgttttgccagccagcagataatgctctatgaacacctatagagaaaacctatcaaagttaggtatgagagcacaggaaagaagatataaaattaaccttttagccattgagtttctttgggtcccttatgtgattgttacctttttagatcttacagaaatgagcactttttgtgtcagctcctgaatc

SEQ ID NO: 2377 - DNA, 598 bp, Bovine  MMBT00768
  misc_feature (1)..(37): n is a, c, g, or t
nnnnnnnnnnnnnnnnnnnnnnnnnnnnnnnnnnnnnatagctccttactgccctcttctggctgtggcttttgtttgtcattgagcgtgttttagtttttaatccttagaattttagcaatattttggatagattagtggttctcaagattagttgcacattagaatcactttggaaagtttttagaaaaaagtaccagttcctgggcttcacttgtgaagattttggtttaattgattttgagggtgtgtttggcagggctgggtgttggtgtttctggattttgtttctaattcttkaaatcagtcatttttggcaccagggactsattttgtggaagacartttttccacagactgagatggggtttagggatggtgtggatggtttykagatgattcaagtgcatacatttattttactaccactgatgtgacaggargcggagctcaggtggtaatgtgagcaataggcagtggctgtaaatacagatgaaacacctcctgctgtgcagcccagttcctaagaagccacggacttgtaccaatctgtgaccyggaagttgtgaacccttgcttccgatgattaaaatctctg

SEQ ID NO: 2378 - DNA, 600 bp, Bovine  MMBT01352
ctggagaatcccagggacgggggagcctcgtaggctgccatctatggggtcgcacagagtcagacatgactgaagcgacttagcagcagcagcatagctgctaatctcaaaaaacatgcctgtttctagttttaaatttagactttttagatttcaagctgtttatttttttaataactaaatggaaaaggaaactaaatgtataggtttcccaccaaagatcatcactattcccaaaatcagtgttagaaccttttgtttttctttcccaagactcctcctaagagagttttttccctkccttggggagatttatgaattgcagcaattactataccctcaattattatatcattatttaaaagaattatcccaaactactttcttaccctcatttgttagataatatttataagtgctgggaaagacactgtgaagaaaccccacccatgcccaaagcaaaatactgctctaaagcaataaaaagagtacacaggtacatgcatacaaaatttttttaaatcaatggaaaaatgcagaattataatgcttttgttttaccttgttttcgtaaaccttttatctcacttgataaaacag

SEQ ID NO: 2379 - DNA, 600 bp, Bovine  MMBT01364
gtggctggaatgtggttcccacagctccattcacagcaccaggtttgccattgctggtggatatttggttgggatttggtttgctgctttcaatgaaatataaagtgaagtgataaaaatgacttgtgtaacaaggtagaaggctctacatttcattactgatttatcttaaccacacataaacatgtgaatgtttgatgaagaagaaatttaaatgaacccaaaccatttatctttacaaaccgaggctatgtaaaaaccaatctcataagcatgacactcacaaaataagtagtcatrtmtcttcctcatccagacataayttccttaggatactgtttgamattttggaaaatgcaagttattaaatattacttatcatgacmaaataatttctggattaaataaattaggcagtgtgcagtgtttagggaaaaccactgcccattcctgccactagagtgacagctgctgaccctacgcattggctctcgagggaactgcacaaaagctgcatgtcaacagtgacactgtggataccagctgggcttactgggagaggtaaacgcatttcaggagactgtgaccactcatcatttc

SEQ ID NO: 2380 - DNA, 600 bp, Bovine  MMBT03789
cttcagtactcataggaaaaaaaaaaaggcaatgttgcttctggtgtcagttggatgccaaatgtaaataactacgattaccctagcaagcccatgtggttgagccagaaaagggcactgtgccagcttccactcggtttgcatgtttattaattaagctcctggaagtttcaaaataagagttttaactcaccaagaaccctggaaaaagagggaaaggraagaatttgacaaagaaaaaacatactgaccggcaggtggacagacagacaaaagcagtgcttacattaaaggcacaayggtctttgaccaggaggttttaccaagagtctccactacctggtacatgaaggataagctaaaggctaactttgcactatgcttccccccagtggtcaagttttggaaatgcatttttctagtcaggaaagaaaagctggggaccatctgggcracatacacaaagaataccattagcttcttaatgtatggaacccgatgctcacttttaagcggaataataaaaagggaggtttgcatttaaattgttgccaatttgcaaatataaaatgtatatatttgaaacacattctaaagaaa

SEQ ID NO: 2381 - DNA, 598 bp, Bovine  MMBT07576
  misc_feature (1)..(89): n is a, c, g, or t
nnnnnnnnnnnnnnnnnnnnnnnnnnnnnnnnnnnnnnnnnnnnnnnnnnnnnnnnnnnnnnnnnnnnnnnnnnnnnnnnnnnnnnnnnatacgatgaaatgatgcagaacagaaattaaaattcatgtattaattttttatcttcataactatttctacctagtatgctacagagactttaatatgaataatttaaaatatttttctctctttaatggctctttgtaaggctggcaagataacactgaaagtcaaatgtttatcataggttatcttattctatacagctattagtgtcrctttcggtcttcatggtaaattcaatgcaattcccttccttgacccctcagragaagtcaggatttagataaaggcctgagaaaaacactgagactattaaacaagaaagagttaaaaaaagaaaataaaataagaaagagttaatctggtaggggaagaaaagaaagaaggaaaagaatttttctcagggccattctttggaggccttcctttggattttggcrtctagggataccttccttgtgttctttactttcctgcagctgttgctataagaggagacagcaccaccaccac

SEQ ID NO: 2382 - DNA, 598 bp, Bovine  MMBT09303
  misc_feature (1)..(11): n is a, c, g, or t
nnnnnnnnnnntgtgcctagtgtttaatgctgccttcagtgctgtgtgacttctacgcccgtctatattttactattgtgcaaactccttggacctatctctacgctccctgctaatccagggtctggcttgtgtcggttttagttgagccaaactgaatttgttattaaggatgtcactataccagggccatgctgtgtggccttgggcatgctccttccctctctgggttgcagtctcagcatctctataatgaggaagctgccaggatctctgggctgttctgagtttctggaactycccaggtctgcctgcctacactaggggtgaacaaaaatttggggggtgggttggttcttagtgcctcacagaccayctgcctctcctgttagcaacttkgtccccttggaaccaggtgactggtattactaggaaacaaaaggactttcgcagaagttaatatttctttcttttccccaaagaaatggataaacctcattaagccaagacaagggaactaggtcatgcccygatgatgtcaagcagaggcttgtgagtgaagcaggctattaaatttcagatataaaaaataatctgc

SEQ ID NO: 2383 - DNA, 600 bp, Bovine  MMBT09324
ctctgtcggctgaggggccgcctgatggagaagcctgaggttatgaggcatccaactgcatcacagacaccaaacatggcccaggctgcgagagtcggaaggggctggctatccacttggcccatgacccagcatcttccttactctcgcccgcctttttggccactgctgttcattagcatctctcccaagagaagagagacaaggggaaaagagccaactttttgcttgtccgtttggctccttgtcaacagctctagtaagtgtgtaatctgatggaaccatggtccaagatgagawtttggactctttccctctctctgccccttgccaggcatgtgaactcctgttacggcttcaagtcccagcctttttccctaaggccccaggggcaaagtcagaagttagtcattccctccctggctcatggagcccctctccaggaccagagaacactcctcacattgtgcagtgataatcagagcccaggtctgtctgacaccagccrgggagctactctgagggtggggtgtgctctttcatcggcttaagtcccacgggttccggaccaggacttggcacaggactggggtgtaagaa

SEQ ID NO: 2384 - DNA, 600 bp, Bovine  MMBT09343
gggttctgtgggcccttctggatcgtcaccattcccactggctttgtctctgtgcggtgggctcttccctctacatgtgcttctaaacccacctgtacccctgctccccagatcaagatgaatgccatgatggagacctccgagctcccggccgtatttgacggggtgaagctggccgcggtggctgccgtgctgtacgtgatcgtccggtgtttgaacctgaagagccccacagctccgcccgacctctacttccaggactcggggctctcacgcttcctactcaagtcttgtcctctyctgaccaaagagtgagtagacgtcaaacccacctgtacacctgattgctgatctgtctgtcattacactgttcaaagaagaaccttttcaccatgggtcctcaaggcatctatgtaaaatagtgtcactgatgttaaaatagccaccatctctgtaggagtctggcacttgaatcctggcgggtaggggacggactcagatctttgttgcccaaagtcatcccttcttccacagtgtggtgtcatcaaccatgtcaaggactttgcagaaaactgttgttgtttttaggtagatgcagaa

SEQ ID NO: 2385 - DNA, 600 bp, Bovine  MMBT10243
gcatttcccgtcgaggaggaagtagccgtggaggcagctctcacacttatccccrtagctgttattctggcagttcacacacacagcctcatcttcgctgggaccctctgtcgcccagtgttcaatctggccaagggccgacaggacgatcacaaaccaacacggaccagacccctcctccttcagacccaggagctcaggaccccagcctctttcacctcatctggatccagcgagtacttctccggctccctcctggctatctcaagctccttcctggagacgcagacgtggctgttkccgcgacaaaaggcgtggcagggccggcaggtccctccccctacggctgagcccacgaacagygggaggcactgctcacagtggctgccctggaaaccagggacagagtggtcagagggagttaagggtcctggtggktgtgagagtcgggggaggttctgagagcacccagcttccctgtggctcagagagtaaagaacctgcctgcaatgcaggagactcgggtttaattcctggcctggagwagaaagtggctacccactccagtattccatggacagaggagcctggcaggcaaca

SEQ ID NO: 2386 - DNA, 600 bp, Bovine  MMBT14773
tttaattaatcacgtaacattttagaaacctattttgttataaggactcatataaatttttttgatctctgttaatggtctatgataggtaagtgtaaagatttatgccttaccaagaaaagtccaattgagcatattttgtttaaattaataaagaaccgtggagagaattggaggttgaaggcttaggtaatgaataagagaaacagatgcggatgaaatatgacttccttcgtgtgctgtatttcagggaatctttaattcacctgaatatggccgtgagttatgcttagagtattstattagaattcctagtagaaagggatttagatatacacgtaaagttaaatatggttagacagtaaaatattgattgcttaccacaaacaatgcagcagggtatctaacacttgttttccttgtgggacataataaggtaattaatttatctctagctgagttttatttgtggaaaaatttttttttggtggaatagatttaaatgtgctttgtgtgtgtctccggcagctctctatttgtgctgtaataaccacgtgcagcttggagcagccctttaataatcatcaccttggaaatggg

SEQ ID NO: 2387 - DNA, 600 bp, Bovine  MMBT16141
ttccttctccaggggatctttccaacccaggaatcgaacccaagtctcccacattgcaggcagacgctttaacctctgagccaccagggaagccctgcataggctttgaaaggggtgctaaagctctagagttcctgctgcagggagttaatcttccagaaaaggccagcaaaggctctgagaagcttcactcagcccagctttcctcagatctccctcaggcagctgtgactccttagttacctcttggcttctccccagtccagattagccctggttgcgttgtcatttcactgtcaktctgagcacatctatggggcagagtcacctctggaggctcaggagtctggggccccagcccrttgatagctgagttttagaaataccttgagatttggagggcaccagggaacagggtcaagggtrctaaggagctgctggwgtaaggagctgtgttcaggggcaaagctgattcacagggaaagctaatccttcagtctacagtgtttactgatcctactattgtttggtctttgagggcaggcatgctaggcctgagagaggcactgatagtaataacaacagctactttttatccag

SEQ ID NO: 2388 - DNA, 600 bp, Bovine  MMBT16443
ttaaatttttctccaccagctaaatttctgtacttttactatgagaatgtcattcaaatttctaaaataacccctgactttaaacatctctaatatatgtacttctttttaaagcaatactgtcataagatgcatttgtaaaattacttagatttagacaaaagtaactgaaaaacttaaaggggaagccttgaacactattaattttttccccacatgaaaagtacagatagcagcagaatacccactaagtgacaatattaactggtttcgaaggcacattgttagttacaacatctsaagtgggatttatttgacgaattctgtgaaattttcagaatatttgctgcaactcaagtagaaaagaggcaagtgttcacatactatgttagcttgtagtcaagaaagacatttcaactaaaatttgtcaaccccccaacatgaaatcacttagacattgctgatgtagtatttggatgaatttctgtatagaagattttttcagactgacagtgtactcagtgcttcaagggctaggtaaaattagttctcttttggtcaacagtgcctaacttccactagatgaatcttggtctccaa

SEQ ID NO: 2389 - DNA, 600 bp, Bovine  MMBT18605
ctcaagattagttgcacattagaatcactttggaaagtttttagaaaaaagtaccagttcctgggcttcacttgtgaagattttggtttaattgattttgagggtgtgtttggcagggctgggtgttggtgtttctggattttgtttctaattcttkaaatcagtcatttttggcaccagggactsattttgtggaagacartttttccacagactgagatggggtttagggatggtgtggatggtttykagatgattcaagtgcatacatttattttactaccactgatgtgacaggargcggagctcaggtggtaatgtgagcaataggcagtggctgtaaatacagatgaaacacctcctgctgtgcagcccagttcctaagaagccacggacttgtaccaatctgtgaccyggaagttgtgaacccttgcttccgatgattaaaatctctggctagtcattaaaatctaaccactggaatagatgccccttggaatcctgtataacttgaactacttagatatagtccttatgtttttaggtatcatagtggtttaaagaatttaaattgaggaatgtaggacttcagaagaggca

SEQ ID NO: 2390 - DNA, 598 bp, Bovine  MMBT18713
  misc_feature (1)..(54): n is a, c, g, or t
nnnnnnnnnnnnnnnnnnnnnnnnnnnnnnnnnnnnnnnnnnnnnnnnnnnnnncacccagacctcagataccaaaagacctgactaagcatttggcccagttttgttaacagtcactcatgaagtataggaatgccagaaaagctaaaaccgctactttgggaaatccttctgagttaggtctcaggagcaccctgaaaagaamatgagaccatgacacacaaaaaagaaccaacaaagcagcatgggccatgacaaaggagtcaggattaaagcatgactctgacattcttcaagcasctcttctccagtcttaaaaaggcaaggggatacaaataggaactggagactaaagagcagtattgggatgaatttatcaaataggaaggaatgatggcagacttttccaagaaggcctctcagaagaagagaggccaacttcgctcaatgatttcaggtaggctgctgctaatgagccccatcggggtaggtacctttgggcttcagaattgacgtactctaygccacctggaaagggttcgaggatgccccagttcctgcaccctaccaagctctaagacccacctttgaactccat

SEQ ID NO: 2391 - DNA, 600 bp, Bovine  MMBT19760
tgcctctttcaaggtctccaaatagtcacagaaagaaaattttcagctctaaatgtggcccttattataaaatgcatcatttatactacaaaaatcattttacatacatacaaaaaagattaactagttaaartggagacaaaatattggctaaggttttaaaatttcttataaaaataatttattaaaattggactacagaagacagaaaacatttcacaacttcrtattgctcattgttgccctgaagacatcatgaaacatacgcaggtccacagcatgggcttgggcacaatataragaaagctaaagaaacacaaccctttccaaccaaagactagagttgtaactagtggacttgtgaagctctatcacccagtgtccccaggagtcttccttttttagtggaacctgtaactaactttaaaacttgtcaaaatggaaagagtggccagcaagacgytgcttcaggtagtgtaacttcttcacattggtatttcattttattgactggttcattactggttcattgactggttcattaccggtgatttcagagagatcacttcttttaggttatggccagtaaataagtcttaa

SEQ ID NO: 2392 - DNA, 600 bp, Bovine  MMBT20592
ggattgttcataggcattacattcagaaagaaagtaatttcttataaastcatttattgcagatcytcattttcttcttgggtgtcagctaatgattagtaccaatttgatgtatgcaattatagtgaaaacaagagtataatcaaaaacttcatgagactgcgagtaaaaagcagatgaaagcaggtgatgaaaacttttcaatgaccaaattaaggtataaatactagatgaattctcttacaactgctggctatttctcttctggaacattgraaaaccctcattccattgctccasaccttttctaaagacagttgatctgaaagatggtttggaaattctgatttactttaggatactagtgtcaaaacagttggtaagtttagtagcataactagaagtaaagttggacaatataatcagtacaaacaaacattttatttgaactaacttctgttaagtatggcagcttgacacaattttaaaaactattccacaaaaacactaagtacaattatttgtcttctctgaaagctactttgagctgggtacttaagatgtgattcagtgagaaagggaaaaaaagttgttacaggg

SEQ ID NO: 2393 - DNA, 600 bp, Bovine  MMBT21050
catgctgctgggaactgtcccccggagggcaaccctgaaccccagcggggctgctccctcgttctcttctcggccctatgtgaaccggcaaggcggaaaatcaaactttatccctttctgtgacttcctgcttgtgggcatggggcacagcacccttgcgatggatgctgcattgcttcaggaggcaagctccatcctctcaggtccttaaaggtcctcggtggcycttttggagggctggtttataagcttgtgcttgcctgaagaaggaagggtgggcagcaggcagaggggaagcgmatatgacaagttgttcccagcggcagggttttggtggttgtattaacccgttattgctggctttcattggctggcaacgcacaggagtttctatttgaacagctttggggtgtgtgtatatttctttttaagttgcaagagatcaagttgacttggaattcttsatytaacaagtcagcaggttatctttctttggactttctagatccatatttttgatctgatctggccaactccaaaagaaagagtgtaggttttatttcctagggcagagttgtatagtgtggtaatgagaaatca

SEQ ID NO: 2394 - DNA, 600 bp, Bovine  MMBT21070
cggggtgataggactagtctcttcaactttacagagggatcttgggtatcccttggccagggtcaaggggtaagggtcctggtgtgaagaccagagccccagtctcctcacagtcagcaccttgttttgtccaatgctcagacccacccttccctctccagcaccaccctagtcctcagagtgagcgctgtagggacccgtgtccctctaagggtcaacttcaccctgacatgttcataaataactkgccttgattctgtgctcaggaccccataccctaaagcctgyagtggagctttrgcagtaagggggcaaaagaggcctcatgtatgttggctgcattctttatgactgcatacrgccattgtctcattgtaatgcacacagcagtcttatgattatttccgtccaacagccgaggctgaacaagcagttcaagatcgggtaagtagtaagtgcttggtataaaaacttggaattcgtgtgaccagttctttccaaagtgcagttctctgagcagcctgtgaagatggtcagaacttgtgctgggctgcactgtctgttatcaccatgactgtccttctggagcccgttcccgga

SEQ ID NO: 2395 - DNA, 600 bp, Bovine  MMBT21796
atccttcaagtaaaagaaaaaaaaattactgtgactttaacgtgagctccatgattttgttttcccagtttctgaattcctcttgggcattctcatcagtgtgcacagcttgtcctcatcactcatacctggcatttggtcttccaaggaccctttgctaccctccccagcccctaaactctcttgccttcagttctctgccaggcttgccctcccacccaagtggcctctgagtgtgcctgtgygtgaccagaggctgacactggactttcccagctgccggaactctgtgttcaaccraagggcctagattgtgtttgatgaccaatcacactaggaaaygggcccccgtcaccagcgtcccccagcttctggggagagtggaagtgctcccgagaggccagttgggattcacatggccatcatgtggcagagtggccctgttcctctacctgttcatgctgtgagtttgccagtttgattctttatgagttgctaagtgtcttcaatcttttctcaaattatccaaagactaatagctaccagcaagactgcataaatgcatttctttaaaatggcataaaatgagttatcctacag

SEQ ID NO: 2396 - DNA, 600 bp, Bovine  MMBT22169
aaacatacctggatctgatttgagcaaaccaacagctaaaaaggaaaaccagggagatttgagtatttactggctagctgatactaagaagtttagaggttttgtttatttgtatcaaggtagtatttttaagtccatatcttttagagaaacaaactgaaacatgtccagttaaaatgtgatatcttgataaaaaagtggtttttttaaatgttttacagttaaataatgtgattattttccatctgaaataaaaactaacactcttgcagccttacccctcgtgaattcaactcttayggagcccgaagaggtaacgatgctgtaatgacaagaggcacttttgcaaatatcaagctttttaataagtttattggaaaaccagctcccaaaacaattcattttccatcaggacagacggtaaggatayatacagagtgtttaagcagttgctaactagattaaaatttgtattaaaatttttatgtttgttttaatctacagctggatgtatttgaggctgcagagctgtaccagaaggaaggtatcccactgattattttagcagggaagaaatatggttcaggaaattcaagagat

SEQ ID NO: 2397 - DNA, 600 bp, Bovine  MMBT22174
gatcacgataaccagagccatttgggaaggtgaggtctggaccatctccctaagaccacactggagtctctcagcttgaattctgcaagccagggcagcatttcagaatctcatttttaagtgcaygttagtgtctgctgtaatgaaacacatgccgtagactgatgaaatttaatgttcaagctaaataataaaatcttttatttatgggcaagttttacrtctccctgaggggagataagctagtgtacaagtctttcccactttccctgggtctgatgtgaagccagcttgttcccycttgacatcacaggggaaatatgagtcggagggaggtggaaggtcgggggagaggaggctctatatttacaagcctgtggtatgatgcagccagatgcagattctactgggtttgtgggtgtgaggacattgagggaagtagttaaataggacttacctttctgacctcagccaagtctccagaaggactcatggggagggtcgcactggagaaattttaactctaaagagaccacagatgatcagacaatgctagaaagggctcccagccctcacagaccccatccttcactgataagc

SEQ ID NO: 2398 - DNA, 600 bp, Bovine  MMBT23027
caccaccaacacacacacatcaccctgctgctgaaattactcatgtccttaggatcaagttcaagtgtcttgtcaggtcctccagggtcctgtgtggcctgaccctacctctcctccattgtgattcctggtcagccaatgtcacctcctcagggaagcctgccgtaaccactgccacgaacccattaggctagttctcaggactatcttgcctttttaaaaaaaaaaaaaaactctttatttttatttatggaggtaggtacgcccatttcactgctgaagacactgagggccaamtgrcactgagctaggttagcctcacggggctacttggaaagtaagcggtgtttgcagactccttattatcatcattgttattgttattattattggctgttacatgcagcatgtgggatcttagttcctccaccaaggatcgaaccyatgccccctgtactgaaagtagagtcttaacccactggaccaccagggacgtccccttactttttttgaaaaatttacttttcaaactgagatacgattgacatacaaaaaaacctgtacatttttaatcgtacatcctgataagtttgaagcata

SEQ ID NO: 2399 - DNA, 600 bp, Bovine  MMBT01592
tacttctttaataattgcagcactcaaatggcaacaggatggattaaggtgacctagctcagaaacaactttcatctgggtcatagtaaaaagttgtaaaattcccttaacagaaaattagaagtatatctttatagattgtttgtggaaaaaaattcctaacttgattttctaattcaatagaatttagtaagagttgaccacttagtacacattttaatttcccagtatctctgtatagggattacttctgtttcatctctggatatactaattacctttytccatcctgttttgtgyccagaggcatgtrtggttagtaggaggaggcttcattgctccctagtgtctagctggtttgggtcaaagggaggcagttggagrgttgagggtatraggaagtgatgtgtgtttattccagttctctacctgccagattattgtagccctctcatgaagactgcagcttctccagttccttctacatgttcctttgccctaaggataattaatgccccctccttgctagtctggggcaaggaaggaattaaggaggtggcttctgatctatttctgtctctcaagattttcctggataaa

SEQ ID NO: 2400 - DNA, 600 bp, Bovine  MMBT01597
caagttctccaggcccggggagacagaggcagcacagaattagaaaagtcagatgaaatgggattggggtcgaaattcaattcagccagagaagtcccagggaacaaggtcgggctaggagcctgagtgaaccaccagagctattggtctactaccacacaggggtgtctgagttcatgggggtaaccaaggccagagaggttcacaggcccacagaccattctattctaggatgaggcaggggtccagggaaaggcttataccaccactttcctgttgagagtctatcctttatcttcyttaacccaagaagtctactatttccttccatagaatatttcagcagtatgacctgaagataagtggatatctagaatttcaaaactgtttgaccttggggaagttcttaacctcttagtgcttctctgcctacatctgggaaaaggagctcataacgggatctagttcatagagttcttccaagaattaatcragttaacacacatttggaataatgcttaccacataataggcatartatatgtgtgctgccattattatatgttgttcctaattctcctttcattcatatggattttt

SEQ ID NO: 2401 - DNA, 600 bp, Bovine  MMBT01616
cccttcaattacaaacgaagacctcagggygtaggagatgacaggcctgcttaggactggtcagttaattaatggactggcccgggtagaaattcaagtttgctcaaccccagatggtgaccactaggtcagaattatgccacctgtgcataagtctggtaaccattagttatatcattctccataggatttgttttaacaaatgatttattttctgctaaaggaagggtatagtttcatttcctggataacagaaaaactttgaaaaatagtgcataattttcataagaatttgcattycttctcatttattcttgccttctttacttctttgacactccaccaaaagaggggaggaaagtccacaaagggagaataagtgaaagaaatgtatctgtttccttattaatatttgtaggaatattcatgggaagcattttttttggaataagtagggatagttttcccctcaatwtacatgcgtgagtaaatattaaaggtcttctttgacattaattaaaaggtaaagacacagaagagaattctgaataaatatgatatttacacagcttctgagaaattatcattgactctttaagc

SEQ ID NO: 2402 - DNA, 601 bp, Bovine  MMBT01649
  misc_feature (1)..(1): n is a, c, g, or t
nttggcaaacatcctgttcaatagtccttgggggttctgagtacattcacaaaatgaaatcccaattattgctgccaacaaatgagtacrtaagtttttcaaactaggtgggtgaaactgcttgaaaaacacaacttaaaaaaaaaaaatgtactcattaacaataggcaaatcgagttaaatcaaccactaaacaggttttaagtgagatttctcccccaaacttggaaataaaggaaatcagccctcagaatttacttttgcgattaatggatcacagagaacagggtaagtcactttkgagagaccagaattactcctagccacacaaccttccaatgtatcttgcttatttagcaagctaccttatgaaacttcaaccagaacacatactggtaaatgaacagaagaggagtcatagaagcaaaaggtggctgtgcccaaattaacattgcaaaataaaaaatggatgcatagtatcagacctaaaatgcttggaatacagatgtttcagaggcaaacttctcttaccaagacaaacttctgactatttggcttacatttgttggtttacaggaaaaaaaatgtcaggttatcaata

SEQ ID NO: 2403 - DNA, 598 bp, Bovine  MMBT01650
  misc_feature (1)..(49): n is a, c, g, or t
nnnnnnnnnnnnnnnnnnnnnnnnnnnnnnnnnnnnnnnnnnnnnnnnntcagtgttaccttactgtgaaatgtgtgagaatccacggggcggcgctggtgagtacatggagggcgaccttgaggcgggtagcagtggtgtcttcagataacctgtgtgtttagagacaactgctgtcatcagagatccatgactgggttccaacttcagtgtttaagctggaggaagagcttccacagtgaagactgtgaatttatccccttgtggaatgtgaaaagctcccagttctgtcaagaatayatatcccctggcgtctgtgacatggcattaatttggcacaaatggacatttctgattaatgccagcaggacgtgkattcagtgggcaggaatagaagctctgttgctatggcagcaaatatgccttatagccatagacctgctgttttctttcctctgtagaatatacttgtttttaaagaaattgtagattattttgtttaaatagcagaatgaatccagtgtagcttcttcgcctactgaaatatttattgtgccatgtttctcccatgaaaaatcataaaaattcctctcttgat

SEQ ID NO: 2404 - DNA, 600 bp, Bovine  MMBT01712
aataaggaagaaaaagaatgtaatccaccttaggaaaaaaaaatgatggtgttaagtctggtatttaagagtttattaatgtagtcaacttcctactgaacaattccattcagttgcctgacacatgtctcaacctcaacacatacaaaatagactcagtagctacctcaactcctcctacatctcacctatcaagaaactggatcaaataatgtcctgcaagaaacttgaaacgtgtccttgacatttccatctcctccacccaccagagtctgtcaagcacccaggtctcttaatccygtatctcaaatacctctttatttcacccacttctgtcacatctcactggcactactatgctctaagcaggccttacttcccacacagaactcatgaaaggccaccaccaccacctaccccacctccctgtagagttgtctattccccgatctagtccacacatgaactttccacaacacagagctaatcatgtctgctgtattctaaactcattcagtggcttcccctttttttcaaatccattcaatggttcttattcactcactttagttgtctatattacagacacatcaaacccac

SEQ ID NO: 2405 - DNA, 600 bp, Bovine  MMBT02036
gggcttggggcaagtcagacccagatgaagcggagctcggagggggtcttcacatggacaccaaattaaaaacctcccggtttgcaatcctgattatgctgaggttatccagttgctgcctctttgggtggcacggccaggggaagagatggtctgagattgtctgcaggctcgacctgtgccccgggaggagaaaatattcacagtgtaccagggaatctggaggaaggagggagcagcccctactttagttttttctcactctctctctccctttctttcctcctttccttctgagtkttttgttgaagtataggtgatttacggcattgtgttagtttcacatgtaccgcaaagcgattcagttacacatgtgcacacctgttttcagattcttgtccatgatagtttattacaagatgttgaatctagctccctgtgctgtgcagtaggtccttgtttatttcacaggcagcagccagtgtctgttagtcccagactcctagcttatccctctccctaccccactgctttcccctttggtaaccagaagttcatgttctgcctctgtgagcctgttttccttttgtaaatagtttg

SEQ ID NO: 2406 - DNA, 600 bp, Bovine  MMBT02246
gtgtgtatatggtaaccgtatttataaagatgtctaagacgtaagactaaaaattcctgcagatagtgtggtcagattttaagaatcttgatatcttaagatcaataatgtaaaaaggttaaagtgtgtcctattttcctttccaagtccccctatatcctgttaaggaaaaataaaacattaagttcttaattgacatgttacagagaatttatcacagatctgaaaccatggcatatctcagacataatgtggatttggcaccacagctctgcattcaagtgagtcacatggattttrtgtaatggtttcccactacatataaaggtcagtttatastaggccttaatctattaactgtacaatagcattatgtctaaaaaaataatgtatataccttaatgaaaaagtgctttattrctaaaaaaatgctagccatcatccaagcctttgtcaagtcataatcttgttgcaatagtgacatccaagatcacagattacagagcaccataacaaatatgctaattatgaaaaagwttgcagtattccaaaaattaccaaaatgtgacacagagacatgaagtgagcaagtgctattgg

SEQ ID NO: 2407 - DNA, 600 bp, Bovine  MMBT03241
gtgactgtaacactgttctgttcaagcaaagatttagaaaacaggtttcctggacagaactgggcctgacatctccacgactgagctgacaagccaaaaaataaacctggtgtacgaaggtacccagtggttctgaaaatagctcactgtctttacaaactgctaatgatcaagtcctgggcctagacaagcaccaagcaaggaaaggacaaacatgtgctcagcactaggctaagtgctctgaaggatactagcatacagaagatacaattctaagtctcagagacttaaaatcaagcrtgaaaaacaaggcagaaatcaaaacaaagcatggctgaaggactggcatggtaagagccaatggaatggtataaccttgctctggaggccaaagcagagaggagaccctacaaaaggctactcagggaaggccagcttcacagctggaaggcaagcagcaggtggacccatttggaaatgcagagcaagggcaaaagaggtcctaaactaatctmggtgacacctggccttgcaggacagctaggggttccctttcccaaggcatgaagagcctctagtagaggaagcatgtggaggaga

SEQ ID NO: 2408 - DNA, 600 bp, Bovine  MMBT04106
ttgaacaggatacctaaattctctgagcttaaatttccgtatgtatgaaatcatgaaaattctacctagttagcacaattaaatgtaagaaaatatatgaaacctggcacaatgtctggtactttgtataaacccaaagttcatgtcttctctccttccaattaatcatggcaaagcaatcctttttaaaatcataagtgtttttcacattaaaacttctgtagtttagcagtcaagtcttaattttgacagatgcagttatttgtatgtgtgtgtgtatttctgatttaatggcaaaaygtgttgcacttttctagaggaccagggcaggtaaatgatcaataaaatcatatgaatatgtacatatgatgtacattctgtaaatatgtacattctgtaaataaaggaagagtttgaaaaaggttgacatcactgaatttgtgttgaggtacagactttccttcagtcttcatttcgtcaacaaatactaattgcatacctagtgtgtaataagtcaaagatccaatratgaagaatccaaacatggtccttgtttgaatggaatttattgtactagagaggtgttaagcaaattgtcat

SEQ ID NO: 2409 - DNA, 598 bp, Bovine  MMBT05316
  misc_feature (1)..(157): n is a, c, g, or t
nnnnnnnnnnnnnnnnnnnnnnnnnnnnnnnnnnnnnnnnnnnnnnnnnnnnnnnnnnnnnnnnnnnnnnnnnnnnnnnnnnnnnnnnnnnnnnnnnnnnnnnnnnnnnnnnnnnnnnnnnnnnnnnnnnnnnnnnnnnnnnnnnnnnnnnnnnnnntatacccaatcttgttttaaagtcagtcctggacatactgttcctaagaaggaacatatattcctgaagacattcaaaaggggggactcttcgctctgaaaccctaacaatatcactttaatcatcgcttctgtccctgcacstcacaaggccatacctctaattaattccatacctctaattctgcttctcttccccagggcccagtcatatatgcgcagctagaccactctggcggacaycacagcgacaggattaacaagtcagagtctgtggtgtacgcagacattcggaaaaattgagaagaccgccatcatatcctaagcaataaacaaatccaaactggactcttgtgcagaaaatgtagcccataagtatgtgtggccttggaaaccagaacgtggagaagcacatgtttagtcatagagggagaaaaagatg

SEQ ID NO: 2410 - DNA, 600 bp, Bovine  MMBT05530
tctgcccttcctttgatttgcccttctttgaacaccaagaagccttttcatttcttttctcagaatcttgatattgggctagaattagttcgtaaaggatacgcagttgagcttgcagaagacatggaaaaaaacagagctgtcccagtaatgttggacgacctcgtaagtgagccattatcatcatttggggtgctgctttgggacaaaccttgtgcctcaagacaggagggcttctagtcatgcatgcaatttgtagaacacccttaaggactctgagttgctccactagttgatcartggaagcactgtgtcccttagcagccacaccagactctgtgagcaaaatgatggggtcgcttctcttttcccaccagccaaacacgttcttcctttttctcctgtttattccctcaggccacagaaacagatgtctcactgagcatgctcactgagaccaagaagagccctggagagatagcaaacaccctgtcctgcctcagtttatcaggtacaaacagcatttgctccctcgagcatctctggaagttaccaattcttagtcagcctctccaaactagggaagttgtgtcaagattt

SEQ ID NO: 2411 - DNA, 600 bp, Bovine  MMBT07970
tcttttaaatgtttaccacatctaattaaagtacagagctaacttgtggcataactttttgcaagggatgattctgttcatatacaggggatgtttctgatttagtccaaacttaaaattttaataagcaactactcaccaacccctcaaatatgcatatatcyttccttctttcctataccactcatttccatctgagtctacaaaaaggatggtactagattttaaagaaggtgaaatgaatcagaaagtctttcattttacctaggaagttgagcatatgtttaaaaatccttaagrtttgcttctactcatagtttccctttcaatgggcagaagacagagtcttactactaattctttttattagattcctacctcccaaacattttacaattcagatagttctagtgaaaatattctgttatgatcatttaaaatgacgtgcttcatcactgcttttcaaatttccctatcctatttagaatattttcctgtcctagttagaatatccactatatctgagatctgtcaaggtaaatacgatttacaaaaaatcaagcagatttctcaagaattatttttttctcaagaattttc

SEQ ID NO: 2412 - DNA, 600 bp, Bovine  MMBT09317
tctcatcttttaattagcaagccctttcaagatatttatgaaaaatctggtgatggtggccatctagatttgttcctgattgtcttaatatttttctttatatgaaaaaagcaacatttgtggcttgagatgtatattattttcgattatcccaaaatggcatggccattctccccatcagccaggctgaagccacagtacatcttggacttatctttctttcccacccgcatacagctccagttgctaggtcctatggctcttccttcgtaatgcagtctggtccatctttgcattccygatgccacttcccatagcttgatcccttcagtctatcctgactttatcccatactggcaggatgctctcagattgaccctttaaaaggtcagctcttctcacctcccatctccaatgaaaagtcagtagtgctccctcttcccacctcctaactgccctctgcattaagtgctgctggtgactggcatttaaagccctctgtaatatgtccctggggcttcagtggtggctcagtggtaaagaacctgtctgccaatgtaggagacgagggttccatccctgggttgggaagatcccttg

SEQ ID NO: 2413 - DNA, 604 bp, Bovine  MMBT10931
  misc_feature (1)..(4): n is a, c, g, or t
nnnntctttagtcttccctaaatattgtggtatttttgtcttgtctctttaactgagttgtaacctgggrctgtattttatccctttggacttacrttacttcacactatgctgcccaactattggttcattcattcacttaacaaatgttttctcagaaacctctatgtgctaggcactgtgtgagagactgcaaaggcaaaactaaatgtttgtcaaaaaatattctccaagtcagttgtaatagattcctgccctgtagcacagccccagctgccgggatgctccagtcacagaaaggtaygaaccaacagcttccttcctggtccctgtgctctagctttggcctgaaaatctgtgtagaattggctttgctgctgctcactagggtaccttcaggcctggaccttgggggtattgtgactcccaaatatggtccctttttactaagctcttatcaaggtttgtatcttcaataggtacctttttaagctctgctgctgctgctaagtcrcttcagtcgtgtccgactctgtgcgaccccatagacagcagctgttaatatacatttttttgacatattgcaatttgcagttttgtagtt

SEQ ID NO: 2414 - DNA, 600 bp, Bovine  MMBT11572
tttagttctccggcacttttccaggactgtatgatttttcttttaagcagtctatgaagggcaccctgcctgaacacastctgcctgtctctatttccaccccttcatccaccttttcttttaactgaaacttctggggaatttgaatagaacytcccttatgccttgcaactacacacacacatacacacacctggagtcagcagcccactcagccttgaccgggatgcttctctcagtcttagagaaatctgtacccccatgacactgggaagtctccacattcctcattctgcttgsagaagaacactcttgggtgggcacagttctcagggccctgtgggcagtaggggcagaaccaatatcaagttcatctgtctctggtaacgggagtctgaagtggggcatcttcttttctcttgtcctgtccattcaggttggagaactgggctctgtggtttccatagcgatcatatacccgagatattcctaataaccacagtctagtttgaccacaacattggctgtctgtctctagtgtgtttgtgagctgtgtgtgttgggaacaatgggaagacaatcaaggtgaatcactctgga

SEQ ID NO: 2415 - DNA, 600 bp, Bovine  MMBT11763
ggctggaatgtggttcccacagctccattcacagcaccaggtttgccattgctggtggatatttggttgggatttggtttgctgctttcaatgaaatataaagtgaagtgataaaaatgacttgtgtaacaaggtagaaggctctacatttcattactgatttatcttaaccacacataaacatgtgaatgtttgatgaagaagaaatttaaatgaacccaaaccatttatctttacaaaccgaggctatgtaaaaaccaatctcataagcatgacactcacaaaataagtagtcatrtmtcttcctcatccagacataayttccttaggatactgtttgamattttggaaaatgcaagttattaaatattacttatcatgacmaaataatttctggattaaataaattaggcagtgtgcagtgtttagggaaaaccactgcccattcctgccactagagtgacagctgctgaccctacgcattggctctcgagggaactgcacaaaagctgcatgtcaacagtgacactgtggataccagctgggcttactgggagaggtaaacgcatttcaggagactgtgaccactcatcatttcta

SEQ ID NO: 2416 - DNA, 502 bp, Bovine  MMBT12026
caagttctttggtcagattatttagataggaattggaaagcagtttatctgaactatgagctaagctgtktaaaaagcatgttaatatgttgtagaatatatttttgcaaatctgcaaccttatgagcttagatagaaattgttgagaagaatatgaattaacccatacaatctagatctttccaaaccagaagtttgaaaacttctgcccagagccaaactctgtgacttaaacgagccacttgagcaatgttgattgttgattgaatgagtcagtcaatcttctttctgtgaatgagyacactgaggcacaaatggttcaaggaatgaattttttaagaaataattattgcacattcattaaaggtcaggcaccggatatgacaagaataattccaacatgaacaaagcattagatgttgggctcgtaagacgctggggagagaccacctttgaacatctataagcgatagatatgctacaaatacagaaacgggtactg

SEQ ID NO: 2417 - DNA, 600 bp, Bovine  MMBT12311
attatggcttttggcttatgagtcacaatagaaaggtctttctcatttcaaggttttaaaagaattctcccatgttttcttgcagaacttatagttgatccatttggaatttatcctgatatgagatataaatccaacttttctagatgaaattccagatgtcccaacacctagactatttgttgaatagtccctctcttcattggtgtgagatgcgcctttygttgtctaataaatttccatatagacttggatatatttctggattttctattctgtttcagtcattgctgtgactgyttatgtgccagaacttgatttttgtgtataggtgtgtatattttatcattccattttcccctctattagtttggaattctgtttttagtgttcactttgtatgttayaagacagtttttatttacttttttatggctgtgcagggtcttggtggcttcccgggctttttcctagttgtgccgagctggaacgactctttagttgtggagtgtgctttctggggcacgtgggctcagtagttgcgagcacaggctcagtagttgtggcgcaggcgcttagttgctctgtggcattgtggga

SEQ ID NO: 2418 - DNA, 598 bp, Bovine  MMBT13350
  misc_feature (1)..(21): n is a, c, g, or t
nnnnnnnnnnnnnnnnnnnnnctcttaagtttctggtctggtagggaattataaaaaaaaaaaaaaaaaggtgggggtaggtttcccttaaacacccaggaatagactgcttcccggatagaccatttctgaacctgagaatggttctcagagagagctgacaragctgtctctgagagagagacctgagagagctaacaaactctctttgttagcttrtagattaaagaaaataaatacatacgtagagttaatactaagttataggagagtttcttcaaatagctaaaatttaggagsctccaccaaagtaacrgtaaatatgactaaattatatcatgcctaaagcttgatgtgtatgtctgatttgacatatttcagaggtgctatttactctgtaaactgttctacatttcaaaaactaagattcttggggttcataagataaaagttaaaattaatatttcagaaattaattttctgagcatttgggtggrtgctgacaatagttgctaacttcttcatttctgatcactagttctaatcattagttgtttttcttgggtatttagaactgattttttttttttctctacct

SEQ ID NO: 2419 - DNA, 600 bp, Bovine  MMBT14297
attttcaggccatgagccactaagacaatgcccctataagtggctgcttcaccgtgagcctcagatccatgcagatggcgaccrtgtggttatattaaacttcgatctgcctgcatttggcacaggcctggctcagtaggcacttactcattcaacaatcatttcctgggcctttcccgggtgctgggtgctctcccagacactggtgacctaatggggacagcacatatgcagctgcctatcctcatggagttcagaggccagtgggggggactgataacaatcaggttaacagtaaaygaatgaatgaaaaattataggtggtgataacaattgggaagataataaacagactgatacaaaagagaaatggggcaagggttagaatctactaccagttagaggacattaccatccttggggatgacaagggagccaccacggaagatgaggggtgtgaactgggaggagggtgcagcatgtgcaaaggccccggggtgtgaaaggccctggcagctttgaggagcagaatggagagtggagagggtgctgggaggcacaggctcttgcagagcccagggaggagcccaggctgtccgc

SEQ ID NO: 2420 - DNA, 600 bp, Bovine  MMBT14896
taagctcctggaagtttcaaaataagagttttaactcaccaagaaccctggaaaaagagggaaaggraagaatttgacaaagaaaaaacatactgaccggcaggtggacagacagacaaaagcagtgcttacattaaaggcacaayggtctttgaccaggaggttttaccaagagtctccactacctggtacatgaaggataagctaaaggctaactttgcactatgcttccccccagtggtcaagttttggaaatgcatttttctagtcaggaaagaaaagctggggaccatctgggcracatacacaaagaataccattagcttcttaatgtatggaacccgatgctcacttttaagcggaataataaaaagggaggtttgcatttaaattgttgccaatttgcaaatataaaatgtatatatttgaaacacattctaaagaaaacatattaagggttataagagacagatcatatactatctaggaggcacacccctagcattgtgaacagaaaggtaaaaaaacaggggctttctctgccagatttctcaagcttgggaaatgtcctagatcagcagtttaaatataaagcagggc

SEQ ID NO: 2421 - DNA, 600 bp, Bovine  MMBT15868
ggacacaactcagtgactaacactgtctctttcatattattttagcaacaaaatcttatggcagagaggatgttttccaacatccattttcaaaacactctccatggcctgtttcatttacttaatagatactttgttccttatttttaaaatgtcaccttacccttgaagcgagagattatacttattattattcttaacattgtgattagtattattatttaatcatctgataagtgataatataccaacagacattgcagtagcagcaaaactgttcagcaaacttaaaacacttcwctttttagaaaacaaaaataaataaccttaaagttagcagcttttggaagttctttgtgacattttraaaataatttttattgtcactgtctcttataaaggtaaatattcttttgtattctaaagatcttttctcttgcaaaattaagcacatgaggacaaactgkagacatttttgcatatctacagcttcaactatttttttgctatagatgwaatggtctagcctatgaatttcatatccagagctttctttgtaaccttccttggaattaaaaagaaaactaaatccaagtcaac

SEQ ID NO: 2422 - DNA, 600 bp, Bovine  MMBT15901
cctgagctggtggagaccccgcagctgtgctctcagcctctgcacaccatctccgggttctggcactggtgagtcaggaggtgtttcacggagccccgtgtggggtgccttcctttttcagaggcaagaatgagcacccagacagacaagacgacctgtctcccttagtgcatagcaggctcggggcaaaagtgggctgagagcctgggtctccactcctctccgctctgagaaaagctactatacagagctcctcctcctgcctgtggggcaaggagttaggagaatctccatcccagmtgrgcaaactgtacccaacacgacagggaaaaccgcctgtgactggggcaggggggtggagtggcccaagggcagcctggctgtgcgcctgggaagcccaggtgagactgggccaggctggatggaaccgtgctgccaggcaggcgcctgctcctcccagggccctgactggctcctttggagcacagcacacccggcgctgcgggacctctctcctctgctgaaacagcagatggacagaggagagacttctggggtggagggagtcaggaaggccagtccccagattgtgtggtgctg

SEQ ID NO: 2423 - DNA, 514 bp, Bovine  MMBT15938
atgactttgaacgggactattaggacagggtgtacagttacccagcacatgttcctcatcctcctcctattgtctgggctgtagtgccctcaaaatgccagcgtgtatcaggaaacacctcatgaaggggcaaaagtggcttcaattctaagaacagacagcggggagcttcttctaagtctgaaaagttgaaaggagatgaccttcagactattaagaaggaattaaccsagataaaacaaaaagtggattctttactggaaagcctggaaaaaaattgaaaaggaacatagcaaacayggaatagagatgaagaatgataaatcagaagaggagcagagcagaaactcccttaagaaagatgagactaacgtgaagatgtagtctgagggggaggcagaggggtcagattctgctgaggaggggaacctactggatgatgatgataatgaagactggggggatgaccagctggagttgatcaaggacgatgaaaaagaggctgaggaaggag

SEQ ID NO: 2424 - DNA, 600 bp, Bovine  MMBT16303
gccttgagggccagagtgaacagggagatggaccaaagagatacaggccaggcaaccaccttgggaactggagagaaagttgcttagctccacggcagctgcgcagcctgaattcaccaccatgcggcagcttccggggcttctttaccgttttctctctcaactccaccgctttaaaccctttcccctggtttatcactggaagagcctgaggcttgaaagacagagccctggaggcctcatcactctggtggaaagttactgcagttacagccctgctttcagggtcaacaaaacccrcctcagagagtccttccagtcattattgtggaaaattaaaatgaagccagygctttacctggaaatcctgattctccttttgttcctttctgtccttgaagtcctaagatcaaaatacagaaaagggaagaagataataaaacttagatattaaacacttttaatcttagacaacctctaccttctgtctgattaatgcagatggaaaggtacattggttctcctcgattgtttaaagccactttagcagagcataaaagtagacagattgcagataaatgggtatgtgtattggggtga

SEQ ID NO: 2425 - DNA, 600 bp, Bovine  MMBT16353
cagggaaagtcaatccatttgtgtgaagataggaagtatctctgtgccattttatcagggttccagtttcaccagaatgagagtgtggaggagggtatcactatttgctccccccgagaacctagatgctaaaaaaaaaaaaaaaaaaaactggtacgaaacaaaactctgctggctggactaaatggatgttggcatcaccttttcarttggtttactttattgtggtattttgagctgagaaagttgtgttttcagagtttttcccttttacccactgcctatarcagcatttgtttygccctcttccgcccttgccctttggattgattataaagttgggaaagaaatgtaaaaatcagaacccatactctcgcttgaaactcatatttgaaaccatggtgaagcaggtttaattacagagaaagattggctgcttaattgctgttacctgccacgaagctgttgcctttctgtagctgtttccataaatagactttatatacaggaatctaccctggggcaaagagttcccattcggcctctttacttaattcaaattgctaggttgaggtggttatttttgaaactcttctcagg

SEQ ID NO: 2426 - DNA, 600 bp, Bovine  MMBT17288
cacgagctgaaccctagggggcactgacgaggccgccgttaactgggtgttcgtgacagacacgctcaacttctccttctggtcggagagtgacgagtataaatgtcaggtggggttcggggggaagacgtacagtgggtactggtccctgtgcgccgcggtcaacagagctctggacgaaggttggtacctctactcccggtcagacccagtggcgttgagatttcattttactgggagggtcccacagagtgggctgggacatggaataatgtattgataagatgaatttattgccgrtacctctgcttaaaagtacgagaagaagctggcataaaatctttcttcagtgtgaagtgattctgattttaatacttagcactgtcgcagctaagactgaaagtcggttttcttaggaacgccactctgatgatatctgaggagcaaagggacaaatattatcccacactctacacagtcaaaatacatttggtgtaatattacaattgttagaagtgattgaggaagtacagacgagcaaatacagaatgagggatctgttcctgatttttaattattcatctacttttaattcattcc

SEQ ID NO: 2427 - DNA, 600 bp, Bovine  MMBT17421
atactacaaaccaaaagctgagaaagcacctgataaaccccacaccaygcagcaaaattagggagtgtggggaatctgcatctctcagttggatttaatgatctattgttaggccaagaaacctgtttccctgatcagcatgtgaaacaatagaggataaaatggtgtgtaagcagaaagtctccccttgtaagctgcaaattacctaaaggttttatttctaattatggtcatataattgcagacactttaaggagaagagcctgtttgttctccctggtgtgagcaactctgatccargctctcctgaagccagcagccaagtggcagtggcacaggtccaggagtcctggagaaggacagayggacagctatcctaaaaaagagctcctgatgtcacccagcaatgagacgtgagagcctgataacgctcccatcctcactcaggtgttacgtgtataaagtgaaagggctyacaacattaagtagatattttttcactgggtagtggtcagcaccatgcttgatctcccattctctcattttctgaccaggccttcccaaggccttccttcttagcataaattggcttcccctaag

SEQ ID NO: 2428 - DNA, 600 bp, Bovine  MMBT17430
cttaatggacttctgtagttcacctattcaactctgggaagacttgttagctttacagaagaataaacctttcctgagttgtggtttatctgtcattcttaatcacttactttcggctgaccattgcttctggttagaattaagttgtcacttcatcatttgatatttgtattatccatatttttgagtttattttcctggactcaaaattagacacataagaattaaacttctctgcttgaggaaactctgaccttggtataaggaactgttttctttccagcatttggagaccacgcrtttagagccattggtcaggtctttgtcagtgccctttacagatcaaatcaaatgtaattttaaatcamattagataattaattaggcagatgagattgcaatttttccttagtgttctgttgagagcacaygagtggatggctgccaatttgtctcacagcctgtctattaaccgtatattaccccagttttcaaatcaactttcaattcagttattcaattttgggactgataatgattctcaaagatagccagtgcctcattttaggatgaagatgctgagatctgatattactcaaa

SEQ ID NO: 2429 - DNA, 600 bp, Bovine  MMBT18250
tgagacccgcctgctgccagtggctggtgtgtctcaagtctcagtttataactctgcgctgtttattttctggagaactttggttacttgtcctgtagaaactcctacattctgaatttgctgattgcagctccctggagttgtttaacacgtgcctctgtgccccgtattttctgaaaatggtcatttgttttacagacttgattagagtctgtgttttagggcgaggacactttgttattggtgctgtgtgcttcctgttgcatcacatcaggcgactgtcattaagatccatcagtraacctgactgaaggttgtctttccacatctgtacatatagtccttaatttaaaaaaawtttttttttttttaaagaaacacacgtgtcagggtgcttgagttggaatgacaaagaaaggccataatggggccctcacagacaggctccatgctgtgaagaagagagcagacttgtggagaggtggaagccctggaccacggggaagacctggagcagaggccagaacagtgctgtgctgctggcagccagctgctcttctgggacattatgtaaaatgatgtaactgagtgaaaaagtgg

SEQ ID NO: 2430 - DNA, 598 bp, Bovine  MMBT18601
  misc_feature (1)..(8): n is a, c, g, or t
nnnnnnnnatagctccttactgccctcttctggctgtggcttttgtttgtcattgagcgtgttttagtttttaatccttagaattttagcaatattttggatagattagtggttctcaagattagttgcacattagaatcactttggaaagtttttagaaaaaagtaccagttcctgggcttcacttgtgaagattttggtttaattgattttgagggtgtgtttggcagggctgggtgttggtgtttctggattttgtttctaattcttkaaatcagtcatttttggcaccagggactsattttgtggaagacartttttccacagactgagatggggtttagggatggtgtggatggtttykagatgattcaagtgcatacatttattttactaccactgatgtgacaggargcggagctcaggtggtaatgtgagcaataggcagtggctgtaaatacagatgaaacacctcctgctgtgcagcccagttcctaagaagccacggacttgtaccaatctgtgaccyggaagttgtgaacccttgcttccgatgattaaaatctctggctagtcattaaaatctaaccactggaat

SEQ ID NO: 2431 - DNA, 601 bp, Bovine  MMBT18816
  misc_feature (1)..(1): n is a, c, g, or t
nagggagtttacagactagtgggaaagatgagacatacatatagctatascatatgatggattgggaaaatgcagtaagaaaagtataaagtacctaaaacttgcagagaaaaaaaaaaatgagttctggtcatggggattaaagaaagtgtcataaagaagataggttatgagcttgactgtgaacagtatgtagatatggcacaaaggggatcagtgaagtggacagtgatcagaggtggacagttgcaatgcatcagaggatttaggggttccaggragtatcattggtagagtagarggtaagcctggataggtggattagagacagataaagggcagtsaatatcttcytgggagtctcatctgatgtggacagaataaggagttactgaaagcctctgagcaggggaataaccagatcacatgttctcagtaagaagatgacaattttgactgcagaggaaagaccagctgcagagtggctaagatgggcacctttaataatccaagtaaaaggcaatgatggcctgaattaggggaagtgactattagaatggaaaggagggcacagacagagcaatatttcaaaggttactgc

SEQ ID NO: 2432 - DNA, 593 bp, Bovine  MMBT18817
  misc_feature (1)..(1): n is a, c, g, or t
ntgatggattgggaaaatgcagtaagaaaagtataaagtacctaaaacttgcagagaaaaaaaaaaatgagttctggtcatggggattaaagaaagtgtcataaagaagataggttatgagcttgactgtgaacagtatgtagatatggcacaaaggggatcagtgaagtggacagtgatcagaggtggacagttgcaatgcatcagaggatttaggggttccaggragtatcattggtagagtagarggtaagcctggataggtggattagagacagataaagggcagtsaatatcttcytgggagtctcatctgatgtggacagaataaggagttactgaaagcctctgagcaggggaataaccagatcacatgttctcagtaagaagatgacaattttgactgcagaggaaagaccagctgcagagtggctaagatgggcacctttaataatccaagtaaaaggcaatgatggcctgaattaggggaagtgactattagaatggaaaggagggcacagacagagcaatatttcaaaggttactgcatgagctaaatgtatgctttgcccagaaaaaaaaaaaaagagttg

SEQ ID NO: 2433 - DNA, 598 bp, Bovine  MMBT19995
  misc_feature (1)..(47): n is a, c, g, or t
nnnnnnnnnnnnnnnnnnnnnnnnnnnnnnnnnnnnnnnnnnnnnnntctaccatgaatgagacgctttgcaaacagcatctcactcaacagcctcatatcctctttactatcactcagaccctgcctccattatctcacttaaattgttccagctgaccttatggtggcttccagtgatgttcctatgacctcttttactttcttttatgtacacttaactcttgccgtactggcctccttaaaattcttcacatgtgccaagaatgctcctatctttggacacctgctstgcatgtastgtttcccccagatgtccacttgcaaactccctcagctcattccatttatcactgaaacatcacttcttgatgaggattccccaaccgttcaaatttaaatcacattgtacccttcctacagagccttcccattctttacactttgctttatattttccttttcatttgatttttaacatactatatgatttccttattatgttyaattcctattgtgtatctgtgacatcaggcaagaatctttgtcttattcatggacacgtcctaactgcccagaaaaagtactgggcacaaggt

SEQ ID NO: 2434 - DNA, 600 bp, Bovine  MMBT19996
tttatgtacacttaactcttgccgtactggcctccttaaaattcttcacatgtgccaagaatgctcctatctttggacacctgctstgcatgtastgtttcccccagatgtccacttgcaaactccctcagctcattccatttatcactgaaacatcacttcttgatgaggattccccaaccgttcaaatttaaatcacattgtacccttcctacagagccttcccattctttacactttgctttatattttccttttcatttgatttttaacatactatatgatttccttattatgttyaattcctattgtgtatctgtgacatcaggcaagaatctttgtcttattcatggacacgtcctaactgcccagaaaaagtactgggcacaaggtaagtgtccacatgatgaatggtttatctgactggagcccatggtccttcccttgtataagcggcatctcagcaattgagtatctgttccaagatgtcccttactcagagactccttatgtgaaatgatggtaatgctctcctttctccttttgcttctgcagctgatttgttcctttaagacatattctttctttataatgagagga

SEQ ID NO: 2435 - DNA, 600 bp, Bovine  MMBT20598
accatctgagccaccagggaacccccaaattggctactaacatactcaaagcactgactccccccgattggtcaagaggttggcccactgtgcgtgtrgtrctccrattacgtctgctctttgttcttaayaaactccctactttctgaaatgcttctggaaatccttttccaacctgagtacagaccacagcagaagatagctaatttagtcacaaacaaataaatctggctggtaaggagacttgtcaaggatagyagtgcaatctagaggtagagaggcgggaggcagactagtgaygaagggcctggaatccagaccatggtgttcagtccttattccgaagacaactgaacagccatttgtcatttaactttgttaacagttgamcttgggaaagactggtcatttaggtgtgcagctatggatgatcaagagctgacctttgtaaaccaaatatatacaaggggagggactgacaagatgcaagggcttgctcatmataaacgtgataaatgagagggaaaaatgtattacagaagcttatatgaatcagagctttatgaaagtattcatatacagtttgggaaatgtcagagt

SEQ ID NO: 2436 - DNA, 600 bp, Bovine  MMBT21075
ggtcaaggggtaagggtcctggtgtgaagaccagagccccagtctcctcacagtcagcaccttgttttgtccaatgctcagacccacccttccctctccagcaccaccctagtcctcagagtgagcgctgtagggacccgtgtccctctaagggtcaacttcaccctgacatgttcataaataactkgccttgattctgtgctcaggaccccataccctaaagcctgyagtggagctttrgcagtaagggggcaaaagaggcctcatgtatgttggctgcattctttatgactgcatacrgccattgtctcattgtaatgcacacagcagtcttatgattatttccgtccaacagccgaggctgaacaagcagttcaagatcgggtaagtagtaagtgcttggtataaaaacttggaattcgtgtgaccagttctttccaaagtgcagttctctgagcagcctgtgaagatggtcagaacttgtgctgggctgcactgtctgttatcaccatgactgtccttctggagcccgttcccggagtggcctcttgtgtgggtctgtgtcagcaccgtgagaggtccaggtgtggagccccttag

SEQ ID NO: 2437 - DNA, 600 bp, Bovine  MMBT21079
cttggcactgtgttaggacttgaatacccagaagtgaggatcactgggtcaccataaaggctgcatactacacatgcttagcacttcgcagaatctatttcttttgatcctagtataactccatgagacaggagagcttagtccatttatggatgtggaaactacaacttagaaaggttatgataatgaacacaaagcctctagaaaacatgtgttagaattaagtcgatcaagtctccttgtctgagcacttaactatggactttctgcacttacacatacaaacctagatgggtatgrgtatggtgttgttgatgaaatgctgaagaccgttctttgcagtataattgtgaaatctatgcagaagtgagggttacgtggagtagaaccaaaactcaagtacatgtgagtgctaattccaaagtgctttaaaggaagacaaagtattcccatcagtgcaagagaatctctttacctggaatcctcttcactagactcccaactatactgacttcttccctaagtagagctgcatttcagaaaacaatactcaggataataggcttarttgttctagaatccataaaagagaacccccca

SEQ ID NO: 2438 - DNA, 600 bp, Bovine  MMBT22160
ttyrttctggttacataattgaaacttaaacagaaataaatgtagtagccataakaatttaagaagttaacaccttaattcaagaacggtaaaagaaaacaaagaacaattagctaaatttaaaggtagaattcaagacctaatgggagcaacaaatgtgaacaatgtctcagtatttccttgccataggaacagggcgatgggttttgctttcaagaaggaatcctgattctccacttctggccccaagagtgctgtattcactacactagagtactaagtacactcaaataactgtaytgtgacagaagagagaggataacatttgcaggttaaaaagaaatacttgggagcattactaaaaacaatcgggattagcaaatgagactgctagattggtgctcagaagatactattctattaactttgttccaaagttacattgtattatactgtatacaacacttgtcattctccatccaaaacaaacaaacacaatttcataaaccatgctatttcatttccctacagagatggcttctggcaccacttaaactggtctatgtataaagacctctgagattgtggtaagggaaacca

SEQ ID NO: 2439 - DNA, 600 bp, Bovine  MMBT22168
tttttaattggagtatagttcccttacaatgttgtgttagttcctgctgtacaacaatgtgaatcagctatacttatacatatatcccttccctcttgagcctccttcccatcccacccctccaatttcttcctgaatttctagtagtatctgttgtatacattttcatgccatgtgtttgcattcctggcctcttgccatcttaaagttaaaagaagataacaattcctgggatgttatgcatcatacaaaggaagtcctgtctctcatascaaagggatacaagcagagtcaaggtgyttgctttcccccacccagtcttaccagcattgtgtctggcaacccaagtcattctgggaacaccatacccagaatcacatgctgtgggacccaatcccatgggtcggtgtgtgtrtgtgtgtgtgtgtgtgtgtgttttaatgcaaatctcagcttccaaagcaagatcctcatttggaatttaaaagagttctaggttgtttaacgtttgagtggaattcctgagcctgttaactggtcacagtctactagctctcataattagcaagagacattgtattatgcaaacaccactcagtt

SEQ ID NO: 2440 - DNA, 600 bp, Bovine  MMBT00075
tagagaggtccagcttcagactgttgagggaaacccgccggaagaaagtctcactggtgtgctgaaggcaagcccgcaggggggtgaacagaccttggtctttgtgcatcacaggagtctagccgagggaggtgagtctaacaggagccagacgtctaaggacgagcggagcatgcagggctagcctctgaggcttaccttacaagcctccagggtaaggactgttatcaccgaagaggaaactgaagcacagagaggttacataagttgccctaggctgcacagcgagtgagtggtagrgctgggattcaaacccaaccagaagctgtagagcccgcgttcttaaccaccacactgtgctgcgcacctcccaagctcatttaattgtcaaggcgtattgtcctcactctgcaagaaagttccagaagcacagagaggtcaagtaatgccctatatgggtgcacagcaaaaagtggtgtatctgggatccaaacccargctatttgataataatgaccaaaaaaaaaaaaaaaactgtactaaaacccaaaaggacagagagtattctgtcctggggggctgagcaggaggaggagccct

SEQ ID NO: 2441 - DNA, 600 bp, Bovine  MMBT08714
ataatcagaagtgtcaagacttattgagtattataagtacttccaaaacagtcttgtgtgtccttccaaggcatatttctttctgarcaaagtggcccacccactaaacccagtattgatttagctgagcctgtggttctaccttcccagctgcagggcagggcttcataacgtgcacaggtagtttcagttggcaccagagcagtcttatatgttatgttatctttgatgataggtgtgggatttgttctttcttgccagtgcatcctactttgaaacagtactggaggttccagcctrgaagatggaggctggaccatcagatgcgcctctcaagatttccaagttagcaaacacacactcaactccatggcactgtgtctcttgaggtttcatttttctgttgttagatatgaggactaccacgcaggggaccacactgaggcaacagggtttccaagaggtcaacaaaagaaggactttcttacaggataatagctggataaagaaacgtccctgaagaggaaaggtaagcgggcatggagaggaaggagcgggggagaagaaagagctattctccatttaggaaactaatggccg

SEQ ID NO: 2442 - DNA, 547 bp, Bovine  MMBT10574
ccccagcggccataaggacagtaaggcccagggagcttgcgggagagggccacagacgaggaggagaaggaccgaggcttgagcgtgaactgtgtgggtttcgcgtcaaggctcgttggagaaggtctggacgcgagagagcaagaagagggcttcggcaaactctggcctcctgccccccaggagtggccggaccctaaagactggagcttgcaggacacggacgccttcgtgcttgtctacgatatctgcagcccggacagctttgattatgtgaaggcgctgcggcagcgcatcgcrgagaccaggtaaggtgcgccgcccaggttgcgtgtcagacggcggggagtgtttgtgggtctggctgggccttttttccccagaggtgagtgggtgggytcttccgccgtcctgggccaggtctcaggccttttcgggcctggcctctggccctaagcggtctttgtgggtctggtgtttgctgggggttctctgggtgcaggaaagtatgctccttagtgtgtatataaccactggaaggattctc

SEQ ID NO: 2443 - DNA, 598 bp, Bovine  MMBT11895
  misc_feature (1)..(154): n is a, c, g, or t
nnnnnnnnnnnnnnnnnnnnnnnnnnnnnnnnnnnnnnnnnnnnnnnnnnnnnnnnnnnnnnnnnnnnnnnnnnnnnnnnnnnnnnnnnnnnnnnnnnnnnnnnnnnnnnnnnnnnnnnnnnnnnnnnnnnnnnnnnnnnnnnnnnnnnnnnnncatgggattctccaggcaagaatactggagtgggttgccatgccctcctccaagggatcttaaacccaaggatggaatccacatctaatacactggcaagtggcttctttaccactagcgccacctgggtggacaccagcagatayttgtgacgtccctattggttcaaattgactcattcacaggcccaggtctgataaaatgaacgtgagtaggagaacagactttacaaattcagctcctagactgattgggtcagtattacctaaaacacagacctgtgaatagaagtaggacagtccttcasagtgaaataggggttctagtaccatgaagtggatgggcagcaagaagaatgcttgccagaagcaaaatcatttccctgtaagagctcagttgtgcagggtttgtttgcacatataattatccactagactaaaagtt

SEQ ID NO: 2444 - DNA, 600 bp, Bovine  MMBT21068
ggacgcaggaggcgcaggtgccaacatccttcagacctcccccaaaggagtaactagcccccccaggaacatcttgggtgtggtggaggctgaggacttagagaatttctgctcccagctcagcgcctgcctgatgggtggctgccagctgggcgtggctgggygtgaccaccatgaaggctgcaggaaaggaygctaggtcctggatggactgcctccatctgtgccccagtctccattcctacagaggcaccgagccctgcactgatccccagtagcagatacaatctggagatgagsaaaggtggcccagagagcaagtgactcatccaaggttgcacagctggtaaaaagtagagctggaacttgaactctggctttgaggttatacatttgaagctgtttcctctgacctcaacaagatgtcccttcactaacatcagggtccttcctgttggcctatggaccctcagccctgtctgagtttcagaggaaaggtagtatctggagttttcacatcatatcatccatcagagaggcctgcagtggccatccaacctaaagcagcctcagacactctgcagggaggacccctgtgga

SEQ ID NO: 2445 - DNA, 598 bp, Bovine  MMBT11552
  misc_feature (1)..(69): n is a, c, g, or t
nnnnnnnnnnnnnnnnnnnnnnnnnnnnnnnnnnnnnnnnnnnnnnnnnnnnnnnnnnnnnnnnnnnnnttctgatagatttttccaaatattaatctaacagcagcatatgttacttctaastctaaattataaagctcctattttattgtttgcatttcaaaacttattttaaatgatgtggcagtgaaagtgtataaaatatacttactaaacattattttccacattcaaattagagcctcttgggctgatttttaagtgccatgtacattttaaaatcaaaatgtattgctgacrttcttttaacactccctccccgttcactcttcccaaatgccacagttccttactgctccgaaagtacttatmtgtgcattcgtctggtctttcacaacagcacactccaactgtttgtacttcagatctctctctcaattaaagtaacaaatgttaaytctttaaggtacttaaccatacggtaaacttgctgcactcttcctttcgttaactttaaatctcattatagcaatttcccctcaacctttcctcccccttctaaattcactacaccarcattgctgcgaagcaacatgca

SEQ ID NO: 2446 - DNA, 600 bp, Bovine  MMBT18822
tagagtacatttctagtttatcaggtggctgaagtaatgcatatattatgccagccactgcaacataatcatcaakttcttgatcaattaaggagtgtttactttgagccctgagaactgtctcctgacagcagtactgaatctgtcactataggttctagagtatgtaggagttgttggaaaatttcccatattttaatagctgagaaagctggtttgtcagatgagaagtgagagggtattctcgtgagaggtcaggtggcttgaaaaamtgtgcagatgtggagtmcaaawagggcrggaaaagagaaatcccaggaacaaaaaatgatgtgagtagagggggtggaagaaatcagttatctgaggatgagaagtaaaatctgacaaggaaatgggaactaatacagggatttagagaatgtggatttagaaggttagggatttataatgtgagaaacagaagatgacttgggcagaagatttcgaatggcttttgatggaaccacttcgattttagagaaatgtaatagagaaaagctatgggcttccctggtggctcagatggtaaagaatccacctgcaatgcaggaggccagg

SEQ ID NO: 2447 - DNA, 598 bp, Bovine  MMBT22740
  misc_feature (1)..(38): n is a, c, g, or t
nnnnnnnnnnnnnnnnnnnnnnnnnnnnnnnnnnnnnncccacatcatgatccataacctggaggagggcatggcaacccactccagtactcttgcctggagaatctcatggagagaagcctggccagctacagtccatggggttgcagagtcggacacgactgaagcgactgagcacacacgcatgtgatccataataacargtctgttcatatgacagatargggaaactgragactggaagggactcgcttccagtgtgaaggaagccagaacccacatgtacacactcatgtatasggggagacccagcccacctacatgcccatcaacccacaagctctaactggagtcctgctaacaatgggaacgtcactgagtgtacccggaatgttctaagtgctttccaataagtcgttcaatattcagtgagcctataggcagagcctatttttctyccctttttacaaaggaggaaatggaggcacagggcaagacaataactcactcagagtgacagccaggagaaggctgggttggggtttgagtcaagagggtgggctctggacctcacacttccaaggctacacaatgcaat

SEQ ID NO: 2448 - DNA, 600 bp, Bovine  MMBT22774
tgtgtgaacaactatacaccaacaacctgtgcaaccagaaggggtgggagaattctcagaaacatacagtttaccaagattgacccaggaagaaatagacctgtgactaccagacgcagagtgggaaggaggaggaattggaggcagggggtcaaaaggcacggacctccagtcatagctaggtggaagkgacatgattcatcggwcaggaacctgagcaaactccagggtacagaggaacacagaggascctggcgtgctgcagcccagagggtcgcaaagagtcggacacgacttagygcctgaacagcaacagtgtgtggaagggacataatayacaggatgactactggagtgggttgccatgccctcctccagggggtcttcccaacccaggggcagaacccaggtctcccacattgcaggtgcattcttcaccatctgagccaccagggaagcccaagaatactggagtgggcagcctatcccttctccaggggatcttcctgacccaggaaacgaaccggggtctcctgcattgcaggcaaaatttttactggctgaatttttaccggggaatcccatagctgacagtattgc

SEQ ID NO: 2449 - DNA, 598 bp, Bovine  MMBT05663
  misc_feature (1)..(132): n is a, c, g, or t
nnnnnnnnnnnnnnnnnnnnnnnnnnnnnnnnnnnnnnnnnnnnnnnnnnnnnnnnnnnnnnnnnnnnnnnnnnnnnnnnnnnnnnnnnnnnnnnnnnnnnnnnnnnnnnnnnnnnnnnnnnnnnnnnnnnnatttgtcagtaactgcagttcctttcagatgcctgttgcatctctctaaaggagtgtggcagaacaaatttaccatttgttccttcattttgtgtgtcttgcatctgtttcatttgatcttacacatttaaggccagtaatgtcctttgagactttattttctagatragaacaatgagggtctaagatttgggagggaatcagagggaagacaacatcaatctggaaacawagctttgacccgactagagtaaaacagtaactcttggcacccgcatttagagcccttccttgaataagtttttttccagagctatttctcattatcactgtgccttccagctccccagcagccggtttggaatttgcctaaattcaaatttacaacatatggtatttacatcgaatctgtgaggtactcagtaatgtggcatgctgtcagaatcggaaacaattctactttcca

SEQ ID NO: 2450 - DNA, 600 bp, Bovine  MMBT23288
aacccacatctcttatgtttcctgcattggcaagctggttctttaccactaggccacctgggaaatcatgaatcatgaatgtttaacagcaattaattaatctgctttaggaacctaagtaagtactagctgaaatttaagatgtaaaattggaagtcatgagtmcaatgaaggttagaggaaaaaagaaatgggatatgaaggagagtcataatkctgctcagaaggtcaggccaaatagtgcaatagaccttttgtgcttgaattcatgggagttttcttcctcagattaaagttatraaaaggagtttttttctctccttgatggctatatttaacaggagaatagttgctcaaatttattatttggcccagtwgaaaaaagtrcaatgtaactcaaagtctaaatcaatgtaatttaaaatataattatgcatgtatgggagtgtccatggcaagttagatgaatgtgttctaaagaaagaataagaatccagggattgagagattcttgttaaataggaaagaatcaataaggagacaagtttcctcattaagagatgatcgccacatttctgaaaaaaatgataaagtgactga

SEQ ID NO: 2451 - DNA, 600 bp, Bovine  MMBT01681
tgaatgttgttttaaaaaccataataatttgcaatcaatttagcataatctgtgttaaggttggtaatattaaagaaaaaagaaggaaaacagtttaaaagcacaaagcttgtaatttatcctaaataatatacttaaagcttagattaataggtgcaagtaaattttgtaagagtcatgtcctgtggcatagggaacactgttttcttgttgtttttttgttaacaataaatcctactgaacaggagcctacattaatccttcatctctactatttttgcttaagtgtatctcactcamaaactataagactggagttatagttaaagaggaaaagtcctagagttggggtcctagggtatatctgtgttgtgtgtgtgtgtgtgtctgtgtgtgtgtgtgcgcgcacataggctgtatttagttttcagattcccatcagcagagcaaaggtgatggaaaatctttagaggacaatcattttacttagagattttccccttttaacaggtctatttattatgaaaacagtttactgagttctttatatataaacctcacctcttaaaactgagaaatctcatgatgtgaaacacttcc

SEQ ID NO: 2452 - DNA, 600 bp, Bovine  MMBT08006
atgtgtgtgctcagtcgcttcagttgtgactgactctctgcgaccccatggactgtagccgactaggcttctctgcccatgggattctccaggaaagaatactggagtgagttgctatgccctcccttcaggggatcttcccaacccagggactgaacccgagtctcctgtgtctcttgaattgcagggaaattcttcaccactgagtcaccagggaagccctagttcttgtatataatgcattataaactgcaaagtcattttcctatgagaaaaggaataatattaccacactgtgartgaggaaacagaggtggggagaggttcagccaccttcccagggttgtacttgtatctcaaagcaaagccaggacgcgctcacaggccttctgctcccaggtctcatggttcttccrctacaggacttctcatccacgcttagagtctaggaactatgctatgagattctagaggttgggtgtcctttcctgccttctccaactttgccacatttacttcctgagtcagtgcctgctgcctgctcagcaaagatgagccctacccacatcagaggagggtttaacatgaatgcataaagaa

SEQ ID NO: 2453 - DNA, 600 bp, Bovine  MMBT08182
caacttttctaagtaatgcaggctttgtcgtaactgatttctagaggactaacttacttatattagcaataagtgtaggatggcttccttaasaataatccctcttccagttagtcaaaagtcctggggaattctcagcctccatggttccaccaaacttctgaatggcaagagaaaggagatgtcttatgcaccatccaaagggccttggaggtagtgatgtcctggctgatgttggttttttcataaccctcccaactctttgctctatttcttaatttctgtcatggcaccaccatytacctggtcttccagaaagctgatctttattttacatgtattcttccatcccaagccttcctctagctactgtttctcttttttcttatttgtagtcatttttcttgaaataattgcttatgcgttactgcttttactacttcatctcaccagtgagcaccaactcctaatccatggaggattagactgtgggcttagtctcatcgactttctgcaacactgcatcttatctgatagttcttggaaatgtgactaattatcatacttgcccaccgataacctacaagtatgaaaagcttc

SEQ ID NO: 2454 - DNA, 598 bp, Bovine  MMBT10238
  misc_feature (1)..(38): n is a, c, g, or t
nnnnnnnnnnnnnnnnnnnnnnnnnnnnnnnnnnnnnntgtcaaatactgagttactaacattctgagattctgagggaactgatactgactttgggattttaagatttcacgactctgacaatatatattttacgtgtataacatgccacatttctgagatattaacattccaagggtcaacgtgctaagggtctaatgttttaaaggcttacgattatggaattgtgtgtctgagaagggtctttgctcataaaactttagtattgatgattaaacacttctgagattctaaaacttsatgaatacaaagtccaaaggatcaagaacttaaagttccaaaggtctaaggtcctaagattttatacagttctctggtctttgcttatattgtcctaaaacatcaaagtagtgtgaccaaccattctagttgtcccaagactgagggtttcagtgcaaaaaaacatgaaggtgtggtcattctgctcagcatccacatttctaatctgaaatcctaaagctttaggattataaagtcctaaggacctatgtatattagagtctagatttctgaggctttaagattctaagacccaaca

SEQ ID NO: 2455 - DNA, 600 bp, Bovine  MMBT11584
atttcttaaaaggaccttctggacatgctgctgactgttcagaggagctgactttcctccccatcagaaagacccttccatggtttggattgggataacacattaggattcagttcctgaatccaggataaagctgtttatccctggagttagatgttctgctaacttagtctttggaagaaataatgtaacatgtctcttgtctgctcctgaactacctgtgaaagactttcttctgtcattatttgcaatttaatgacgagttcatgtggtccatgataaaaatacatcctcttagayaaagaggataaatgcatttcaacatatatgtcaactctggtcatttgatggtggcagtgaagatcacaaaattgaggagtataaaacctgattcaagcttagagagatgagtgccagatcaattagtgaagtctgccatcagcatgggaacaggagattagcaggccacaggttattacatattcgctatcatactctttccaaggcctccactgaaatgctgccatgcatgaattacaatgctgttcctcttccctactttaagggaataaaggctattgtgtccttgtgcatattttg

SEQ ID NO: 2456 - DNA, 600 bp, Bovine  MMBT18304
accagacttcttgtccagtggattttccaggcaaggatactggagtgccatgcccttcaggggatctccctgacccacagagtgaacccacatctcttatgtttcctgcattggcaagctggttctttaccactaggccacctgggaaatcatgaatcatgaatgtttaacagcaattaattaatctgctttaggaacctaagtaagtactagctgaaatttaagatgtaaaattggaagtcatgagtmcaatgaaggttagaggaaaaaagaaatgggatatgaaggagagtcataatkctgctcagaaggtcaggccaaatagtgcaatagaccttttgtgcttgaattcatgggagttttcttcctcagattaaagttatraaaaggagtttttttctctccttgatggctatatttaacaggagaatagttgctcaaatttattatttggcccagtwgaaaaaagtrcaatgtaactcaaagtctaaatcaatgtaatttaaaatataattatgcatgtatgggagtgtccatggcaagttagatgaatgtgttctaaagaaagaataagaatccagggattgagagattcttgtt

SEQ ID NO: 2457 - DNA, 600 bp, Bovine  MMBT05956
acacgactgagtgactgaacaacagttacttccgtcttccttaaagataaggaccaggggaccataaaccacagaggtttagtttgatgagtggagttagtttgttgagtggcctttcaacccatttttttccctacgaataagctaagctagctagttatatgcctcgaagaaagccatttggttaaatatttaggattttcaggagagtaggtgtaagaatttcctatcatctatcaaaaaaagttaaaaaattatgattatgaatcaggaacatcactttgaacagcagcctgtacrtgtagtgtattttgaacaaatttcccatttccattttctgaactgcattattaaaactttgaattttggtgttgtttcttaccaaatttttttttttgtctttgttgtaggaattccatacaagcaactaactgttggggtccccaaagagattttccaaaatgagaagcgagtggcattgtctcctgctggcgttcaggccttggtcaagcaggggtttaatgttgttgtggaatctggcgcaggtgaagcttccaagttctcagatgatcactacagagcagcaggtgcccagatcca

SEQ ID NO: 2458 - DNA, 600 bp, Bovine  MMBT11873
tgagaatccacggggcggcgctggtgagtacatggagggcgaccttgaggcgggtagcagtggtgtcttcagataacctgtgtgtttagagacaactgctgtcatcagagatccatgactgggttccaacttcagtgtttaagctggaggaagagcttccacagtgaagactgtgaatttatccccttgtggaatgtgaaaagctcccagttctgtcaagaatayatatcccctggcgtctgtgacatggcattaatttggcacaaatggacatttctgattaatgccagcaggacgtgkattcagtgggcaggaatagaagctctgttgctatggcagcaaatatgccttatagccatagacctgctgttttctttcctctgtagaatatacttgtttttaaagaaattgtagattattttgtttaaatagcagaatgaatccagtgtagcttcttcgcctactgaaatatttattgtgccatgtttctcccatgaaaaatcataaaaattcctctcttgatcttcttttaaaaaccaaatctcacgtctgttttatgagtttattcttttctaaaacatgctatttaaaagaaattat

SEQ ID NO: 2459 - DNA, 598 bp, Bovine  MMBT17716
  misc_feature (1)..(14): n is a, c, g, or t
nnnnnnnnnnnnnncagattctgtgatgtttgagtaaacatcacatgagggtcatctctggctgcagagaatttgtgatctgagaaaatcaaacacccctgggtgaaataactatacattataaagctatgtattgtgactttcccccaatgccatgaggatattagtattaattattattattactgctactattaatatttaaaattctgatctacttaaacactccctttctttttaggttttgggcatagaaatagacaatttaatgacccttattccatatagttaggttgattkctatagcctgacagagtgaagttaatttaagtgttcctggataaccttggttggcattggactttttatgtaaaggacacttactttgttttttccttctgtgtgtttcctggagatggcagtgaaaggtgaccccatctccatcatgaattcctttcttcatccagatctgggtgtcaggtccaagctacagaattttctcgttcctttattagttaattccaaagagacagagacaaagacagaagagaggactaaagctcggaaagaattattatccccatggacagctttaacc

SEQ ID NO: 2460 - DNA, 598 bp, Bovine  MMBT21078
  misc_feature (1)..(52): n is a, c, g, or t
nnnnnnnnnnnnnnnnnnnnnnnnnnnnnnnnnnnnnnnnnnnnnnnnnnnntggacacggacaaaggagagttggccccacccttcaccctgggcagttcagagttctataatctaagctttactgtagcccaaggaggccaaaacagtgatcctagagggtgggaggttaggcaggggaagagggagtggggtgaagactggctgctgtgagttcacgggacctctcccacccaggccagggtgctctgccttccttacctcttgagggctgagcttgagaggttgtctcagagaatrttagatgaacaaatgtgacttctcctgactggccactgttaggtcatgcccagacttgctcttcatctcttcttcccaaactcgactctcactagtcragccctcatttcttcatttggttccctcaactcctggttgcttagccccgggtagcagtgggtgggaagaacgtggattgcrgrgaccgctgtctcyaccccyacgttgccttggtgtgggtcctgaacgctgtgctttttgtcctgctgttgggcaagtcacatgacctttctgaactcctgtttccctgttgtgaagt

SEQ ID NO: 2461 - DNA, 604 bp, Bovine  MMBT21160
  misc_feature (1)..(4): n is a, c, g, or t
nnnntctgcagtcatctcctttcaaccagaagaattctctttagckgatttaccaacagatattcttagtttyttattatctgaaaatgctttgtttcaccttcatccttaaagaaggattttgctgagtatagaatttggggttgacagtttttgccatactctttcaggatttttattgaaccactcctttcgccctccataatttctgatggaaaggcagcaattattttgattgccatttycctatatgtaatgtgtccttttttttttttttttcaggcatcttttaagattgtctcaktattcattactttctagaaatttgaatatcatgtaccctagcgtgactttcttcatttttatcctggttgagrttttctgagcttcttgaatctgtaaattggtttcaccaatttgggaaaaatttagactgttattttcaaatatccttttcctgacttatcttctttctcttattcttctgctgcttcaatgataccttttgatattattccacagattcttgaggttctattcatttattttgtttttcttttttcttctcctgataggataatttatattgatttgttgttaagtt

SEQ ID NO: 2462 - DNA, 600 bp, Bovine  MMBT01645
tgagaagagagagagargtaggatcaatgagagagctgaaaaccaacrggagcaatgctcctaattctacaggtgaatcagcacgcttagagaamtataattttcaccctgatgttggaatctactgtggatactcaataatttaaacaggttctcttcccatctgtcttcatcactgaagcttcagaggtgccctatctctccccaacacacaaattcrtcccaaatgccattttcacaggcctcaccaagccatgtccctctctttcattttgaaatccattcatactatgaaacctyccatcataagcctcttgccttcttattaggtcaacaggcmgcctcctagcagttaaagcatgctataccctgccctaaaccaattgatatttgctttgtttatctcacaaaatgactcttcatagatgctaatgttttatttctccccttacactgaaaattctcaaaggcagaaatgagagatgcattctttctttgtctccgctttctcatttctctgctaccatatgtctaattcatttcacaatactattgaagcattctctcatctctttctctcagtgtgattattttcttacc

SEQ ID NO: 2463 - DNA, 605 bp, Bovine  MMBT01704
  misc_feature (1)..(5): n is a, c, g, or t
nnnnntagaattcttgatttagaaaagaaatactgttaaacattttagtaatggagaaagactctgggttgatacagcaataataatgcagaaacttctaaaaatgtctgtgctgaaatcatttaaaacccaaaagaaaattttttaattatataaaaaaaaacctatgggtttaatgttgtctcaggttttatgtgcaagtccagaaaatagaggtaagtctagtttaataattggatagattaattgtactaatacactggtgaattayttaggtatgtgtagaaacaaattaagggatggtrcaaccgtaaatcataacaaaaactattaggcagtttgagaacttggagaatagtggagagtctaaactgaaatactaacaagatttgtaggtcatgtagacaggattgatgctttgaagtgtctaaatagcttcaacgtagttggctgggagcatgccagtcctgccagtcctctgcacagtgccgtacatccaaccttcatcaatagcttgaacattgacaatggcatctccatctttgaaggatacctcatctgcatcagcagccatatagtcatacatggcacggaagattttctgt

SEQ ID NO: 2464 - DNA, 600 bp, Bovine  MMBT02775
cttttatgtgtcttgtaaggatcctgacaataaaatgattcatattcttgtagcattattgttttccttgaggtaaaaataaagggaataggttctgctttttattttttaattcattgttattattacttttttggcagagacatttatttycttctctacaaatatctctcttcctttctctccttcctccagtgagggcatctagacgaagtatagtcattttatgctctggcagtcctttctatatactctatgctggcattttagcttccttttataagtaatcatttatatgcsttcctcttytccttaaaactttctctgccttatttatcattgtattctcatacatggatggttaggaaaactagtactcaataaatgcttagtaaatgaggaatttaggtgctgaagaagactcttgagacacgcctgggcaacttgctcaaggaaatcaaatcaatcaatcytaaaggaaatcaaccctgaatattcattggaaagactgatgctgaagctgaagctccaatacttgctcacctaatgcgaagagatgactcattggaaaagtccctgatgctgagaaaagaagtccct

SEQ ID NO: 2465 - DNA, 600 bp, Bovine  MMBT02857
tgcggcttcattattacacctctcatcaagctatgtgactcagaggactcgaggtctccacttctctcactctccccttggaaacgcagtgcagaacttcacggacactgcgggctgactaaagttaatggtcaatgagtgcacactctgggagcacttcatggagaagtgtcagggtttcgggtgatgagatgcgtgcgcagggacagcataattatccatgtttgtatcactggatgagggccccttctgtcacaacagtcctagtatcctcgtggaacgccactgacagcactcctmctttcggcagagtttgaactggagtaacgtacctgtaagactgtttaactcattcctactagctttcacctcacttaataaatggtctctctcttgcttgatgtctttcactgcacggagcctctcggagcctgcgttcaccagcttcaccttttccagttccaggtcactcactctggcttcaagctcccgtatctttgcatctcttttatctttcaaaatctaaatgtagggataaatacaaaggacagagcaagaaataacaaaataaaatataaagcagcaataagaagtgggaaa

SEQ ID NO: 2466 - DNA, 600 bp, Bovine  MMBT03304
tgattccaagggtgacagtgtttcctcttatgatcgaatgaagttaaaattttatttttaaagggattcctgagtttgtttgatcttcgttgagttttatctcaacgtctgtaatcacatggaccatccctttgtaagctaaaatttgaagacaaaataatgtcatgatgatgactctttgtaaaaagtactcacaagtaatgattacaggaacaaggtaagctgggaactatttccatgtcaagtctcagaggaaaagttaaaaacagaawacaaaatattgactggtagtgtgcttcyaagaatgctccaggtctccaatgcaaacaatgatttcaacagatccctgaatcccaaattctctgccagttttcataggaatacatatttctcatagaacattaccatgaagtttatggtgttttgccccaaatgtctagaattttactaycctgatgcatcagactgtaccacacatagactgagtatgctcttctgcttttctacattcaagtctgactgtgtgtgtccatgtggctcggcttccyctgatgtaaactatgtactgatcaaggctctcaggacctcaaaatcctcaaa

SEQ ID NO: 2467 - DNA, 600 bp, Bovine  MMBT03311
cagacatgactgagaaacgttcattttcactttcatggacatattttaagcaaagtgattccatgcatagttttgtatcacagaggaacactctacaaacaaagtgaaaaaggttttaaagaccctttgagagaatctctataacttgtacctggttcaactgtgctgactgcagttgagttgatatttttagagtataaaaatatttatgtatactactttttactggcacagttgctgcataaaatgaggtatatgtgtacactcacaaatatgaaagagttttccaataggtaatayaagcccacaaccatttaaataaaattctgaaatccataaacctcagaagaaaaaaaaattggtaatagaataaactcaccttatttggactcatttgagacaaagttgaatagatatgaaatattattttaaattttcccacttaggtaatctttatatttttgctaatttcctttttaatatagggtgagtatacaataaaatatatatcatatgcatgctgtatatgatatataacatacccacactgcattaccattctaraatgttatatatataatgaattctaaaatgcagtat

SEQ ID NO: 2468 - DNA, 600 bp, Bovine  MMBT04129
caaagacaaatatcatgtgatatcatttgcatatggaatctacaaaatatgatgcaaatgagcttatttaaaaaagagaaacagactcacagacttagagaatgcacttttggttactagggggcaggagaggggaggggagagataggttgggggtttggggattgacatgtaaacactgctattatttaaaatggtaaaccaccaaggacctactgtatagcacagggagttctgctcaatattttgtaatagcctaaagggaaaagaaatgaaaaagaatagatatttgtatatgtrtaactgaatcattttgctgtacacctgaaactaacacaatgttgtcaaccaactattgtccaatataaastaaaaatcaaaaaaagaattatcctgcaatgtagttgtcaattaaaatcaaagctcatattgttttaaaatatttaatcaagaaactctaacttaggtataatttgcagctaaatgtaaaactagaatacaacttaaagacaatgtaggtcagaagtggttcctaaccttgactgtgctttagaattacttgggtagttcttaaaatgtcttaatgccctactgcacaat

SEQ ID NO: 2469 - DNA, 600 bp, Bovine  MMBT07440
agtgaatttttagtctgtaagacctgtacagtttaagttgttttattatttgtccctaagtcagacataaataatggatcacatgttctggtaatgttcagtcatggttttattcttgtagcatttatttgtgattaagaatgtaaatacagaaaatggtccttttcagtgtgattttaaggcttacattggttggtgtctcttttcacatatttaatctattcattatataagcacaaatgtttctggtgaccacttttggaaatgcagttttcacccattgggcatatgactgtgtayatgttattagatattcgataatctcaatttggaatctgtgaggagaaaattcaatccaagttttagatcattcgataacaatttcatgagaatttatagggattttaagatataatcacattgtctttatcatcataaacagctgtagaactttagtctgagaaatattaagctttttcaaagcatagtgtattaatcatatttttaaattttatgtatcttatgatgttttgacatcttacacagcttgctgaccagggagagactttgtctcctagggctagccatttcttagagata

SEQ ID NO: 2470 - DNA, 600 bp, Bovine  MMBT08183
ttaagatgtcagctggagatgtaggctttgttcacatggaaaagctgctgattttcagcaagttttatacacatacacacccaagcatgcacggctgacacttgcctgctcttgacaagacaactgggccatrtggtgacaatattaattagacaattgctgctgaagaaggcatctgtacagctctccacctgcttccccaccatactcagttcatctacaacaaacagccaaccggggctgacagccccaaacggtacagctgtagttttctccagggtagtagctccagaagaaacrcaagatgcaggagacctgacagagtcttgggatggaatttgccctctagaccttctttgcaaggctgccagatcattgtccagaggttgaacaccaaacccttagctcaacrctgagggctctctggcagttttattagggaagtcaatcagcaacatggccttaggctcagcaaccatgtagagctgggttcaaattccaggcatgccttgtgctagctgtgcratcttcaactatttaatttactatttgaacttcttccyttacttcgagaacattatcaccttcccagtagactgt

SEQ ID NO: 2471 - DNA, 600 bp, Bovine  MMBT08648
acagtattataaagtaattagcctccaattaaataaatttgraaaaaaaaatttggaatagaaatagaatactattgaacatggctgtcatttaaaaatagttatctctcctactggttcatagttttaaatttcagttaagtaagacttatctaaaatttcctgaatattacttcattaagactttagaataactgcattgttccctcatgtttctgtatatatcatgtattgtctttctctcccagctgttcccatggtgtcctctgggaccttatctttatgctgaaagacctcacrtacctttccaggacagaagtaatgtagcataatgatgaagacaatggattaggggctcggatccctgcttacccatttattagctctgtgaccatggttgagatattttatctctatccacagtttcttcatctggaaaatgagaataatcatagctactttgtaaaagctgggaaaattaaagaaggtgatttaggaccagacacatggtaactgttaggtattattattatcgtcgtacatacagtcagcattaccactaccaccccccacacctccatcatttcattaccaacatca

SEQ ID NO: 2472 - DNA, 600 bp, Bovine  MMBT09063
gttgcaaatagctggacatggctaagtgactaacactttcacttcaattttcatactccagtaagttttttttttttctttaatcaaatttagaggaaaaaaaataaaggaagagactttgcaatatcttctttgttccccagttatatgatttctgttaaaatatcggcaatagatgaaatgcctgtgtcccccaaatccctatgttgaagccctaatgaccaaggtgatgacttttagaagtggggcctctgagaggtaactaggtcctggggcagcgtccccttgaatggaattatygaacttataggaaaagagaaagagcatgtctctcctgcaggtgagactacagcagcaaagcagccaacttgcaagctagggggagagctctcaccacacattcaatctgttagagtcttcctcttagactttccagcctccagcattgagagaaataaatgtktgttgcctcagtcaccgaacctgtggcattctgctatagtgacccaaaytaagacaatttccctttgaattttatatactctcactgcctaaactaaggagtacagtcaccactaaatgataatctatgcaaacaga

SEQ ID NO: 2473 - DNA, 600 bp, Bovine  MMBT09316
tgggtgaccacacacacacaggcttcccgtctctgctgagaaaggtctgccatgtggccagtttctggtcagcaaaagaattactgtttaaaaggcttcaagtaagaggacagagggtttgtaattaacatggaacactgacagattcacctttatcataaaatcactttcagtggaaacctgcaggtgtgactttttcccactgaaatgtggaggcatctctggctggaccgtggcaccgcacccttggcctgacctgcagccttctgtgttgtttcccttaaacaaaaggataccacrttctcatcagacaaacttaagactctcaaatgsattgaatcaggctcttatagacaccacatccgtaactgtaaaattaaaaacaggccacaggagcaccactcagtgctccgacatctgcatacacagtcaggacgccaggacacgtgaatcccaaatctctgcagaagacacagaacagaaaatcatgcagcttgaaaatcccgagtaatcacttgaaatttattggatttaaacccctctcatcagttaggagcactcttgatatcagtcagattttgtgtggtctgtgaatccagg

SEQ ID NO: 2474 - DNA, 600 bp, Bovine  MMBT11621
cttcgagaattctctttgtcctgcttagtgtcggaggcgtggaggggaggcaggaggcgggagtgggatacgcgcaagtgggagatgaggacccacgtgcacactctcgccctggtggagggggcagaaatgtgctcagagccctgtggtttggggcagagcccagcgccaagcaccctggggaccttccggcccaccaccgcctcttcctctccctgtgctttycttggactcccagatctcagactgcagtgccctgaaacctgactctggtcactggaagtattggaagacgtgggyatctgggctctgaggtgtcctgctaatttcagagtggatgaagcgagcatctttataacagaaggtgctggccacctctttatctaagagcccctcaggctaggacaggggctcagggaggttggtgcaggttcctacctggcctgtgcccagggtcttgggcctctctcccacccttcccctattccccatctaccccttccagcagagatgggtgaagcccacaaagagaaccttgggggaggaaagctcaggaaaggggcaggacccccaagattagctgatgtggcttcagacgag

SEQ ID NO: 2475 - DNA, 600 bp, Bovine  MMBT11850
acaaaataatgtcatgatgatgactctttgtaaaaagtactcacaagtaatgattacaggaacaaggtaagctgggaactatttccatgtcaagtctcagaggaaaagttaaaaacagaawacaaaatattgactggtagtgtgcttcyaagaatgctccaggtctccaatgcaaacaatgatttcaacagatccctgaatcccaaattctctgccagttttcataggaatacatatttctcatagaacattaccatgaagtttatggtgttttgccccaaatgtctagaattttactaycctgatgcatcagactgtaccacacatagactgagtatgctcttctgcttttctacattcaagtctgactgtgtgtgtccatgtggctcggcttccyctgatgtaaactatgtactgatcaaggctctcaggacctcaaaatcctcaaagctaaaggggaaatgtataaaaagtcaaggtgtttgccaataactctgatccatttataccctcacactaaaaagggaatctcttaacaccgtggcacaggtgtctgctagaagtaccatttaatggctccaacaaagatgcacactcaca

SEQ ID NO: 2476 - DNA, 530 bp, Bovine  MMBT11886
ctttctccagacccctcagcattgtctattccatgcaaaccatactgaccaacagcacctgcctcagtgggaggactgagcgggtcagctcatgcttagggaagtactaggatgttgcagtgctgtttattagccaataaatcagagccattattcctgttatttagtttaagtatcttgtatcacatatactaattaaactcttattcccacagctaggttacaagcaaattgagggccaacatcttacgtgtggatttttaaattttcctccagagtacttaccattagtttttaatrattattgtcaagtgatggaaacaaaggatttccatgtttaaagtttcatttgaaaccctttagaacctctatttagacagtgattcaatcctttaacctcttccaggactgaccttgtgtgtaaatatggcaaatccctgaaaatggcatctatcatgggaactttgctagagtagagccaaaatactctctacaagatcaaacaaatattgactcaaaagaattttccc

SEQ ID NO: 2477 - DNA, 600 bp, Bovine  MMBT12517
ttaaagagctataacttaaacggtgatacagggcaggcacacagtagatgataaatggctttgtgtaagaggtttcaaatttgtcaaatctgcattaaataactatatttgaaatcggttagaaggttgggtgaattctccaggtgaaaatgacatttgttttatggatccctccaaaacaattcccccagagttttcacttgaataaatcacatttcgagttcagtgctccagaaacagcttgcattgtaaagttgcattagctgcttctctgtttcctctttgtaggaaaaagcgctygatttcttcatttgtaaaggaagtgagactagataacctggagtgagaatctttatatcctctcattcattcattccatgggcttccctggtggtgccagtggtaaagagcctgcctgccaacgtgggtttgatccctgggttggaagattcccctggaggagggcatggcaagccactcaggtattcttgctggagaatctcatggatagaggaacctggtgggctatggtccacggggtcgcagagtcagacacgactcaagtgactgagcacacacgcaaagaaacaacaacataca

SEQ ID NO: 2478 - DNA, 600 bp, Bovine  MMBT15649
ttagacgagagccctcctcggggctatggaaggcaacaacttgcaacagytcggcaggcgtgagccccagctgcagaccgagctccacgtcctgcaaatggagacaggagccccgaggacaccgcccagacctctgggttcagccccgcctgaagcaagttccagctggttatccttcacttacagcacggggtgtcgcaggaccctggtgagagtggcctttactgtgatgtacagtgaggagttgcagaaggttttctgagcaagtaagttccactataaaggcagacatggcaaccyactccagtatctttgcctgggaaatcccatggacagaggagcytggcgggctacagtacacggggtcacaaagagtcagatacgacttagcaactgaataacaaggcaggatgagccaaattctggaaaccctggcccttgacctcctaaaaaaaaaaaaaacaggccagaggttgggaagtgatgcctattaatgattatcaaaaactttatcgagtttcaggcaaaaaatgacttccctcttgtttagctcctggcttacttgtgttacttctcaaatgtgcatggtgagggatgatc

SEQ ID NO: 2479 - DNA, 518 bp, Bovine  MMBT16255
ctcagactttgaggaggcacagtaagtaggagaaagagaagaagtaagatgatagagattctctgcaccaatgtctgcccttagaaactgtacagtctagtttccaagatcactcaggataagaagtgttatcttcctcttttacaagctctctgatagttcctctgaacttgaatgcagatagtttttctttaagacggcttcattaagccagagggactattactttgtacatggttatgtccctagcctggatggaccatgattgatgccctctattacatttcattagtattcccygtggtactggtgtggccattaagagtgaaagcctggaaaaaaagattcgagaatcttatgcacttgaatacattagaaatagctaaccccttttcccttccctattgttgttcagagttggctcagaatttttattttgaagctatttcaagaggggtaaataaaatgtaacacatacacacaagagtaaaattcacataaaaaatagattcacagca

SEQ ID NO: 2480 - DNA, 601 bp, Bovine  MMBT18813
  misc_feature (1)..(1): n is a, c, g, or t
nttatatcatttttcctccttcagggagtttacagactagtgggaaagatgagacatacatatagctatascatatgatggattgggaaaatgcagtaagaaaagtataaagtacctaaaacttgcagagaaaaaaaaaaatgagttctggtcatggggattaaagaaagtgtcataaagaagataggttatgagcttgactgtgaacagtatgtagatatggcacaaaggggatcagtgaagtggacagtgatcagaggtggacagttgcaatgcatcagaggatttaggggttccaggragtatcattggtagagtagarggtaagcctggataggtggattagagacagataaagggcagtsaatatcttcytgggagtctcatctgatgtggacagaataaggagttactgaaagcctctgagcaggggaataaccagatcacatgttctcagtaagaagatgacaattttgactgcagaggaaagaccagctgcagagtggctaagatgggcacctttaataatccaagtaaaaggcaatgatggcctgaattaggggaagtgactattagaatggaaaggagggcacagacagag

SEQ ID NO: 2481 - DNA, 600 bp, Bovine  MMBT21062
ttctgacaatatgtcttctattaatcatttaagcagtagtaggaaacttaaaggagtgtattcagaagcaagaatccatggttcatttagtgctgtctaaaaaaatttcttattgattggcatcctctgtggttatgtgatgtaatatttataatatgtcacccagccatacatcaaaacaagtatgtctcttgtttcatttccatgagagatgttgatttcagagaggtcagcccagttttaggtcaccttgtggccaaccactgggccagaaatgggaagtgaccagatttatrgagmtattggaaatgaccccagagcygctttaggttctgtggatgctttcctcccctccccccacagcaccccttttccttcctcacgtaccccctgtatgcccagttggattttcttggcacacgtccacacagtaaaacagcctcattaaatctgtatgtgagcatgagcacactaccaggctgtttagcggtgccctggtcctgctgggaccggagcaaagccgagcctggggtttctctacgccattcatcatagctcgtggctgaaatgtgtccattgccatgctattataggcgctga

SEQ ID NO: 2482 - DNA, 600 bp, Bovine  MMBT22078
tcggagtgataaacatgttctaaagttagataatggtgatggttgtacaactttgtgaatatgcaaaaagtcactgaattgcacactatagaagggtgaattttgtgatatgaaatatatgtatttcatgtgaattcatcttgccagttgaggttttgccagttatcctgactttcaagagtatagccgctgctataaatcaagggattctcttaatcttattagctaatatttattgatctttcattgtgcaaaatactgtgtataaatgaaccctcatataacattatatagagttcrcaaagagttagacatgacttagtgactgtacaacaacaagtttatgagatagatayttttccatttttaaggagattgaagattgtgtgttaaatcacttcagtcgtatctgactctttgcaaccctatggactgtagcccaccaggctcctctgtccatgggattctccaggcatgaatactggaggtgattgccattccatcctccaggrgatcttcccgactcagggattgaacccacgtcttttacatctcctgcattggcaggagtgttctttaccactagtgccaactgacatt

SEQ ID NO: 2483 - DNA, 601 bp, Bovine  MMBT22164
  misc_feature (1)..(1): n is a, c, g, or t
ntttatcagtctctgttaggcactttacatattttatcttttttgagacacagttkacatttaacattgtgtaaatttaaggtatgcagtgtgttgatttgatacatttatatattacaatatgattaccaccatagcataccatagaattagctcaccccactatcacatcatataattatcattttttgtgtgtgtggtagaacatttaagacctagtctcttagcaacttttaagtatgtaatacagtattgttgtctataatcagtatgctctgaattagacccccaaaacttactyatcttctaagtatgactacatctcccaattctcctatccttcagtccctgataaccaccatttgggtttcccagctagctcagtggtttaaaaaaaaaaaaaaaaatccacctgccactcaggagatgcaggtttgatccctgggtcaggaagatcccctggagaaggaaatggcaacccactgcagtattctcacctgggaaatcctatggacagaagagcctggcgagttatagtccatgggtcacaaaagagtcagacacgacttagtgactaaacagcagcagcaaccaccatttt

SEQ ID NO: 2484 - DNA, 600 bp, Bovine  MMBT22201
ctgtagttatagacttcaaaggcatttattaagtgtttactctgtgccagaagctattggacctgggacagtgatgaaccagtcaaagttcctgctctcatggagaaattttaatgagaaaagaaaagaaatgacaagaaaagtattagagtggaaagggctatgcatacgtttcaagtggatgatgtgacagtgacagcatggctacgttaggttgaggggtcagggaaacctctgagaatgtgctgtgttacctgaagcctgaaggataaaagccataatatgtagctcaaggaaaaraacattctcagtggaagagttagtccaaaggcaggacacagcacggtatggctggaaaagagtttttgaagcaaatatttgtagaatgcttgccgtgtgccaagtactgttttttagcactttaaacttcacagcaactccattttgtctctcttttatacatggagaaaccaaggcacagagaaattaagggatttcctggggttttatagccataaattggtggagctgtgatttgaatgcaagcaatttgtctgcagcatttgtgcttttaatcctatctcaatctactaacctgga

SEQ ID NO: 2485 - DNA, 401 bp, Bovine  MMBT03652
ctgtagttatagacttcaaaggcatttattaagtgtttactctgtgccagaagctattggacctgggacagtgatgaaccagtcaaagttcctgctctcatggagaaattttaatgagaaaagaaaagaaatgacaagaaaagtattagagtggaaagggctatgcatacgtttcaagtggatgatgtgacagtgacagcatggctacgttaggttgaggggtcagggaaacctctgagaatgtgctgtgttacctgaagcctgaaggataaaagccataatatgtagctcaaggaaaaygcgaggtggggagagcgatgtgcatgtctgtgcgaggaagggtccatcacatgacagtaaaagaggacccgagtcatcggggcgtccgtgaggagaagggg

SEQ ID NO: 2486 - DNA, 600 bp, Bovine  MMBT04450
aggaagattcccttccctttgagggttatgactcctttctggcaggaaaacagcaatcagccrgggagccactatgtacctgctcctttttgtgaatgaagagaggctgcaaagccaggaaccagagcagagagayggctagttgctttcttcttccttcctgttatctagaagcctcttccttgtagtatcagggcaagaagatggacaggcaggtggtaggccagaaaggctgtggctggcatgagatacccacagagcagcagttccctgccagtacttggggaaacctgagagttracgtcaaacttcctgcaatcctaggaagggtctgattccaagaaaacaggctgtgatgagtaagaaaccagtgttctgatcaaatatgcctgcagattaaatagtgaattgtgccaagatttgtgagaaaggtgacaacttgtgagcaggtgtttgtttcgccctagttgtttagtggtgaggtgaaactaggtttgcctacaatattcacgtcttttctaatcttcagtagctactaacagtgttttgcttaacagttttcttcctcccttcaaggaccgatacttctgaagagaagaa

SEQ ID NO: 2487 - DNA, 600 bp, Bovine  MMBT01257
tgaactttctctgtatcaaaagttactgaagtaaagctttgaaagatacaaggaagcaaaatacttaatagtggtgtgtttcagagaaacacacacttgctaagtttaagcctgaatgttgtcttttttttttttttaaagaccctaaacggcccagtctatcactggtgaccctatttaaatgttacttatgtaaacagaatgtgtgtgctggctgttggtctgttcccttctcctctgggcgaattaggaaactaggaggttgacaaagccagcaagtcacattagatcaagtctcgmaagttctcccatgcatgggtttggatttatggcaggctcgtccccctgggcctctcatagtgtcccatgccagagtaaatccggcccgaaccattgcctggcctctggcagtaggctgcaggcactgaagtgggttgcacagtggaaaagatgccctccctatcagattaaatagattaaaataattattttaaggtaactcattgacctatgtcacgtttcatgaacgccaaggacagtggctctgatggttaaatgagctttrtttttgtttattcataaatcattgtttgctaattt

SEQ ID NO: 2488 - DNA, 600 bp, Bovine  MMBT01617
aattctttacatacagagcaagcgtttaactctcttattttggttctcattctatctgattggtattattattgtgatgatcactattattaatagtagtccttacagatgctataaaatattccatcggttaccacggagatcaccactaagaagaaaaagcaaacagaagaaaagtgaaaaaagagacagaaacacgtgataactctgattaataaaacctcattctacacacatayctgactctgcagagcaaggaaaaaactgtaaattttctctcataatgcttggaaggaagaragaagtctacagattgtcaatacccagcttaattgaacttaaatcactgtggggagctgcttacagtcctttgaaaaatgtgccaattcacttatactcctgttgcaataaaacaagtctatattaaggtcaccagggtcacttctggtacagttatctaagttgacaaagtgaattttctatgccaagggtaaagatagcttaaataattctcaaagcactgtctttaccattcatttaccatctatgccatttcttgtcattttgcactgacagttatttaatttttcatatgtttgt

SEQ ID NO: 2489 - DNA, 600 bp, Bovine  MMBT02307
ctgaagaaagtgttttgtctatattataattgtctatagataattgtatcaattcttgrctttatttcatctactgaaaaaaaaattctttgwatgtaatctaatgaacatataggaagaaaacaaaaatccaaacctttctgagagacaatggaaatgcaactactctatttattctaaaacaattstaacattttactcaacatgaaaatggtctgcaaagtacttaagattatacagtggaagacactaagcaaatttggggaactcaggattcctgacaasaataaatgagctgtyttacttgtttttcatttgtgcatttgtttctcccatatcactagtattcattatggtcacacagccaggctcacaatgaaactgagtttatgctctgggaaatgctggaaagcaccatcttcattatgtcaacaatgaaaattacgtttgtccrygttctytggagctggyggctgaaatgtctgaaaacaacatscaggcattttccctctcactctgggggaaaaatatacctactgacattattattattattatttttactaataatctgtttcccctttgccctttaagactgag

SEQ ID NO: 2490 - DNA, 600 bp, Bovine  MMBT02327
ggagatatttttaactgacaccgtttgggggttattactggtatgagatgtgcagaggtcagggatggtactaaacattctgttgtgtgtggagcagtgcctaacagcagcaacttacctgacctaaagtattaataatgctatgattaagaaagcctgatatatataacttcattttaggggaataaagtatcacctataaagtcagcatccatatttatattgccgtgataccatttagccattgactcattatgaaagagatttgaggtggcttgacatgatgtggagttttgtttstcaaaggttatkcaattatagtaagttaycagtttaatctttgtaccttgtaagttacataaatggctttatttcttgtgattgagttcatgtaattctttgtgtttttttaagcgcttaaatataaatccaattatacgaaggagaaagccatttttctattagttgctggactactgctcactgtccttgtcattgttggagcctttcttttcatcccaggtaagatatacagttattatgagggaaaggaggattgataaggttgaggacatttctggagaggtgcatgttagtttc

SEQ ID NO: 2491 - DNA, 598 bp, Bovine  MMBT02700
  misc_feature (1)..(71): n is a, c, g, or t
nnnnnnnnnnnnnnnnnnnnnnnnnnnnnnnnnnnnnnnnnnnnnnnnnnnnnnnnnnnnnnnnnnnnnnncattcacaaaactttattacctaatagttcagtgatgtatactacaagctcaaggaacctgaagccttcctggtttgattttggaggctcacttttgtttctaaaagtttccaattaaccctacaattaaaacctctatccctaatttcaagaatcaatcatgaaatcttctagttgactgatggttattctatgtggcaagaaacactgcaaaagttaagtgcaggtrtaattgaaaaagaaaaaccccagtaaataaataaagcttcctggagtcttcaatttttatcaaccaacaagaaaattatctaagactggtgtcattatgtagtttgtaagaaagaaaatctgaaaatatggaggtgcaggatggggctggcattggagatattacataaagttgacagataaagggttacatgaccgtatcagtatttgtgttgtgcatatttagaatctttcaaggcagcaaatacttttcttttttttttaatgtgccacctctttactatgtaaaatagtctttt

SEQ ID NO: 2492 - DNA, 600 bp, Bovine  MMBT02747
ctccttaccctacctagttcctccatcacttcagccccgtgtcccatttcaacaagaataacaaactgtacatttgacctccttccaaatgtgcccatttgagatcacaggcttgtaaaaatgaaagcttgagggagtcttgcctctgtgacttccttctccctttctaacccagcagagcattcctgttcagtgactccccaatagctctgggcttataatgtcccagtttgctgtgttttctctttcttctttttgccccaatctttctttgtgttgtctggccctctctgagcctcmccactgtctcttttgtcagtgggaggttcatcccagctcctggtgcttggtaggcacacaatcaccataaattcccagactcttcaccccagcattctttttcttctgccatcctaacccttctctcccacactctctgcatctctttttactcttaaaatatatctatgaaaaacctagagaaagaaaataaaagcaaagactaaagagtacttaataattttattttctaaacaataaagaatacataatgtgtgtttttttgtaaatggttttacagatgacagtgataatctaata

SEQ ID NO: 2493 - DNA, 600 bp, Bovine  MMBT02750
catatgcacaaatacatataagcacacaaagtttaggaaaagtgtgggaagaagccttagtcaaggaatctaacytgggttaggtgctcagttttttctcaggatttattttagtctatgtccatttgcatatccattttacacaatatataacaacttcatgtattgcttttttcccctttaacattatattttgagccttttccatgacaatccataatgtccataatgatttttttaaatggctgcaaattattccaattaattatgccagttaaccatttctctctattgcttaayatttctggaactttccatttttgttaaagtcaccctccttgcagtttccaagttccaagtctgtggtgccaaccataagctttatataattgtaacaagtgacctgatttcgattttctttgcctctcaatttcttaattttcttctgacacaaagtaaagatctataggaccaagctgttaagagacagcaggaggctgtttctccatcacaaaccaggcaatgctgcatccataaggcatcaccgctcttcagagctttatccaggtgaaagcaaagggaacctgcctagccatcacc

SEQ ID NO: 2494 - DNA, 600 bp, Bovine  MMBT02766
tattatttctccatcctctctctgaaatgcctgttgaatataggctaaagcttcatgcctttcaaaagctttttcatttttttggaaaatctttttactttcctatgcacgttcagaatgaatttcaatttactaattttctacttgactatagccattcaatatactatattcttattttaatgaccacactttcatttctaggcattctcattggctcgtccagatctacttcttatgcttttatttctgtcagtttgtatttcaaaatatgagtacttcatttattcttttgaggayattaaacttatttgaagcaatttgtgctgttattttaaaattatctggagttaattcatatttgattgttgattttgttggctttcttgtgttagaattctttgtgcattttttaccgagatatattgacataaagttaaggtgtatataatacattgatttcattaacttatatattacaatatgacccttcctgtacttctaaattttggaatttgcagtcttattctgaataggatatattgtttcactctcctcttcatgatctattgtccaaaactcaatccgacccttctgtcc

SEQ ID NO: 2495 - DNA, 600 bp, Bovine  MMBT03140
gccccctgggagcttcccatccaggtggagatctggggacacagtaaatccatttcataccacgttataatggctacaatggtgttttgttgtatggatttaaactcttattttgctgctttctaagtatatgactttaggcaagtaatctaaccttcttagttgtgaaatgaaggtaaaacatctaggatttgggtgccaattccccatgatatatataaaaagtatattaacaaaaacagtaattacaacttcaacttaataatagcttatgatgtagcagatatcatgctaaacatwttttgtactttgtctcattaatccttataatactcaatgaaaggggttttattatcctattaaagatgaagaaattggggtgcaaagcacataagtatcttactctagatcattctgctaaataaatgacagattgggatttgagcccatattgctatctccaaaactcaggttcttaaacactgtatcatattgcctctgggtctggcatgatgtcagaactggtaaatgcttgataatcaggggctacactaattattatgtataatgtgcagtggtgtttaaaagagaaagtaacaa

SEQ ID NO: 2496 - DNA, 600 bp, Bovine  MMBT03392
aagtgacttgcctcagtcaccgagaggacagtttccaagcccaggcgctgttgactatatcaggtgacttgccatattggccggtgacattttaggagattcacgtttttacttaagtaaaaacattctaaaaaaatgtaatgcttacctcttttatggtaactcacaattcatgaatgccagcatatgtttatacagcactttataattttcagtgccatttagctcatgttattataattaccattttgtgagtcaggcaagggatttttcattggtggtgattttattctggttttkcttttaaatccccattttatagaagaaaaaaagaggtgtccagagaggttaagtgagttgttcatagatgcagagctacagccaacaaatggcagctcaggaccagacctggatatcctgmttcccagtttgccctctctcagaaaagtgtctttcttgtttgtcatgcacaccctgtattttaggcatcctcgtgcttacagggctgtagttggggttgtatgaaacagttaaactggcactgcccttgccttctggcagcacataatcaaagtaaagtaaaaagtttttggagtttat

SEQ ID NO: 2497 - DNA, 600 bp, Bovine  MMBT04121
ccatttttaagagacaagagaaggttagtagcaatcaagcctttctgggctcttcaccctggccctttgctatgccttcttataaggtcaagacacatcgatgggaagctcagttatcgtacactggtgtgaaggtgctgtctgctgccccatttaggctgcatgactgagtgactgggtgttgttaagggacatccacagccaatacacaaggtattttctctttgctggctgagcagcactcgagggattctgacagcctgagctgacatgctaacaatctgattgcagatggcaatrgtaggaggctttgagtgagagagaagagtcccctgaccctcctgtcatctactctctcaatctccatcctaggatcggagcgctgcacaactatcacagggagaggtgacatagtgaaaataacttatccacaaatgtgctgaaatgtcatctctaatgttatagttcctttaagacgaactataatttctaatataacttttcagttttgaaaggaaagggcaccaaggctgagttgacagaaataaattatccagataattaaggctaactactccactttctcctactccctggccc

SEQ ID NO: 2498 - DNA, 600 bp, Bovine  MMBT04816
ggttgcactatccctttatgacaaaagaatatgtttgccaaagtagatctttgcattgaatatctgctgatttatttaattttggagtcagtttacattcaactcaagagcctacttctgcctcgtctttggattatttacccttgggtagatatcaccagtgcaagcacattggctaccttggtatagcctcatggttaaggcggggcttggtccaaatcctagtctgccattggtgagggatgtggcattgggcaaggagtctcagcctcttcatttgtaaaaatgggactggagtgktaccttctgtataggattgctgtgagcatcaaagatttcttcaatgaagtattccatatagagtgccaggtacacagaaagtattcaatgcctgttgtctattattttcattgtatcatcatcgtggagataggagagcagcagtagtaataacagcagtaataaaaacatgaaaaattataaccctgaatcgtacaagatctttaatcataaaaatattgtgttcagtacataatacttctaaaccaagggtacacgctggtataatttttagagagcttttagtaaatttaagttcag

SEQ ID NO: 2499 - DNA, 600 bp, Bovine  MMBT05534
gygttctagatgaaggagaaacacaaaggccctctaagtaatcagggactggctcygttttcctaaattcttygacactggggtactgatgctgcccactgagacctgcttcacctaaacgaggaaggagccaaactaacagcacccagccaccatccaacctgtggttcccagggcagctgccaagatgacggagctgctgttggcatcttctacctctgctttacgccttgccttctctctcttacctttgcaccccaccttccttcaaactctcctgcctctttgatcctagaaaayattatcaccctcctgagggcacttataatttaattagtgtatgcacgattcaaggtagaatatcagtcaatgtcacaagcattaagagggaatttgggttcaggtagacaggagaccctgattagtagccctcaaatyaaagaggaggataaaaggcttaggaatggaggtggcaggacttccctggtggtccagtggttaagaatccaccttccagtgccggggacttgagtttgatccctgattggggaagtaagatcccacatgacmcgtggcaactaagccagggcaccacagctc

SEQ ID NO: 2500 - DNA, 600 bp, Bovine  MMBT05767
agtgagcagtccttaaaattgcccttgagaccatttcaggggctccacaaagtcaaaactacggtcataatcacaccaattccttattttcaattctcttacaaatgtgttgtggagccttccagaaattacctgatgtataatgttactatcagtctgatgacccaatgaaatgtatgtttgtaggtttttgtttttaaaatgtattggttttaatatcaaatatggtaaatatcaacagacataatttgctatataagaaagctctttggggtcctcaatgatgtttttacatgtgtwaaggggccctgagacctttaaatgtttggagctactgctttaagttacaagatctgatctggcaactgagatgccagaatatagcaaaatcagaagcaggatattaagtcctaccaaattcaaagctgtgtgagctaattcatttgaaaaggttagtatctaaaagtaaaatcaaaacagcatatataaggaagtgctccaaaactgaccgggtcatatcaccaacatgaaggagctctcactggtcagaaaaggacatctgacttgtgatgttgtgagaaatcagaaatgtcaacagca

SEQ ID NO: 2501 - DNA, 600 bp, Bovine  MMBT07129
aagaaacacacactgtgagttattctgcatattctagtagctgcagttgcctttcatacaagacttctctgatttttaatttctagttttgtaagagccgagaaaagttcacacacagacatagtggctctataatccaccctctgaaaaaattagagttatatatgtaattactttctattactatataaaataataaaataattaactttacaaatcattaattattaaataaataatgctaaagtatcctgatatttcctaaatcaggtcaccacacactaagagggctagttcaayttcacaatctatttagtctttactttctgagattagtaagaattaggctatttagagataagacctcaatattatggccccttgctatgtttttaaacatggttcctctggtgccaagaagaagccatactgtgggtgaaatgtctcaaataagacaatgaaaatcgttgatatggaaagtgcaaaaatctgaaacacttttataatttctttttcattattacaggtctctaaagaaagattttgaaaaattctccagaatatgtgaagataacatgccaaaactgaagcacccaagcc

SEQ ID NO: 2502 - DNA, 600 bp, Bovine  MMBT07167
cacaggactcatgcacatgactctccaaagctttagaaataagataacttgagtggctagcagagtcaaaatctttcttaactatgagaacaaaattcaactgatacttgaacaacactttctacgccatttgcagactaaatttttacaatttaaaaaattatgtaatagctgaaagtagattcaatttcaaaacaagtaagtaggttgtaagtaggtttggaaaagatgactagcctatgctttcacttttgctaccttgtcccaaaggatgcaaataataaagttaagcattaagtraggagaaaactttkggccctgtgtttaatatcattttactgttttgcttaagtctatttttaacagagtactcataaggttggggttttcctaattccaaactctttaacagaaaacagaaaccagttaagaatagaaggctctatttgtcctgcttaaggggaaaaaaaaatacttttgaggaaacagatggtatgtagctaaccctaaccacgaaagagaagtgttgccgaacctcagccttggttcatcaaagttgaatagaaactcggagacagagttttgggtgaagtagaaaag

SEQ ID NO: 2503 - DNA, 600 bp, Bovine  MMBT07533
ttctatgggtaattttgtttccttctttacacctgtttttttttttttttttgacaaacagcaattaagtttaactttaaaaagtatatgctacaggagtcccaagacaattcaatggggaaagaatattcttttcaacaaacggtagtagaacaactcaatctcaccatacaaaacaaagaaactggatccctacctcacatcacacacaaacattaattcaaaatgtagcaaagacctaaatgtaagagctacagttatgaaattcttagaagaaaacacaggtgtaaatcttcattrtcttggatgggaaactgtttctcaaatgacaccaaaagcatgagaagtgaaattttaaaaaaagataaattggacatyatcaaacaaaaaactagtgcttcaagataccatcaagaaagtgaaaagacaactccagaaaatgtctgcaaaatattactgataaaggacttgtatctagactacataaagaactcttacaactcaatgatcaaaagacagacaacccaaktaaaaatggtcaaatgatatgaacagactcttccccagagaygatatacaaacagcaataagcacatgaaa

SEQ ID NO: 2504 - DNA, 600 bp, Bovine  MMBT07813
ggccatttagcatgaatatacaagagtccaaatttatcccaaggagtctgggtccaaaatctgacttttttctccacacctcatagaatctactgctaccctcactgatcctcaatgacccacccactgttatctggaatcctgaacattccacttatctatagtcttgaaaggtcacagattttctagctgccaaacccagtaacctccttcttcattttccttcttgagccccagcaggggccaaccctgcatattgtcccttccttcctgagtctcacttcctagactctggacacygcttcatccacctcccttcccagtcctctggtactctccatcttggctcatttccttctatactcctttgctcatgtatctcatttactctctccaggctgctatggcttttttatacaccaccagtaatccctacttctcgttcctggtcagagctttctccatatataacattctcaccctaaccacctctcaaggattagcagcagctttactcccctttgaaatcctccgcgacagttctcagccatcgctcacaactcttacttttgattgctgttaaacattttctagaaataa

SEQ ID NO: 2505 - DNA, 600 bp, Bovine  MMBT07937
tataatcattggtcttcttttctatttgtggggagagatgaccaaaagctttgcggttacctactctgaagtgaaatattgtgtcccttcccagattatacccaggaatatcacttgggggctatgggcatgtattctgtctgtgttaatggcctagctgtgttgctgcatgtgggtcaacagcatgctgagactctattgggcaggactcttgtctgggcccaccagaaggccaatatggtagaaggccaatgctccttcaaggaataggagcataccacacccactgatggaaggtastgaagagtttaagtaaccttgtggagggacattaaagatctaccactcaccaggtggtgctagtggtaaaaaataaaaacaaaacctctctgccaatgcaggaaacttaagagatgtgggtttgatccctgggtcgggaagatccgctggaggaggaaatggcaacccactccagaattcttgcctggagaatcccatgaacagaggagcctggtgagctacagtccatgggatcgaaaagagtcagacatgactgaagtatgactgaagtgatggcacacacgtacacatgcgactcat

SEQ ID NO: 2506 - DNA, 600 bp, Bovine  MMBT07990
cggggaagcctagggagggagggctgaagcagatgcttgtcctcctggctggccaaccttggttgtgcagacctaggtaccagaccgaaattgtgcttagtaagtgtcccacaatgtgctaaagacattctgttcatcgtctccctcaatttgctgggtttgagccaacataccagttacacaccaagctttggagaaaggaaagatctggtgttaagttccaactctgtcattgctagttgtgaattttaggtctgtggcttaacctcttagatgacactcttaaccagagacgaccaytctctcattgatcaaatgcagataacgatggcacgaactcacaagaccgttatggagatactgctatggcatggtgcctgtaaagttcccaagacctgcacagaatgaatccccttcgttattatttctgttaacaatcctgccatgtcagcgttttggatctcataaaagaaatgagagtcaaagagccgaaatgaaaaaaagctagtaagtggcagaatcaggatttaaacaagacagatgtgtctgaatcaaaagcctgtgctctgactgcagaattcagcttggagctcctgatca

SEQ ID NO: 2507 - DNA, 600 bp, Bovine  MMBT07996
tataagtacctactgtgtaccagacatcatgctagcatgtagccacttggaaaaatttttwaatgttttagaatgttaatgcttataaaacatggaaatgttcatttatcttttcatacggttgtcagaatataacaagaagtaattgaagataaattcagagtccctcttcccatgcaatgcaaggaaattctagtttgtatattacaagttgacagtatcatttttcatatggtttgcagatgactggctcataagattaaaaataagtctagtcccttctgatcttaaaacaaatcrtgttccccattattaatagaagatttacccacaagcagaaacaattgtattagcaattgtttctgagaaccaataatttatagatgaactagttacagcaagatgatttcatgtcttcagttaataagcatcttgattgaggtccagctaagctgcttcttcaaattctccttaatagacaaatattgtgatgagattctgttgttgttattctactaacaggaaaaaacaactaacttgtcaaattgtggatgtcatctatttaaaaagacgttgttaggatggtgcagcagacactca

SEQ ID NO: 2508 - DNA, 600 bp, Bovine  MMBT07998
tttgtcaaaaatttcaagatctatgttagaaatayccagtattatctcamaccaaatctggctatttcaaatgtattrgaacttggckctgggattttaaaatgtcctgggtccctcctcccttctttccttgcctccttctttcctccctctcttccttccatttattcttcctttttccatttttatagccttatggtgctccttacttatatctagggcaacatttcagcagaagaaagtactttaggaagcaaagtgctaccatgtcacgtggcckcattgagataaagagatgtrtttgccagtcwtgatgctgtaagtcatttggactcatacagcctccatcaagatgtttgtgcctcagctgttgatgcagatataaagattatccctttaatttttaacatagtcaaagttaatatgtactgtttccttttcaatgctgttaatgttaatacaaaccttttaatttttaacattttaagagttaatataaactccattaatgcttcttagctgatcacaggaaggatcatcaagcactagttgtatcgataatttttttctgtagttaattttttggtgatgatattgtca

SEQ ID NO: 2509 - DNA, 600 bp, Bovine  MMBT08132
cctgtgctcacagtcagggtcacgttgcactgggcgctgcccacctcattgtgggccctgcagatatacactccagacatggaagtggacaggtttttgaggcttaaagacccgtggatggcatctgtggacacaatttggccatcagtccaaggatcgatcccctttcccataaaaaatcaccctgcccttcctctggaatgtctattttgactctctgagagccttagctatctgaatccctgatgaaaggtgaaggtgtgacgatcagttgccaaactgctagctcactaccctttyccatttccactgctcagtgttcccaagtgatatctgaaagaaggctaaagaggaagtgatgcccagaaaaaccaaaacctgattttcacttttatttctgagtagtgagagagaaaaaacactgagcaaggaattagaaaacgtggcatccagaacaggccatgggactttaagaaagctatttactatctctgggtcccaatttattcatctataaaatggggtgatatgacctaattgatggtgttgaaaggaatgtatgaaataatctaatgattttaacagttaaagtttgttggc

SEQ ID NO: 2510 - DNA, 600 bp, Bovine  MMBT08169
tatgggtgttacacagacgggcagaagtggtggtgggatgactaaagccccagcactgtacggaaggttgacgccgcgttcctcttacaggtgaacaatgactttattctggcactggagagagatgcgtttgtggagcaagtgcgggagatcattgagaaagctgacgagatgctcagtgaggatgtcagcgtggagccagagggtgaccagagcttggagagtctccatggcaaggatgactatggcttctcaggcacccaggtaggttcatcattcccatggtgaagctctgtttayggtaaaagtatgctgaatttgccttgcggagtctgagccgtctagtctgacactttgcgagcgtccagtgataccacatcacacctgtaactgcgacgatcagcatttatattctctttgcatgtggccatttgctttgcttgatcattaagattgagttagagaacacatttaatcccttttgtttgttgtagaaattggaaggagagttcaaacaaccaattcctgcatcttccttgccacaacagataggtgaatttcttttctttttattgtttattctaaccttttacctaagaa

SEQ ID NO: 2511 - DNA, 600 bp, Bovine  MMBT08618
tacagatacgtgaaatcacttctttttctttctattaattatcagcacaattccgtatttcaacattcccttttatgctgggtrtccagaaatggcaccgcaccaggacttgcrttaaaggataacatttaatattttgatgcatcaaaatggtctggtcaaagatcatttctttttatacgtgagtaatgtgtatcccactcctccccttctggaactttctctatcccttggagtggtgactagggtctgaattttaaggatgaggtataggatggtggagattttggaaggggtgasattatctgcttcttcattctttaaaaaaagaactaatagctgacttttttttttaacatgacaaaatagtctctcatcagaataattgtatcaaaatggcaatgtcaaatatcatgccctctactttgctgattgtaggttcttgatctctacttgttattatggctgttaatttaacctgaaactgaaatttagtaaggcttccagagagaaggtaaccaaatggcagatatttctggcactatggaaatgcatgctgctgctgctgctaagtcacttcagtcgtgtccaactctgtgt

SEQ ID NO: 2512 - DNA, 600 bp, Bovine  MMBT08620
ggtgtacagcaaactcagtcagttatacaaataaatacagccactctttttcagattttatccccatataggtcattattgggggaatcttaagttaaattccaagtgacacattctactttgttcaatgtcatagatatacaaattactttaattcaaataaccttccaaagtcactataacctctgaacttcctttattaactgctgaccatcttttccaatcctcttgtataaattaataatttaatacccagaaggcactaactcaggttcctgagattatacgtagaacaaaatmcatggaataagcaacacacagaaaaccctccaattttaagcacatgctgctataaagttcagttagtgtttgtcagaccatgctaaatattcggctttctctccccaactatcacttcataggcttcaaggagaaaaagcacaaactttgcgtaaacacaggcagctttctactataaaataactatgtaagacatggcttagcatctttaagaactacaaattaccaaattgagattgccacagataagctaccacttaaaggtattataatgggtcttcctttttttgatggtgggtc

SEQ ID NO: 2513 - DNA, 536 bp, Bovine  MMBT09042
accaggctcctctgtccttgggatttcccaggcaggaatactggaataggttgccatttccttctccaggggatctgtctgacccagggatcaaacccttgtcttctgaattgacaagcagattctttacctctgagtcaccggggaagcccatttatattattaaatataaataaatgaagagcgcagagttttacagtaaaatttacaaatcttatccacacgggggaaaaaagagtctggaaagaaatatgtcatattgtcatggctttaggtgatttccttctctctctctttacrtggattataatattaaattatggtataacatagcttgtatcttgaggttcagttttattttcagtacatttaagtgaatcctgagccttacatattgcaatgatttgaactgaaatgcccgtgctctctttttttaggatgacagaaactttgctgaaagctcccatgcttatgggttagatcagtcatcttgttggcaggatcacagtcgcttcctgtctagtccacgattttcc

SEQ ID NO: 2514 - DNA, 415 bp, Bovine  MMBT09096
acatctattccaatatattaggtttcctcggtggtgtttcctgggctatgctagtagcaagaacttgccagctttatccaaatgcaatagcatcaactcttgtacataaatttttcttggtattttctaaatggtatgtgtttagattatattaaaataaaattgattgtagacactgaagtttagtcttatttctatgacatttctgcagctggtctcagattcaaatttaagttcacgatgtagcagtgtagatagccttggggagatcgtgttgcatataaagtgacaagcctaatwctgttccttttgccagctttcccagggtagtaaggcaggtcctgtttgtacttcatgcgtaaacctactctccaaataaactcgaattttagctgtaatgttgctaaaatccagt

SEQ ID NO: 2515 - DNA, 600 bp, Bovine  MMBT09106
aatttgccttgattcatggacctgacattccaggttcctatgcaatattgctctttacagcatcagaccttgcttctatcaccagtcacatccacagctgggtattgtttttgctttggctccatcccttcattctttctggagttatttctccactgatctccagtagcatattgggcacctactgacctggggagtttctctttcagtatcctatcattttgccttttcatactgtgctgcaagtaagctataaacaggcgttatttttctatatccttttcaccctgtagcacagtyctgcaaagaaagagagggaccatctaatattacagcagagaaccccaaggcctggggaggccagaaagtgcggtgacgagcttgggtttctgtagccaggctacttaggctggatctcagctctccggtttatgaggggtgaggcaaccagggatgctctgtggcctctctgagctcagctgcctcgactgtgaaataaatggcgatcacaacagcacccacttacctagaagactggggcttccctggtggctcagtgggtaaagaacccgcctgccaatgcaggagatataggttcaa

SEQ ID NO: 2516 - DNA, 600 bp, Bovine  MMBT09193
atcaagagtttacattcttctccaaatgatatctgaagaccacttccctgtttgaacgaaggcattagaagaggagttaaaaataagtactatacacatcaagttttaccacattttaattagtaaaacaaaataaaatgaaaataggcttagccatgtctcaacagaactaaataattttatatgaaaaaatgccatccaccataacatatttccaataattctgacaaatatctgtcacaacattttgcaaaattctaaggaaaattacaaattggagatttactctaaacatgcagmgctatctgactayaatttgtgcgcaaaacaccctgaagactttacttgaccaagatgttgatgttggacgtcagagttcttccctccacacctctaagatgccagcatagcacctccactgcggcttactgccaacacagaccacactacagagaaaccaggcacaaagagaatyaaaagaagatgtttgtggtaacatcaatryartttcttatttatgtgcacaaagcatcaaagtctatcagtgttaaaaagcaagaaaacagaatttggaattagtccaacccaaatgaggcatct

SEQ ID NO: 2517 - DNA, 600 bp, Bovine  MMBT09470
caatgcaatttactggcaatgtaccaggtaaactacaactgcaaatctagcaaaagaaatttgatttcccagtgtcaatgaaagtcatcctgggaaactgttggaatgtgggagggttagaccagctgatgattgccacttctgaagaaaatgatctaactgataaaggactcaaacattttttttttcaccctgagaccttacctgactccctatttgtcaggcaacgtgccaggtactatggttacaaccaagaataagaaaaactaactgcctgcctcaatcttatcctctttagartatgattgacaataaacatgtacaactcagtaatttcatatattaataagcattatgagaaaaaaataagctagataaagacaatgataaatgagattctaaagttggctacagaataatagtaattttctgacaagggtactctgtaaactccatgttaagagagtatgcccaggggcagaacggctgtcttgattactagagtgggtctcctgcagccatgactgcattacatgagtctgtcccactggccacagctgactggaccagaggtagacagctgacccaagctaggccaat

SEQ ID NO: 2518 - DNA, 600 bp, Bovine  MMBT10547
atctgcttcaaaatatctgacatttgagaaatgtttacaagtagtttggtgtttccctttgaattcaaaggcatctttaattagttctaagttaggacatccccagctaccacactgatttcattagtataagtctctctagttcaaagacaagaaggacttgacacaggattttcatacccctgtttacataactgtcacagaggaatcagagaacacccagcagtgttacacaaagattcagacaccgcttggaagagtttgctttggagagtgacaggagaacatccctgagataascggtaggtgtctatgattttatgaatacctatcttacctttcttctcctaaataagaatatatcatcaattaaggaggagaaacctgagcccagcctacaactgacgctccatctcatcacggagggcccctgcggttacctctctgccaggacttccaaggggcttgtccccagagaccagctacgcaccatccaggctgagtccatagcagccagaaagccccgggctattcctgttcccattggccaaaaaggctagaaggagatagaaaacagagaattaattaccttttaataga

SEQ ID NO: 2519 - DNA, 600 bp, Bovine  MMBT11204
gaagaaaaatatgattctacatgtcttcaaatgctctaaattcaatctcaaagcaagattttccctttactacagaggctttctcaaatgatacttttattgctttagctatttctattccaatgtgaaaattcacaaatttatgaaatactgtaaattctggaggtgtgactctccttctagttttctacttgaaagagactatgaatatcactctaaaaatatcttgtacccaatgcctactgaagttttgctgattttagggggtacactaactgtctagattaaacattattgaamgagacttcctaattattcggaagcttctctctctgtacaatattgactcattttgttatgtacctaaaaataatataatgctataggtcaatcgcacgtgtgctgtgctgtgcttaatcacttagtcatgtccaactttttgcaacactatgaactgcagtccgccaggttcctctgcccatggggattgtccggcaagaatacttggagtgggtagcctttccctcctccaggggatctgcccaacccagggatcaaacacaggtctctcacattgcaggcagattttttaccaactga

SEQ ID NO: 2520 - DNA, 600 bp, Bovine  MMBT11383
aggatggtgctgctgctgctgctaagttgcttcagtcatgtccaactctgtgcgaccccatagacggcagcccacgaggctcccccgtccctgggattctccaggcaagaacactgaagtgrgttgccatttccttctccaatgtggctatcctaaactcccaggkgttatataaaatactgagtgggatccttaggggaggaaartaggtcctctctgggatctttctatagcagccccacactaggtaacctgagttactttagttcttagtacactacccatgggtctcacttctgraaatgctaaaagcccatctacatatgtgtttgcatcctgctgcccctcagcacgtggggctggtgatgcctccaagactgcagcagtgactgcctcccttcacgggcagcrgcctcccacccccttctgctgcctggtccttcacttggactggagcagacctgctccttctctttcttctgaattaacttccttacctgaaaaatcttctggatccccttccatccccacaccagatggggtctctagtctcctcccgcttagctcttccatgtcactgtcctgctggctttcctcccc

SEQ ID NO: 2521 - DNA, 600 bp, Bovine  MMBT11891
atttttctatctttgatgaatactgcagtgataaaagaggtaagataattttgtttttaaaaatcttggtcttagaaaacctaaattttgaatgattcaagactctgaagtagaaatttaccaaacagtccctagtagttaacactcgaccagaaatgaatacttattggccaaccgcaacatgatgcttttgacataagcattaatcctatataacctgatgctccccaagtacttttcatctttttttaagcctccagaagatgtgcaatcaggccacttactgagacctcagtctaycctggacaatcaacaagttagctccatttaaagggtttaaacctgctgccagtcagtgtaacttatagaattggacatggaaatttaaagacaggcatcttcaagagcagtgattctcagtgtgggctgcccattagaacctgggaagttttcaaaatcctctacaggtcccaaggctgcctggacaaataaactagcacaacctgggcatcagtagtcttagagctcatagaatcttagggaaattcgatgtgcagccagttaaaatacttctgtttcaggttacagaacactctgatc

SEQ ID NO: 2522 - DNA, 600 bp, Bovine  MMBT12140
tcaaatcatgtcattaatataaaagaaaaacatccatatttgctctttggaaagacaaatgcagaggttaataacacccgggttgcctgctcctgagagcatctgcatcactaggacagtttgataatgagattttgtataaaagaaatggacattttttgagagaagtcatgatgtaaagtgtattcttagtaagacatataagagaagctgaaataaaatccttgtaaatttcagtggtgagactatttccagaattagagctctctaattaatgattttttggaacttgttttaatygaagtcctcatatgtcaactcataattttactgggacytataatttgcaaagtgcttttaaaatttacyckcctccccccaaatcctatataataaacaactaatttcttctgagataatttattcttagctcaggctaagaatgctgcttaaagttttatgaaacatctacaaacataacagatcatgcycattttcttagcttttattcttactttgttcccttggcctcaaatccataatttcctgagggcatttcagtgcactttaccttagagaaaaactagttaactacgtcct

SEQ ID NO: 2523 - DNA, 600 bp, Bovine  MMBT12312
ggcctatcacaaagcagtcatccttgaacaatccagagttctgaatctgatgacctacactttcttggtttactcttttattttgctggagtgcatcccccagtagcatctggagcaacggtaaaaagaagataaacattttgatactatgcatgcctaaatatatctaagttaaaaatttgttttctaattctgaattttgacaacaattatccattgtcttctagcatccattgttgctgagaaatttaatactgtttaatttccaattttttgtatgtgatcttcctttgaaagctyctagaatcatatctcrttgcattctgaaatttcaagttcatatgtacttgagttgctattttaaaaatttattataatgggcactcaatgtggtcttttttttttcttaaaaaatgagatataattgacamataacattatattagttatattaagtatacaacataaggattccatatctgtataktcaatatactcttaaactggagacttgggctttatttctggtaaatgttcttgtgctgttttcttgataattttgttccatttaactcttggttaaatgttgaacttcctggc

SEQ ID NO: 2524 - DNA, 600 bp, Bovine  MMBT13345
ctcagttcagcttacaactattttatctccgaatttaaatctgttaagtggctacagatacttctgaaagaagcagaaaagataccatgcaccgttctctacctgaatgaaaatgatacaagcttattataggaaaaaaggaaacaagatcatctgtagccctccatcaatacatagccactgctgatgtttctgtacatgttctttcagtcacgtttttgtataagtattttatgtgctgatgatcattttacatatatgattttgtagaatataaatattacatgaataaagtaaatstaatgttaataaaatcactgactataaagtcatgccaaatgtaaagtgggcatccattagataaagatgccccaaattctgcataaacaccagataggaatctgggaaccaagcagacataggctgagtaaggcacaaagcactgaggagaacaaggcagaagaaaatgttccatcaacggccccaaatggggagaatacacaaaatatcagttcagatcaaagtgatcacaaatagtcactctactatctttgcaactcttgacaaatttaaaatgacttaaaattacaaataatttcc

SEQ ID NO: 2525 - DNA, 600 bp, Bovine  MMBT13387
tgtttttggctgtgtcacatgtcttgcggaggtctcagttccctgaccagagatcgaacccgggccatggaagtgaaagcccagagtcctaatcactaggccaccagggaactccctacgcttcttttacttgcctctggtgggactctggacccagcctaatgccattgcttctctcaagattcaagttctgaggaagaaaagaaacctccagctaaggcagtcatcgccaaggcagctactaaagcagctccagcaaagaaggcagcagagagctcttcagacagctcgggtaaggayggtgtagcgtaggaggccctcagggcgatggtagctccaagggccccctttagcctgattcggggacctattcactctaacctccctgtctagactccgacagttctgaggatgaagctcctgccaagccagctggtaccaccaagaatccctcaagtaaaccagcmgccactcccaagcagcctgcagctaagttagcygccactcccaagcaggctgcgggcagtgtccagaagcctctaaccagaaaggctgacagcagctccagtgaggaggagagcagttctagtgacgaggagg

SEQ ID NO: 2526 - DNA, 600 bp, Bovine  MMBT13697
ttaaaaataaatttacttaaaaccatttcggagagctttgtgttaacaggggttgaaaaytatatatttaaatattttaaacaaaacaccttaatactttgtaatcaggaagccataaccaaggaaagtgttttttaattcatttgatgtaacatataaacaacagccaaataagaaagtttcagcagagtgtttcaggtcattactttcataggttttaagacaagtacctaaagtgatagttagcattcctagcttatttgtttatgcaatgagagccattaatcattccatttgcgyccaagtattygcaattgaatctagaactagagtgctcatagagtatatacttgaagactgaccctgtggaatttcttttcttactttaacaaacaattcagttcagttcaaacatttagtgaatactcattagttactaggaatacaaattctttaggaataagctttggttatttgcctattgaactygaatataaaatgaatgtcaagattcaaatacttacacgactgagaaatgttacaaaattagaaagtcaccattattcatattctgaaagtagttttcttccactgacactc

SEQ ID NO: 2527 - DNA, 600 bp, Bovine  MMBT13736
aaaatatctcataggatccagtaacttaattttctaaacttgtaaatttttatcataatgtagggaacgatgattatggggaaagaaacttatgaagaatgtgagattctcatgtgaaacatttatagccacaatattatgtatacgatctacagcaagcaattgtttcccagggcctctgttgacttatttttataatatctgattgccctttgtggtagccaatctcctcgatgacacccaagtgatcttcatctatttgtatttgtactcatatgtagtcccctcttacattatacytgggcaggtctgtgaatagcagcatacagtagaattaatggtgtatcatgtctgaggttaggttataaaaaatactgtggtttctgggcttctgttttgaatgacttcttatccttcttcckctttctcttctttttcatctctccctctctcttatcctctttctttctcctggaataagccagttgccatgaactctgattctgcctrtagagagactcacatggcaagagactgaagtctctggccaacagtcagaagtgaagcctgccaataaccatgtgattgaacttcaaatta

SEQ ID NO: 2528 - DNA, 600 bp, Bovine  MMBT14387
gtcaaaaaatattctccaagtcagttgtaatagattcctgccctgtagcacagccccagctgccgggatgctccagtcacagaaaggtaygaaccaacagcttccttcctggtccctgtgctctagctttggcctgaaaatctgtgtagaattggctttgctgctgctcactagggtaccttcaggcctggaccttgggggtattgtgactcccaaatatggtccctttttactaagctcttatcaaggtttgtatcttcaataggtacctttttaagctctgctgctgctgctaagtcrcttcagtcgtgtccgactctgtgcgaccccatagacagcagctgttaatatacatttttttgacatattgcaatttgcagttttgtagtttgtagttacaatatttaattctaataataaatgtgcatgtgagatgagtacctgagataactttttccatattcattttaaagaagtttttcactaattaatttgcttttctggatggataatatacattcacgtggtttataattcaaaaagtgccaaagagtatatacaagaataagtttctttatatccttgtagaaataaaaaatc

SEQ ID NO: 2529 - DNA, 598 bp, Bovine  MMBT14598
  misc_feature (1)..(65): n is a, c, g, or t
nnnnnnnnnnnnnnnnnnnnnnnnnnnnnnnnnnnnnnnnnnnnnnnnnnnnnnnnnnnnnnnnnaagttctgaaatgatgccttatattctctgaataaaagataactgccttcagggtaaataatatgcctgcacttgcagctctcttcctaccttaaaccatcactataatggcccaaggctctgcttctcatcactacacaggaagagagaacaaggtgtggcttacaaagctggtagccctaggyacatgtcactttacttttttgccttctcttttttcttccatttagagtcwtctgtgccaactctcagattggtaaacagagggtggggctaaaggtcgaaaggtgacagatctcaatctgaactcactagcttaatcagctgcatttcttcattttaatcaggaaatcctggagtgaccsagtcagcaagagcacttgtggggcgacaaagaagggagggaggggaaggagaagagggaggagtcctgtatcgaggaagggaggggcgcctctctcttttctgggctcaaaatggatcttcctttctttagaccacatgttcaatctctgacaaatttttttcctttg

SEQ ID NO: 2530 - DNA, 600 bp, Bovine  MMBT16469
gcctttttcctgatacaggtgtaaattcctggtactgatcttgcacttcagtcatgactaggattattttttggctcaaaatggaacaaagcagggaggagaaggtagaagggagggagaaggagatcttttcctaaggtagtttggagagaattggaaataaagaaaagagacaggcctaggatgttctgtgaaaatacagtttatagtggaaagtgattcctctkaggaatataggagaacagcatctctttggtgggaaagaaagaaaggaggcagtagaaaagggtgaaaccaagycaggtgggagagtgagtgccctcgtgttttagaaacagggtacagagaccttgtgcagatcaagaatgagaatcytgttaccaatctcagtttgaatgtttccacattgactgttctgagcccagaatgcctttatagtgactgtatccttctgccataggaaatatcaatctgatgaaaattatatataatataaaattatcctaaggaaattaagcccagatgtggatattggaagatattaattggtcagaaatcgaaaccataggctggcacattttgggggctagagagaggact

SEQ ID NO: 2531 - DNA, 601 bp, Bovine  MMBT16524
  misc_feature (1)..(1): n is a, c, g, or t
nggttggttatttagagcatgcgtgaatgttcaattgtatctgactttgcaacccccaccaggctcctccgtccatggaatttcccaggtaagagtgctggagtgggtggccatttccttcttgagggaatcttcccaacccaggcatcaaacctgtgtctcctgcattggcaagcgaattctttaccaactgtgccacctgggaagcccctggatatttagttcagagggagaaaaatgtctgtgcaaatgagcagtaaatccacaagcctctctggcataagaatttgagagtaggaayttcacatctccttcctgaggggygacactgaccttctaaatattaccaatgaaatgccagcctctttgatgttttcctgcttataccaacagtacaggttttcagaacaaaagctgtttgcggcttctcagtggaaggatttcaaagttgggcttccccagtggttggggaagcctatacagggctgtgacataataatgaaactttgtttctgtaggttcatgtgatgtctgagggagctcagacctagactgctcacttgttagaacttcgcttctaggtggaataggacacatcatt

SEQ ID NO: 2532 - DNA, 600 bp, Bovine  MMBT17401
ccaccataagagccactgaatactgaatcccagaggtgactcctacaggactggtaaccagggtttcccgctacctagaggagtgacaaggcatctttctgtactctgtacttaagtctgaaaataagtactatgttacttggcccataattactcttttattaacaatctggacttgttatcaatagtaaaatcaagagactgatgactgatcaactatacttcaataatatatatttttagtttggagtctaaatgtaaaaaaaaaaaatcaaatttctacctttctgtttgaacaaygggaagatctggccacacctggcttgcatttccagaggacaacctcatgccaccgagcagagctgtcccctgcaggccaggcactgcctctctggtttgccttatccccccatcactccctgattaatatcccaacccatttcacttattacgtatagctctacagtcttccaccctattacttctgaaacctgaaaacaacaaacgtggagacacagcaacaatatccataagctaatacaaataatattattattgtttcatgacccagaagtatccctgatccatgtaatcagaggc

SEQ ID NO: 2533 - DNA, 539 bp, Bovine  MMBT17579
agggttttctctctttcccagggctcccagtgagctgctgtagcttgcagagtcagagggaagaatcaggctgcatgtaaatacttaaccccatcagagaggtgtcactgagccgtaaatagtgctgcaggcaacggccatgcatcactgattcacacttgtcacacccctcattttctgaaatctagttccctgcccatctctctctctcggtacaggagatccattgccatgagctattttggagtctacttaaatactgtgatttctacactaatattcttttgaggctttaaaatrcacattgtaattttaaataaagatattttactttgactatttttgtaatttgcagaagttttaaaatgattatctaaatgtaactgttctgggacttccctggcagtccagtggttaagaatccgcctgccagtgyggggacacagatttgatccctagtccagaaactaggatcccacatgccacacagcaagtaagcccattcgccataactactgagcccaagctctagagcctga

SEQ ID NO: 2534 - DNA, 598 bp, Bovine  MMBT18409
  misc_feature (1)..(47): n is a, c, g, or t
nnnnnnnnnnnnnnnnnnnnnnnnnnnnnnnnnnnnnnnnnnnnnnnctttaaaaaataaaattaaaaaaaattaatacagttttacattaattttgaatagttcttaaaatgtattaaattttaaaattttacaaatagtgcttttgaatattacatatttaatctgatgagctctacattgaagctaaaacaatgacattatgtatgatcttatataaataaaaaactgaggaaagaaatttaaataattgtactaataggtggatatcccatgtctcaagccagcttatatggtaayggtctattccaaagctttataaacttcagtgacacactcagcagtttttaatgattctcactaaaatattattttcaagataaatcttcatattaaacacaatattctgtcctctgtttccctgtcctcttttcaggtttagattaattttgagatagagtctgagggtggattagatagtaatctagtataagctatttagaatggcacaggctttgattattataaatattcttttaaaaaactatattattgttagcaacaaaatcacaatgctgcttctatatttagaaaccag

SEQ ID NO: 2535 - DNA, 600 bp, Bovine  MMBT18647
gggcaccctctgactcttagattgtgcccctagaatgacgtgggtggcgaaaagttgctgcagaagaagtggaccaccttcctaaaggcccagctgctttgcacccagccggaacaacttcccttcaacgttatccgtcacgctgtcctgctggcagacaattcctccaccgatccccaggtctacgcagtctttacctctcagtggtgagcaactaggcgagagcgtgggggttggaagtgggatttggggtcagctccctggccsgccagggagggtaggaactgatgtgagcgaagyacaaactccacacttcacatatgaagacatttgatcatcaccatctcccaggartttgactcacgcccttaatgtagggctcaatgtagatagggaaaataaagctcagaaaggttcttattagtttatgtcctgcctggttccaaaaaggataggaggcagcttacaaaaggcaaacgttaaaataaaataaacctatgaggaaatggaaataaaaggagaatgagagaacccagggatggagtcygcacattacagatgattatcacttatacagttggggatgctgggacacctgta

SEQ ID NO: 2536 - DNA, 589 bp, Bovine  MMBT18778
trtctgagacttgtcaaatgcttcaagaacctgattcacagtcatttccaaaaacctaagggagaatgtgtttttatgtatatgtttatagcytgtttcccagagatatggaagcagcagacacctgtcaagaatttccagtgaagcatttttgttaccagcgacttgagaatagcagccttaaccccatctaatccattgggcccacagcgagtgacttgcccagagtttacagagcaacttagtggtaaaattaggatgagagcttctagttgcatatcccaagcctcatactctgcytccttctgataacattcagatgagctctctgaaatcaaagcattttaactgaatctatcataaattaagcatctgtagttgaatctttgtctctctcaaagtccttactcatatcatgatttattccagaacccaggataactgtaaggcagaacaaaagggtatatgtcttaagagtttggtagggggtgggggtgggggtgggggaatatgctaatttcatttgttttaaaatatgaatgaaatgcaaatacaagtcagcaactaagcaactaaggtcacaagatca

SEQ ID NO: 2537 - DNA, 600 bp, Bovine  MMBT18983
taccagcacaagrgatatacggccaaggtgaaaagtatagatctgccttaatttcttggaaagcccttgaaacgtaggttcagattcyagagacttcacatgagtctgccttccccaccctcaaggatccgagttgcacttgctccttcttggtcttactcygtgccctcttgcagagttcatatacagagcctataattaggcgttcaccacgcttgaaagcatatgttttccacaaccataccactaacctcagaaaacatactctacataaatagacaaaaggccacgaagaaagayttgtttttaagttttagataatttctatcacagtcaaggaatactgttagcagagactttttttggtaagaaatttaattactgcatttaaaattcacataaagcactgtactaaagagtaaagatctgcatagaaaaacatgttgaattaaaaaaggactgtacccacatgtattagagttatagcatcttaaatcagaaagagattgctctatggaaaagaaaagtacaaatacaatacttcaagctgcagtgtcatatttatttttgtaaaaggaagtacaacatttacttattcct

SEQ ID NO: 2538 - DNA, 511 bp, Bovine  MMBT18991
tttgcttttctcttttcagtagctgttgccaatgcagttcctctgtttactgagttgtagctttatagacaagaatgcaggaagtctctatagtattctgatgataggttagtcrtcaggcttattatagtccctaaatccagcaaggagagcagagagaagcctggatgatgaagtcactaggggaagaaaatggtatggaagaaatgataagatattcagaaggctgctcaaatgctgcctcctaataaattgtcaattcctcccaaagagagtgmtgtctttttatgctgatgtgcmttatgtgcagagcttatattccttactcccgtgtgcacgtttgtcttcataggtcataagaaaggaaaattgtctcacgtttgacatctccattcgattttactactttagcatcttgatggcttttaaataaaaatggggaaaggattatagttggcagcaaagtgaatttcagggacagctagaaaataggagggaagacagcctctta

SEQ ID NO: 2539 - DNA, 600 bp, Bovine  MMBT19028
attcctgacggctcagtccatggggtcccaaagagtcgacacgactgagcaactaacacttatcagacatatatccccaccctcttgagcctacccgccaccacccctccatcccaccctcaaggttatcacagagcaaaaagctgagctgcctgtgttatatagaaggttcccactagctagctattttacatatggttgtgtatatatgttaatcccactctcccaatttgttccactcctcccttccccacaccgtgtcaacaaaaccattctctatgtctaygtttytattcctgmcctgcargaagatgtggtacaaatayacgatagaatattactcagccataaaaagaaacaaaattggatcatttacagagatgtggatggatatagagtctgtcatacaaagtgaagtaaatcagaargagtaaaatgagtgttgtgtattaatgcatatgyggaatctagaaaaatagtacagatgaacatatttgaattccatatctaactggtagttttgacatcttccctgcaccaaactatttctccttgtccactgtctctgtatctaaaaatacacaattttctcttcctctt

SEQ ID NO: 2540 - DNA, 600 bp, Bovine  MMBT19759
gcttttaaggttgactttttgactctgaaaagaatttttaatggcaacataagtaaggctgaagcttagaatctgcctctttcaaggtctccaaatagtcacagaaagaaaattttcagctctaaatgtggcccttattataaaatgcatcatttatactacaaaaatcattttacatacatacaaaaaagattaactagttaaartggagacaaaatattggctaaggttttaaaatttcttataaaaataatttattaaaattggactacagaagacagaaaacatttcacaacttcrtattgctcattgttgccctgaagacatcatgaaacatacgcaggtccacagcatgggcttgggcacaatataragaaagctaaagaaacacaaccctttccaaccaaagactagagttgtaactagtggacttgtgaagctctatcacccagtgtccccaggagtcttccttttttagtggaacctgtaactaactttaaaacttgtcaaaatggaaagagtggccagcaagacgytgcttcaggtagtgtaacttcttcacattggtatttcattttattgactggttcattactggtt

SEQ ID NO: 2541 - DNA, 600 bp, Bovine  MMBT20815
ggcccttctcattagaaaagcctagggtttcaacatcagtgagcttctggagatttttttttgtatgttattgtcatgttgctagcttttctaactgtggaatatatatctctgatttacaatccttgtggaaggagggtaactaaggaaatgtcttttctctgtcattctgctcctggctttctaatccaggggatatctctctattttgctgctctgcctccatcttttggaaggcagctgccttgctttatataaaggcctgcaaagtcccagggggatttctctcagccaagtccrtgctctgactctgatgtattgtccctgagcacattgtcaagtcctatagaaagggttggcagttggagcgagacttactctgtcgctggagtttctcagaattctaatctatcaagccagcccatgcacatacattaaaagtacattaaattttctgtggatttctctatttttcccctatgggttttttttgttgttgttgctttgccrtgactgaaagtcattgtgtaggagtraaaatatcttctaagaggagcttgtcacttgctagagtttaattcatttagattctttgcattc

SEQ ID NO: 2542 - DNA, 600 bp, Bovine  MMBT21044
caaacagctgtgctttatctccctggccagctcagtgctaatggccttgatggccacgtccctcccwatgtcctcctggcctcctgttggctgtggccaatttgctcgtgatttaccactcyggggcgctgacccgtgagggagacacacgggacagaaggaggcagagcggacgtcatgcctgatgcgtgtgcacrcgtgcrtgtccgggcgcaagggtggggaggcgtctctccaggaaygcgctacccagccaggctctctaggactgggagcagggtctggcacccccaccctttmgctatcccatgctgattatggcactaggcactgtgctagagagaggaaggccaagggagaccttgagggctgccaggagccacaggctggaagtcaggcccaggagcagccctctcacaatggtctggagccttctgggtcctctgagaatccaggcatgcgcacaggacacacctcccagccgtgaacacatccacggccctgcccctgaccacagtcaacagaggcagcacaagcgtggtggggccctggaggtgcacccgctgggttcacatcccagctcagcaactgacaaccttt

SEQ ID NO: 2543 - DNA, 600 bp, Bovine  MMBT21379
aaccattcctttagtagaatggctttactgtatagatacttaaaagtttgtataaattgtatgtatcacacttaaccgtcacattgagaacaaaaaaaaaactagattaaacaaatctatttgaaggtgctgaagaattattaagatagatagggttcaaatggataagctgttgtagcctgaaattctttctttccacttcgaggcattagttgcattttgagtagtgctaactgagagtacaacagacttagcagaaagaggctaagaagctgagcacagcctctcackgggctgggraggcaaaatttggccagctaaggagagatggtctcagaaaacactctagatggatagttttcaaagtatgggccccaggccggcagtatcagcaatgcctgaggatttgttagaaatgcatattttggggccaggttggatacatgctaaaatatgcaaactactacctaggttttcagttggagcccatgaaagaccacagcctagaaatatgggcaaagaaaaatgagatcagaccacgtgaaagcttctcgtcagttcgttaccaggctagattgaggcagtgtgtcctttctctgt

SEQ ID NO: 2544 - DNA, 600 bp, Bovine  MMBT21394
agtagatatgcctgttaccagctggtgaaattgaggctccttagttgtgagttgtccaaagttccataaatgataagtggaagaacgggaatttaaagggctaagtccttttactaaagagcatttttttctcataggcagtgcattacataaaggaaggattcaaatgtttgtgaatgtaatcaggaaaacagtggaataaaaggtgtaagtgattttctcacgcttagtgtcaaaaagcagttgagaatgagatccaggataaataacttaagttctaaaatatcccaaccttttctktttcaattggttaatattgctaggtaattggatggaattgaagagttgataaaatgaatagcaaactgaagaagggcggctttcagaatggcaactcaacgataattttgaagaagcaaatgaatagttactgaatgctagtagttttctaaacttaagtgctaggatttgtaatttcttcacattttgtgtgattatctatttgttgcaatagaaattggcatcaatgaatagaaacttaaattatctcatttgtgcaagtcagtattcagagactgtttatataaataaatgaaaatg

SEQ ID NO: 2545 - DNA, 600 bp, Bovine  MMBT21498
agacttttgccgttatcccctggcttgagtgacaccaggcgctggttcctgcctttcacaccccagcaagyggctatttcccagaggtcttagaagtgattccatcctctttgtggctgtttcgtatttcagttatcttcaggaaggagcatatgtctgggatctttgcctggctgtgaaatttcatttccatttctttacacctgcagttgcagcgtgagtggaagacagagccctgctgatgtcccagacccaggttatcaagatgctttagctgttgtttcccagaaggggctgggkccctagagcagatttcatcagctagggctttgtgggggccatctttttttttttttytctctctctctcttttatgtgtgtgtatggtaaatcgctcagtcatgtccatctctttgcaatcctgtgaattgtagcccracaggcacctctatccaagggattttccaggcaagaatactggagtgggttgccatgccctcttccaggggatcttcctgacccaaggattgaaccagagtctctttacgtctcctgcattggccagcagattctttaccactagcaccacctgggaagccc

SEQ ID NO: 2546 - DNA, 600 bp, Bovine  MMBT21519
tttcctgttcaattccattttgcaaggaggcccgccttttgggatctgttgcacagtctcgggcttaatacccctgggacttaacacaagcaccttttctactgaagaacccaagccttgattggctttcttgggtacctctggctgtgagatgagggacctgaagtcacaggtcaccatggcttctgtggtcctgtagcctccttggtggatagtctggacagaggagcgtggaaaagtttctcgaagctgcatgtttatattctgtgttccccacctcccccagagtaggatcagggraactttattgggagccatcacaggtcttttcaaccagtcttgcagaaaccatcattccctctaacctacagaagagcactgatttcatcatttggggacttgaaaatctggggaagagactatsggacccaggttcacccagagatcatcctttgcaaccaagggaattcaggagatcaaaagtgctaaacaatactttttttttttttttttttgaatttatgttttccaagtctaactgcagatacttgcctgcttcgttccgtggaaaaagtaacactggtccagggacatgttcgt

SEQ ID NO: 2547 - DNA, 600 bp, Bovine  MMBT23299
gagtaacggtacccatcaataaaaagcagatgtgggatttgaaccctggtcttatctaattccgagtcttgtgcttcttccccatgcatcaagatattgtcttctccagaaacccctttgtctctgcctatctatatgtcatcttcccttcacaccagcctacagggctatttcccacctctgatttcctatagctcaggctcactaggcactgasgccttgcttttaggcctctctttagtcttccctaaatattgtggtatttttgtcttgtctctttaactgagttgtaacctgggrctgtattttatccctttggacttacrttacttcacactatgctgcccaactattggttcattcattcacttaacaaatgttttctcagaaacctctatgtgctaggcactgtgtgagagactgcaaaggcaaaactaaatgtttgtcaaaaaatattctccaagtcagttgtaatagattcctgccctgtagcacagccccagctgccgggatgctccagtcacagaaaggtaygaaccaacagcttccttcctggtccctgtgctctagctttggcctgaaaatctgtgtagaattggc

SEQ ID NO: 2548 - DNA, 600 bp, Bovine  MMBT07978
aggtaaaatmatttagaagccctgaacatcagcttctttataaatgaatgcaatattaactacctctcaakaatttctgttaactttaagggaaatacaggagccttgtctttcctataacacacagtaacacacattatgtgatcaaaatgtataactgggcaacttttttacttcattaatgttttccattgattacctaaaaaggaagccttcaatatacctttaaatatattaaacagtggtaactacaatctattaggaaagtttcactgaagaggatcatagtgggcttagtgsaggagacggcatgtttagctggactttaaaaattaacaatttsattaagtggaaaaactacagatgtgcagttgaagtaccattcaggagagtgtctaggctgatatkctcaaagtcagttccctccatgtgattcttctagtagcaaagagagtcacatactttagacaaatcattggttgctaatttgggcttttatcaatttcagtataaaagtaattttgagattactatctatagtaagaatcttaaaagtagatttctatactgtgggaaaaaaagggtggaattttatacttt

SEQ ID NO: 2549 - DNA, 600 bp, Bovine  MMBT18760
gggtgttgatcaaagttgaatgggaggacccaggagacctaagggagaagaagatgagagagaaaataagccagaactaacagcctccccatataaggagtttttaaaaatcatgaaactcaagacatgatgagatagttcttcacacccatcaatatgaccattttcaaatatgcaaccaaccaagcaacaacaacaacaacaacaaaaaaaaacattatggagaaactggaaccctcatgtcttgytggtaggcctataaattggtgcagccactgtggacagtggtatgacagtttstctaaaatttaaacatagaattccctatgatccatcaattcrcttctgggtatttacccaaaagaattgaaagtagagatgcaaacagatgcttgcacacccatgttcatagcagcatcattcacaatagattaaagtggaagcagcccaagcgtccactgacagatgaccagataggcaaaatccggactcatgtgtgaacctagaaggacaaatactgtgagtccacctgtgtgaggtcccgagaggagcgaatacacagagacagaaagcaggctggtggttaccaagggcttgggg

SEQ ID NO: 2550 - DNA, 600 bp, Bovine  MMBT21793
ccctatggagaagcccatgtggtgaggttttataattgttaactgaagcaaaaatgcaatccaacatcgtaagaggaaactggaataaatgtacatcttccttagatactttgtaaattgtgtcaacataaaaactgtatttgaaaattaaaatgatccagtgctatcagaagttttgaaaatgaagctagtatacaaaataagtattgcaggcatactgcttactgtctgagccaccagggaagccccaaataaaacataacagatataattatgcactacataaacaaatttcctgayatcactaaaattttctttcttaggttctcaaggagtaataaaacttttctttttaatagtgaaaacactttacagtggcttctatcatttatttggaataatgtgtttaaacaaacaatggtaggaaaattcaaatgttgaatttgtcaactagtaagcatcctgttacctttttgggaaaacccctgtacgaaaatgaaggctggcttatattaaattgtatattagctaattcaaggccctgtctgccaagcaatagcaatgtgtatcactgaccaagtcaaagatggactatatcct

SEQ ID NO: 2551 - DNA, 600 bp, Bovine  MMBT07861
tagactttttcttttagaaactgataaaactgattctaaaagttatatggaaatgcaaaggactcaaaatagtcaaaacaattttggaaaagaacaacaaaattgaaggaattatactaccacattttaagactttttataatgctacattaataaagaaaatgttaaattgtctatccacaaatgtatatgctgaaattgaagattcatgtccaagaaatgattcttaatcctatgtcatattgtataaaaaattaatttaaaatgtactacagactatatgcatacactcatttttaraagttgagaaagtgaaaatataaaccatggagaaaataatcagcaatggtcctaatttcttttaagaggttataccccacatacttgaattttacctcaaacttcttgtcttcctcaaactttttctgatcacataattcatcataatcttcttgtaacttagtatgagtttctttaagtgatgataactcacttttaatctcattaatttctccattaagttcttcaacctaatatataacatttaaccaaaatgaacatgtatgtaaattagttgtatataaaaatacttcattaaca

SEQ ID NO: 2552 - DNA, 602 bp, Bovine  MMBT11207
  misc_feature (1)..(2): n is a, c, g, or t
nntctacctagtataaggaactgtgcactctgggaaataaattggaaaacaaaagtttctgattttcaaggaagagactatcgtatggctcaaggttatatgacagtgtcttttgcttctaaaagctcactgatttctcattaagaaattataaaaatgaaytgaaatgtgttagagaaattatragtaataacaaatayaagagaataattactcataattctttcactttaatgcatyactttaatacttcttagagctttctattttcctcacattttgatacagatgtactctctacrtggtactttgcattttgctcttttctacttcacattagagtttaacctagtcttttgttagtatatgtcattattctaatgactggctgctgctgctaagtcgcttcagttgtgtctgactctgtgcaaccccatagacagcagcccaccaggctctgctgtccctgggattctccaggcaagaacacctggagtgggttgccatttccttctccaatgcatcaaagggaaaagtgaaagggaagtcgctcactcgtgtctgactcttagcgatcccatggactgcagcctaccaggctc

SEQ ID NO: 2553 - DNA, 598 bp, Bovine  MMBT14885
  misc_feature (1)..(151): n is a, c, g, or t
nnnnnnnnnnnnnnnnnnnnnnnnnnnnnnnnnnnnnnnnnnnnnnnnnnnnnnnnnnnnnnnnnnnnnnnnnnnnnnnnnnnnnnnnnnnnnnnnnnnnnnnnnnnnnnnnnnnnnnnnnnnnnnnnnnnnnnnnnnnnnnnnnnnnnnncttttacttttatattaacttagttcttagctctcatcttcggtctatttatctctcttctatctatgctaatttcttttaagacggatttgccaaatcatatccctattgtctggccttccctggtagtgcagtcagtaaaaaatctrcctgcagtgcaggagacccaggtttgatccctgggttgggaagatatggtggaaaaggaaatggcaactcactccagtattcctgcctggaaaatcctatgaacagaggagcctggcagactacactctgtggggtcgcaagagtcagacacaagttagcgactaaaccattaccaccatccctaatattttgtgttaaatattgtgctgtactgtgttaaataggtaattactattcattgctagtacattgaattcattgtataaaatgcagcattgttcattttagagraaaaaa

SEQ ID NO: 2554 - DNA, 600 bp, Bovine  MMBT21071
cctagagggccccggggtgataggactagtctcttcaactttacagagggatcttgggtatcccttggccagggtcaaggggtaagggtcctggtgtgaagaccagagccccagtctcctcacagtcagcaccttgttttgtccaatgctcagacccacccttccctctccagcaccaccctagtcctcagagtgagcgctgtagggacccgtgtccctctaagggtcaacttcaccctgacatgttcataaataactkgccttgattctgtgctcaggaccccataccctaaagcctgyagtggagctttrgcagtaagggggcaaaagaggcctcatgtatgttggctgcattctttatgactgcatacrgccattgtctcattgtaatgcacacagcagtcttatgattatttccgtccaacagccgaggctgaacaagcagttcaagatcgggtaagtagtaagtgcttggtataaaaacttggaattcgtgtgaccagttctttccaaagtgcagttctctgagcagcctgtgaagatggtcagaacttgtgctgggctgcactgtctgttatcaccatgactgtccttctggag

SEQ ID NO: 2555 - DNA, 600 bp, Bovine  MMBT08148
gagacgtgggttcaatccctgagtcagggaagatcccctcgagtagaaaatgcaatccactccagtattcttgcctggaaaatcccatggagtggaggagcctggtgggctacagtccatggggttgcaaagagtcagacacaattgagcgactaacactttcacttcatatagctgtttgctggcagaaatagggcaggaggaggtataggagagagtgatacatgcagggagatcacttgcacgaacaaagacttatgaaagaggatggggtgactggaaaacacagtccacggattrcttgtaggtcyttaaatacatttcctttctttcaaagatgcagtaaagggaaaacgaccaacttacttggagaaaatacatctcactgtgttttgtgctgctgttgtcttgaaagcactgaatgcctgtgtgcatggggaaggcaactcccataaggggatgaaagttgtctatacctacaagagtagagaggacatctctatgcacacacacaccaatgtctatgcacagagacaattgtcctttgtggctggtttggaaatcgttgtgttcctggtcttgcaaagttcagacttgtat

SEQ ID NO: 2556 - DNA, 600 bp, Bovine  MMBT11713
cctgcagcgtttagacccttggtatgcrgacacgcccagaraagcccattctttatggcaatttgggccttctgcctggcttctcacatgtgcaagagattttggcaaaacactgcttttttttttgtttctctcattgtcatataatacaaagctttgcttctttcctctaacgggctttcctattttgtttctcaaatccagacaaacacacatttcaatgtccattcacattattaaccaaaaagacctccataatcaakcatttggggtttgattcacaaagataccatgtatggrgywctggagcttttscactcttttgggggaaggttgaaagggccttgtctgtggcaggtcgggtgcaagagggttgcaaagctttctcaggttcgtgactgacttgccccacggatgagaaaatcagagctcggggacctgactccagtgctgggatgtctgagacagctggcttcaacttccccctctccaccggcccccgccctcactcacgctgcctaagaggcacctgctctgggggcctgttcaagctgtcccatcatcccatcattctgagctgttgtttccagggttctaagg

SEQ ID NO: 2557 - DNA, 600 bp, Bovine  MMBT17431
agccagagcacaggtgagatatggacttggagttctgagctagactaaactcagtttgagcttagctccactgagaatcaacctgatatacaggatcaagttgtttaaacctcgcaggtcttgttgctgtaagtgaggtttatggacagcagcatcagttcacctgggaatttgttagaaatgcagaacttcagatctcatcctgacctagtgaatcagaaactgcattttatcaaaatccatctttgatttgcatgcagattacattgtgagggagaagtactgttctcaggaaccttycatttccttatccacaaaattcacataacagtagctaacttccaggggggcctaggaggatcaagtatatgtaaaatgctcacctcagtagctggcatgtttcaggattaatgaatagtgagtttattttttcttattgatattactgacaatattgtatatcattagatagttttatcacttaaattttctaagatgcatctctaaaactgggataattatatatgttttctataacttcctttactgtggattaaatcatttaatatctgtaaactatcaatataatgtgcaatgttc

SEQ ID NO: 2558 - DNA, 600 bp, Bovine  MMBT21385
tacctatgcaccggcagcacagtatggtgagagggaatccatttcactcagtctttaggttagaggttcagcatttgggcttcttcctgccacttgcttcaactaaatcatctaatcagtaactattgctagcttcctagaatgggttaaaatatggcaggatggccaagaagattgcttaccatagtgcatataaatgttaatgtctcgttagcattaggtctagcgttakagcattaagtcactaatgaattaggatcactagcaaatcggagttaatgataatgtcaactatcatcractgatagctactggtttccagggactatgcttaatgttttatgtaattatcccaatgaaaacactattttgcaggaaagaaaagtgagttagatagacattacacttttgcctacagccatacagatggcgattagaagacccaggataggaaccaggaagttgggctgtagagttggaactcctgactgttggactaagtagctgttcctcctcacaaaacatttactatgtgtaaggaactatgccaagcacattattgtattctrtccctatatttattatcatttccattttcca

SEQ ID NO: 2559 - DNA, 600 bp, Bovine  MMBT21806
agaaagaaatatgtgacaccagatrscaggtcacagagctggctcataaggaacaggagtttggggacactttcacagtgccaagttaagaagatacaagagaagaaaaaaaggaatttgctcttttctttttatttctaagctcgtttacagtttaaacctgcatgaaatctctacttagatcttcagaggaaagataataagtagctcagttaatagtttgggatgtgtcatgtaagatgctaccccaaattgtgctggccttgatgacaaacttccatgaagaaactttgcaataaycacaacaacttaaagcaaaggtggttattactgtctcagacattatctccagaatgtttaatttctgtgttttgacttataatttatatggtcatgctttatagaaacactagagaaaattattgttgattgtagtgtccttctagacaaaggataaactaaagaaaacaaatcccaaattttcaccaaaatagaaggtcttaacctgttggggaggggataacctgtaaggaaatatagtctaccactgttgctatctgtacagatgtagaattaattcagattgtatgtctaagctgt

SEQ ID NO: 2560 - DNA, 600 bp, Bovine  MMBT03111
aggatggaagcattgctggggtgagtcttccttgtatcggagttcccaaaacagagcaagcacacaatacarcaaatggttgagaaagaaagagaggtggggcgagcttgcatacatgggtgcatgtatgcatgtgtgtgtgtgtgtacatgtggctgggacagggaaggagtagggtaaaggagtggctgagggaagcaggaccccttcttccttccactttgtcacgcttcttggctctgagtgctttgaggtccgttcctggaggccagggactgagcaaggtggctatttcctaasgaccaggtaggctgtctccccattccattctgcctgagggaggagcatgctctccctgcccctctgtcccttggaacaccactggtcttacttagtggcctgaggcttctgtcaactctgaggccgggtgaggtccccccaccccgggacctgggccctgtccccatcttcctcacccaggagcagggagaagcaattccaccccccctactccagccccatcacttccaatcacctgcccatctcctgcaataacccacgctctccatggctcctcagggccgacagcatggctgtctc

SEQ ID NO: 2561 - DNA, 600 bp, Bovine  MMBT03219
ccaaggtcagaccacttgtcagtgggcacagaaggggctacaaaataagtagaataaggggaaacctgacactggagtgaagatttcctcattactatactgcctcacctcaacaactcaagcatttttaaaatccagcaactaatttaagtacaaagaaactgccacatgcctgagagagagattttcattatcatttttataatagtcttaccagttctactcttggttttaaatattctctcaaatcttttctccagcatacttatatcgtctctcaaatcttttctccaatatacytataacaatacccagtcatttaactcaatccaccatttgatctgcatacaacttctcctgcatctttgattcaagttttgattctgccatctaacaagccaygcgatctttgggaagatgtcagttaaccaatttcagccttgtcttccttagctttaagatggggataactacacctatcgccagagttctttatgaaattaattcagttaatatataaggaaatgtttgacgtgctaacccaaacgttagaagcggtcatcaccaccatcatcactgttagagatacgtgaattcttg

SEQ ID NO: 2562 - DNA, 600 bp, Bovine  MMBT04957
ttcccagtgcagtgtcttctgctaaattgtaggttttttctttgacattctctcacatcaaactgtctgtcaaagctaaattactccctctcacttcaagcctttccctggctatttaactctttgtcaatcctcctagccttttttcttgcttgactgctcattccatacatcagtttcactggcactttaccatctaaaatggcccttcctagtggggaagctcctgttctttatgaccactgacagaagggcgttaattcctataacctgcccgctcatctccactcattatacccyctcacctccccagtcagtctctggcaccagtctctggattgtcatcaaaaaatacacactgactgctaatttagatagctgataacagtttcactttatggatcagccatctcctctttgttccatccaggaaatcccaggccgggtttccaattcatttttyctggcctctatagccaggaggtacaaggagtaggcagaagtgtaatattgcttagtggagaagaagattcccctggatttcatttacttcacataaggagaacaggctcatagtttaattccagctgaaaaacttct

SEQ ID NO: 2563 - DNA, 600 bp, Bovine  MMBT07632
agctccccaggctcctytgtccatgggattcgccaggcaagaatactggaatgggttgccatgccctcctccagagggtcttcccgaccgagagatcaaacctgcatctgtctcctgcatggcaagcaggttctttaccactagcgccacctggaggcccaaatggaagcagtcgttattatccgttgttcttaagcaggacgagtgtcctctgcttagggatgggctgcgaattaaaacaagagaacatgtgacatccatgagctcccttagatcctcttatgtaggcatcatcctctstagcttttgaagtttttcttagtttggggaaaggcttgcctctaagtttcccaaagtaagaatgtgtgtgtttgagttgtatgtgcataatgtttagatgatgctaaagctgaaactccagtactttgtccacctcatgcgaagagttgactcattggaaaagactgatgctgggagggattgggggcaggaggagaaggggacgacagaggatgagacggctggatggcatcactgactcgatggacatgagtttgagtgaactccgggggatagtgatggacagggaggcctggcgtg

SEQ ID NO: 2564 - DNA, 600 bp, Bovine  MMBT10569
aagatcctgcttgctgtgcagcaggtgttacttcaaatatttccatgcactgttagcttgatggtaattttttaaaaaagaaaaagaaaataaactcttaaactgtaatttaatcccactgtgcttccaattctagaatcttgtacataaaatgacacagtttaaacatcgcagacaggtctcttcttgccctgagcaggttttggagggtctcactgaaaagagagaccttctccttcgtgggaacacagttcttaataatgtcaggcctccaggaagagcggggctagtccttactckgcaaaataatggggaaagaaaaaggaatctttctgtgccatgcattgtgctaattctcagcagtgtgttttaaggagggtattttctacagagaaaggtaactaatcgagggttacgtcttgggcgcatcacctccctctccagggtttagtatcctcagaagtaaatttgtattctgtcatttatccatccacctggccacccagccagaagaatttccctggtgcctgctccagggatgacaaacctgttccatcgtaagagcattgagaaggattctgaggtcacgtctcaactcag

SEQ ID NO: 2565 - DNA, 602 bp, Bovine  MMBT11981
  misc_feature (1)..(2): n is a, c, g, or t
nncctcgcctgatggctgtagatattacacctccagctcaaaatggaactcatccccctgtgctcacttccaccccacttcggtaagatcaagtactaattctctacacccgcccaggkccacsmgcccagaggcaccgactccccagcctcacctccccactgtcccccagctgtagaccctctcctttccacctgcaccgactcggcccaaaccagagccttatcgagtctggagagatgctgaccaaccggrttaccaagacctgtctcccctacccatcttcaacctactcstgatcmgcactgaatttttaacctattggcatccttctctaacattaagatagaaaacagcagagaaaccaggtaggttatttttaaatttcaagaatcagatgtcaaaaatggtttctaaacacctctcaactcacccatttccatggatattaggtacttacagcactatcaaattcaatgcttgtaattcctgcattactgccagacagggagcccttgaactcacatttgtctgcataaaaacaaagatgccaacataccaattaaaacgaggcacttgaaacacaagggaagctaattaca

SEQ ID NO: 2566 - DNA, 600 bp, Bovine  MMBT14107
cttgaggaatttcctactcagataccattgaaatgagaggttgtgaatctgacgatgagtatatttcaaaatgatatactctccggagctcaattcacagaaggttccattactctgtcccctccctccctctggatatagtatgaaagtatgaggggctgaagtctctgaagctgtggctcccggactggcagcccctggggctgctagtggagtataktttcctccatgcagttgaggaaaatctcaatgcagaagggttatccaggccacagatctgttctgactggttaacaagarggactgtgatgaggacttggctgtttagattaaaatgcatcgccggctctgggaacaagcacacatcagtagtaaaggccgtttaaacctttggggacagccttatgtttagattacattaattcataaatattatactaaataccacttaaattggacttaaatgacttcaaagataatgcattataatatggctatccagagagcactagtctttatgtctcccagtaactcagtctttgctgcctcctatcctgctagacaagaccaaagttatgaatggattgtggcttgttcatg

SEQ ID NO: 2567 - DNA, 598 bp, Bovine  MMBT14320
  misc_feature (1)..(99): n is a, c, g, or t
nnnnnnnnnnnnnnnnnnnnnnnnnnnnnnnnnnnnnnnnnnnnnnnnnnnnnnnnnnnnnnnnnnnnnnnnnnnnnnnnnnnnnnnnnnnnnnnnnnntgaagacgtctgaagagccgtgggacccagcaggtgtgtgtccaggacacagaggacaagctgcggggcctcgattgagcttctggtctgagatttgtgttttcccacgataactacaagaaccaaagcaaacagacgctggacgcccccggatgaacccatgtcattaaaccccactggaaaacagcttaaaagaaaaargattccaytgatttccgtattcatttgcacaagctgcagagcctctttcttttatktttatcagggaacatgttgaaccagccctccaaattaaggaaataactttacgaactccagttttacgttttcttattttagaaatattcattgccttcctatgtgtccctcatgtccttatataaaagcatttttctctcccatttgccaatttttaatgatttttctttccttctacttacaacaaagccatcatttcaaattaattaagttttcattaaaatgtatgattgtaatgtcc

SEQ ID NO: 2568 - DNA, 600 bp, Bovine  MMBT00191
agatctcggatgtggcaactaagacccagtgtagccaaaaaaccaaaaataattaaaaatatgtttttaaaaaaggaaaccagattatccaagaggggtcgaacctagaaactcagaatgtaggtgtatgtgcggtttggatggtcatggggttcacagagccccgtgtctggagtcccttgtcccagagtcagtgccccctgcttggtctgtggtgggggaggggctttcctgtcacttcagaagattgtgggtcacaaggcccgaatttggtgagtcttgaaatcagccggcccaggycctctggtgacccgggtctctcttatcatatctagagasatgactccaatatcaacgatttaggctttccttatgggttagcctgggaaccacaccacattgtttggttaaacctcgagtacggacggacttaataatgaactgttgggccagtgctacttgcttgacctccagggctgtctttkgctgccgctccctctcccccagagcagtgtcctctcgggaaatgcagctgaccaggctgcatccgtgggaaggcctggccctgctgaggctgcaggaaatgaccctcttagcagc

SEQ ID NO: 2569 - DNA, 600 bp, Bovine  MMBT00467
cctcctaagctttctctatttaggggtgaaggttgtctttgttgaggtttgagagagtaattcctccctgtatgagactcccctcagaccctgaaggtccctccagcctccccggagggtacagatgagaggaagtagagcacagttccaggccccgctctgttccccgcccaagaccggaccatccttctttttctttttctttttctttattgttaattggaggataattgctttacaatattgtgttggtttctgccatacatcaacgtgaatcaggcttaggcatcccgccccctytaggctgtcaccaagcacgggtttgagcttcctgagttgtatggcagattcccaccagctatctaatttttacacatggtagtgtatgtgtttccccgctactctctcagtccatccaaccgtctccttcccctactgtgtccacaagtctgggcagtccttcttgtctgatctcgggggtcctggaagcgttttcttgaaccaccgcatcatggctatgctatgctaagtctcttcagttgtatccaactctgtgcgaccccatagatggcagcccagcaggctcccccatccctggga

SEQ ID NO: 2570 - DNA, 598 bp, Bovine  MMBT03751
  misc_feature (1)..(10): n is a, c, g, or t
nnnnnnnnnngaataggcaatcaactgacaggtcattgctgaatcaaggaattatacccttttctttggcatatcacagctcatgaaggctaacattttggtgactgtttcaggaaaagaaatactgtactgtatttcctctcttcccttcaatatctgttatacaaagcaaacaaacctgtttacagaacagccagccctttggttgagtaaatgacaggtaggaaattaagctgttaatacaggaggatgactaagtgaggaaatccgtcttttgtcaaccactcttacatttttatyattttcaagtagaatctgctttcggtttcagtgggggtgttagatgtatgtggcttaatggattttgtacttgaaattctggcttccctcttttgcttacaatccaacatcacagtagaaaataatgcaaatagtcttctaaatgattgatawacagtaatgatttaggcttatttattgagtcagagctccacacctgttctgtgtcataacaacttcctccaagaatgagtttttttttttttttaagccatcctttcttgcaatgccagaggcattaaaaatctctaaattgaat

SEQ ID NO: 2571 - DNA, 600 bp, Bovine  MMBT07051
gtccacctggaaattccagttcttatctggttaagcagcattccagttgttttaggatggtggtcctccctaagctaactccctcgaggatctttttacctttgcctctagcactgcccatgtgggccaggtgatgagatcactgtaagccagaccctgacatctgaggagctaacagggcctacagttggattcggtgacatccacagggttccacctgactcttaacttggtgagggaccgtggctgtgattgcaaaagcctccgttgtggggcctctctgtttacctgggcctgcgmggtcgctggcctaggagagagatcttcgatcgtgttctaaaggccagaccttccaagttggaaggtcgtggtggcctgaaggataggggacagggcctggcaagaagctggttctgggtgaacgtggcctgaagggattcgtccttaggaggcagaagggctgagtcacacgctcagtgtttcaggttccacttttcagcctggccctgcccgccccttccctgtacaaatgcaggccaggggctgtattattggctgttgctgaattctttggcagggattttaatgtctggtctgggt

SEQ ID NO: 2572 - DNA, 598 bp, Bovine  MMBT07282
  misc_feature (1)..(11): n is a, c, g, or t
nnnnnnnnnnngtctgggcttatcctgggggttaagcagaggcaggacctggtaggtgtatgtttcagagcccygccctctggccggtgagatgttagggaygggatggaagagaayggggtctgagtccctctctctctttctccccscctcactctcgtccctccctttgctcgagggcgtcaggatttcccaggtgcagctggcggattcgggcaccttcacctgtgtggccgcgagccccgcaggtgtggccaacaggcacttcatcttgcaggtgctcggtacggagcagggggygggttaccaggccctttggcctcagggttgagaatsaaggccctgtcccygcccctcccctctgagtggaaccgagggytggccctcagggatgtcaaggcagggcacacactcagcctctggctcattcagtcactctttcattgatctcacaagtggttctcggacacgagggtgccagggcctcaccaggccccgggatacggcagtaagcagaggtggccgctgmcactaggaggcccatgaggaaaacagctctgtagaaagacaattaaaattccaggcgactggtgatgcc

SEQ ID NO: 2573 - DNA, 600 bp, Bovine  MMBT07509
aacatctctggtcaaggaaactactctaaccaagaaaagcttcatggagtcaaaggacttggttttagttaagaaggggtacaaagcgctccaaggctaggagtgatgtctagtgccaaccacagtgagaacagtgattgtgtaatgacataagcattcgatggtgatgcttactgacctcagagaggaagagtaggcaactaaaatcatattggcagagtcaagaccgactaggacacatgacaaaagcatgtctctaaataagggcttgctatcgagtcaaacagaagccttatctcrtaggtatttaaagttaggttgataagactaaccggctasagcaaggctaagaaggaaattgatgacttaaatgtgraaacttagataatgtaggaaacagaaatatactaaattttaagagctagaatggcacacaaaggaaraacaaagaaaatgccagagcggtggaatcaagcactgactaaaaaaaagaaaaagaaaaacgaagctggcagctggtaaaaaaaaaacaaaactgcatgaatccagatagaacctacacccacctaatgcatatagttaaaccatgttaagggagag

SEQ ID NO: 2574 - DNA, 600 bp, Bovine  MMBT07821
tccagctattccactcttgggctaataaatctggagaaaattctaatttgaaaagatacgtgtaccccagtgtttatagcagcactatttataatagccaagtcatggaagcaacctaaatgtccattgacagataaatggaaaaagaaaaaactgtgtgtgtgtgtgtatacacacaatgggatattagccataaaaaagaaagaaagaataatgctatttgcagcagtatggatgaacctagagattatcatagtaactgaagtaagtcagataaagacagctaatcatgatattatrtgtgcagtctaaaagaaatggggcaagtgaacttacttayaaacagcagtgactcatagaaaacaaacttatggttaccagagaggaaagggggaatgtgataaatagggagttttggactgacatatacacactactgtatatacgatagatacaccacaggggcctcctgtataaygcaaggtatgtgcaygcacacgcccagtcacgtcagactcttggcagccctatagactgtagcctgccaggctcctctgccatgggattttccaggcaagaatcctggaatgggttcatttt

SEQ ID NO: 2575 - DNA, 600 bp, Bovine  MMBT10294
taggaaggttgtggcaacatcctaccccaataaaattttattcatgctttcagttacatagaaaattattctctyttttcaaaatatgtgaattctcactactttctgaaggatcataaattcagaattattttgatcrgtagaggaattgttgttaacacaagttagtgtttcttgaggtgattatcacctggacattctccttttgccactccagacccttttccattctgctctgagttcctaaacctgacctctataaactgcaactgaaacctttgccagctggtttccaatggrtttggccaaagcggagaactaaataagcaggagatacctggagaaaggaaggaggcagggagaaaaggggagagaggacagagtggaaacagggtgttttccaccagctccctcatttcagactttggtggccagtggctgcattcctctctcataggtttcgcattcagttgggggcctctctcccaaggacagccatagctaagctatggacccttcctgttctggtaactttctccctctccttgccccttttggtcctgttgtttagtcactaagtcttgtccaagtctgcagcac

SEQ ID NO: 2576 - DNA, 601 bp, Bovine  MMBT10567
  misc_feature (1)..(1): n is a, c, g, or t
nacactgtgctgcgcacctcccaagctcatttaattgtcaaggcgtattgtcctcactctgcaagaaagttccagaagcacagagaggtcaagtaatgccctatatgggtgcacagcaaaaagtggtgtatctgggatccaaacccargctatttgataataatgaccaaaaaaaaaaaaaaaactgtactaaaacccaaaaggacagagagtattctgtcctggggggctgagcaggaggaggagcccttctaatcccttcggcactacccatgaaggcccttctccaatcccggtgtakccctggtttacagatgcaaatacatctgcccttttcccctcccctcctatcagttcaggagtcaccatttgaattctgctctccttgaaagcatcaggcagtcagaaatcctgccagctggaccccattcaagtccagttgcgtctgcctgactgggcagaacccaaccatccgtgtggaaatactcagccgataacagccaaggggatgcggccaacacggggaaaatggatggttcccagattggcttgtttggcctccagctcaggataatatatgagcagtgacgtcaaacaaatg

SEQ ID NO: 2577 - DNA, 600 bp, Bovine  MMBT11517
aaaagataagtaactttaaatgtttagacgttacctataacctattaatcacttttatttatcttctgataaaaatttcactacaaggatagctaattaaaaaaaagcagttattctgataggcaaattctgaacaacctgataaaacgataatttttactgtttgtatgccttagatcacttttgaaataagtgyaaaatggtttatcttacctgtaccactgaggaattgaggtactctgcacatacccctaagggctgcactagtgctgagactgcctgaaaaaaagacagcaaatktgagaaataaatgtgagcaagttctttcctttcaacattaaacaaatccttttttatatgtcagagaacattttatmctcttgggcaggaaaagctgatataaagatgtcagttcatttaaattattgtagaaatttaatgtaacttaaatcatactatgccaataaaacttctttcaaggcttggatgagatgattctaaagttcacattgtagaataataaaaatttttatttgaaaaacgagagaatagtgggggaaggaatgaaatgtgcctttaatgtgcctttaacaaagaaaa

SEQ ID NO: 2578 - DNA, 461 bp, Bovine  MMBT12774
cagttgtattaatacattctataatttccttataaataaaccatacattaaagccccattgctgcttttccccatcttttaatactgagaaaaataaatcccatgaattttccttgaaatcttactagatcatccaaaatacattctaggggaaagttacaaacacaattacagtagacataaattcacaagtgacttacagttgaacttaaatcaggaagaaactcctacaatttatttcttttccatcacccttgtgtttcagtgtaagcacctaattcaatgcttttctcagaagcyccatgtagtaaaagtcattcctggagcacagtgcaaaggttaagaactttggacctctactcatctgagtttgaatcttgcctttgtttctcagtaactatgtgaccttaataagtatctgccttcttttttttaattaaaaaaaatttttttttaatttt

SEQ ID NO: 2579 - DNA, 600 bp, Bovine  MMBT13361
gttgaagcyctcggcacagcagagaactggggacttyagggcctagagggccccggggtgataggactagtctcttcaactttacagagggatcttgggtatcccttggccagggtcaaggggtaagggtcctggtgtgaagaccagagccccagtctcctcacagtcagcaccttgttttgtccaatgctcagacccacccttccctctccagcaccaccctagtcctcagagtgagcgctgtagggacccgtgtccctctaagggtcaacttcaccctgacatgttcataaataactkgccttgattctgtgctcaggaccccataccctaaagcctgyagtggagctttrgcagtaagggggcaaaagaggcctcatgtatgttggctgcattctttatgactgcatacrgccattgtctcattgtaatgcacacagcagtcttatgattatttccgtccaacagccgaggctgaacaagcagttcaagatcgggtaagtagtaagtgcttggtataaaaacttggaattcgtgtgaccagttctttccaaagtgcagttctctgagcagcctgtgaagatggtcagaacttgtgct

SEQ ID NO: 2580 - DNA, 600 bp, Bovine  MMBT13680
atacaaaagcagactgttttcctgaggctggagagctgcaagttcactcctctgtacactcgcaagttaaatatgggtgttgacgtgtcagtgctggtatcatcttttaattacgttctccaccctctgttcccagacgaagtgagtggggtcaagtacccccctaagctccagggcctctctagagctctgctggcagtgggcccaagggcccctgggcacaagcagtgtccagcttggtcccttcgtcagctctgggcacgtgctctggcttgactgctgggtgctggccagaggggyagtggagcagggccaacgcattaggagaaagtgctgggccgggtttcagttctytgattagactgaaagatttrgctgccaattgtcatcagccaaatttctcacactttgcctgatgagtcacttgtgctggtttccaagtggaacagaaggctctgggaaatttgcagtgcttattttagatctgcttcagggagggggctgagtgtccgatgtgatcctggtttgcctcacatcagggctttgtgcgagggactgtggaacgctcttccaagagtaaacagcttctaactaaggctt

SEQ ID NO: 2581 - DNA, 600 bp, Bovine  MMBT13689
ctcactgataaatttaatgtagtaccattaaaatgaaagccccagcacgaaggacccaatgcaaatataaataaagagtttttttttttttttttaaagaacaggttgtcaatattagagctgaaaattttgtacaggttctggtaagattacttaagaagcaaatcaaaatgcttaagctgtagctgtttaacatgattataagtgctgattattcaaatgaaattaattagtcacaaattccccaagaacattaagctactcctcagtggcagaaaaacyggtgattttactctttcrttgaaatatacgctgggtttttgaaartatgaacaattcctggaaatatgaaagcaactgaagatttcttggtcaggatttaaagaaagatcaaaacccacttagttccacaatcaatatagastgtgaaggcaggaaaaagctgagragccatcttgaaggcagccaggcagaargaattctctggtactcgaccttttgtagtaaaaggccattttggatctactgatgggatgtggcccacccatggtggaagcctcctgcagctttaaggacaatattaaaatgggacctctgtgg

SEQ ID NO: 2582 - DNA, 600 bp, Bovine  MMBT14827
acagagaatacagttttattgtttcagaagtggcccagacaaaaatagcaccatgagaagaaacaagcttcctagtaagatcaaaattaattatggtttttctaaaaaaacttaaaagacttttatatactcaattccagtaaacctcagaggacacgctactgaaacaaaagaagttaagaccagaaagaatttccacagatttgagaaaactcaatgaccctttcagtctgttaggcaaacttgtgttctgtaggtatgttttagaattttgtaagtaaccatgtgatcatagatgayaggaggaggagcgaagaagaggagcaaaattgtacagaatgaacaaaaaaattaagagaaactcatacagattacaaagatgatcaggaggtcagttttctaaaatgtaggcactgttatcaacctcagagcaatggtcctcaactgtggccctttcgccccccaccccagaagttactaggcaatggccaaagacctggtagctcagacagtaaagaatccgcctgcaatgcaggagacctggtttgatccctgcgttgcgaaggtcctctggaggaaggcatgacaacccactccagt

SEQ ID NO: 2583 - DNA, 600 bp, Bovine  MMBT17641
actttcaatgactcatggccaaagaaatcgggagcacaactagctgagaagtggaaattttccctgcaagacccagagcccagagttagtgacattccatctctatatcaggaaagatcaccttaagatttctgtcattctggccacacaggtcggtggcggagtgtttactgggcccctccaccagcaccagttaggtacaatccacaaaggtcttgctggatttcattgcttcttctcagaagacagttttacattcctctgaatgccttaaatttacctctggtgggatatcatgaytgattccttgacttttttctttttgcttataaataattctttatgtctcccccatgcaatggagggcagagcagggggttgtatccctgccctcatgcagggaatggaggtcaatgtatactgatcttattgccagctgccctgtggccttgcggtgggaaatggtggggggtggtctacagccccctttcttctaacattggtctctcttcaccacatcaccatagtggagctgaggggctggaggtgctaggagctgaggtaaggaygcttatctagggaaaaaaaaaatgtccccay

SEQ ID NO: 2584 - DNA, 600 bp, Bovine  MMBT17701
tcctccagagacacagtctttattgctagtactgtttgcatgttgcagtgatatagaattgtcttggatcttcagtggaccgtgttgcaggttgttacatgctggctcaaatttgattccatgattttctccacagttgtggtcataccatctatccctcatccaagtttgaaccatggattccttgccaagttaattcccgagcagagctttgcccactcattttacaaaggtaatattgacctcatctcctgacctgtttgggtattcttaaatttcatcaattgttatacaataacyattcattaatgtagttgtttatagacatctcagcatacggctcaggtttcatggagatataatacgttgtatttgtacctggctattgagagcaaaatagtttttatatttgtattcccttgtatttctttaagtatcatcttcaaattaaggctgcctaattatatggataataagatgcacagtggtggcatgcagaagagatcacagaaaagtcccaccatgttaatgggaccgaattagctctaaaatgaaggctactgtagaatgacaagtaaaaagattttaaacaagcctcaa

SEQ ID NO: 2585 - DNA, 600 bp, Bovine  MMBT18050
cgctgtctgtcagcctagtggcagccaatcacagccctcaggtccagtgcctccccgcccacccccttctccgacctcctccttccaggagaggggttcaggggaaaagaaggcctgtaccgggtctgtgggtggcctgggtctcagctcctctggaagcagcagggtagggtgggtggggcagacctgaggttcttcctgcccttgtgggggcagttgaggaaggttctggaaaccctrtgtgcaagcaccgtgagggcagggaccaccttgcctgtctagctcactgtggaattcacrgctcccccccagaaccagtgatgcctcagaggctttcgattcttgtcgaggaaggaagggcgggagggagaaagagaaggcttgggccaggctaggttaagcagagaggagcaatacaggagagcggggaaaggcctgaaaaaaagctctgggttcctttccaggcctccctccatcccctccagagacgtcggaggagggaagaccaaagacagtctccctctccgctcctggcaggagctgcagggctctgactcagacagttggtaactgcccttgatgtgttatatgtctccatgg

SEQ ID NO: 2586 - DNA, 600 bp, Bovine  MMBT18246
tcccaccaccaacacacacacatcaccctgctgctgaaattactcatgtccttaggatcaagttcaagtgtcttgtcaggtcctccagggtcctgtgtggcctgaccctacctctcctccattgtgattcctggtcagccaatgtcacctcctcagggaagcctgccgtaaccactgccacgaacccattaggctagttctcaggactatcttgcctttttaaaaaaaaaaaaaaactctttatttttatttatggaggtaggtacgcccatttcactgctgaagacactgagggccaamtgrcactgagctaggttagcctcacggggctacttggaaagtaagcggtgtttgcagactccttattatcatcattgttattgttattattattggctgttacatgcagcatgtgggatcttagttcctccaccaaggatcgaaccyatgccccctgtactgaaagtagagtcttaacccactggaccaccagggacgtccccttactttttttgaaaaatttacttttcaaactgagatacgattgacatacaaaaaaacctgtacatttttaatcgtacatcctgataagtttgaagc

SEQ ID NO: 2587 - DNA, 600 bp, Bovine  MMBT19520
tgggagaggtgcaggttgcctcgccccagcctcgaccagaagtcctgagtgagaacaccaatggcctttccagcactcctgcagagccagacctcagccccagaacagctgccaaggccctgatgcaggccagtgagcatgtgcccacgcaggcagccatgtcctctcctgacattgtcagtgaggtggggaaggcatctcccacactcaactctcctggcaatactcagctgtcagggggcagagagcccacagcaccagccctgtgttctgcagcaggcaaggatttaatacctgcarcatttacaatgccagccaatcagcacatccacccagttgtcccaggcaaccagccccatgccagcccccagtcagggcctgaagataccctggtgaaatcacagagaactgcagatggagggcaacctgagaagtcaagttgtccggtggtggtcatctgtggcaaagatcaaatrccctgtgattttccttctcaagaaayaatgcagggaatrgtgcaaactgaagatacagcagccaggtcgttcagtcctacttccgctactgtaggtggacccgaagcagaaaggcagcaagctg

SEQ ID NO: 2588 - DNA, 601 bp, Bovine  MMBT21018
  misc_feature (1)..(1): n is a, c, g, or t
nctccaaacaagagtttcttctagataaagaatgacaagcaaatgccctacagaatgacaaatgttgcaggtggatctgatagggaccatctttacaaggagaccaagttagctgaatactttcggcttatactgtgaataaggatcctcagaaacaagtccatttttctgatcctcatatgtaatcttyataaataaatatttctttgctttacatctgygtggaaaatttgcctcctacacaagccccaccttccagccaggtccaaatctctcactacyaatgttatcattatccttkggagtccagctgctttgggttatgaggattttttgcaaatacgaaccraagggagcaaaacataaagcacttccatttttttccttcccatttccccaagttaaataacagtttattctgcaggctttcaaatcactcccacaaaattggcaatccaagacaatcgacacattcatgctaatccacccagaagtaaatacactgtggtaaaactgtgacatttgcaaaggccgtagctccccaattactgaggaattaactagggatataatgagggagggccaagtgtgattcagccca

SEQ ID NO: 2589 - DNA, 600 bp, Bovine  MMBT21043
acaaactctctttgttagcttrtagattaaagaaaataaatacatacgtagagttaatactaagttataggagagtttcttcaaatagctaaaatttaggagsctccaccaaagtaacrgtaaatatgactaaattatatcatgcctaaagcttgatgtgtatgtctgatttgacatatttcagaggtgctatttactctgtaaactgttctacatttcaaaaactaagattcttggggttcataagataaaagttaaaattaatatttcagaaattaattttctgagcatttgggtggrtgctgacaatagttgctaacttcttcatttctgatcactagttctaatcattagttgtttttcttgggtatttagaactgattttttttttttctctaccttatatacctctatagaaaaaggtggattgtttttcaaactcagaaacaaattcagacctgaaatgggcctgttacatgttaaatggcaggagttcataaaactgaaaacttyccattgctcacattaagccagtgttggagcaaataaacaaaatcatcttttgcttataattttaatcatcttaaaaactgtaaagga

SEQ ID NO: 2590 - DNA, 600 bp, Bovine  MMBT00672
cataaatttcgtgctttggcactcccgcatgagatcaagccctggaaaagatggttgctgcagagggcagggtctcaatgtcattgtctcggtgattagcaatggtcttttctaaatgccccttaggcttaacaataatcgaatgcattttaaaaattaggtctccttccgttcaaagcaaagatgtcatctgtaaacattcatcaacacccatcagaagactcttctttgctggggttctttcctgctcattaacatagggctgtcattgctttagggcccaccatgcgcttgctgggygtgtgcatgcatcatttctctccagaaacactgccaagagacaagacaaactctctggtggaaaaaaaagcattggcttaagaatgagacttggattctagtcctggattggtccctggccagccatgcaaacttggacagttcatgtaaacatctctgaccctcagtttcttcatctataaaatggggatgttgttatacatctgcctcaaactattggaaaattgtaccgtggtcaacaaattcacgttaagctgcaaagtgtttttttaagcactgactccagtgtgcaaggcctta

SEQ ID NO: 2591 - DNA, 600 bp, Bovine  MMBT00789
atgaaattatccttacaactcttatttctaaaaggaggatcttgaaagacacacagttgccaaagcctgtccctatagcttgtgaatataacaacagcttaaaagtttgtaattttgaataattatctttattaataaactgctgccctaaaaataatttttaaattgttttatgaaggtataactagttacaagttttctttcttaagcatgagtatgagcattggtacttgtatcaaattctacacacaggaaaaagaaatctgtcagaatatcacacctgataaaaattagcaatgyaaaaactcattcgggcaagattcatcactggattttaaaaactattgactataagcttgttgaggaacagagctttcaacatggcctccaagaatcatcccacatactgcttattaattataaaggaaaaattgtgccctgaacatggtgagatctggcagtaaactttaaataagggggaattccctggaagtccagtgggtgggactctgtgctttcattgccaagagccagggtttgatctctgctgggggaactaagatcccattagctgcacagtaatggcaccccactccagta

SEQ ID NO: 2592 - DNA, 600 bp, Bovine  MMBT02322
attccaaaaatgttcatgcagaaggtatgtggagacagaccccaagacagtgagcatggaagctgtgagctcaatgaagagtttatattcaagaaaatagatgatggtttgtactaccaagaaaattttggtagtagcagtgaaaatggttaaggttgtctagattaaatcaaaatgtaaggaaataaaccaaggtaatgggacagattaactggatatggcacttcaaaacagaaataaatttaagatggtttctaggcttaagcaactgagtgactaatgaaaatattcatcaagatkaagaatatttggcaggagttagggatgtgtgtaaagacatgagtytagtttgaccttttatgtttgaggtgctcaagggagatatttagattggwtttggattagatttggaaattttatgttaaatatgatatttcaaaacgtgagacagaatgaaattacccaaggagggagtacagatagagaawcaaagagagctgaggcatcgtagcagagaagtacaagctagtaagggagacttggaagaagtagacagaaagataagagaaaaataagagaatgagatacaataaaggccaa

SEQ ID NO: 2593 - DNA, 600 bp, Bovine  MMBT04167
caagttttagcaagaaaccattttatagctatttttaatctcccacctgaaaacattagttgactctggaaattctaatccctttaaaacccagcagcatcaaagcaaatagtcatgatcccttaagaggataaatatgctgattttaattaaagactaaattatgtcacttggtgtataatttttgcatctgtactttgagtagtatttatatatcatgtgcctttcattaatgaaaaattgaaaagaaagtatatattttgaagaaaagcctattgacagagacactttaaaagagcwgtaccttgaattttccaagaatttaagataataggaaaaaagtcctggtgtgtgctactatcagatgaaccttgaaaacactatgcaaagtaaaagagttattcagtcgctcagctgtgtccaacactttgcaaccccatgaactgtagcctgccaggctcctcagtccatggaattttccaggcaagaatactgaagtgggttgccacttcctactccaggtgatcttcccaacccaattttcaaacctgcgtctcctgctttggcaggtggattccagtaactgtggttatttatttt

SEQ ID NO: 2594 - DNA, 513 bp, Bovine  MMBT04281
ctgcctttgtggcacgcatcactgcattttcctgtctctgcartgggtgagcagacctttagaggagatacttaaaggtctatggaagtgtctgaaagatttgatgactaatcccaccccctccaccccatatctaggaccttgcaagtgatctcaaattttctgtacaaatataataaaatgatgtttttgtttacaatacattagtttttatccaaggtttacaaaatattaaaacttttccctttgttaatgaagcaacaagaaaatacaacctgtgcccaagaaactctttacaaytccaactctcaaactttctcatttttaacagtcatggctatctaaattcaaagacttttgccaatgcagagaatactaagtacagttgcctctggatctgaactgaaacagaattaaaattcttaaaattatatttcattccacacttcaaaaggaaacttttgaagtcaacataactcacacatcaaaacctccaatgaaagacctcattgg

SEQ ID NO: 2595 - DNA, 600 bp, Bovine  MMBT07805
ctcactttatgaaactctgggggaaagcttaccttcctggggctttatctgagtcccaaggcaagagccccctgagattttgcctgtcaacagtttacatttcactcaaactttctccagggaggactactgttgggatgttctttgtgcagtagcctgaaattattataataatggcagaggtgtccattttcatgatagtctggcatctagtatttactgggtaactactgcatgcctggcattatgctaggcatattgtatacacactttcattcatttatattcacatcaatcagyaagagaatcattgtttcccccgttttccaaatgaaactcaaaaagctctacctgcacatggccacacagtctgtaaggagatctgcaattctgagtctaattggatccccagtcctgtctgccttctcaggtcagctcctgtaactggctttctctggctttatagcccattgtgctgactgtctgatatcagtggatagaaaacacagaagctttaaacttcaacatgcaaatattatatttatttttttaagctttttattttgtgttggaatatagtcgattaacaatgttgtgata

SEQ ID NO: 2596 - DNA, 598 bp, Bovine  MMBT07841
  misc_feature (1)..(135): n is a, c, g, or t
nnnnnnnnnnnnnnnnnnnnnnnnnnnnnnnnnnnnnnnnnnnnnnnnnnnnnnnnnnnnnnnnnnnnnnnnnnnnnnnnnnnnnnnnnnnnnnnnnnnnnnnnnnnnnnnnnnnnnnnnnnnnnnnnnnnnnnntagatgaatcatacgcagacactattaaacaatgacacatgaaggcagcccccttaaaataaaccactcccccttaaaataaagtaattaaaaaaatacagaagttcttataaaragatkatgtgttatctttttcccccttttaatcattattcagattcaggmatttaaagagttgtctaaaaaccctccagtcaaatgctttgtgcagcgttcaatatgtaacactctagctaatggaaaaagcaggcggtggaagggagaactttctgttgtcaagctgaagagtgcttcaaagaagattgtcatttgaaactctgttgtcagcaatgaaggattccaaatgccgctgaacccagaactctgactgtggtatgtttaaataagtatatttaaacattaggaattctattttacttttttgtttccttaaaaatatgtaagaagccaacaaagaattata

SEQ ID NO: 2597 - DNA, 600 bp, Bovine  MMBT07862
tcaactcccctttcatttaaattctactccacctcttatgcccaattcaaggccccttttctccagaaatccttccctgaccactctaaaccctctattttctaaactcctgttgagtggttaaagtcaacactacagtttaataataacttaccagttgttctatatgtgtccacctgcctctccaaattagatgtttcttaaaggcaagaactgttccacatgctttcatttactcccccacatttctagacccaaagtaagcattcatttaattaacttgcaattaaaatagcttakttttatacaacttcacatattacagagcaatttcacctatatttttcttttgatccttaaattgcttctgaggtgtataggcattacttcctatggcatatttttttaaaaatcaccaaagtcagactcctaaaggtgaagattaatttttctgagataaagttccctaatctgtcaataaatttcaagcttaacccaaaaaatgcttcctattttaaaagatgagcactctcaaagttctgaaatagatttttagayggattaacaccaccaaccagttcaattaataaataattgtga

SEQ ID NO: 2598 - DNA, 600 bp, Bovine  MMBT11654
cgtggaggcagctgtactcagctgaggctccattttgctgtgactaacctttcctacttcgcctaggactttccagatttcatcactgaagcgcctgtctcctgggacaacctctcagctccaggcaaacaggaatggttggtcagccttcttcatttaccgcagggccggcccacttgcacctctaggcaaatcagccttgttcctaccctttatttacaattgacrtgaatgagtcctgtctttttcctgtcctcaggcatggtgacaccaggcttgtcaagagtccaacctatgaaytttatattcaataaaagtttcgttattggccttattttggacccaagcaaatgaaacaagatacattacggaaaacaaaaagaggccaggccttgctcttacctagatgctctcaaagtcacacgtttacttcctctttgtattttctctcacctctctcctccaccttaagtcaccctcagctcttaaataaaagcccccctaagaagtcaagtggccccaggaccccgcacaccctctggcagggaggggcagtgtggggctgctggcgggtgcccttgggaatcctctgacatgcag

SEQ ID NO: 2599 - DNA, 600 bp, Bovine  MMBT11712
ttgtaatctagcttttttttttttttttccattggaagacaattgcttcacaacatagtcccagtctctaccatacagcaacatgagtcagtcatacatgtttttaaccaagggaaatactagatgggagaaaagggcttaaaagcagacagtaaaagttatattaggagctattgccacctcaagctccaacataaattagcataaattatgatgcaattaaatcattaaagatgacttaatttgttgaatatgaactgaaaaaagcacagtaaaaggaatatctctggctttagctgraagaatgacatatcaactggctcatgtttcagctgatgagaaaattgccacaactcattcctagaaaagagacactgctctttgaaagtgttttacacaactacaaagcacaggacagatgaaagtagctgttattttgctattttgctacgttcagaccagcagctttaaatatgatacccttaaagaggcagctgagagagacaaataagatactatgtatggaatatttcttaaaagctgaatgtttttagaagcaccatttggtcagttatcctagagtctcattagagcatcaca

SEQ ID NO: 2600 - DNA, 600 bp, Bovine  MMBT12106
atatgaatcatgggaccaaagaaatgagttaaaaagtaaacttatgtcctatcctacttaattttcaaatttaatcactgaaatccagtgtattagtaaaagtcaayatagttttatataagacatgtaataaattcaggttttaaaacttatatgcatgactttatagacatttgatctctgtaaatttcattgtttccatctgtgacatgaattgtctaataatacctgtattagtttacagtgtccttgtgggaaatcagtgaaaaaatacatatgttattttaaatggtgacacartctttatggattagtaatcagtattctggttttcattattgttggtatatctgcctgacctctggatatattcagcaatcaaaaactgggtggaaaaaaccaggaactttatgccatagcaatttcaacttttccgaataaacaagaagaccttgtatatatgtatatatgaaacagatttggcatttgtctcatctaattttctgtttatattgatttacaactgtgagaaaacaaatttctacagaatcagcatgagtacttagtacaggtgaatattatgagtaagtaatttttcag

SEQ ID NO: 2601 - DNA, 600 bp, Bovine  MMBT14855
cagattgcactactttggagcgcaggtgatgaaatctgggtattgaattacactgaaccataaacttcatttgttcttaggtgcacagtgatttgctgtaataatgatcatccatttgctggacagctgagattttttaaaagcttgattgcttttggcattgcattattagtcccgaaagaatgcaacacatttgtagcaattctcaatttgtacaagctacagtatccatctcttaacaaatgttggccatttaagacctgtgtgttagacctctgtgtttttcttggccattctacracagsrtaagtacttttgtttttcattaacaccatcaggaatatgtacatctctaaaatttgaaggggrttaatttgagttctgttttatgaacaaaagggccaagaaaagtcccccatgaagggtacatgctgtcgattgtctttggtaaatgaaagtcaaacaatttcagacaagtccttttctaagaaatgcactgcatatctcaatccaaatactcatctgatgagagtctaaaacccctactgaattacattggatgagaaccttgatttttcacgatcactgtagaaatygact

SEQ ID NO: 2602 - DNA, 600 bp, Bovine  MMBT18126
ggaggagggggagaactgttcagcccatgaccatgtgtgagcagggaaaaggtctggtcaggaagatggttgagggtggatcagccagagtgagacagagaggcagaaaaaatccaccagcaagattcaactgagcacatcagggggctgactcagcccctgctttggagttttccagagctttcaaagaaatagatctcagaaaaaacagccccagccacgaggcacatcctccgctcagaaaggggaggaggcagtgctggccaccagggtcaccggagccctttgttagcgagaacrggccacttgaagggaaatcgatcctggctaagcatgaagcagctgctcccagccaaagctgctacagagaggccctttgcaccctctcctccggggctgggacaggagccagcaggagcctgaggattgttctgccaggtggcgggtctcggaagggccttcaatcagcatgcattgtggccgctggctcctacgtccatccaaagtgaagtttcagcatcacctgcactcaccagagatccggcctcatatggaatggttaacattatcatcagccttgccaagtgccatccatgtgcg

SEQ ID NO: 2603 - DNA, 600 bp, Bovine  MMBT19549
taacattattttaagtttgtaatgaaaagctgttataaccactacatttataatacttaaattattaaatatgtaaaatttactcactcataataaaagtcaggttgcagatagtgtatagattattataaaaccaagtatttcaagttttcaagttaaactttaataaaatgcaaattagaatcatacggttttctacaacaatttttgcccttctcttgtttagcttttcattttaaatatgaaatttttcatctccaaatgtgcagagctgggagagtcttttgattagtaaaatcrtttttatcccawctccatagtgggttgccatttccttctccaatagtagaaagaaacrtaagtcaactcagttaagatttttaaaagattaagtacacgcttagattaggttaattatattaaatgtattattttttcccctttgttaatttttacaattttttgctggtgctgggtcttcattgctattcaggctttctctaattgcggcgagcaggggctgctcaacgttcattgagatgtgtgggcttctcatttcgatagtttctcttgttgtagagcactggctccagggcgcat

SEQ ID NO: 2604 - DNA, 601 bp, Bovine  MMBT00153
  misc_feature (1)..(1): n is a, c, g, or t
naggataatatagytggatggcatcacagactcgatggacatgagtctgagcaagctccgggagttggtgatggacagggaagcctggtgtgctgcagtctggggtygcaaagagttggacatgactgagcgactgaactgaactgattcagaggaaagaagtttcagtactataaatatttgagttcatttktggcagaagccagcacaatattgtaaagcaattatcctccaataaaaaattagaaaaaaattgaaaggcattaatataaaacagctgtggtataggaagaagtgaacyttcatattcactgagctcttacctgacacataaaaataaccactatctgaattcccatttaaaaattcagaagccaaagaaagatttgtttatatactttgacacttcttctgtcccaatatgagtatccttgtcttgatatgttacaacattaacattttacattatgcatgagtggtcttttccccttagtttgaaaccaacccaaatgcaggtgatattttttcctaaatttgtttctttgctggtttcaaatagggaggaactcatgtttaaaataaaaaatgaaaaattttaaag

SEQ ID NO: 2605 - DNA, 600 bp, Bovine  MMBT02354
tatcccctaatctgagtcatctcactcaccctctaaggccatgtagctcttgctgttctctgttgcatgaagtggcctttatgcttcagaaaatttaaaggtcattttcctttctttgaaacctcactacattttattacttaaagtgtcagtttcagtaaaagaaaacagagaggtgaattgttattttactggtgataaccagagctttggggagtacccctgagagttgttttcaaccgtgggtcataatgccaatgtcccagactgagttcccttcccttttaaacaccataaacrataacccaacaatggcactgtattcctggtgtgaaatgaaagttgtcccataagaaattgcttcaccaaagaaaacatttataaataagaaaagaagtgagctcactgaataaacaatgaacattaggagagggctaaatgattttgcccttcaaagctagttcttttagaagattttgtgaaattaacatccactacagcttcatggtaagcttctaggataaatcattagatatttacctaagtggagccttttgtrgtaaataggaagcaacaggtaataccttacaaagtcccttt

SEQ ID NO: 2606 - DNA, 600 bp, Bovine  MMBT04784
caaaggggatgaggaaaaaaaggcacatgaaataagcatatggtttagattttccataaaatgtcctgggattagcccaagccacaaggacttttttttttttaatagaygacgtgccacatatgcagagcctctagaagggaaatttcaagcagtttgtttaagactgtccaaggaaggttcatgttttaaaactagcatactttactaggcttcttcgatccctaaagaagattcagggggtggggtrgggctataaatcttccaaaattgtatgtaaaatggtatgtgtatgtgcawtgtcttcagaagagaggcctttgtatcaaatttccaaaaagattagacctctgatctaaagaataagatgaatgcttcttttttctgcagacctaaacttattgctatacctgtgatcagaaacagggagtacacaaacagtgattcatcaactttcaaaggaaatatcagcaaaaaggttacyacttactggttcccctggcaggctttttcctggaggaccagcctcaccttttggacctggaagtccaggagggcctgtaatcccacctgggtctccctgaggaaacaaggtaagat

SEQ ID NO: 2607 - DNA, 600 bp, Bovine  MMBT05873
aaaatctgcactattttcaaggtccacagccaaatcccaccagctgtctcctgcctcaccctctgaatatttttgttacattttggattcttgaacaccagtggaagtgataacgaagaaaagcacaactgcttggcgtgtaaaatgcaaactttttaaaaaccaccagccactggataccttaccgagaggaatatctatcagccaaaatacaaactgattttgtcaaatgaggtcacttctttcaaagccgcaactggtggtctgaccgagcttgtgcggtgtatgtctgtgctgagmtgctgtgttttctgcatcaagagagaagacaccccaaaccaacacctctgccctcaggacgtgacctggggactgaggaggagcggggaggacggaggaggggggggtggagccatggccctgagggggcaccccctacaggaggagccagcagggccccaggcaggacttggagaccttggtggaatagcgtctcaggcctcttaagtcaagactagatgccaaaaacgtgaggcccagaaattaacttctcaagcagtcttttacacaacacagaaaaccaccaggccatctatattt

SEQ ID NO: 2608 - DNA, 600 bp, Bovine  MMBT06130
agatgagctcagcctttcttgttttcctttttattatttcctccacatccggcctttcattctgtatttactccacttatcaatgagattacatccaaaagatgaaatgaggacaggactagataatttggaaaatccttccttggtcttttttcagcttcttctaaagtatgctatttagtcccattaatgtggctstaaagctatgaataaactacctgawagagaaaagaactgcctccctgaaaatgctgctgctactgcttcagtcgtgtccatctctgtgcgaccccatagacrgcagcccaccaggctcctctgtccctgggattctccaggcaagaagactggagtggggtgccatttccttctccactgaaaatgctaagtggttctaaaaatatcttttcttaaaacaaataaatgaaaaataaacagatcacaggytcttcccttgacagtaaataaacaatccawaatagattcatcaaaaataacaagaaagatgacgcatgatatagaaatgttatattcttatttgtgttgagattaacacttcaatttgttacattgctggaatccctyactttcatctcagtt

SEQ ID NO: 2609 - DNA, 598 bp, Bovine  MMBT07537
  misc_feature (1)..(35): n is a, c, g, or t
nnnnnnnnnnnnnnnnnnnnnnnnnnnnnnnnnnnactgcccagggcggtgggggtggaggattgggctcatctctcacctgggcctcctggatggttcccacggtccactcctccccggagcggcagaggtgcgcacaggactgcagctccctcaataaaatccccagagcccccgctgccttgggatcagatacaagctcctgaagcctgggtctcaggcccccttgccctcaacctgagctgccttcagccctctttgagttgctagaatctgatgagcctttgccctcaccatccsctctgccctaatgtcctttctcccactcttcctggcaaacaccgaatagccttcaagtctttgcttaaatataacctccttggagaaaccttcccctgccatcctatctaaaggtgacctcctcacacttcctcagagcgccctgtatttttccttcagggtgcttattgtcagttatggttacacctttacttggggggttgttggttcatgtctgcctctctcagaagactgaaagcaccaccaagrgtgttgggtttaacatctgggttattctgcatccctgcgcttagcatgg

SEQ ID NO: 2610 - DNA, 600 bp, Bovine  MMBT08471
aaataaacaaacccccaaaagagaattccctggtgccttccattgcagggggcatgggttccattcctagttggggaattaagaccctgcatgctgcatgatgtggccaaaacgaaaacaaaccaaaggaaaccacctgaaatgtgacctctgtctgaagttaactctggttccctggggcattgcgacttctggcctccctttggcttcytctgtatcaagcctctgagacagaagtctcgtctgttagggcgcattctcattcgtctgtgtaccttccaggctttgagctcctggggygtgaggctggtgttttgcttatttctgaatctcyggctckcagctctgacctagcaggcattaggcactcgaagcacggtctgagataaacaataggtacgtcgtgatcatcagcggatggtggttgattccaaagcacagacttttgatgggagccttggttctgttaccttcatgccggcttgatctctctaagcctcagtttcctcatctgcaaaatgtacttgtgaagattcagtgaaattctgtgtgtaaagagcttaacacaggacactcaatgatgctgcttattattagcta

SEQ ID NO: 2611 - DNA, 600 bp, Bovine  MMBT08611
tgcttctagtgcttctgtcatatcaactccctgtagctgcttctgcccacagatccatagctggctttaagagctgtgtcctcttcctacaagtggtcccacttatctccgaaatggctgttccaagatgggggttaacaacagggctttgtcattgtgatgtttgtatctataatacattgtgcaaagctgcctttcttcttttgacattatattgtaagtatccctctatgtcactttaactcttcaaaaactttgtcctttataacactctaagacattttctaaatacaaaagcartgattggtcaatgcaaacaacttggcagaagtaaaacagaaaaacacaagggatgataacacactatttatgcttatcattttagtgtatatacttccagtattttcttttgttattttttcaccttttctttttcacttattattctttaataaatgttttccaagtgattgtgtatttttttacactatgattacttaatggctgaatatcagcatagtatctgttgtatactattatcataattttaccaatgatcatgttaaaatttaattaaaaaaacaaatgtgatgactatcc

SEQ ID NO: 2612 - DNA, 600 bp, Bovine  MMBT09282
tcctaaaggtgatgaaaatgaagtcccyccaggtttaaccagaggagcctgagattgacggtgccttctggaaagacagctctggctgcagcacagaaggtgggtcagggcaagccaataggaagcaatggggtgtgtggggggagtccatttccaagccattgcagcaatcggggcaggaggtaagaacggctgctaccaggggagggaaagagaagagcatttgagagagatccagaaagtggaacaaacatttgagggatgaaggatgaatttggagaaactctaccagaggcttcygcccccatgggaccagagaagggaggtctgacagataaaggacatgaccttttaaagggtgatgagacttccctggtggtccagtggctaagatcccatgctcccaatgcagaaggctggagttcgatccctggttagggaactagatcccacagaccacaactaagagttcccatgctrtgactaaaggtcccacatgctccagcaaagaatgaggatcccaaatgatgcaaccaagacctggcacagccaaataaataaatraaataaatattgaaggaaaaaaagcatgataagacc

SEQ ID NO: 2613 - DNA, 600 bp, Bovine  MMBT09302
tgtttaacaggcttaaaacaaaatgtgtcagagatcaagagtaagttatctgatatgtcaagtgcataaggtcaaaggtccaattttattaggtcagaggtggtataaataaaatcttatatgtcaaagaagaagggtcacagataaggtgtatataatataaagacatcacagatgacaagcaataactttaagtagaacaagtatgtttactatagttaccctcactgattaaaaatgaaatgtgtgtatgagtaagtataaaatggcctttatatatcatgtaaactcatatgcacrcttggtttgaggaaaagggggctattaccaaaaataactacatgaatgaagtgaaaacttaaagaaaatgtaatacttctaaactgaaacagtacayaaaatgaatatctcaatccaacctcaaaccacaacagctaaacatcaaactatgctgtagtagctacaaaagttatacaatactatatatttttcttccaaagtaaatgtgtgaattaaatatcccttccttctctatttttctcaatgagataaaaacacataaaatttagatttcagtttacatagtagcagtgctgcaca

SEQ ID NO: 2614 - DNA, 600 bp, Bovine  MMBT09398
aggccccccatgtacttccatgggcctcactgttcttactgattaggctgaccttagaaacacactgttgattgttacatttcttgtaaacgtgctgcrtgcctttctggacacaaatgtcatagtggcctgtgatgtgtcaggtgggcatccctgctggggattttgtcacgagtttttaagggccagtgactgaagccccaacttggtggggtcacaggcaccagcttggccaagggggacttcctctgatttgtctggaaatagtgacttccttacagctgcacagggacagtgtckggtgaacgccaactacaagcctccaacgtccagttccaacgctggacaacctggtgaagggtcagatactggaaagaggatagcgttcctcatgccaatctgttctaaggagcctcaggtcccgctgccaagatggtgtccccgcaggccagctttagggagctgtccacactctgacagcagctgtggttagtccacagcacataggaatgacgaggctggctgtcttcggtgccatgggcaaagcgttcccaggctgccctccctgcatacctcagagctgaccgccctcacagttgc

SEQ ID NO: 2615 - DNA, 600 bp, Bovine  MMBT11869
tgtggtctctggcaacgagcgcatttctcaagtgaaaagataaagacagaaacctattttaaaattaagtctcagaggctctcaagtgagacycaagttttgaaaagtaattgcacccccaaagctcaggatttccaagaaatatttattttatttttcatgccaataggaaagcgggacaccccagagttatgcacaaaggcattttcttctaccagcacaagrgatatacggccaaggtgaaaagtatagatctgccttaatttcttggaaagcccttgaaacgtaggttcagattcyagagacttcacatgagtctgccttccccaccctcaaggatccgagttgcacttgctccttcttggtcttactcygtgccctcttgcagagttcatatacagagcctataattaggcgttcaccacgcttgaaagcatatgttttccacaaccataccactaacctcagaaaacatactctacataaatagacaaaaggccacgaagaaagayttgtttttaagttttagataatttctatcacagtcaaggaatactgttagcagagactttttttggtaagaaatttaattactgcatt

SEQ ID NO: 2616 - DNA, 600 bp, Bovine  MMBT13679
ggactgtgggaactcagggacctttgttagtaggagtgactcctggtgggatttcctggggcagtgctgggaggggagggcgcacctgaaggtccagctagcatccccttctgttcccagtctctccacagcagggcagcagctgccctgagcatccagttcccagggacctgcctgtgggcctgtgtttgggcatctgagaaacggcttcccacagcccccatccccccaccccctgcccgctctgcgcataatctgaatttccgaacagtcattatctgcratatttaatccaaattygcttctctaccctcctccgttwccccttattaaaataattttagagttttagtaacaraggtctttttcaaaggatttctgataagaagtggactctcaagaagccttttgggaattatggatgtagcatgtgtttgctsatttcatgaagataagatttttccttgaagataagtcgatctgatgatcaggacacacaagtggtggtgactattgttgatattcatacasttcacctgcagtgctgttgtgtattctgtttgtagaatccacccccatacagttggagggcttttttat

SEQ ID NO: 2617 - DNA, 600 bp, Bovine  MMBT14865
caatctttgaactgaagatttctctattttacttagaagcaaatgagcaaggctttccagggtagcctgratttagttaatcaatcgtggaaatggycccattcaactagaataaaattccaagaaaaaagatatatcttagggtaaggggagttaartgggggaaaaaaagggaaatagaagttcaaaagccaaaaattttacttgcatattttrtccatcttctcacctgctgtttttatcttttaattttttatctccctaattgtgtcatcagggagcattctatgcttcattgtrtgatgctattaaatcttaagttaaaaaataattttaaatctctgccacctgaattctactttcctatctagatcctgaggttgaatgatattgaatggtagtctgtgcgtgtgtctgcatgtgtccttatgaggttttcaagctaaaaattttttgctacatctgctcttgtattccataaatgacacaactggaacattggagataagttatgtattcgatttatctatttaaataatttgggaattgccttgtgaggcaattcactggagaaaggaggaagtcccccaggagttgatc

SEQ ID NO: 2618 - DNA, 600 bp, Bovine  MMBT15564
gccttccattgcagggggcatgggttccattcctagttggggaattaagaccctgcatgctgcatgatgtggccaaaacgaaaacaaaccaaaggaaaccacctgaaatgtgacctctgtctgaagttaactctggttccctggggcattgcgacttctggcctccctttggcttcytctgtatcaagcctctgagacagaagtctcgtctgttagggcgcattctcattcgtctgtgtaccttccaggctttgagctcctggggygtgaggctggtgttttgcttatttctgaatctcyggctckcagctctgacctagcaggcattaggcactcgaagcacggtctgagataaacaataggtacgtcgtgatcatcagcggatggtggttgattccaaagcacagacttttgatgggagccttggttctgttaccttcatgccggcttgatctctctaagcctcagtttcctcatctgcaaaatgtacttgtgaagattcagtgaaattctgtgtgtaaagagcttaacacaggacactcaatgatgctgcttattattagctaaacctgtctcagtccttactttaccctgaggagt

SEQ ID NO: 2619 - DNA, 600 bp, Bovine  MMBT16097
atgccttttagtggaggagaaagcaagtgagcacagaaggaaccatctcccgtggtctagggtggagccggcctcagccgccctctaatagtggggcggtcgctccaggaagctgccgagtttacgtgcaggtgagggaagagcctgtgggcctggatggcagcggggaggaggccactcggccttgtcgcattattggctgtgaacagtctgagactgcttggccagacgaccccagaatccttacggtaacacgtaggaaagtacagagtgaagaatcagttaggtgctgtttgtcarggttctagacaagtgctggtacgtggcatggggtcgggcagtgcagcacagcctcaaccagggagccagcctgccttgctctgcatccctggtgggtgtggccatgagggggaagggagaggagtcagctcagggcagctgggatccttccttcctctgtgaggttcccctgcagctgctacaagtcgacctccagctgggggtggcctgcagtgccttccatggcaggtcttcaccctgaggcctgcccccggtctgtgtgcctctcgctggctgctgctcagagtcagtgtcctgtca

SEQ ID NO: 2620 - DNA, 600 bp, Bovine  MMBT18609
ccaccctcaccacactcaccatcttttgaactatgtaatgagattttgtattgtgtcatagtcctttaaaaattgtttcctaaataataagaatctgtgtcctttaagtgtgagtgtaaccctcactcaaggggaacagctgtaagtgaaagaattaaaagcagatggggctaggcatggtcattcctttagggagagctggagagtgcaagaggaccagaggaaactattaggccaggataaattaattgctgcatgggagccatgaattgctattggagaagccctctggtgttaatyaggcaattaacacttgggttaaaaatagtagctaagttcaagttgaaacagatagggttgaaagcaatgaaaatgctctgaggcaattaaaggtgcatataaggtgaaaacacatatattttaagaaactgaactgctaaattagtaagtgttcatacaagattaaaaaaaattcsctctaaccatggtattacatagataaaagaatgtaacatatagtattgaagaatttacttaggttaaaagacatgggtgggtggagagcttattccttcatctgtacagtacttctccacttta

SEQ ID NO: 2621 - DNA, 600 bp, Bovine  MMBT19091
aaaaacttggagaatgaactagaaaatgttttatagggcatttttttgtaaactgatttaaaacttgcatgacttccttcattatgattatactgacaggaaacttgtgttgtctaaattctggaaaagatacatacaacttgaaagaaatattaattttcatccagtcaagtaattcctcagaaggaggaatagctagtctgtygggtcttgtgacttcagtggtgcctttgtaatctagactgtcaaggccaggagattactgtcattttgcattttgtgtattttgaggagttttaytccattttcattctcaattcctttccatttcataagccacaactaattatcttaaccatttccactagtaagaactgrttgtrgytgtggtgttacagatcttgcctgttttctttccaaatttcttatccacatgcttcacgatagtctctcgcctcttctttttgcccccattctctcgttttttgacttctgaggactccttgatgacgatggaaaacagagtctctgcctcacattgtgaaatgtgcatgacttagctactattccaacaaacatttctcagacagtgtgggccgg

SEQ ID NO: 2622 - DNA, 600 bp, Bovine  MMBT19246
aataacacccgggttgcctgctcctgagagcatctgcatcactaggacagtttgataatgagattttgtataaaagaaatggacattttttgagagaagtcatgatgtaaagtgtattcttagtaagacatataagagaagctgaaataaaatccttgtaaatttcagtggtgagactatttccagaattagagctctctaattaatgattttttggaacttgttttaatygaagtcctcatatgtcaactcataattttactgggacytataatttgcaaagtgcttttaaaatttacyckcctccccccaaatcctatataataaacaactaatttcttctgagataatttattcttagctcaggctaagaatgctgcttaaagttttatgaaacatctacaaacataacagatcatgcycattttcttagcttttattcttactttgttcccttggcctcaaatccataatttcctgagggcatttcagtgcactttaccttagagaaaaactagttaactacgtcctaatctcacgtcatgagaaattcacaaaccccttccagtgaatgcagactaaatgctgtatctggrgatc

SEQ ID NO: 2623 - DNA, 588 bp, Bovine  MMBT19570
tgcattcatctctttgcacccaactaggacaactttttacattacacagctcagtctggcttctcaagggcctgaactaccagaacacggctttagytcmacttttgcatttttttctagctagtagttacccamactgagagtcyggattccctaaagrcaaaagcaagcctatgctaatataaaatgaagttttgaagtaacagacctttcttaaagaacttcatagataatttttggagggggtgggactcaaggtcatataacataagcttagttcacaaaatacttctttctagytatttyttctttctttgaccagctttatccattacttccacttcaaacattatatacacactgataaattttagaaacagtattttaaatctcatgctttctttcccaagtttctggcccatgttaataactatgcctgggcacctcaaccgggagtcctacagagaatggaaacaattcagtcttattttcaagaacttgttctatcactttttaagttcctgaccttatcatccattcttctgtcaaaaacctagaaggcatcccagaatttccttctttctcata

SEQ ID NO: 2624 - DNA, 600 bp, Bovine  MMBT20818
gctgctctgcctccatcttttggaaggcagctgccttgctttatataaaggcctgcaaagtcccagggggatttctctcagccaagtccrtgctctgactctgatgtattgtccctgagcacattgtcaagtcctatagaaagggttggcagttggagcgagacttactctgtcgctggagtttctcagaattctaatctatcaagccagcccatgcacatacattaaaagtacattaaattttctgtggatttctctatttttcccctatgggttttttttgttgttgttgctttgccrtgactgaaagtcattgtgtaggagtraaaatatcttctaagaggagcttgtcacttgctagagtttaattcatttagattctttgcattcttggcaatctaatgagtttaaagaaacaaaagaaaacaaaaagcacttctgtccacctgaagggcttgwcagtttctagttttgcttcagttcagttcagtcgctcagtcatgtccgactctttgtaaatcctaactatgaagtaattttttttctagggagcaatatatatcagtctccttgttctccctctgcactttattctcattc

SEQ ID NO: 2625 - DNA, 600 bp, Bovine  MMBT21116
cgaggtgagaaacatcaaacaatgaatggcatgaaaaattttaatttagataaaactgaacctatgttacattacagagctattgtcttaaaaaaaaaagccctctactctaaataaaactatgccctctactttccaaacgaagcaatattaaaaccttatttgtacatgtgcctaacgtcatctaaatctcacaaaaatactgaggtactcrgagtatcataactgtcttcttgttggtttaactaaagagataacgtaggagattcatagacttgccaaccaggagccatccctatyatatgactcckctaagatctaagtcctcagttttgttctctgaaaaaagggggatgatattacttcaaaatattcttaaagctgctgtattttctctcaccatagattagtgttcacgttctagaatgtaacattattctagtttttaaaattcagcctattctgagtcattcatgttgctgaatgaatcaataatttgttcctctttattgctaaataaaactctactgtgtgaatataccacaatttgtttatccattctccagttgagggacatatgcattatttttaattttggct

SEQ ID NO: 2626 - DNA, 600 bp, Bovine  MMBT00624
taaagaaccccaaagtgagggagtgtcagaagattggagggtagtgggtgagggaggactggttctaggaagggactaatgggcgacactgagcatgcccaagtgtttccaagcaccgcagagaaaacgcccccttaactcggcctacactgcgactgcggctcagtgcccagctctgaggatgcagaagaatcacccctctgccctgggatttctccagctggtggggaaggcagatttggacacaagtaaccatgctgcaacggctgcgtgtgaggaacatgttgatcagatgtacaytgcttgcattgggggtaacccggggcacagtgggaagactgactgcaagtggaagagaaaggaagggttcttggtggtaatggctttggaatggctttgaagaagggtggggtatatacagatggaaatggggacaagggtgctcaaggaagagggaattgcctaagcaaaggcatgaaggcaagaaccctctggggatgctggagagtcccacatggcccgcaggtggccataagtggctgtagatagctgatttgggcctctaggcagaactaagggccgttccccactcccacagcg

SEQ ID NO: 2627 - DNA, 600 bp, Bovine  MMBT00625
ttaggatggactggttggatctccttgcagtccaagggactctcaagagtcttctccaacaccacagttcaaaagcatcaattcttcggcgctcagctttctttatagtccaactctcacatccatacatgactgctggaaaaaccatagccttgactagacaggagggtcagggtctaaacaagcccattccaaggcagttttacttcaratgaagagcttccataacrcttgacttcccctccagagtcctcctccctcctgattctcccagtacctaaccaggctttgcccatggcwgcactccacacacacaaaccatctgtgcctgtcctagcctgctcacccttctgctgcagacctgccagcctggggggcrggggtggggggtgcggttggctaatgtcaatctgggaacactcttgttccaggcttttaggcaatgactcaattttcacagctagagctcaaaactcatcacataaatgtatgactgtggggcctttttaagtattgtgaacacctaggataaggggataaaaaataatcattccaaagcatcttaatcaaaatgatgcaggatcctttttcccaacaaga

SEQ ID NO: 2628 - DNA, 600 bp, Bovine  MMBT00682
tagagaaacagaattttagaggaggcaggacacgtggtgcctggaccgtctcattatttggttggtgcaggagcagtgtgttcaagtgctctgtcgttagtggcaaagctggcaaagcagatctgagtccagtgccctttccaccacaccatgatgatcacttctctttttaattaaaaatgccctattcctggccccttattgacaagttgttcatagctcttaatttctggggttctcgaaactgtttaatgagcatatctggattaaatccagatactctgacgataaatggtgctyctttcaagatacctatctatgtaagtacagcagagaatccataagttccccatcagtttccccattttaacatcatggctcttttcccgtagccctctgagaaatcagttctatatatatacctctgcttctttctgtcaccatctcttgtcacacatgctcctctgactatggatgccacttttaaaataatgatagctagggatcaatactgaaatattttcaataaattcttatttatcctgtaatatcggcattacagagtttctagttatgtatttaacaggttttccttttctc

SEQ ID NO: 2629 - DNA, 600 bp, Bovine  MMBT00748
gaacaaggaaatggatgcaaagaagtccttaactacatgtgtttaatgatcataacaatttattataaaatgcttagagctacagtcatgctcatgggatgaatgattttcacaaaataaaaacagctgtgggaaaatcacaaactgtaacagtatcaataaaagcaataaaatgaaaagatgtaccttgaagtattattcaagtagatgacgcatatacaattagcttttatgctatatatgactcaattaaaatgcaattattaaaaagttgaacatataaacagtatcagccaacawaacacrtgaacttttttaatgcattggaatatcttgatcaatatgtacttaaaaaaaggttgtattatactttctgctttacaacttgctatagaacaagaatagaaaatgccacgtagatagggtggaggactccaggtttcacatgatagcatctgcactacgactaatagaaatggatcagtgttgattaggagtaaaagctgatggtaacatcggccataaatgcaaggcaaatttcatagcaaaatctaaaacagataaacatctactgcatattgttacccatatttctagaaa

SEQ ID NO: 2630 - DNA, 601 bp, Bovine  MMBT00807
  misc_feature (1)..(1): n is a, c, g, or t
ngttatcaaaaattatttttaaaataatttagaagattgctgataaaagataaatatgaaaaagtaaattatatttctgtactccagcacaacaaaagttagaaaagaaaacattttaaatatgtagtaataatttatgataaatacaaacaaaatataaaatactctggaataaacttatgaaaaagtatagaagacctttatggaaaaaaacattctaaaacttttttatcaagagattatcaaagaagacaaaawaaagtatggtttctaaaaattattctaccttaaatcttctatktagtacctccttcaatttcagattaagtaccagttcctcagayagttcttatcagaatagcatttatgtacagtgtaggtattttttcactrttctctccctctcagtcygctgttcctctccttaacattcattaggacaatcattttatgtatgtttatgcamtttcctgttacaatataagttgtaacatgagccatgttacatgtttgaccattctatccttagtacttactacttagaaatgtgataagtatttgtagaataaattaatgatttcaggaaggtgaaatattagta

SEQ ID NO: 2631 - DNA, 600 bp, Bovine  MMBT01002
tttattctgatccttgctgtctggagcatcttccagcatattmacttatgactttgaaaggtcacatatttggttttataggggcctctatgtcaaactgggctttaaaatagcttatgcttttkcacttagaaaatctgtacagtaattctatgtatactttattgaataactagattttgaaggtaaaatgaagaatgtgtgtagtctgaaaggtttatactcttccttgatgttattagcaatgagaagtttcctatgaatgaaatcattgttaaagtttgttttccgttttgtttwctttgcttctgaagatgttttgaaaccttgatttctgggaatggaattctttatatgcttcctaggarrggaaatataacacatcacttagaataattcrtaccagaaaagcaacatccttcttgtccccgtaatattgtagtggaacaaatcacccatcctccagttcaacgacaatgagatgggaagaagaggcatttgttttgtacaaattaaatctcccaaatgtattttttaaaaatagcttcattgttttcaaatacacatggtgatttagggtgatgctattgctatccttag

SEQ ID NO: 2632 - DNA, 598 bp, Bovine  MMBT01267
  misc_feature (1)..(139): n is a, c, g, or t
nnnnnnnnnnnnnnnnnnnnnnnnnnnnnnnnnnnnnnnnnnnnnnnnnnnnnnnnnnnnnnnnnnnnnnnnnnnnnnnnnnnnnnnnnnnnnnnnnnnnnnnnnnnnnnnnnnnnnnnnnnnnnnnnnnnnnnnnnnntacatgattctggttgactttttcgttatccagattccacttgaccatcagagtgaccacttgacccacccagagggtgctcatcattcttcacaatggttatatcaacacttgcttcttaagatatctctccacgtgagattgatgggatgacacagcaygtggtgtgcacatgacaatcattcagagatatgggagtgyattagatgtctccccttgagtcaacaacayactcagatatcccagtcttttccatattgtgcctatgtttggacttctcagtcacatcaccatcctaaccatattctagtagtttttcagtgtstctgcttttgtagtrtttccccacttattcatatctaagatttaatcaccaagacrtattgaagacatctttttttttgtatgtttgttttgatagtgtaaggaaatgtagaaacatttgttcttgggagataa

SEQ ID NO: 2633 - DNA, 600 bp, Bovine  MMBT01282
aatcaaagaaatggattttctttgtgtgtggtgaggactcaagatttactctcctaaaaacttttgtatttaatatagagcagtgttaattttacatattttgttgaagagaaagtcccaggtcatcacagttttaatatgcactttataactggaaatttaagtactgtttgacagtcttcattcatttcctcctccctttactccctgtctctggtaaccagaaatttgcttcatttttttctttgtttttgaagtrtaattggtctgtactatgttagttcctgttatacaacytastgagttttttttctgtgcattttgaaatgatcaccacaaaaggtctagggtgctcaagggaggaggtgagatcagtgtcttcctactccactatcttgatcacacttttgtaatcattccactcagaaagcatgttgtataccttttcagctagatcctctagcatttttatcctaggaattttcaagartcagtctgacatttcatcatctagactatctctggttctgctttcattgactctttccttattgttcacaggttacattttcttgattcttatttttytttttatcatat

SEQ ID NO: 2634 - DNA, 600 bp, Bovine  MMBT01283
tcccgcatccaagtagcctcattgaaagtgctttgtgccgtgtttcaagccttagagttaccgtgtgcagagcaggcatccttgggcaatgagagcagggcatccctcacctgggctccctgctaccctgtgcctggagcgctcttggctgcarctgcttcgttgagcttgaggaatccaaagctgtgtgcagggaccaggagcgatgcagatgaaatagcacaaaacagaaaggttaacacattctgtcagctcccactttacattcacagtgaaaacaacaatagaaacgttctcaascataaaagaattttctactccaactgctccgagaagaaaaatgcctcacaaacagcatcttcactcagacatcaaactgcttggctgacagcattttaatcaaaaactccaaagaaagatgagtggaatttacaaagaaacaccgagagaaaataaatgaagacattcactgcacttctgtaggtgaagagtcagcagagccttatgcttctgccctggaggctcacagccctgtcatcggaccaattactctgagttcgtggatagtgacccaagcagcaccagggtcccttgggacat

SEQ ID NO: 2635 - DNA, 598 bp, Bovine  MMBT01587
  misc_feature (1)..(74): n is a, c, g, or t
nnnnnnnnnnnnnnnnnnnnnnnnnnnnnnnnnnnnnnnnnnnnnnnnnnnnnnnnnnnnnnnnnnnnnnnnnntgcttgcatttaactcttttctttgcagattgtaaagggcttgagagtgtttttgaggaactgaatgtctaaatcctttggaagagctgtcaaagtgggatagtgtagttaataggatgaaaacttggggaaagacagacattttacctattttatcatgtaggactatggggctttcctagctcctcttattatgtttgcagtgttgcagtttcatcacatctayatgtgatgaacattaattattagatcttactattagacctactatctgatgagcctgatgggaaatgattatgaaatccttggaagttatgaccctagcctttgagaaccttgtaatttgatattctttccttgactcatttttagatctgtgttctacccttatccctgataccaaatgtcacctcatatccatttccatcttgatattgccttacagaaaaactctaagcaagacatgaatgataacttactmtaaaattcccagtgaggtcattcttcatctttcattttgttaa

SEQ ID NO: 2636 - DNA, 600 bp, Bovine  MMBT01823
actggagaaggctgtgagttgctttagaatgagacaaaacggtgtctcctgtgctttctgaagacgggctgctctccgtgtgggcgcttctgtgaagctctgtgtcacccacaccacccgttacagtgttcacaacattcacatatctgatccggaggaaatgtagctggtgctctgtttattcctgttacctcctgtcttgaagcaaaatgccagtgcttcaggcaacccggagtggtaaacatcagctgggaagaagtctttatttagagaatttatcacagaatgaatttttgaagrccaattattaagaaagtggaagcaccatttataaggtgtaccattggtacaagtagatatttctaattatgcatttctgatgcattcatgagcagcgtcattgctattatggtctccaacacatatttgtaaatgatacacagattattccactttggatgcccaccaattgtgtgcattcacaaaacagatttctgtgctgttaaggagatataatataggctgaggatttgatacggtgctaataaaattaaaaaattttaaaaacctgccaaatgggtaagatgtttgcgctatcat

SEQ ID NO: 2637 - DNA, 600 bp, Bovine  MMBT01861
agtttttattcatcgccatgggacctaacctccacatataaaatggcttaaatagaaaaatatgttttgaaaagcaaaacaaagatgtaaaaaacgattttgaaatatccattcataggttgtgaactacctgtaagggttaaatcttgtgtttcctaccctgaacgtgccgaagtctgttttccaggacacttggttgacgccgcaggagcattgtcttatttggtgtactgcgtgtcccagagctcagccagccaggcagtagcaccaggaacagcaacactgaattttccctcctgrtccctgttcatggaaccatcaaatgtgcccccagagcctctccatcacggaggcagcacaaatcactgtttttatcaggtccactgactcgcatagcctggtttttctgcacataaagaggtgcaacaagtggaggatttaatggcccagaattcagctatagatattcccttacgttttcattttactataatcagatggttttctgttgctgctgctrctaagtcacctcagtcgtgtccgactctgtgtgaccacatagacggcagcccaccaggctgccccgtccctgggatcctc

SEQ ID NO: 2638 - DNA, 602 bp, Bovine  MMBT01942
  misc_feature (1)..(2): n is a, c, g, or t
nngctcaacctcgcctgatggctgtagatattacacctccagctcaaaatggaactcatccccctgtgctcacttccaccccacttcggtaagatcaagtactaattctctacacccgcccaggkccacsmgcccagaggcaccgactccccagcctcacctccccactgtcccccagctgtagaccctctcctttccacctgcaccgactcggcccaaaccagagccttatcgagtctggagagatgctgaccaaccggrttaccaagacctgtctcccctacccatcttcaacctactcstgatcmgcactgaatttttaacctattggcatccttctctaacattaagatagaaaacagcagagaaaccaggtaggttatttttaaatttcaagaatcagatgtcaaaaatggtttctaaacacctctcaactcacccatttccatggatattaggtacttacagcactatcaaattcaatgcttgtaattcctgcattactgccagacagggagcccttgaactcacatttgtctgcataaaaacaaagatgccaacataccaattaaaacgaggcacttgaaacacaagggaagcta

SEQ ID NO: 2639 - DNA, 600 bp, Bovine  MMBT01945
agggcagatgagaaagagagcagcgaggagcatcaaagctgagagcagaaaacatgagagcacagagggacaagaaatggatgaaacccacttattaaaatatcgagattctccctggtgtgctgcttacagaaatacccaaaggggaggaacaaggacaggaataaaggaaaagatgaacaaatacacaacgtgcaaagattagcacataaagagaagacatggaaatagaactrccaagaaattgaattctaagtaaatactatgtaatggggcaaacagggccatttttaatggacwcaaacccaatccaatatgagaagataatgatggtagagctttacatgctggcttaagccraataaagcaaaaattattgtaattgcaaaggacattgaacagaagagygattgtaagattttaaatggtatggggagggaggagggaggagggttcaggatggggaacacatgtatacctgtggcagattcattttgatatatggcaaaaccaatacaatattgtaaagttaaaaaatwaaattaaattwaaaaaataaataaataaagcaatactgtcagctcagaagagatcaaacac

SEQ ID NO: 2640 - DNA, 600 bp, Bovine  MMBT02283
gttgccctggagaacagtaaggaggttcctcgaaattaaaaatagaactatcatgtatgatctagcaatcctactctgggtatatatccaaaagaactgtaatcatgatcttgaaatggtatctgcgcttctctgttcactaccatccaaccatctcctcctctgtcgatggcatcaccgactcgaaggacatgagaytgagcaagcttcaggagtaggtgatggacagggacccctggcrtgctgcagtccatggggtcgcaaagagtcagacacaactgagcagctgaactgatgttyactacagcaatattcatgaataccaagaaatgtaaacaaatatctgtcaatagataaataaatataatgtcttagccatttaagaagtaaatcctatctctattttctacattctttttgtcttgcctaggcatgctttgaaagaatatgaatatagctatttcactgattgattataatattccttgatagattgactcttaatggcttataaataatccctatccaatccccctgattctcaagtgtaggataactgataaagacctgaattatttcagatcagagaaatagctggat

SEQ ID NO: 2641 - DNA, 600 bp, Bovine  MMBT02314
tgttcctcatgctgacacagacatacactcgggcagttaaactatagccagtcttctatttggctccaggtaaaggaattaacagcttgtagggaagctaattagatccaattattattcaactgacctaatttgacattcaatgtctgggaagaagtcatatgaattaactgaatagagatttaactactatatacatatgagctccatggataatttattcctaatgaaactcatttggagaagaggaatgtactgattgagacaaaacaataaaaaaaaaaaaaaaaaagagggagrtgatctaatgcaaaactcctaaaggaatatgagagtgtaacataacttgtattcattcattcttctactcatttatgtattttttcaaagcaaactctttctgtgagtaaaacaaaagccyttaattttatttttaaaakcctgagcctcaatttgcttatttgataaggtgattagatgaactgatcaataagtcctttcttctatggcatttttttctcccaatatgtcatttatttaaaatggtaactagatgtaagacacgcttcattttgtrggttccagttggtaagtaaaatc

SEQ ID NO: 2642 - DNA, 600 bp, Bovine  MMBT02603
ttggccctttcccgcatcctgctactgccctgatctgggaggtcacttctccatgccttggcctggaaggcacttgtcacatcactttggaattgtcttctgtgatgctctcccctcctagcttctgagctatttgagagcagtgaccacatcttactcgtttttgtaaccctagtgccaagcccactctgaagcttcacaatgctttgtaagtgactgaatggtctgggttttcatatcctaactgcttctctctccacagcctgtcttctctcacacacagcattcctgctgtcatcyaacgaatctgtcttaagtgctccactgaaaaacctgctctgatgtcttcaatgactcccattgctctcggcatagtgttgaaccagcattgtctgccttcctacatccacgtctactccacaacttactggctcaatcttagctaaccttctaggtggtctgtgaaacaaatcttgctttggattttcctctyggccattccacattctcttgcatttctaaaacgaaagagattgggccagccctctctgcttgtgcttaggctgttctcctagttgggaatatccctacctcctactt

SEQ ID NO: 2643 - DNA, 600 bp, Bovine  MMBT02617
tatatggaaagaagataacttctgaattctgaaacacacctgttaccaagtaggaactgtttctaataattgttatgtaactttattcttataggccaaagagtgtggccagatgcaaaacaagtggctgatgataaacattcaaaatgtacaagactttgcatgccagtgcctcaaccgtgacgtatggagcaatgaagctgtgaagaatattatccgggaacatttcattttctggcaggtgggagagttaatcagacattttatagcattttactttggtagtatgtggtttctagraggaggaagtaggttataagctgaaaaaaaatagctgaattaaattattacatatgaaaacatagagctacccataatggctaagatagtaaagacaaaagaaaattagagcatcagtgaagagaaggagggaaaaacagaaccaagccaaaaaaaaaaaaaagaaccaagccatataaccatatagtacacatacttgagaagaattttaacatcattttttaagcatcttgaaaagagtgtatagctatactgtttaacagaaatgtaatatgattaaaattttattgtagccacatt

SEQ ID NO: 2644 - DNA, 598 bp, Bovine  MMBT02901
  misc_feature (1)..(96): n is a, c, g, or t
nnnnnnnnnnnnnnnnnnnnnnnnnnnnnnnnnnnnnnnnnnnnnnnnnnnnnnnnnnnnnnnnnnnnnnnnnnnnnnnnnnnnnnnnnnnnnnnnacaaattgattgaaagttatttcttgtttctagcaaatgagattgctttctaccctcacaagtgttttaataattaattattaagttaaatttttatgaactttagaaatgtaactcaaaatatatgaacaagccttgagcatattttaaaataattgatacagttattagaaggtataaatttttaattatagttgcctttgwgaaaaaaacaaggcccagtayaacctcatttttcccttgaaggtgaaatcctcatttaaagatactaattctaataacattggccaaatgtacggactgagacatttaaagtaattatgaatttgtaagtgatgtaataatttcattttgagaagattttttttacttaatcttctaaggcttttgaacttccctggtggctcagatggtaaagcgtctgcctacaatacaggagacccaggtycaatccctgggtcgggaagatcctctggagaaggaaatggcaacccactccagt

SEQ ID NO: 2645 - DNA, 600 bp, Bovine  MMBT03030
gtactcatttgggtgtctacctcattctccctctgtctaggtcatcatatcctattggatatgcctcctgaatagcttaaatccatatattttcacagtcagtctcctggtctaacctactgaactgccatttcttgataactccctaatccaggccaccaccctctctcacctaaaacgctacagtagtctcctactccttttattccattcttgacattatagcttagagaagtctttaaaatgtagcatgtaaatacaatgatttctttttctacttaaaccattcagaatcctctktcgttactaggataaaagcaacatccttaaacatgaactctttctggccaaacttagcatcttcatcttcatttaattatctccatttaatctctgttcttcccacactggatacctttcaattcctcaattcactgtccttcttcccacctcataaacttttcatattctattccctctagtggattgcttcttcacttgattacttgtcatttacttacaatagcttttcctgagtctcaggaccagattcgatacccatactaagtgaaccctgctcttaacttcataacaccgagg

SEQ ID NO: 2646 - DNA, 600 bp, Bovine  MMBT03054
agaatcccagggatgggrgagcctggtgggctgccctctatggggtcacacagagtcggacacgactgaagtgacttagcagcagcagcagcatgattactcttcattttaaatttcaacaaaggtgtagaaagtagtactaagcaaatgtattgyatgagttatacaaatttccatgggtttgtgataaactgagttcttcagatttaagatctattttattctgagtcatttacaacttaacactggctctgctgccaatcaaaatgacaactgcaaattcattcatgaacttgatcygagaagagaaatccctacagatgattttaagtaaagggaaagtagaggagaaaattacatctgtagaaactaggtgttattgtccattatggttgctaaaattactagcagttcgtcagagaagtgagtgaaatggatcccaagaactggctcataatttggaagctgagattagaaagagaaagcttaagatccatatgacaaatatatgtgagctagagtggcacagtttctcatctagaaacaaacaaaaaacacctgaaaagaaatcttaatagaaaaccttgaacttttgggaga

SEQ ID NO: 2647 - DNA, 600 bp, Bovine  MMBT03076
aaaaataatccatagaagtctataaaatattaaataattttggtttatctccaatttttactatttcttaagagcctcagaggaaaggcagtttcaagcatttgagctatcttaagaaaaatgaatttttaaaaaatccaaagtattattcacataataggatgagctttccataaagctctagggtaaagcaagattaggttacatcttacattcactgtgtttagcaccataaagcatttttcacacacttgcagactcggatattctatgagctagtctctgagatattccatgaartcaaacaccaaggactgtctacaaacaaggaaagtgtgcattaaaagctactagctacagggacttccttggtggaccagtggttaagactctgtgatcccaatgcagggacatgggttccatccctggttggggaattaagatcatgcaagtcacaaagttataataaattgtaagtgttagttgctcagttgtgtctgactctttgcgattccatggactgtagcctgccaggctcctctgcccataggattctccaggcgagaatactggagtgggtgccattcccttcttcagggg

SEQ ID NO: 2648 - DNA, 600 bp, Bovine  MMBT03628
ggagcttgaaagtaaaactgtaaatgatcccatctgtgattcttggctgatgattcctctggggtggaccaaagagggggaaatcagaagcaagggtccgctttgctttaaacaaaatatcgttacccttctagcatcttcctcgcttggggtattttccaagtgaaagttcattaggaagacacgaaagcacgttttgctaatatccatcaaagagagggggttcagtttcaaagtgcagaagaaatacaatagtgttgaagcaaaatacatgaaaaagatcttatggcccccgcaagygagaaagaaacagggactggtgacttaggtttttttttttaagtcaatctttatttgggacaaaagattgagtcccaggaaaatgagtgtctcctgggctttctcttatttacattaggcagcctgaaccaaacattttggtgtatttgtaaatgtttgggtttcccatttcatattttctcctgttggcaccaaagctgaagggctcagaatttctcaaacaaggttcttacccacggtgatgactattattaacatgtattgatctagaggatatacagaaacaggattaagtgcaga

SEQ ID NO: 2649 - DNA, 600 bp, Bovine  MMBT03764
ctaaaatacttactagatcttaagaagatataggaaccaaagttgtatttatttttaatacatctggtaaaccaggcaaatctttaagacactgtgtttgtcactgcacttcaagcattgtcagttcattggatttcatgatgtctaggatgctttatactcattgaagatgcaatttcttctattcttcttttacataaatattaatataagagttaggcaagcatccaaaaaacctgtttgacttgatttgtttttctcatcttcattcattttttgcttcatttatattctcctttmtcctccctttgaatataaaatgagttgcttcttaaagtttctggtatagtttagcatttattttttaagtaactttttccatatgtttgtttttacctccatgaagtctctgtgtttcagcgttcttcaccctctactcctaaactaaaggaaaacaaaagaaaagaaaaactttagctttccttgttgtgtttggctatgatctgtaaaatcagtcaatcccagctctctaccctaagtttataattttaattagcttctgtataaaatttccctcctgactccattgcccagttaaaa

SEQ ID NO: 2650 - DNA, 600 bp, Bovine  MMBT03785
taacaggagagaacatgtaatatctcaaggtttatttctattttattaatcattcctcctgtattacagtatctctaaattaaacataaattggttgctgtcaaaattccaggttttaaaaaaaactattacataatgactttgaacttgaactagataatccacaattatttaccatgatttctgaactcacgtgaatacaccctgagaacataaagagcttcagcactgatgctatttttacacgagcctagttggttgatttgttttctttggttttgtttttcgctaagaggatayaggagagtggttattaacatttttagacttaatgtacaaaactctcatgtaagttgtacatagttgctatttcatgttggcaaacctgacaggctttcatcataatatagtgcattaaaatccctcatttgactaaacatgggcaaatggcaaaccagctggttatgcaataatccagatgagcttaaaagttctggagaagagatgagttgctaaatgttgtgactgaatcaagattttcttgtcaaacataattagctgaatatggaagcaggtcagcagttagactgttctgtccgt

SEQ ID NO: 2651 - DNA, 600 bp, Bovine  MMBT04165
gaaataaaacaatatttggggtaagtttgtgagattctcttattgctctaattgcaacatgtaattctagggaaaattagggacttggctcattcaaggatatcacattcgttagaagaaaagagatcatattaagtcagtggtagttttaagaggtagacattgttaaagatatacatttgaaggaatagttggaggcagtagaaatggacttattagttgccttttcacagcctttctgtataatcaactccatttttttataattctgaaaatcaaatatacattgttttatttctrtaaatgatctctgtataataacagtttgtgatggaccaaatgctgttagataatgtaaatagtccaggttgaaaatacaggtatgttgataaagatctataaatatgtaaaagcctatacagaatagtaatattttactggcaaagagaaaagtgtccgttgacagtgcatttttcagtctattctttctgagaaagtctcagattagagatattgtaagctcttacttaagttctgagtaagttgttaatagctgagtgatatattgttttaaagaataaaactattatttattgtcag

SEQ ID NO: 2652 - DNA, 600 bp, Bovine  MMBT05503
ggcattttaaagcctggcctctgacccattgtaggtagcctgtctaccacaaggtagactcagctttaccatgcctaaacaaacttgaaattccttgctgtaaaccctgtcagtttctctgccaggccaaataggtcaaaattctttggccaaagatttcctacgaccataaaatgaatgaaacatgggttccgtttagtgtacatgctacttcctggatggtcagttatacagttattgcatttcttccttctggcctcatatactctgaaagccctagtgcccttccctagatattaygtaacatcatgaagttgtgttaattatccaggtatgttctgtggacatagttgagcttttaataaatatgagtcgtaggattagatggctgaccaggttctaacctgaatccttactgaaagatattgaccaccatgcttttcagaatgtgcaggaagatcttttgagagagtaaaaaaggacaataaaattttgctttttattttttctttactctcatggtgcttctattttatgtatattttaaaacacatataatatgtaaatatagtaatatatgtttataatgatggtaagggg

SEQ ID NO: 2653 - DNA, 598 bp, Bovine  MMBT05862
  misc_feature (1)..(71): n is a, c, g, or t
nnnnnnnnnnnnnnnnnnnnnnnnnnnnnnnnnnnnnnnnnnnnnnnnnnnnnnnnnnnnnnnnnnnnnnntgtcccaccgctttgtgtgattgaccttaagcttcaaaaagcaaagtgtataatctttgcttcgccctactttctcagataagcgcgctcttgtgtcccatttagtgtggatttaagacaagagaaaaaaaaataatcaagaaaatgagttgggttctaaaaaccagactggcaaaagggaatacggacagtgtcttaaaaccttaaggaggagggaaagcgagctggycggggctttaatcccaaaggacctaccttccctccatttcctgggccatttccactccaagctaatcttcagcaacaactgaaccacgttgggatgcgtcgctcatgtaaaatcagaaacctttcacagccactgagttctccttttaattaggccggtccagccgagttaggagcggacactgaccagctcagccttgcactatcctgcckggtcgaggtcgccccagaggcttcacaccctagctgtatgcagctcgcgggcagcagggggcgctgcggaacctccrtcccttccc

SEQ ID NO: 2654 - DNA, 598 bp, Bovine  MMBT06132
  misc_feature (1)..(75): n is a, c, g, or t
nnnnnnnnnnnnnnnnnnnnnnnnnnnnnnnnnnnnnnnnnnnnnnnnnnnnnnnnnnnnnnnnnnnnnnnnnnnataagactgaaacccttttcctccctttatcaagtggttcaagttttcctcaacccatccctgtctttagtctgtgtaattattttattattctcaatcataattgagaaaaaaattaaatcaaaccctaaggtcttaagaagaaagaaaaaagttgaaattctattaagatacactcaacttagtttcaaaggtaagttactccaattacaagttaaggaaaartcagaggaataaattttacaaaaatattctaatatatttctgaacatggaaacatgactggcaaagtgcaggaaattcttatacaaattcattaagaccagaggaaaagcstttttgatgtgagaccagtacttytcaaattagtattcatgggcttcagtatagggcaaatctggggaaatgctgattcagtaggtctgaggttgagcctgaggatttcgcattttttgtcttctgccaggtgayactatgtgctcgtctgcagacatactttgaattgcaaggtttgaaagtgtat

SEQ ID NO: 2655 - DNA, 600 bp, Bovine  MMBT06135
aaatttcctttttgattagctctcccttttcttatgtcctctgttccctttcaacaatcactttgatgaaaacgggtagaaaggagctaaattccttgatggaggaaagagcttgcataaagatttctaatgcagatggagatgaaggccagaggtattaaggaagcagtcaatgtttcagataataatagaaagccacatgtaaagcacagccaggaaatgacttgatgtattcgagtgttcaaacactcattttcttattaagaaacatggtctttactagccacaggaaaagctccwtgctacttttgcctgctggaatgtaggatacacatttcattggtctctgttcctgaaatctgtggcttgaaacttggagagcagaaaggtcattagatttagctggcctaaaataatacttcatgaaccaattccgattgtcaagtaaaagcattggcttgggatctaaaaacctgtaaktctttggaatgaattaattgacatctttttaaaatgttaaatttatttgcaacatttaggaaaatgtgtagtctccatgaacacaggactgccttttaagtgaaagattttattttaagc

SEQ ID NO: 2656 - DNA, 600 bp, Bovine  MMBT07128
tcctttaattaaatgaaggggggaggtgtagttattttcaactctccgcacaaattactacccagtggaaacagaattgtgtattgtaagtagtactcattctatttattgtgccgtctattgatgtgtgttggacttgttctattttggaggcactgccatggtaactgggctcctgacaaaggcctgtgtcagagccaaacttgtacatgcagaacttcagataagtgatgaaataaagaatcaacctcagtaggctcaaaaataacaatttggagaatcatgttttgctcctgagtrttttcatccacaaagttgggaagttctgagaggcaaatcatgggatttactggacatcaaactggatctgagcaaaagggtggaaggaagtctattttcacagtctcttagcacccccctgtcaacttctctggctctgcctttgggttaggctcacagttttagggaaaaaatacaagctggtgttcagcctttagagaaccagggtgtctttagaggatttgccttgactccaccgccctgagatgtggccctgaatctgcccttagatagctcaggggcttcaccaaaccaggattc

SEQ ID NO: 2657 - DNA, 600 bp, Bovine  MMBT07613
agagtcttcaaaaatattttcaaggcattactaacgaggacaaagtggaaggcagcataatcttaagctccaggtttcctggtgcgtcagctgtgtaacgtattagctataaatgacctcagagtttctcaagcagatcaatgttttgttttttttgtaaatatattaatttagttcttcaaacatccaaggttttattatgggatgcctcaatttatcagtgttttcaaaagtttgataaggaagagtgatggcaaacaatgatttctccctgtcagaagggaagcgacacttcaaatktcttattcacctcttaaaaccgggaacagactctagtcacgaggtgagaaacatcaaacaatgaatggcatgaaaaattttaatttagataaaactgaacctatgttacattacagagctattgtcttaaaaaaaaaagccctctactctaaataaaactatgccctctactttccaaacgaagcaatattaaaaccttatttgtacatgtgcctaacgtcatctaaatctcacaaaaatactgaggtactcrgagtatcataactgtcttcttgttggtttaactaaagagataacgta

SEQ ID NO: 2658 - DNA, 601 bp, Bovine  MMBT07614
  misc_feature (1)..(1): n is a, c, g, or t
nctaaaatttgtattgaactctcaaagaaacagtgaattgttatatatattattgtgttcttaaaagtgattttattgttgtatgtagggaaaagcctgtccttttctttctttttttgcataaaacaaaaggtatttgtcttttaaatttttaaaggcttcttttaagagtttttttttaaacatctgctttaagatctattcaagactgaaatgtattttgtttaaaggtataatctctgtgaaacttaggacagtaacttctaatcaggctacagttctctgaaagggtcagtaaaakcatcatctatgcaactgatgaatctcacaggattccttcacagttttcctgattctttgactaatagtttcaacagtttagcctatagaatcatattctatatttgttattttcattygtgttctgtacatttctaaatcaagcatagccattttttcagaaagtgatagttatatatggaggaaaataggaggcaagccaacccccacckccaaggaaaaaagtatttctaaataacaggtaacttatatctaattggattaatttttcattttaggacttgaatgctgttgcttttag

SEQ ID NO: 2659 - DNA, 600 bp, Bovine  MMBT07625
ctcattgaaacagggaaagggtggttgtctgatttcattgaggaggatatcactcagtaaccatgttctgtccctgcctcatccctacctccctgttatctcctattactgagtcagggttctacagagatcctcttctagtttctgaaggcttttaggtttggccttctaaccctctgtgaaaccttgcttccatctattttctgtattcatgtattatgttmtctctccatttcaatgaagatggagttttgtatytgtttcttattagagtggttttaggatatatagaaagaagayatgcctttacattgccatcckaaaatcaagtctagtagtagctcttgatgagcctatatcctcagtgaatctgaaaaaaacaacccrattcaaagaacttttacaaaaaacatgcaggatttcccagctgtgaaacaccactgtagacttaaatatatattcaagtggatggcttccctgatagctcagttggtaaagaatccaccagtttgattcctgggtagggaagatccactggaaaagggacaggctacccacttcagtattcttgggcttcccttgtggctcagctggtaaaga

SEQ ID NO: 2660 - DNA, 600 bp, Bovine  MMBT07628
tgaattaaagtrtactttagctaatacagctagcctaggtaaatagcacggtagggctggatcactaggtaaagactggctgcagggctgcccgctttcatcctgttggtattagtttcaatgtctaaatagtattctagtgtgctgttacagacactttctcaggtattaaagtcattggtatgatcaatttgtacaatgttctaaggcacctcaatctcttctctcctttcaccttcagtacggttccacttcaggtatttcttgaacctctgtttttcaaggctcaggagtgattayccctggaaatctctgaaacatgatcactgccaccaagaagtccaggttctgcaaaagaaagctgaggacatctgcttacctttcctgatgctctctgaggtaacatagaaattcccaggcctctcttgacttttttctgcaaaaactgtgagataaacagcattctaagtaaagccaaatagtaccttttctaagaagctttataatattttatacatttagcagaaaaattaccaaaatcttgtccaaaataaataataatggatcacaacttggaccactgcatgcagttctgtaaat

SEQ ID NO: 2661 - DNA, 600 bp, Bovine  MMBT07630
acacaagaaaacggttacatttccattgttatcaaccagcatcttatcctcatttctctgcttagaatgtatgagagcaaaattttccaaaggtgttttttgatgatttctagtttttttcatttgttttgaacaaagataattgattgagattctcaaccaaatgtggttgagattctgaagattatgtctagattctggaaattctctcttgagcaagaaagaaatgggtcgtgaagatgacgcctctttccaaagtgcatccattaacacctactgttttctgatggacaggctctrtggagaatttcctcgattattcaggaagagaaaaacattatttttcaagaaataaaaatgcagtttttttttaagtgctgaccaaggggctggcgctaaattggcagaaggattcctttgtctcttatttgactttgctgggcatccacttggttcaggttagaaggatgctggccttcacagttcatttaactccaagagcatccggctttgttgaagtgtaggcattgatagtcatctgttttgactctaacagggaggacttggccctgttcaatctgtgcccattccccattatta

SEQ ID NO: 2662 - DNA, 600 bp, Bovine  MMBT07642
gcaaagtaaagatgcaatggaacaggtaacttaaccyacctctactgcagttctagatatggaatttgggctgggagcgctcagcctgcatttaacctgttgggcaggagggtggggctaaatggggcggggggacgggcggagctgccatccccttcccccagtgaccacaaggcttcaaggtctccagtccacatcccgcacactatctcaggttccaaagcttgcgatcctcccccagggccggccccctgaactctgaccaccttcccgctattagatcttggggtggagggaacygaggagggtagccaacaggatcaatgtaggataggcaggctgtcaaccttcatcccagatgtccacccgcctagtgtaggcggtatccctctctgcccagtaggatgatggtctctcckggcctgagagcccctcccccgctaccctcgccttccttcatcctggacagtttgcggttctctcctctcctcagatctaacctcagtctctcctgctgcagctcgaggacgagctctccttcgatcccgccagacgccaggagacgtgacccagatcccggggagcactgttcaccacgcg

SEQ ID NO: 2663 - DNA, 600 bp, Bovine  MMBT07646
tggtatcaaaagatttgtgtacatattttatcacactgtcccttttaaacaggtccctatagctcagtccccccgccttctgttcccccacccaagaagtccctgggaactcagtcccccaagaaagctgcagagaagcagcagactgtggagagcagcgaggagagcagcgatgagtctggtgagtcatcttccgtggtgggtcttggaagtgtgtgaggagtagggaaggagatgcttctgttcccttctgcttttctctgaagcaccacagggctgatgctctgtgtgggtctttgyatccttgttgtttttggctgtgtcacatgtcttgcggaggtctcagttccctgaccagagatcgaacccgggccatggaagtgaaagcccagagtcctaatcactaggccaccagggaactccctacgcttcttttacttgcctctggtgggactctggacccagcctaatgccattgcttctctcaagattcaagttctgaggaagaaaagaaacctccagctaaggcagtcatcgccaaggcagctactaaagcagctccagcaaagaaggcagcagagagctcttcagacagctcgg

SEQ ID NO: 2664 - DNA, 600 bp, Bovine  MMBT07855
accatctatctacccctaaaccagcacaagaagcagcagacgatgaatgatagcagatccaattcaggatcaccactgtacttgccatataaatataatttcctgtctcccttcttcctccctctcccaacccagttgcaccctgggcataagcacttcctctctcctcatatatttctatttgcacacatggcacaggatgacagcctattgatagtgtttcatattacagactcacagacctaggaaacgctatagctggcagcaggcgaccaccgaatgtccgtcattactttactmtcatcagcactcacctgagtggtctttgttgatcctgctttgcgtttgcttttagccaagcagccccaaaccaggccttttacttagaattctcgcttattgctttttgagaacaaaactgctgctctttctttctgctaaaccccacttgaggaggtgttgagatctgctcagaggcaggagggaactagagccactgatttaataaaagcaactgaggatcaccactgggtccaaattccacttaactgaggacatttacatctgatctgtgacgatgtagaataacatggacttacg

SEQ ID NO: 2665 - DNA, 600 bp, Bovine  MMBT07860
gtaataacatctcctgaaaaaaaaatttgtgacccctgtaggaaaactttgctcccttgaagttggtgctgcctgagtctttgaagctccatccaccctaaattcacaacgtttctaatcacctttcaaaatcagatacttctcctgcagtaatgatggatgtacaggtgtagggatgttttagaatatgtgcatccacattactgctgttgtgtcatttccttctttcctacttctaaaaaagtttgaaaggttatttaaatgcttttgtgaacacagtttttgaaaaacataggaaayacaactaaactttaatcacttagatattcagtggttcttctactggtccctggctctgttcccttttctgtctaaaattgggacctcctaggaaaggcttgcttgtattttttgaatttgtattttgtttgccttgttgcacttgctaaggcagcctgccaggactctttgtyctgcccttccaaagctccttytgtctccccagtcttggatttagcctggggttagtgtatttggtatatacactgacattaaataagcaccacacaatgtgaatttgctatgagaaaattctcaraa

SEQ ID NO: 2666 - DNA, 600 bp, Bovine  MMBT08551
taccccaaattcactggggactgtgggaactcagggacctttgttagtaggagtgactcctggtgggatttcctggggcagtgctgggaggggagggcgcacctgaaggtccagctagcatccccttctgttcccagtctctccacagcagggcagcagctgccctgagcatccagttcccagggacctgcctgtgggcctgtgtttgggcatctgagaaacggcttcccacagcccccatccccccaccccctgcccgctctgcgcataatctgaatttccgaacagtcattatctgcratatttaatccaaattygcttctctaccctcctccgttwccccttattaaaataattttagagttttagtaacaraggtctttttcaaaggatttctgataagaagtggactctcaagaagccttttgggaattatggatgtagcatgtgtttgctsatttcatgaagataagatttttccttgaagataagtcgatctgatgatcaggacacacaagtggtggtgactattgttgatattcatacasttcacctgcagtgctgttgtgtattctgtttgtagaatccacccccatacag

SEQ ID NO: 2667 - DNA, 600 bp, Bovine  MMBT08561
gctctgaaaggatgaactggtgcaagtgaaggtgagacatgaggtctgagggcagaggaagtgggttttctcttaagctagtgacaacccctgttcatgatggaatggtgggctgtgcctgtggccctcatccagctcctcgccagggacaaagtaacccaaaaggagacaaatatctctgggccacccaggccagccctctgtcagcagcagcactacctggaggaaagacactttgcacacgcactttgcacacacaggccttgatattgaatgaacttgcatctttgttttgttccrtgcacttacccttgatttagtgcatatttaaatcgactscactgtgttcctggatattccttgcatgtgtgtggcattttaatcccattattctctcttggcagaatggtccttgtgattgcctgtgacaggtagttcttaacatcccaaggatggcaagaatgggcatagccgtcaaataatcatagagtgtctttgaacaaaatgcttacaaaataaacaaatccaaacatcaaagcagtgggaagatgaaacagtaaatgaaatgagagtgcattagaagagaacttcagagtgtta

SEQ ID NO: 2668 - DNA, 600 bp, Bovine  MMBT08581
atcataaagatgtcagctctcactgataaatttaatgtagtaccattaaaatgaaagccccagcacgaaggacccaatgcaaatataaataaagagtttttttttttttttttaaagaacaggttgtcaatattagagctgaaaattttgtacaggttctggtaagattacttaagaagcaaatcaaaatgcttaagctgtagctgtttaacatgattataagtgctgattattcaaatgaaattaattagtcacaaattccccaagaacattaagctactcctcagtggcagaaaaacyggtgattttactctttcrttgaaatatacgctgggtttttgaaartatgaacaattcctggaaatatgaaagcaactgaagatttcttggtcaggatttaaagaaagatcaaaacccacttagttccacaatcaatatagastgtgaaggcaggaaaaagctgagragccatcttgaaggcagccaggcagaargaattctctggtactcgaccttttgtagtaaaaggccattttggatctactgatgggatgtggcccacccatggtggaagcctcctgcagctttaaggacaatatt

SEQ ID NO: 2669 - DNA, 600 bp, Bovine  MMBT08651
gaaaacaaataatataaaacccagagaaatctatataaaatgttaagactatcaactagttcttaagcctgcataaatcttggtccttcatatgacattgttaccaaaaagatatccagagatgtttcatcttaatgttttcacatgtacatcaaaagaatatgaatgcttccaagatgttagtctgtttcattgaatttcacagctttgcatcccatgtcaggawgctgtagcagagttgtgctgatacccggcgcagaatgccagcacatgcatatgctgacacagatgctaaatgargagtcaagactgtagcactcagatgtatcccaccccagacttttctcatctaaatttaaagcctaggtggcccctgcaggctttccctaaacttgccctctggctatgactckagactaaccatcttaaatctcagatgaatagcactgtccatattgtagaagcgtggcacttgatacatttcccaggcctgaggctgcagtctttattgccagagtagtaaaccatggggtgtagtcactgtggtcagcaagctgtttgtctgcctaatatctctgtggtcaccattccttcatgatt

SEQ ID NO: 2670 - DNA, 600 bp, Bovine  MMBT09192
ttggtgtagtcaataaaacagaaatagatgtttttctggaactttcttgctttttcaatgatccactggatatacctggaaaggtttgggggaatcttaatgcatattactaagttaaagaaaccaatctgaaaaggctatatactgtatgattccaattatatgacattacggaaaactcgaaactttggagacagtaaaaaagatatgtgatttccaggagtttaggggtaagggaagaataagtgcaacatagggatttttagagctgtgagtttattctatatgatactgtagttktgactacatatcattatacatttgtccaaactcagaatttacaatacaaagtgcgaatcctaacataaactcaggactttagttaataattatgcatcagtgttggtttatcaattgcaacaattctgcactggtgcagggtgttgatggtgaggaaaactgtgtgtgtgtgtctgtgtatgtgtgtgggaatagggtatattgggtctctgctatgttgtattcaattttgctattgacctgaaagttccctaaaaagtaaagtctactgtaagtatgcttgggcatgaatacatagat

SEQ ID NO: 2671 - DNA, 598 bp, Bovine  MMBT09864
  misc_feature (1)..(14): n is a, c, g, or t
nnnnnnnnnnnnnnttcctctcattcattcctgtttctcctcggactccctgaatccagatgatttctccccgagaggaagcacgtcaggacgacgttcaggctcatgcttaatgactaaggccttctgagacacctcrctggaaagctgccctatggtttgctaactgaacgagcagggtggcagagaaaaggcctttactgttctttttagatggcctcacacatttaccctcagctcttggtaaagaagaatcgattcatctcacaacctccgctgttgccatggcacccacctggmtgtagctggagagaagcacccactgttcttgttcagtctctaagtcacgtcatactttgcaaccccatggaccacaatacaccaggctcccctgtccccgacyatctcccagactttgctcaaattcacatccactgaggcggtgatgccatccaaycatctcaycctccgccaccccttctctttctgccttcaataattataaaagcttacacatrtcaaccatacaggaactatttgttaataaatgatctgtcctaatacttacaaatgcaaagcataactccatcctggtaaa

SEQ ID NO: 2672 - DNA, 598 bp, Bovine  MMBT10170
  misc_feature (1)..(92): n is a, c, g, or t
nnnnnnnnnnnnnnnnnnnnnnnnnnnnnnnnnnnnnnnnnnnnnnnnnnnnnnnnnnnnnnnnnnnnnnnnnnnnnnnnnnnnnnnnnnnnttgtagcaggaaaaacagccctgtatgagaagacaaacaggcatggccgtgtgacaataaaactttattaacaaaacaagcagagggccggattcagcctttgggcaggagtttgctgaccctgatttagatgaacccctgctacacaatgtaattgaaaatcttaggatgcaccaaataacaggagaaaagcggcccaaatagagtygggtggaggaaagaaacgaagctgctttgctttctggacttggttttctcatggaagtgtgtgccaggtgctgtaaggagaggctcagagaaaaggggcggggggctcacctaggcaggctgtggcagtggtgtcaggcgcgtacccagcctggcagtggcaacggaaggagccaaggctattgatgcattcaccatgagggcacaggtgagggagcacacggcactcatccacatctgaggacaagcagggcttggctggggctacccaccttggtcactgggacacgccacctccc

SEQ ID NO: 2673 - DNA, 600 bp, Bovine  MMBT10172
ctgatcagaaaagactgtcaggcagggggattattctacagccagacagttgggctgcagggtgagtaaaaagttgcccagtcagaaggccagggagccataccagcacacagttytggcagtagagcaggctgctacacacctctatttgggcagtagaattgtcgggaagctgcatggtcatgttaattgtcatgggatgctgggtggctrttcgaccaatgagtttggcagtggggcagcctcaccactgtagaaccaagagcaaaagaatgaggtgtttgacaggcagatgaaccrtcagacagggactcggacagctagagaaagcagcagaatgaccagaaattgcccatccagatgagaaaccgtggaaggggcggccgtggtggctgcgcaccctgaaaccgccacctgcccggcccctcgggaatgaaacagagcgtggccaaccaggcctgaagcgctccgtcagccgagagcgctacgtggagaccttggtggtggctgacaagatgatggtggcctaccacggacgccgggatgtggaacagtacgtgctggccatcatgaacattgtaagtgcctccscctccctgg

SEQ ID NO: 2674 - DNA, 598 bp, Bovine  MMBT10272
  misc_feature (1)..(39): n is a, c, g, or t
nnnnnnnnnnnnnnnnnnnnnnnnnnnnnnnnnnnnnnncgcactccgcgcactcgtagggcttctccccagtgtggatgacgtagtgctggatgaggtgcgctcggctgctgaacgccttctcacagtccttgcactcgaagggtttttcgccggagtgggtccgatggtggcggatgaaggtggagcggtgggtgaaggccttgcggcactggctgcacgtgtagggcttctccccggtgtgcgccggctggtgctgccggaggtaggacctgcgcttgaaggccttgccgcactcgscgcactggaatggcttctccccggtgtggatgaggtagtggcggatcagcgtggagctctggctgaaggctttcccacacgcgttgcactcatagggcttcatgcccgtgtgaatccgctggtggcgcacgaggtaccatttcctgttgaaagccttcccgcactgcttgcacttgtagaggtgatggctgggggggccttttccaggtcgctgtgggtcacgttcatggagaacatccccccgagagacgctcttctggaacgcccctaagtgcagaccatcacctgcccctaaacc

SEQ ID NO: 2675 - DNA, 600 bp, Bovine  MMBT11402
tctaatcattcgcttaatcggataaactgtatggttcgtgcgagagtgccagctatcctgagggagacttcagagggaaccagatactagatggttcgattagtcttttgccgctatatccaggtcaggcaactgatttgcaacttaggaccactacagagtttcctctgaagaaaaagaccacgtggcactctatttatctctgcattcatctctttgcacccaactaggacaactttttacattacacagctcagtctggcttctcaagggcctgaactaccagaacacggctttagytcmacttttgcatttttttctagctagtagttacccamactgagagtcyggattccctaaagrcaaaagcaagcctatgctaatataaaatgaagttttgaagtaacagacctttcttaaagaacttcatagataatttttggagggggtgggactcaaggtcatataacataagcttagttcacaaaatacttctttctagytatttyttctttctttgaccagctttatccattacttccacttcaaacattatatacacactgataaattttagaaacagtattttaaatctcatgc

SEQ ID NO: 2676 - DNA, 598 bp, Bovine  MMBT11506
  misc_feature (1)..(70): n is a, c, g, or t
nnnnnnnnnnnnnnnnnnnnnnnnnnnnnnnnnnnnnnnnnnnnnnnnnnnnnnnnnnnnnnnnnnnnnnggcacagcaacaggcagactctcggccgtagtgggaggggtggtggtgatgcaaggggctgagctgctcaatctgccccaggcccactcacctgccttgtgttcggactcccagaaccacccttcctgatagcccggggccagggaccacaaagcaacttctccctccctgcccctgccttctcccagtggttctggtctcggaccacatcgcacgagccagtgcaggakccctgctggggacacaaaggactgaaagcgacgggatctggggtgagtggcatcgatgcaaagcagctcagagttctgctcaatgatctcggaaatttcttgtccattcttccactttcagggtcttacacattcacgaaggcaacaggcttgtagtgggttgccaagcctctcatctattgcttcgtcctgtygccatagagtcctgacccttcttttccctgctccaacactgcctgcggctcctcactgtgcccgcaaccaattcctactcttaagccagacttgctacactctg

SEQ ID NO: 2677 - DNA, 601 bp, Bovine  MMBT11563
  misc_feature (1)..(1): n is a, c, g, or t
naaaagataaatatgaaaaagtaaattatatttctgtactccagcacaacaaaagttagaaaagaaaacattttaaatatgtagtaataatttatgataaatacaaacaaaatataaaatactctggaataaacttatgaaaaagtatagaagacctttatggaaaaaaacattctaaaacttttttatcaagagattatcaaagaagacaaaawaaagtatggtttctaaaaattattctaccttaaatcttctatktagtacctccttcaatttcagattaagtaccagttcctcagayagttcttatcagaatagcatttatgtacagtgtaggtattttttcactrttctctccctctcagtcygctgttcctctccttaacattcattaggacaatcattttatgtatgtttatgcamtttcctgttacaatataagttgtaacatgagccatgttacatgtttgaccattctatccttagtacttactacttagaaatgtgataagtatttgtagaataaattaatgatttcaggaaggtgaaatattagtaacaaatctagtcttgtttcaccactcctttccaaggactgttt

SEQ ID NO: 2678 - DNA, 600 bp, Bovine  MMBT12109
cattgtatgaaatgtatattctttatgagatagtctagcaaaatagccacaaatttctttaactctataagcatccctaactctcataaatcaacatatatttaaatatttaacatrtgccaaaaatataaaatatgggtttttttatttaagtctatatcaccagggcaattttcatcaattgaagccacagtaattaccatttattaccactagaataatgtataatccctcactttctgttttcaaagcatgtggttggttaaagatacggttgaaataaaattcatggcagtatasttggagataattctatgctctcttatgaaatggattttacmgaagtaagtaaaggtaaaggaaaggaaaatgtaggagatgctaagcaaataattgcccatttagtttattaagtgtcctagtttgcatttaatgaaggaaagtagaatttattgattgccatcaaatgcctaatattatcaaactagttcacattttctaatttagtttttaaaacaatacatgtatagaacagtcttttggactctgtgggaragggagasggtgggatgatttgggagaatggtattgaaatatgta

SEQ ID NO: 2679 - DNA, 600 bp, Bovine  MMBT12155
tgtccatgggcttttccaggcaagaatactggagtgggttgccatgccctcaggggatcttcttggtccagagaaatacaatgacatgcctctataagagacagaggaaaagacacagacacaaagggaaggccatgtaaagaaggaagcacagactgtagataaasagctgcaaaccaggaaatgcatggaagagcaagtaattctccccttgagccttcagagtgaatgtggcccttctgattcattgatttctgatttttgacctccagagctgtgaaagactacctctgttgtttkaggccatcaagttagtatgttatggcaaccccaggaaactgatatacttagaacaagaattgtttcacaaagaggtaatggaatggattagaaacaacatttatgcaagatagactcagattttaacctagattttctctgtacaaattgtgtgatataaaaaaggaagttacttaatatctctgatcgtcatgcttctcattagcaaagtgatggtaagttttcaatgtagggtcactgtgggatatggagatatgtaaaacacctcacttactgtaagcattacaacagcagaatatt

SEQ ID NO: 2680 - DNA, 600 bp, Bovine  MMBT12157
catgcttcctaattggaccctggggacctgagaactgccatagtttattgcactattttactcatcacactgctggttgtaaaagaaaacgcttcccacgtttctgtaacacatatgtacgttttaatagctggacattaccactaacagagtatctttgctataaatcacagctatcagtccactctactttatccgccccatactcacaatggagattcttctgttttaaccacttaccttccaaaccttgtagttccagtatgacttttcttttttaactacttaagagaatcttgyttggggcaaccgtagcatcctgtggtttaaaaaaaaaaacaaaaacaaaacagataactgtgccttgactgagtacccatcccatgcaccatcccatcctctgtagcccgcaggacactgagcatccccacccatgtgctatgttggaaagttgcttggccattctgaagtgctttctcaattgtacatgtgaatgtttggagggcagaaatgactaagggaaaaaaggaasgtaaaaaaagcagtagctttcacttctctttgttgaatcacaacttagagagtaacttgggagatgtg

SEQ ID NO: 2681 - DNA, 601 bp, Bovine  MMBT12158
  misc_feature (1)..(1): n is a, c, g, or t
ngtcccagactgagttcccttcccttttaaacaccataaacrataacccaacaatggcactgtattcctggtgtgaaatgaaagttgtcccataagaaattgcttcaccaaagaaaacatttataaataagaaaagaagtgagctcactgaataaacaatgaacattaggagagggctaaatgattttgcccttcaaagctagttcttttagaagattttgtgaaattaacatccactacagcttcatggtaagcttctaggataaatcattagatatttacctaagtggagccttttgtrgtaaataggaagcaacaggtaataccttacaaagtcccttttgtttgtctgttttggacctatactgttaatagtaagatcttataaaaaattattttgttgctgctcagtcactcagttgtgtctgactctttgtgaccccatggactgcagtaggccaggtttccctgtccttcactatctcccagagcttgctcaaactcacctccgttgagtcaacgatgccattctaccatctcattctttgttgactgcttctcctcctgtcctcaatctttcccactttctaaagatacaaag

SEQ ID NO: 2682 - DNA, 600 bp, Bovine  MMBT12220
aatataggaaagaatacaattttacaaattaaattatccagaatgctaacatcttgagaaaactaccatcagtggtttagatgcattttgtagtttagttatagtttaaaacattgacctttttgtcttatttcctatatatgaaaatttaaaaaaacactttgaaaaatgtatacattaacatactacaattgtctagaattctacaagtcataaataacactcaatgtttttagtatatttattttatattatagtattatatgagcatatgtatttgtatactgaatattagttacygaaagaacatcattggtcygagattcaaaagagtatgaaaagggggctatatgtcagataatatcacatcttaagtgatttactattatttctcaattaaaatagaagcaacacagtggatcatgtaattcaatatgagttttaattatcaagaaaatcattagttaagtttattgkctattaagatggcttttatttattttcctaaggaaaccaataactgagagagacaaaacaaaaacttttggtttaataatgcactgagcctagtagctcaactgtatagtttccatattatta

SEQ ID NO: 2683 - DNA, 600 bp, Bovine  MMBT12348
ctaaagggcaaaacaaaattagggattttcctcactgttttggaaaaaatgactacakagaacatcaactttgaagaagccaactacttaaagttgtaacaatgattgtctttgaaaagattcagtagttaagtactgtttggggagaaaaaartgttaaactattcagtagagtggatatgaccctatcacaaatgtagaggaagtacctttaaggctttttaaaaataggttttrtattataaagtaattagcctccaattaaaataaacatattaaaaacatgaaaataaaaatagsttttagttgccacttatgaataatcataattartattaaatatcatttatagaatgtattaaatttttagactggcaaaaagtgtggattaaaayagaacttaaatattatatcttaaatatcaaatgaggtcttcttatcaccacagacatatttttcaatgtggtggaataattaataataagcaagccctgtcagcactgaccccttaayagtggcagagataagccagcctcccacccaagggagcaattggagggattttctcattggtatcatgactttattattaatcacaga

SEQ ID NO: 2684 - DNA, 600 bp, Bovine  MMBT12471
gtccatggggtcaaaaagagtcggacacgactgaacgggcttcacttcccttcaggcttycttagatgattagagaaagcattgccctgcactttttcctcagtcttgtcccctctgatatggcacccaggtctctgtggttcctcagagcctcctgacaataatgagatgcaggaattgtctgggcccctaggcacccctagtgcctctgtctttcagtgtcacatgcacagtcttcttggctacaccagaaacattttgttcctctcactgagtgaaggagctctgagaacccctctkgaccattggcctgggatcctcacactgcacctcttctctacgcccataaccatgatgaaatggaaaactccacagctggtccctgactcccagtagaggtgggaagcgaagcataggccttccctagtcttacaccctcacatttctctgtgcactatcatcccctacagtcacctctttgacactgaaggcacgatgacaggggtcagtgccacttttcaaaacccagcaccagtttcttttctgaatttcttagagctctctcttctcaccctggaggtattttaatatctcctactg

SEQ ID NO: 2685 - DNA, 600 bp, Bovine  MMBT12501
tcttctaattttccttcctataaaatagaaaaagaagatctatgaaaataaattcacaacaattgatttaacaaataatattgagtctaatcagtaacaaaatcatataacaaaccatgtaacaaatacattagtgaagaacttttcttttttaaaattattttccattatggttcatcataggatactaaacatagttctctgtgctagacagaaggaccttgtttatccattccatatataatagcatatatctgctaaccccaacatcacaccatccctcctccaaccctctccccsttggcaatcacgagtctattctctatgtctgtgagtctgtttttgttttgtacatagattcatttgtatcatattttagattccaaatataagtggtaacatatgctatatgtctttctctttatgatttacttcagttagtatgataatctttagttgcatccttgttgctacaagtagcattatttcattcttttttaaatggctcagtagtactccattgtatatatgtaccacatcttcattcattcatctgttgatggacatttaggttgtttcccagtcttggctattgtgaat

SEQ ID NO: 2686 - DNA, 600 bp, Bovine  MMBT12551
gagagacctattattgctgagctttctacaacatcaaaagcaagaaaattcataggcattatttgcctctaacctgttttattccactaggtaagattttgccaaagtctggagattgcatatattgcccagaaatggcaatagaggtgagagtcaaaagtctcaggaagctctttcaaaaagccaatagattcagttgtaattttcagcatattttaaaaactcgaagttaatcccttatttaactaataatcatatccttttactagaaggagagtctaaacgatttgtttggatttytaatactttcatttatttcttcatttctaaacttgcttactgatattaatttgggggastggagtggcaatatgaaatgattttgctctaaaacttgtaagacatcctttcagataactgaagacaccaaagaaggctacaaggctatacaaatagaaataaaaatccactatgaatcttctgcttagrgaraaacatttaagcactgaagcagagtgaaccagtagaggggcatataaagaaagaaatggcaggagagacgrgttagtggttagtattcttttcctaaaattttgaaaa

SEQ ID NO: 2687 - DNA, 600 bp, Bovine  MMBT12769
ttccatacatcagtttcactggcactttaccatctaaaatggcccttcctagtggggaagctcctgttctttatgaccactgacagaagggcgttaattcctataacctgcccgctcatctccactcattatacccyctcacctccccagtcagtctctggcaccagtctctggattgtcatcaaaaaatacacactgactgctaatttagatagctgataacagtttcactttatggatcagccatctcctctttgttccatccaggaaatcccaggccgggtttccaattcatttttyctggcctctatagccaggaggtacaaggagtaggcagaagtgtaatattgcttagtggagaagaagattcccctggatttcatttacttcacataaggagaacaggctcatagtttaattccagctgaaaaacttctatatattaagacagcaaacttatttgtcagaaacctatttaatcctacttttagttatactctttaaaattcagtgagttcctgcctgggaagtctttgctttgcttgtttttaattattaactaatttttgactgtttcatcctgttatgaaccctccaata

SEQ ID NO: 2688 - DNA, 600 bp, Bovine  MMBT13042
ccttctcactcgaggttgaaaatatttatttccgcgagctgccacagagttctcaaatgcctcttgtgtcattgccttcagagcagatttacgagaaaagctttccctgatcacaaaatagtctaaccagacttggctttaaattaattgtggctctttccacaagacgaatctgtcattggagatttaccatcatattccaaagaatgtgcctcaggctcagaagacgtctacgatgagttctaacaaagctttgaacaataactgactcttttaaaccaactgtgtacaggcaagtcrgtactccgaaagagacaccacttagtgacctaggtattgctgtgttttcttatttcgtggttgcaggttcaggcggaaggatttttcctaaggcattttccycattggacaggtttactgtcttttagtcctttaacttggttttccatctggacatgtgtatagtgacttttcatcttgaaactgcatttttctttactatttgaartcccccccatatttttatatttgaaatccactcccctcgtatcagtcatttctatttcaattttgtattgtgaaatcgctcatctgtgctct

SEQ ID NO: 2689 - DNA, 600 bp, Bovine  MMBT13335
ctgggaatggagagtgggaagaactaacacttaatgagcagtagctcagaagtacagcttaagacttcaacccgattttaaaggctttgtaacatatagaaagatgggaccccagaaacagtctgaataattttgggggagatggcccttggtcaggcttcatctaaatggttctaggaagaaaggcttcagccttatttcaaagtgcccactgagggcacaactgctaggtaatttctctaagaacaaattctggtttctgtaccatttgaatccttcttgataataatatgcataagsagaaacaacaagaatataatttggaagttttaaaactggtttattctaaggaaggctttaacttaacaaaaaaagaatgcgtagatgtcagtttcagaaacaatttttcctgcacatcttctagcttagtaatttagtggcaacaagagtcattaatgctgtcaaaaacagcagtgaggtttaaaaataaaaattcaaacaataatatccttcacgtttttaatatgtcatttactgaattggcaatcacaactgagatttacgacagccttctagttagaaaaaacaaatgaatcgtac

SEQ ID NO: 2690 - DNA, 600 bp, Bovine  MMBT13478
tgccaccactttttgtctgtgactatggacaagtcacttgatgcttctgagcctcaatctctccattcataaagtgaataatagtactttctgtttagggtagtttgaggatccgtgtctgacatggagtaagaactatgtagctagttattattatctttgcttggggagcaaaggattgcttcctttactgtgtccaggacaaawgcagaccatccccagggatgctttctggttcagtgctggactgtgctgtgtttgtgatcccttgcctagtttcatctagcagaggagaaagamcattggacttgggggtcagaaaacttgatttaggatgccttcttccactaatgagataagtacacttgggaaaaattccttattctgtccaagtctcagtttcctaatttgtccaggggcacactcacctggggctcactgatatatcgtgagactcaaattagatacccagtttatacgggtgtgctgtgtaggctggaaagcactctatggatggaagatggtggcagcaagggatgagctattggataatgggcttttgatgtcaggggctgtcccagtcccttctgatggccttgg

SEQ ID NO: 2691 - DNA, 600 bp, Bovine  MMBT13844
ttgtgaggataagaaagcatagcttgcgggcgtgctgcaactcggcagacacacagtgggcatgttggtgaatattagtatattcactcatagtatgcagatcatatggggaatgttgttttccacattgattgctaatgtttagggaggctcttgaaatactaaaagccacattgagaaaacagagctgtttctttacccaaaagagaaaggaaaagaaaaattgtcttcacatatttcaaagtcaatcagtagataagggaaaggtattttcaaggcctaggcggctaggtgggagcyacaaagttgttgaaaggtagatttcattcattcattattctgcgccatttatgtaccagatcccggggatgaatagaacagataaaaatcaatakaaggttaatgcaaaagtaatgtaaaaaccagttattgatacctagcaataccgtaggctgctttgtcaactattaaggtcccagtggaaatggcgaattgaaggtgaatgaccaaacrttactgtttagaggcagtctgtgtaccagaagagaaaattgagtagtgacctttatagttgattccagtttgtaagtatccataatt

SEQ ID NO: 2692 - DNA, 600 bp, Bovine  MMBT13959
ttatctgtaaatagaactggggggaagaattagtaaataaccagggcctcttcccaaaagggctatagccaaagctcttcttagcctctctgaatgatctctcaacattccagcagtctgagttgtggtaccaggcgtgataagctattgtgaagagaggtytagaaattgtcagttaccaatatttttttagtccctattgtggatcaagaattgtgctaaatggactagatatataagaggcttcccttcttcaaggaggattagaaagactgatgttaacaagtaagcagtttggtkgtttattaagtgcaaagtgttttgagagaaattattccataacatcttacggaaaaacccaaacaaactttttggccaacccaacgatagcgtcctttgggagtggtaccactttaaatggggtggcctagaaaggcttctgaagcctttatgtttgcatggaggcctaaaggataattttttaagtcttagccatctttatgctatggatccttttggctttctaatgactctttgatgaccctcttaaaatacataaaatacacagaattacaaagggaattggttatattgaaatga

SEQ ID NO: 2693 - DNA, 600 bp, Bovine  MMBT14214
ctccctgggccatccctctgcctctcctcgcactgggctcccgcccccagggagctccagacatcaccggaacttcctgggcattagcctgggcaggggcacggttttaaccagtgggaacagtcaagctagaagaatgcatgttcccaggcccagcttgcggtgctggggccgtagatgaggagggggactgttttttaaatcgcttgggaatatcctttcttttgggcgtagaacccagctcttgctttttgaggaaacttccttctctttcatcctgtagaaagtatttttcgattygacccattygtggattgtaaagtcaaggttgtggggtagagacagtattttgcaaaatgaaataggatagaaaattattagaaagtttcccacaataagaaaaaagtgaaagaaagtgaagtcgctcagtcgtgtcctcatggactgtagcccaccaggctcctcagtccatggaattttccaggcaagagtactggagtgggttgccatttccttctccaggggatcttcccaacccagggattgaacccaggtctcccgcactgcaggcagatgctttaccgtctgagccaccaggga

SEQ ID NO: 2694 - DNA, 598 bp, Bovine  MMBT14733
  misc_feature (1)..(49): n is a, c, g, or t
nnnnnnnnnnnnnnnnnnnnnnnnnnnnnnnnnnnnnnnnnnnnnnnnnctgagttctaattctaagatagttaaagacaaattcaaagttgttttaggcaatctaggtagcataagtttactacaattctccagtcatctagtaacctttttatattaaattaacaaagatttgggtaagcattctcaagaatgagtgttttatatgtactggaaaaaaggaaagtggtcatcccttagactgytgaatggctaataaattcaaagaattattcttgtctattaacacttgcagaattrtgttatgaaatattgagaaagaaatatggagtttactattcaatcacaaacacagcttatttcattattcttagcattatttmaagaaataattcatggaatgtctcatatacaaaaggataattcatttctagtatctttcaagtatatttttggttcatcattaaatatgtgcaattccttcagtcaaacacattaaccctctttataaaacagtttgacagaaaatagacaaatctaaaattatgttccttctaaattattaggatgtttcattaacaaaaaacatttcttagtt

SEQ ID NO: 2695 - DNA, 600 bp, Bovine  MMBT14963
aaaaagagaaacagactcacagacttagagaatgcacttttggttactagggggcaggagaggggaggggagagataggttgggggtttggggattgacatgtaaacactgctattatttaaaatggtaaaccaccaaggacctactgtatagcacagggagttctgctcaatattttgtaatagcctaaagggaaaagaaatgaaaaagaatagatatttgtatatgtrtaactgaatcattttgctgtacacctgaaactaacacaatgttgtcaaccaactattgtccaatataaastaaaaatcaaaaaaagaattatcctgcaatgtagttgtcaattaaaatcaaagctcatattgttttaaaatatttaatcaagaaactctaacttaggtataatttgcagctaaatgtaaaactagaatacaacttaaagacaatgtaggtcagaagtggttcctaaccttgactgtgctttagaattacttgggtagttcttaaaatgtcttaatgccctactgcacaataaatcatattggaataagagacacaagtatcagtacttttaaacctgattgaacaattttgttatgtagc

SEQ ID NO: 2696 - DNA, 600 bp, Bovine  MMBT15500
tcacatcaagaatattctgtttagtaaggaaaataagtttgcaatacatttgagaaatattctcatcccaataactacatatccacgtgcataatatttaaattattatgttttagttaccggaaamaattcatgtatagagagcattttgccattgaaaatgctgactgtaaagatctttgatttctataaggttatttcttctgagggtgggtgctgggatgtcccttgattatacactcacttgtaagaygttaattccttggtctaagatgaaatgtccctgagtctccctaggtyatgtgagtggggctgaactggaataacaggtaaatagaaggggagtgaacaaaacagggaaaaaaatatacagtggaaattttagaatgtatgttatggaaagagaacgaaacagcttatctagttgctaattgcttactcagtttttccattcttccctgcctcttttctgcttcctttcctcatttgagtgatcatgttcctttccaaaatcaccaggaytccatagacaattgctctggtgaacggataagggcactcmtctctccccctctacccctcctctctctctctctctga

SEQ ID NO: 2697 - DNA, 600 bp, Bovine  MMBT16004
aatcattcgcttaatcggataaactgtatggttcgtgcgagagtgccagctatcctgagggagacttcagagggaaccagatactagatggttcgattagtcttttgccgctatatccaggtcaggcaactgatttgcaacttaggaccactacagagtttcctctgaagaaaaagaccacgtggcactctatttatctctgcattcatctctttgcacccaactaggacaactttttacattacacagctcagtctggcttctcaagggcctgaactaccagaacacggctttagytcmacttttgcatttttttctagctagtagttacccamactgagagtcyggattccctaaagrcaaaagcaagcctatgctaatataaaatgaagttttgaagtaacagacctttcttaaagaacttcatagataatttttggagggggtgggactcaaggtcatataacataagcttagttcacaaaatacttctttctagytatttyttctttctttgaccagctttatccattacttccacttcaaacattatatacacactgataaattttagaaacagtattttaaatctcatgcttt

SEQ ID NO: 2698 - DNA, 600 bp, Bovine  MMBT16115
agaaactgtgacctttgaaagaggaaccaaccaagccccaggtaatctggaagatagggaactgggtgaataaacgcctcactctttctctcctccaccctttgatctcccactagaggtttggccaaatgcaatcagaaaccagagaatgagagagccctgttagcgcaacccacagcagtcagcctccaaggacacaaagcaggtgataagggtggagaaaggtctggagaaacaagtggaagatattcggtatagcaaccaaggacgttcttctgcagataatcatgagccaaaatygataatacacacacacatgttctaagtcrtctgatcttcccacttctcattcagtaaccctcactgaacactatcccctgtgagtaaggcaactgcttcttaggcaaacgaagtaaaaacacacccaggatttctaataagcaattatagatctttaaatttatagatgatctggttttctgtatttatattataatattcttycattagcctgttctagctgggctaagcacaaagctttttgcccacagatgagacatgagccctggagacccttaagggttactggctataatatag

SEQ ID NO: 2699 - DNA, 494 bp, Bovine  MMBT16301
ttttatctttcagaaaaaaatcagccttatgcttatcacacatcttggacagtggatcaaactcactgatccaaattctgatgaaaaaatatcactgttctgaaatagttaagatttattttgcactcagtgtacctttaaaaatatgccagcattgcacatagcaggactgatactttttctccttttctttgctgctaggctgacatgttaaataactgtcaagaaaccaaagataaacagacctgaagggaggcgaagttctttcaggcaaactctgttatgcccaaatgttacatragagcaagagcccacaccctagtttacctgtctcttcagatactggggagagtagagaaacctgagaaaacagatctgttctattttcctgatcactgccactgctcagggttgagactggactcctatttgtgccttttttaagtcacaattcacagatagtatggtatccttgtcaccaaccgaagtataag

SEQ ID NO: 2700 - DNA, 600 bp, Bovine  MMBT16302
gagtatgaaattaaaattgaaagccaattttgactttaaagaaggactttaaaattgaagtccttctacttcagcaagactcttgccccaaggagaaraatactccagggagacaggacagtgtcttagaccagcttttgctcatgaaagagaaagctagttttcagaaacagcgtgatgcttagagaagcagagaggagagatggtagtcagagccctaagtgggtttctggccatttccacattcaggttttataccttggagaggactgatgatccttctctcctgactttggtgamcatctccttgtccctttaataaagaaccaaaggtctgtttttgtttgttatttacttccacaaactgaaatgagacttttactaggttgttcctayttcttcaggctggcattgtgattaaaaaaaaaaaaatgtgtcttcacacattctgtaaaatattcaggaggctgagggagcctgtaagtgaatatagaaacataattagatagattgataagaaccacctcctaggacaggacatcaccttgggagcacaccacttgtggaaggcttgttgacattttattatccaccctgcaa

SEQ ID NO: 2701 - DNA, 600 bp, Bovine  MMBT16355
catatgtttagaaggtaaaccataagcatktattgagcataaccaagttaaaagcagttcaactgatactttatttttttaattgatttttgattggaggacaattgctttacaatgttgtattggtttctgccttacattgacacgaatcagccataggtatacacatgtgccctccctttttaacctccttcccacctcccatcccatcccacccgtctaggttgtcacagagtacctggttgagctctcagcatcacagagcaaatttccactggttatctattttacatatggtartgtttatgcttcagtctactctctcaatttgtcccaccctccccttccccactgtgtccacaaatccattctctatgtctgcatttctattgcttcatcagtaccatttttctagattccatatatatgtattaatatagaatatttgcttttttctttctgagttacttcattctgtataacaggctttaagttcatccacttcactagaactcactcaaatctgttcctttttatgactgagtaatattccattgtgtgtgtgtgtgtgtgtgtgtgtgtgtgtgtgtgtgtgcgcac

SEQ ID NO: 2702 - DNA, 600 bp, Bovine  MMBT16455
caggagagattctttgccaggctaaaaccttattgtttttgtcaaaaaaaaagtaactaaaataatttaattcacaaattttctcacagaaaaatatttttaaatcattatttttgttttgttttgttttttggtaaagaatttatgcctatgattcctgatgctgccaaatgagctttttcttgggctgagctttggcaaattcctttggtagtgctcatgttccctagacaactagataatgaaaaaatatctattggggttcatacaacaccaaagaaaccagcctgggaaatgaaytttgtctcacttgttcagcagttattcctctgagacagaagcatctggcctcactgattaaaactgcttcacctgcctggaggcagtttataatccaattttcaatctaaatccaggaatttcactgctgtgattcttcacactgaagaaatcagtgtgcctctgcttgagaaaagagttagcctgtaagtttaacaaaatcccatgctccaggcgctgtgacctaggattcaatcggtgctttgcactgtggcctggcactctacagagtgtgtttaaccagccgtggaagaaagtaga

SEQ ID NO: 2703 - DNA, 600 bp, Bovine  MMBT16546
gggatacgcttgaaggaccccagaggacacctccaacttcagtgtcttttatgtactatttttttcctttatatacattctccgataaagtttagtttttaaagaaggcacataagagattatcatcaataaactaagagaattatgacaacatattgtaatcagagttctatgcaggtggtctccctctcaaaatatctcactgcacaaatgaaaaaggtcttttccatctaactaagcatttatcacacactgtggccataatttttgcagtctatggtgcaacagcaaaatgagcayggattcttttttcttcactatttcatggctaaagatttgttcttactctagatcttcgcaacctcagtatatatgattatttttctttccgtgttaaatctttcaccttttcacttagaaagcattttacagatttatcttcggcacctttgcattgccagcatcaatactcctatacttgagggctcattacgaagtaaaacaagggtggctggaacagaaggcactgagcttccaggacaatcgatctgatgacacatgacccagatggccaccaagtgtctaacaggcggatacgct

SEQ ID NO: 2704 - DNA, 445 bp, Bovine  MMBT17291
aaagcaaatgtttcaactgagtgtctgcctcttagaacctttgagacagctggatgggctgttttatgtcttctctagcatagggctgataacttcatattatgactaatactttctattttgcacaatcaattacttcatggaaaaatccaagaatgctttatatattaagtttattttctcaggttctgaacagagaattaatcttgaatgattggatttcattctagtatgagatacttgtggatttctttgaaaggaaaaatcagaattagtttaaaggaagacaagaccaagagractgattagtgaggtaactgttaagttgaaaatggagaaaataacaatctctaccccaaaacccctcccagtattcctttgaagtcctcttaatagatgggctatatctaaattggcatctgaagctgttacgccaaggacattc

SEQ ID NO: 2705 - DNA, 553 bp, Bovine  MMBT17402
tagaatgaaaaatatttttatatttttaaaactytttttcttcctcaaagaatgagaagaggcttataaaatagaaaaaacaaggaaaaattcattttgagatagaaaatcaagttcaggaagaaagtgtatagatactacttggttattaaagttgaygctcaaatttgtttctgagcttccagacaggcaaaggagatgaagtattaagagtgactgatttaagttgttagtgaaaagaaaacacaggagtttctcaagacaaatcagttattcttcaaattttaatctaaaaaataycattttgtaaatgtccaatgtgtgatattattggcatttgttggggtttagaaaattcttagaaataaaatatttcaagcatttggaagtgtatataaaacaatataatgagcatatgtgtatcctacacatagcttaagaattaaaatattataattaacacctttttgtacctttctacaattctgtttcttggtatctctacccagaattaatcattctccgaatttagtgtctctcatcttcaatttaa

SEQ ID NO: 2706 - DNA, 600 bp, Bovine  MMBT17412
attatacttcatctacagacttctactgtatttgagtaaattttagataaattctctcatagaatatgatgctatttttgaatgggccatcattattcactaactgtactaaattttgtctcggtgaaggaaagtagaagatgataaagaagacaaaaagtgcaaagcaaaaggctggaaagcctaaggaatattgtcctgaatgttctgtgtctcaacatctccaggctacctcctgtgaacctagcaaagcatcagtggggcttctctcccttctgacttttggttgggcaaggccaktgggaggcmstagtagaggactggaggrtgggagaaaatgaggtctgcgttttcttttctggtttcctcctgacagagctttatcagaggctgtgtttctttccaaggccatgattcctgaaggccttgttatagatgcagttccccctgctccttattccttcaggtcacagaggaggcaacgtcttcctctacttcctccacaaatcatcaggaatcttatgattcctagcggaatcatctcccacattgatttcttttacctctgtcccatgtctatattctgtcatccccccctct

SEQ ID NO: 2707 - DNA, 532 bp, Bovine  MMBT17452
ctatttcagaagctgagtgagcccagagtcactgtggcattttggaactacttctggtgggggagggggaagactgctaccccaccctcaggatcagaagtatgagccagccatcatcatcatcatccggtcaggggcttcccacagagagactgtgggaaggggaggggactcaggcctcctggaaggagagggaggaagaataggggtagtatatagggacatgagaggctcagaggcacaggtgaaactctaatacatacgtgatgaatgggaaaaggatattcttgttctccatayaggtacacacacatgcacacacacacgtaaggacaaataatgtcagtatacagctaacacgttcataggcaacaccctccagcacacacagacacaggcacacacacacattgctcaaagacacaccctcatacactcagtcataacaaatatgtgtgtaatggaaaggcacatgcttgttttacacacacacatggcaatcaaacagaaacacacaaagagatacccaaat

SEQ ID NO: 2708 - DNA, 600 bp, Bovine  MMBT17495
gctccctgaacaccaagctctttcctacttaacaactttgtactggatgctctttcccctgtacttaactggttccttgccattcagcagaattatcatctcagagcccttcccaaccacccactgaagtagtagctcccagtcatatcacatcatcctattttaattattactaactgttatttttcttactgatgatcatcagtatccctgactaatggtatattccaggagagtaaggaccttgcctgtctttttactgctattatcagcccataacagagtccagctctgttataygtgctgaatgaatgaatgagaaataatgactaaggaaactcctactttaaagtgaggtcatgcctccaaataggctagctaaccttatagaagtttggactcgggtcacaaaacgacaagaacttgaagggtcgtaagccatccgaaggcagtggcttctgctcttactacctgaggaaggatgcatcagagaccagcatgctaaaatcgcttcatccttggctctctcccaactgtgttacaatataatttggagaaatttaaccctcccctgcaaccccctctaccacccctgcaaag

SEQ ID NO: 2709 - DNA, 600 bp, Bovine  MMBT17725
tatttataagcagttttcaatcctgatctgaattctaagtagatattgtataacatgacagaaataggacatcaaaatttatgaaaaatttggagaagtagggaagcataatgcacacatgcatgcacatgcacacatgcacacacacaatttcaaaatttattaagaatccagcacatttctgatacatgttgggtattcaataaacacttgttgagggaattatgaaaaataaatacaattattcatcagttaagacaacctcttatagtgatgacattaaaaataattatatgtcartgataaaggataatatttcagtgcatataggttttgcagtattagcaaagaaaccctgatattttaaatgctatatatttgatggagaatcatgaattattttcaattatattttgaaaataacaacattaaatattaatgytttatgaagaatgtctttctcttttttaaaaatgtaaaacaattcagtaagtggttctaaaaatgagaaaaaattaactggaaactatttaatgtttaagatgcttcagattataaacttttaaaggaccaggatatttaggaaatcagtagaatgac

SEQ ID NO: 2710 - DNA, 600 bp, Bovine  MMBT17836
actgaaaataataatcaaatatactctcaaattatgtctatgtgtttgttagtagaaatgacacctcaaggtcctgcacatgataagggtagagtatgattttttcttttgaaaaaaagatgtattctgatgtctctaaataaagacagattcgtgcttctgtttcataatcattttctccatcttgttttccctggtagtatgcaatttccattcttttcgttattgaaaagcaagatagttaaattagaggtatataattcactaatcatgtgatttggtgttataactattattagkaataagttgctaaccctaagccttacatttttctttctctctatgcaaccttggagaacctcagcaaagactcagcatctattttcctgctcttttttcctactgtctatgcataaacatagcacaaggataagtcagcaaatgccactttggagtggccgtggtgggagaggacaatggtagcagacagaaaattttagatcttgcatagttcatgaatttgattcataattatgaaaatttaggaagaggtcccatcaaagaattttagttttaataggtacaatgactgagaaaaat

SEQ ID NO: 2711 - DNA, 600 bp, Bovine  MMBT17850
cttttcttcaaattacagggcctgcggggactgggaagactgagtctgtcaaggcccttggccaccagctgggccgctttgttctagttttcaactgtgacgagacctttgatttccaggtgagaggctcctgggggactgcctagagcagggggccgggtggggagcgcagcccacgcctctgggggccgtgagcsgtgcacacagcgctctttttgggaaccgggttactggagctgtttgaggggccagccggtgcatgacgccaacttgagcctcacgtcttcaggttaactcttmagtgtaacgaatctttctggtggtgtctgtgtttaggaaaaacaaatagcgaaggtttttttttaaacaacaaaaagtgttagctctgtcactggaattttttgcacaagagggaaaataatacattacatctgttcatctgtgaatggagtacttgctacatgtagggctgggctccttgcctcacgggtgaagctggttccactttcacagcccttctccaccccactgcactcctctgggaggaaggtggtattactcgtgtttcaaagatgagcagacaggtctcaggatgtgatt

SEQ ID NO: 2712 - DNA, 600 bp, Bovine  MMBT18085
tgagcatttcaaattgttacttgaaagccatgtagtgatagcattttctttttttttttaatatagggaataaactaattactattaacaatatagtatcactatggaatcattacaagatcatcatatgaataaagaaaccattgttgagcaaactatatatatttagcaaatattaaaaaaattaaatgctttcatcatgatcctttaggaatttttgtaattattgttcttatttcttttgctttaaaatttggccatttgagaagtaaaattaaattgttctatgaagagaaaatsagagaagggctagaggataagggtagaatttagactaattgccagttaatgtgtccatgtagttcagaaagaattgaaaacagttttaagaaacccttattcatgtcagctcgctctaattggtagtaaaacaatccacatatggaaatgaaattagaaacccaggggaaaaaagtcaaagctaaaatgaaagcaaattgcatagcaaacattacttacattatgatatcaaataagggaaacagtacaataaatgaaataacatgagcaaaaaaagaaatttgacttctatttgcatgc

SEQ ID NO: 2713 - DNA, 600 bp, Bovine  MMBT18106
atgcaataagggaaaaaacatgcaattaatatcctaagttgggaaaagacacaattgatattattaattgaagcaactactttagaacaggtattttataaagtctttcatgagtttgggtaaactccaggagttggtgatggacagggaggcctggcgtgctgtggttcatggggtcgcaaagagtcagacacgactgaatgattgaactgaactgaacttataaggtctttgcaggttgagatccaaaccaaactaatttaactgctaataagagttaagcaaatcagcatgggcatrctgatagagaattcaataattctgtcagtcatgactggtgcttgtgtaattaatcatttatatacttcaaagaattagagtagaataatactgacttaatatgaaaaccattctgtactcttgatgacttgaaagcattttyaatatcttccaatagccttttataaatgaagaarccatcagaaattaaaaaataatatgcataggtactactgatatgttagtctactcataaaatgagcattaagaaatcttctttgtgtatgtgtgtgtgtgtgtgtaataaagttttattgaagt

SEQ ID NO: 2714 - DNA, 600 bp, Bovine  MMBT18165
gaaaaaaagagccatggcccaataaggacagagaaagagacgagggaaaaacagaaaaaacagacctttagaaaagagaaagaagacagacaaaggagttgctcacctagcggacctgggaaagcttccaaggggtggaggtggggaggaagcaggaaaaaaggctgtttggagttggcagacacctataagaagccaccccagttttgtcataaaatcaaaaaaggaacagaaattggaggcttcaagttctggaggcaggaatacagggtgcgcctgaaataaaggtagttggttgaragtgtccaaaaggatcttctagaccagggtgggtaaactatgacctgtctaatttacagcctatttttgtactgtctgtaagcaaagaatgtttattttatatttaaagggttttttgatttgattgctttgcttttttaagagacagagaagaaggaagaggaagagaagaatctgtggtagagaccaaagtgttgcccacaaagtctaaactctactcgctggcgctttacagaaaatttgctgacacttgatctcaagtcccagattcctatctagagaggaagttacccctcccca

SEQ ID NO: 2715 - DNA, 602 bp, Bovine  MMBT18551
  misc_feature (1)..(2): n is a, c, g, or t
nnttgagatacacgacagtgagcagcagcaaagattttccctgatccttcaatacaatcccaccttagaacattctccaaatagcactgctgtgctttctrtgtacctctattatgatactaatccatttgtgcactgaataagcaattattgaagatcgtttgtgagccaggcaaggtgccaggattttttttttttaattttacattagctcattaagttattataagaatctatcagattttatcatccccctccacccacatttaaagatgaagacacaatctcaggaagatgaagamatgtgctctatgcactgtcagcatggcagtcttccttttttagtagtctgtgtatcattcgtacttagtctacagtattacagttttccatatacctacctacctcccctggagactgtgaacttcctgaggacagactgtctatttctcctttgtatattaccagttcacagaatactgctagagatgatgtgttgtttcacaataaatgttgttggacagaagactgaatggactcccaaactgtggatgctttgctctttataaatgtctcttgtttatgttatctgagttcatgtg

SEQ ID NO: 2716 - DNA, 600 bp, Bovine  MMBT18562
aatttgctttgcagaaccacaacaaataattattttagtattacatgggctctatttattacaaaaaaggacttgtttatctaaaccaagtcacgtattttatctggccaccagtcctagttctctgcacactcccatggaggtttcacgggcagcagtaagagcagtactggaaaaggttcaattagtctgtgatgatttcagtgatcacaaagggtcaaaccactggaatttaacctgctggaaatgagacctgagaagagtatcgcaaagttctaatgactcaactgcttaaattcyattcattctgcatctgccggtagcccagtcgttgtcttggaacaataagccacttgtgtggcatagtcagtaggtacaatactgtagttgagagccattcaacccatccaggtcagtgtgtaagtttaattagtggaactgtaattgagtaaggcatagggacatcgtgtgagtcacttcttcaaaggaagtatatcttgtcgcaagtcctagttattggcagactgttwgcctcatgaaagatggtgaaagtagaaaatcagtcaaatcacacagcactggaaaagtccacattcaaaa

SEQ ID NO: 2717 - DNA, 600 bp, Bovine  MMBT18985
gaggctctcaagtgagacycaagttttgaaaagtaattgcacccccaaagctcaggatttccaagaaatatttattttatttttcatgccaataggaaagcgggacaccccagagttatgcacaaaggcattttcttctaccagcacaagrgatatacggccaaggtgaaaagtatagatctgccttaatttcttggaaagcccttgaaacgtaggttcagattcyagagacttcacatgagtctgccttccccaccctcaaggatccgagttgcacttgctccttcttggtcttactcygtgccctcttgcagagttcatatacagagcctataattaggcgttcaccacgcttgaaagcatatgttttccacaaccataccactaacctcagaaaacatactctacataaatagacaaaaggccacgaagaaagayttgtttttaagttttagataatttctatcacagtcaaggaatactgttagcagagactttttttggtaagaaatttaattactgcatttaaaattcacataaagcactgtactaaagagtaaagatctgcatagaaaaacatgttgaattaaaaaaggactg

SEQ ID NO: 2718 - DNA, 600 bp, Bovine  MMBT19221
gtttatctcagagaaatccaggctatggagaaggctccactgattttgatattcccttcatctgccctcccagtaaggatgatccgtgtcaccaagataactttgacattatcatgatcagttgcagtgagtcttctgtaaatgtcagaaccagggtcccaggaatcataataagcaaggtttctaggccagataactctgctgacatgttcattagtcttttagtgaatgaataagttttttatgatcaagatatgtatcaatgctgttgtcctgtttataattatagagacaagaaayagactcactgatgcagcattcaagctgagaggaaaagagtagaggaattattacagacgtctggatggtgtccttaattcccccttcagctattgaatctcagctgtctgcaatcaagaactgagtcacaaaatagcttgtattgtgttgctatttctgtttaacagactgtttttcagcatggaaattatgaacaattaaccaggttttaaaatttctataagaaaaacatttaaatgcagctataactttagctataatagcactaagtacaattaaacaaaaatattttaataattg

SEQ ID NO: 2719 - DNA, 600 bp, Bovine  MMBT19222
gttacctctctgaggatgaggtatttcacctgaaaaatgagaatttgatagccatcttacaggtaattgtgagcgttatttaataaacagagtaaaatgcctgataatcatattcaggaaattatggcactcaatacattgtgagagaaatttttaaaaatcagaagtttgcattagatcctcagagttttgaatgtrcattgctcaatgatatttcataaaatattttaaagmgaatattaaagaaattaaaaataatcaaatgagaaacactgaagaatcctgaaaataatcacacarcattttaaaaggatataacagtatattctttaatttcatagtgtatagtagtttgggcaggagttctagagaagggaggaatatagaaagaagtataaagcagggtgtaatgtagaatattgctctttataaatctatatttaagtattgggagaaaagtggccataaaatgttttaacagcagttaaatgctttaagtaacttgcattttagatattccataactatcaaaacaacttgaagattgcttctgtatttgagtgtagacagcttctacttgcctatcttctttccctcctt

SEQ ID NO: 2720 - DNA, 600 bp, Bovine  MMBT19237
tacaaattcaattaagattacacagtagaaaaatactctgacctaatcccaagcatagsttttaaaacaataggcaacttcttttagagtcttcaatactgttattgagaaggataatcaagttgcagaacagcagaggatgacaagatagtcttaagaagctagtgataatgtgatgatgatgaggatgataatgatagaatgagttgataatgggcaggaaaaaaatgttgtggaacacagaatatcattacctaatgttgtttctggagccttggttgtatgagtgacaggttcaaygayggtaggaagaactagccaaaaacaataaaataaaccaaagagatttttaaaatgtatttgaagactaatttcagaagctaatttttaagcttcargacagagagaaaagagacacatacttgttctttgcagatctgaccaaattatggccaatatccattaacctcrtaagacaggttatgcactttgttcaatatcactgtggtcaacaagaagctctagatgtttggttatctgacccttgctagcatggaagactttgctagatgagctttctacacgtttatgaatataaac

SEQ ID NO: 2721 - DNA, 600 bp, Bovine  MMBT19402
catgctgatgtcttcaaccttccctcctggcacatacatcccagtccatccaggccaacttctggggtgtcctctgctgggtctgcattcctcacagccgggtccccagacaaggacataagcattcttgtttttggcttgaaaagctttacatgccagccaacaactgaggagcttctgcttttgcttgaagaagtaacatgagccttgaacactggccttggctcccaggagggtacagggtagcaagaggtgccagactgaggtccagggycatcacaaccaccagccaggctggcygagacagtgcctgtkccctccctccaggcctttgagccacgaccctgccacttggaatataggtagcaytaggtttttaattcaatgtgatttatccttttgtaaatagtacattctcatggtttaaaattcaaaaggtacaaaagctaggaagtggaaattcttgctcctaccctttattcccaccatctgttacctctcctctagtaactaatgttaccagctatatccattgcacttataatacaagtaagtatgtgtgtgtgtatattcatattcatttttccctttttttttaaa

SEQ ID NO: 2722 - DNA, 600 bp, Bovine  MMBT19444
ataaatcactaaaacatttcaaaatgaatgtattcctcttcttcttcttccagttattcaacagacaggatgtaaagcatgaagtttaatacctttaaggaagaagataggccctgttcaatagactgtttaataaatcaggaatatttatgtcccacttagacacattttgaaaacatatcctccattctaggaagtaaagctaaataaattatgttgtaggaggattgttctatgtcattaaatattttagaagttttatttagaatatttcaaaattgcataatgttctatataacrtaacaattccaagtggactttaaaaagacatggatatctttctcaggctgattgtactatataaatttatgtatattaatgcaaagtaactaaacatgaacacctgcacacactacagattctctttacaattaattctaagcatttattgccttaatagtcatatggtactaaaaatgtgctacttttgacattatattacattttgttgtgggcatgccttattggcactgctaacttgagtctccatgatagtaaagagaattcagtccaaatctgcctaattccaatacttatcca

SEQ ID NO: 2723 - DNA, 600 bp, Bovine  MMBT19497
aatggagggttggtatctcttaaaaaaaatagaagctgctaatctggaatatatatttttagaactattaagccatggaaactacttttcacagctcaatttcctaataccatccaatttttgttaacatgtrgtatttttgggggcaatttttttttccatggaataattctagccatttcaaaactgtgcaagaactgacttcattagccaatggattgcattgataagacgcctgaattctaaagggcaaaacaaaattagggattttcctcactgttttggaaaaaatgactacakagaacatcaactttgaagaagccaactacttaaagttgtaacaatgattgtctttgaaaagattcagtagttaagtactgtttggggagaaaaaartgttaaactattcagtagagtggatatgaccctatcacaaatgtagaggaagtacctttaaggctttttaaaaataggttttrtattataaagtaattagcctccaattaaaataaacatattaaaaacatgaaaataaaaatagsttttagttgccacttatgaataatcataattartattaaatatcatttatagaatgta

SEQ ID NO: 2724 - DNA, 600 bp, Bovine  MMBT19499
gtaacaatgattgtctttgaaaagattcagtagttaagtactgtttggggagaaaaaartgttaaactattcagtagagtggatatgaccctatcacaaatgtagaggaagtacctttaaggctttttaaaaataggttttrtattataaagtaattagcctccaattaaaataaacatattaaaaacatgaaaataaaaatagsttttagttgccacttatgaataatcataattartattaaatatcatttatagaatgtattaaatttttagactggcaaaaagtgtggattaaaayagaacttaaatattatatcttaaatatcaaatgaggtcttcttatcaccacagacatatttttcaatgtggtggaataattaataataagcaagccctgtcagcactgaccccttaayagtggcagagataagccagcctcccacccaagggagcaattggagggattttctcattggtatcatgactttattattaatcacagatcctggcaaagcatgtatataagaagatgtatgcagggggaaagcggttagacaggaattagcacaacgtgttagtagttgtctttgaatggagt

SEQ ID NO: 2725 - DNA, 600 bp, Bovine  MMBT19561
ttctagaacattgtttcttactgctttttgccactagatggaagaagcaggttaacaaaatgatatttttggtgttttattcagctctacccagaaacaacccacaacactgtgtttaaaataatgacagtctcagcattcttttttatttttactgaagtatttcttttcatatacatactagatctaaaaagtgtatttcttttgtatttttatagagattaattttctttttattattttaaaggactgaaatttttgaaaacaaccaagaaggaaagcaactgctactggaagagragaggtaagaattataataagatattggtatataaaaaatagatatgtggcaaagtaattcttcaagtgcattactgtccaatacataacaatcctcattcatgtaattattcttttgtgccacaaatgcttactgagcagttggcacattgaaggcactaaacaaagtgctgagaaacacacaagggatgacttgagtgcrgtaactgcttataacatttttacattctacaggggagttgagcaagactcatttatgcatcatttaaaataargtaaagatggataaatactagaaat

SEQ ID NO: 2726 - DNA, 600 bp, Bovine  MMBT19562
ttttgtatttttatagagattaattttctttttattattttaaaggactgaaatttttgaaaacaaccaagaaggaaagcaactgctactggaagagragaggtaagaattataataagatattggtatataaaaaatagatatgtggcaaagtaattcttcaagtgcattactgtccaatacataacaatcctcattcatgtaattattcttttgtgccacaaatgcttactgagcagttggcacattgaaggcactaaacaaagtgctgagaaacacacaagggatgacttgagtgcrgtaactgcttataacatttttacattctacaggggagttgagcaagactcatttatgcatcatttaaaataargtaaagatggataaatactagaaatacaggtacaatattttggacatacagggagtgtaggtttggagtgtcacgttaatctgaggagagcaggaatcacttcatgaagaaactggaattaagagggacagttgatgtggaaggagcagagaatggctttcctatgatagaggcagaatgagcaaaggcacagagcaggaaatagcaggttaaaagcatatataatg

SEQ ID NO: 2727 - DNA, 567 bp, Bovine  MMBT19563
ggaaagcaactgctactggaagagragaggtaagaattataataagatattggtatataaaaaatagatatgtggcaaagtaattcttcaagtgcattactgtccaatacataacaatcctcattcatgtaattattcttttgtgccacaaatgcttactgagcagttggcacattgaaggcactaaacaaagtgctgagaaacacacaagggatgacttgagtgcrgtaactgcttataacatttttacattctacaggggagttgagcaagactcatttatgcatcatttaaaataargtaaagatggataaatactagaaatacaggtacaatattttggacatacagggagtgtaggtttggagtgtcacgttaatctgaggagagcaggaatcacttcatgaagaaactggaattaagagggacagttgatgtggaaggagcagagaatggctttcctatgatagaggcagaatgagcaaaggcacagagcaggaaatagcaggttaaaagcatatataatgtatagtgatgaaaggacagtgcattttaaaaagcaactta

SEQ ID NO: 2728 - DNA, 600 bp, Bovine  MMBT19564
taggtgagcaatgttgatagcctcgactgttggagggaaatggacggattcaagagttacttaggaggcagcatgaacaacacttgataattaggggtgtgaggaaaagaaggggttgacacccagagttctgctgagcaagtgggtagacagtaccacacacggaaaaatatgggatgaaataaaataccggacctgggctaggtgaaattagttcacaatactgaaaatactgagtgtgagrtacctattgaaatgttcagtagacagctggaaatacagattatttcaaaaaggtcracattagaagctgttttataacaataattagcctttttcagtttgtctctgtcatagaaatagacatctgaactcatgctgaaagagaacatttctactctgaatatacttcagctctcaagagtatatacgcaactgaagaggtgtggctgtgaggtgaagggcaaagctttcccacaatgcactagtctctttgaaaatatcacagatactttaaataagagaagagaagtcatggttcctgaaggcatgggatgagagtttgaatgtgggccagtatctcaggcatcataattaatt

SEQ ID NO: 2729 - DNA, 600 bp, Bovine  MMBT19565
caggaaaaatagtaagtaacatgactgtagtaaattaggggcttttagcagtaatctaggtgagcaatgttgatagcctcgactgttggagggaaatggacggattcaagagttacttaggaggcagcatgaacaacacttgataattaggggtgtgaggaaaagaaggggttgacacccagagttctgctgagcaagtgggtagacagtaccacacacggaaaaatatgggatgaaataaaataccggacctgggctaggtgaaattagttcacaatactgaaaatactgagtgtgagrtacctattgaaatgttcagtagacagctggaaatacagattatttcaaaaaggtcracattagaagctgttttataacaataattagcctttttcagtttgtctctgtcatagaaatagacatctgaactcatgctgaaagagaacatttctactctgaatatacttcagctctcaagagtatatacgcaactgaagaggtgtggctgtgaggtgaagggcaaagctttcccacaatgcactagtctctttgaaaatatcacagatactttaaataagagaagagaagtcatggttcctg

SEQ ID NO: 2730 - DNA, 600 bp, Bovine  MMBT19569
gagacttcagagggaaccagatactagatggttcgattagtcttttgccgctatatccaggtcaggcaactgatttgcaacttaggaccactacagagtttcctctgaagaaaaagaccacgtggcactctatttatctctgcattcatctctttgcacccaactaggacaactttttacattacacagctcagtctggcttctcaagggcctgaactaccagaacacggctttagytcmacttttgcatttttttctagctagtagttacccamactgagagtcyggattccctaaagrcaaaagcaagcctatgctaatataaaatgaagttttgaagtaacagacctttcttaaagaacttcatagataatttttggagggggtgggactcaaggtcatataacataagcttagttcacaaaatacttctttctagytatttyttctttctttgaccagctttatccattacttccacttcaaacattatatacacactgataaattttagaaacagtattttaaatctcatgctttctttcccaagtttctggcccatgttaataactatgcctgggcacctcaaccgggagtcct

SEQ ID NO: 2731 - DNA, 598 bp, Bovine  MMBT19768
  misc_feature (1)..(113): n is a, c, g, or t
nnnnnnnnnnnnnnnnnnnnnnnnnnnnnnnnnnnnnnnnnnnnnnnnnnnnnnnnnnnnnnnnnnnnnnnnnnnnnnnnnnnnnnnnnnnnnnnnnnnnnnnnnnnnnnnnnaattggactacatttgatcaaccctcatataacaaacagtatattcattgtatgaatgctgaaaagagaagacagctaaggttttcatgtctaatttctgctgatctacatcatgtagagtcggactgagacacacaggcctacgtagaagcttacattttwaaaaaatgcatctggggcacatttrctgtcatccttctgtctaaataaaataatgccttttttattatgaakaaggcagaacatagttttaaggaacaacttttggtaatctgcaatagcataaaatgctctcatctttcagagtggtacttatataatgagattacatctatttatttttgtatatatgaaagattcatagagcttttggcttttttcacataccttgctttggtgtataaatggcatcctgaagtacagtgatgaatttaaaaaaaatttttttttcaaaaatggcattatgtttatagtatatgcaccag

SEQ ID NO: 2732 - DNA, 601 bp, Bovine  MMBT19929
  misc_feature (1)..(1): n is a, c, g, or t
ncagccttctaagacttgagccctgctgaaaaccctgaaaagastttctttaagatcccttctagccgatttttttttttcttggcttctgtttctcttcatatcacttttctaatgctttttttctagataacatttctctgaagatagaaaaaacatttccagtgtctgcttagatagggagatagagttagtctggtttctgatgtggcctaattttagatttgattctttacccagactattttgtttgctcttgaatgaggaattctggaaagtaaccggagaggtttgtttagaytcagctggaacatttcagagaggaagacagcaggtattttcagcagatgtttgccatgctgtggattaaaacaaaacgtgagactaatatattctgaaagtggrtctgaaatcccagtgatctttgaaattcttacgtttcagaggctcttggttattcacagcaattcagaccagattttgtcaacattttcaaaaccagaggttagagaattatatgctacatcttcagggatcgtaggtatttataccatctactgccaataaaagctttctgtttctcctgattttgccacatttt

SEQ ID NO: 2733 - DNA, 600 bp, Bovine  MMBT19932
aacataagttgtgctgggcccagttttgctacaattagcattgtgtttatatgccagatactacagaacaggaacacttatttcccttaatgttaacatgataaagctggtgattaatgtttttgatgttcaatcatttgttataaaatattgatataaaatgccatggaagtaaaatagatctatttacatagtgagtaagctcagctctgccagtccagttatgagaggtgatattttagcatctcccagtcaagtcatgagggtacacttagtatactgaaagtgtctggacagttyattaaatggtgctgaaatatcctggccaagctgtcctccgtggacaattaaagcagcctgcttacagtagagctggcctaactgggggcacttcatacattagtttgcatcaaattagggaggctgctagagaatgacaggcgggaaggcctgtctaatagcagagtcctaggggccacacggaagccctgcgttctaggttcagctcagccaccaaccaccagtgtaaacagccttctaagacttgagccctgctgaaaaccctgaaaagastttctttaagatcccttctagccgatt

SEQ ID NO: 2734 - DNA, 600 bp, Bovine  MMBT19933
tacccaatgctactttcactgtggttttaataagggatagcctgttccctggrtggtttccaacaacagtggacacacttgtgcatgtgcgcrcrcacacacacacacacacacacacacacatcatattagactgtgcagccataaggtttgtatttttagatggatatttgcataagcacgtttgaacttatgttcaaaatgtcagatcttgctttatgatgatctaaccaaaaaaaaaaaaaatcagatctacagatttctctaatttagacacatgcaagtatatacagaagcttrtagcaatcagtacaaaagaatacatcatcagaaaagacttgaagaaatagagaacgaactcaggagatgctgtctaatgcctagtctggccatgggggaatatacaaagagaaaatgatggtagcttctaggacaggctgatgatttgagcttaggaatcttattccctgcrtgttaattttgttggaaatgagcaattgaacgtcaagagagggggtgtcagattgaaaaggctttcactggataggtctgggaaaatctgaatgtgaaaaaaaattaagtatagtaatgaaatgtaaa

SEQ ID NO: 2735 - DNA, 598 bp, Bovine  MMBT20413
  misc_feature (1)..(155): n is a, c, g, or t
nnnnnnnnnnnnnnnnnnnnnnnnnnnnnnnnnnnnnnnnnnnnnnnnnnnnnnnnnnnnnnnnnnnnnnnnnnnnnnnnnnnnnnnnnnnnnnnnnnnnnnnnnnnnnnnnnnnnnnnnnnnnnnnnnnnnnnnnnnnnnnnnnnnnnnnnnnncgtgtttctagggattttagtggatagttaatggtgatcactcacaagtatgttgtgaattttatgcaaatatttttaaaaaactattttatcttccacatttagaaaagtcacaaagtcatgtgaagcactccacatattttgstctagtgaaagaataaatatatcacctgtaaaaatctcataatgcacttgcaccaacaataatacaccaaaagtaagacaatgatatagaatacatataaagcatctctgtaaatcttacctcaaaacagtgggaccgattctcccactgtagaaaacaaacgacagtagccagaattctgtgtaaagtgagacagcaatccacctgtattacggttccacttgtattacagtttaccatgaatatattcttcctcatsttagaactgtcattaaaaatggcttttcttcaaacttct

SEQ ID NO: 2736 - DNA, 600 bp, Bovine  MMBT20599
ttaggtcttataaatatctaataaaaggaaagggagtagatcttcaaaggggaatgtattcttggtgatgaaacataaacatctttacttttatttgattatatcctagtacaaattgaatatctattggaattaattctacttctctagattcctgagctaaatcaacatccattctatcaacttagttaaccaaattaattacaaccttgcaggaaaataaaattaagaatgacagacatgctctgtgatacatatctatttcaggaaacttaatttagttaaccatggtggaataascattacttccttaagaaggcacagaatttgctacactcatcaacacagaggagcagcagttattcaagagttattcatgaggttgatgccattcactgaagggacaacctgacaggccccagatcaattttaaaaagttaactaagggtttactgtgaaattctgcaggagatacaaagaaatatgatacagatattgactcttcaactcttgaggggataactcttaggcttgagtagcagcagctgcaagtgaaagctcagaatatgctatctgcagacacgtgttttcaaccaaact

SEQ ID NO: 2737 - DNA, 600 bp, Bovine  MMBT21027
tggaccaggaggcaggccctcaccagacatggaatctgaacacctcttgatcatagagttcccagcctccagaaccgtgagaaataaatttctgttgtttataagccaccaatctatcattttctgttagagtagcccacrtggacgaagacagaacattttcttaaaaaaaaaaaaaagtatacrtcagaatatacctaaagcaaacacaaacatagcaaaacgtttattattgtatcctttaaacagtactgacttgatattcaaagcacagccataaatgcatgcaaagtagagcakcaagtattaaggtgaaaatttggttcagagacttttatagttactctaaaacatctttgctttattgtgagaaattataagaagtttgggaatatatatatgacataaattttacactgtagctctggtgccacatgttccttcatggaatttgttccaaatgaaaagctagaaaactgatttctctcaataaaaatgactataattgaatttggtgactgctctcttgaaagtaactttttgagcctcctttagaagactatcccaatattaatgcacaaattagcagctttatttaac

SEQ ID NO: 2738 - DNA, 600 bp, Bovine  MMBT21097
gcaaacaatgatttctccctgtcagaagggaagcgacacttcaaatktcttattcacctcttaaaaccgggaacagactctagtcacgaggtgagaaacatcaaacaatgaatggcatgaaaaattttaatttagataaaactgaacctatgttacattacagagctattgtcttaaaaaaaaaagccctctactctaaataaaactatgccctctactttccaaacgaagcaatattaaaaccttatttgtacatgtgcctaacgtcatctaaatctcacaaaaatactgaggtactcrgagtatcataactgtcttcttgttggtttaactaaagagataacgtaggagattcatagacttgccaaccaggagccatccctatyatatgactcckctaagatctaagtcctcagttttgttctctgaaaaaagggggatgatattacttcaaaatattcttaaagctgctgtattttctctcaccatagattagtgttcacgttctagaatgtaacattattctagtttttaaaattcagcctattctgagtcattcatgttgctgaatgaatcaataatttgttcctctttattgct

SEQ ID NO: 2739 - DNA, 600 bp, Bovine  MMBT21115
acatcaaacaatgaatggcatgaaaaattttaatttagataaaactgaacctatgttacattacagagctattgtcttaaaaaaaaaagccctctactctaaataaaactatgccctctactttccaaacgaagcaatattaaaaccttatttgtacatgtgcctaacgtcatctaaatctcacaaaaatactgaggtactcrgagtatcataactgtcttcttgttggtttaactaaagagataacgtaggagattcatagacttgccaaccaggagccatccctatyatatgactcckctaagatctaagtcctcagttttgttctctgaaaaaagggggatgatattacttcaaaatattcttaaagctgctgtattttctctcaccatagattagtgttcacgttctagaatgtaacattattctagtttttaaaattcagcctattctgagtcattcatgttgctgaatgaatcaataatttgttcctctttattgctaaataaaactctactgtgtgaatataccacaatttgtttatccattctccagttgagggacatatgcattatttttaattttggctattaagaataa

SEQ ID NO: 2740 - DNA, 600 bp, Bovine  MMBT21702
cattgcagggggcatgggttccattcctagttggggaattaagaccctgcatgctgcatgatgtggccaaaacgaaaacaaaccaaaggaaaccacctgaaatgtgacctctgtctgaagttaactctggttccctggggcattgcgacttctggcctccctttggcttcytctgtatcaagcctctgagacagaagtctcgtctgttagggcgcattctcattcgtctgtgtaccttccaggctttgagctcctggggygtgaggctggtgttttgcttatttctgaatctcyggctckcagctctgacctagcaggcattaggcactcgaagcacggtctgagataaacaataggtacgtcgtgatcatcagcggatggtggttgattccaaagcacagacttttgatgggagccttggttctgttaccttcatgccggcttgatctctctaagcctcagtttcctcatctgcaaaatgtacttgtgaagattcagtgaaattctgtgtgtaaagagcttaacacaggacactcaatgatgctgcttattattagctaaacctgtctcagtccttactttaccctgaggagtagatga

SEQ ID NO: 2741 - DNA, 600 bp, Bovine  MMBT21767
gtcacggcagtggttagaagaagggacttgctgtgtcacagttgcacgaaagatgcttattacatcacagatagggggtttgagtccagactaaaagatgaaagcaagaaaacacatacagcatttgaaatactggttagtataccagaaatcgtttttctttttcttttttcttatgatcagtgtttttgccggttgtcagatcccttaccccaaacgagaatttttaacagaagaagaacctgatgacaaaggagacaaagtaagtattaaagtacagttggcatctggctttgttcrgtgcccccatgacttctggcatggacatctttggttctccctctgagttgagctgtgtctctctgtttaaccaattgagaagaaccagcagcagcagccgggcaataaccacacgaatgggaccggccacccagggaaccaagacagcagtcacacccagggacccccgttgaagaaagtgagagtcgtccctcctaccactacctcaggtggactgatcatgacctcagactatcaggtactcaggctgtctctcagtgacctgcgtgtcagtactgcctgtgggcttgtgagcactgg

SEQ ID NO: 2742 - DNA, 598 bp, Bovine  MMBT22027
  misc_feature (1)..(219): n is a, c, g, or t
nnnnnnnnnnnnnnnnnnnnnnnnnnnnnnnnnnnnnnnnnnnnnnnnnnnnnnnnnnnnnnnnnnnnnnnnnnnnnnnnnnnnnnnnnnnnnnnnnnnnnnnnnnnnnnnnnnnnnnnnnnnnnnnnnnnnnnnnnnnnnnnnnnnnnnnnnnnnnnnnnnnnnnnnnnnnnnnnnnnnnnnnnnnnnnnnnnnnnnnnnnnnnnnnnnnnnnnnnnnccctgccctatgagggtacctgcaggcccacttcttycccgacactgtgctagggagagatgaaggtgcccgcccgcagarggtatagaaggccgcagaggtggacttctgtcctggcatgggctccctgagcaggccctttgctcccagagacaggaagaccctgccctcctgctgtgatcagcatccctttctyatttgcacgttcgtgtcttcaccgctttgctctgtggtatccatttagacttgcaagtaaactttagctaattccaataaaatagccgtgccaagcgctgccagaattctaattgtatttactaagtagctaataaatatttactacaaatctcattgctccataaaattgaagactgcacct

SEQ ID NO: 2743 - DNA, 600 bp, Bovine  MMBT22194
tgtaaattcgccccaggcttctgttcccttggaaacaatgaggctatgatacatatgaatgttgtcttcagagcccccttctctgaagttctgcacctgggctggagattgaggctccatctttgtgtcagagtggctaagatcgtccaccaggggagagtgaaatgttttattcctacagatcctatttccagtagcaacatttctggtagtctctgcttttagagatcaaggtttttctggatgtaagaaagcaggagttactcaaagaaggttataatgtcagagtgtccttgggaraaatattgtttcctattactttgcagctggttttatctttatctgttagcccagcctgatgaatagcaggggtagatttttactttcccagtctgagcttatttttactttctcaaaagtttggggttctgggaaggaaaatgtgatggttaggggatcagtgttcttcagtttttccaaagcctgtgaaaacttgtatctagtctaaatgaacacaaaccattaacaatatttgagaagcagctaggtgggagctgccagcttggctgatatggcagctggggggccccagtcttgggg

SEQ ID NO: 2744 - DNA, 600 bp, Bovine  MMBT22274
accccctccactcacccggtggttgtccagagggtcctggtctcgaggtgccatgttatcaaggtcgctgaacacaggccaatctgggcagggagaaaacagagcaaggcagcagttccayggctggaacaggtcacaaggtccatctaagctgccatcaracctctcttattttaaatttatatttatttttagggccacaccacatggcttgcaagatcttagttccccgaccagagatgaaacccaggccctcggcagtgaaagcgcagaatcctgcagaaagcaccacygaaggcrccactgggccactagggagtttccaaaccttttttatttgacatttataaagtacaaaagcgggagaagaatgttgttggcacctgagaggccacagttcttctttgagaatttacccaaactctctacttgccagctgcctgtactygtcctgatgagcaactagcttagctgctgcgctgccttggggtttccataaggtaaacagtgatacgattgtgtaaygtactggtcagccgtcaatgaggtgcagttgtgaatgaaaaaagaggcatttgtccatttggggtacaaatggga

SEQ ID NO: 2745 - DNA, 600 bp, Bovine  MMBT22718
caactcagataccatataataaagctaaggctgagcaagccacagtgtggccaccctctggagtgtgggatggcatggaaatcatgttgaaactcagcagtaagcttataaactagggggsagtgaagcaacctgagtatgaagtagtgggttcctrgggattagaaacacaagtaccttttgatttttatttttggccgtgctgttcagcttgcgggatcttagttccccagccagggcccaaacctgtatcctctgcaatagaagtctggagtcctaaccactggactgacagggaaytccccaaaacacgtgtagattttgaattccctcccccagcattgcctctatactccagccacacgatacccattcagccttaatgtctgctcctctcagagtctccygttattttctctgcctggaagctctctcatctactcttcatacttagactttaaaaaaaagaaaaccatttatttatttaggcgtgctgggcctttgctgctgcaccggctttctctagttgcagtgagtggactactctcgggttgctggctcttcactgtggtggcttctcactgcagagcacaggctcta

SEQ ID NO: 2746 - DNA, 600 bp, Bovine  MMBT22767
ccatccctctgcctctcctcgcactgggctcccgcccccagggagctccagacatcaccggaacttcctgggcattagcctgggcaggggcacggttttaaccagtgggaacagtcaagctagaagaatgcatgttcccaggcccagcttgcggtgctggggccgtagatgaggagggggactgttttttaaatcgcttgggaatatcctttcttttgggcgtagaacccagctcttgctttttgaggaaacttccttctctttcatcctgtagaaagtatttttcgattygacccattygtggattgtaaagtcaaggttgtggggtagagacagtattttgcaaaatgaaataggatagaaaattattagaaagtttcccacaataagaaaaaagtgaaagaaagtgaagtcgctcagtcgtgtcctcatggactgtagcccaccaggctcctcagtccatggaattttccaggcaagagtactggagtgggttgccatttccttctccaggggatcttcccaacccagggattgaacccaggtctcccgcactgcaggcagatgctttaccgtctgagccaccagggaagcccatca

SEQ ID NO: 2747 - DNA, 600 bp, Bovine  MMBT00134
ttgttcatcattatgaggaaaaagagtgttttggctagaaattaaaaatgcaaattaaaacaagctttaaggtatcattacaaactgatttatccagaaaggaaattaaacacgtaataggcaatggccggggtgggagagtccataaacgtctgcatacttggcaggtttataaatgggttcaatgtttttgaaactcagaacagctctgtgaataatgagttgaaaagctgttaatatctttgatcctataattatccccaaagaaatcctcccaaagggtgggaggagtcattgtaygtaaatgctcccagcagtgctcctcgtaaaggcaaaaactggaaacaactcagataccatataataaagctaaggctgagcaagccacagtgtggccaccctctggagtgtgggatggcatggaaatcatgttgaaactcagcagtaagcttataaactagggggsagtgaagcaacctgagtatgaagtagtgggttcctrgggattagaaacacaagtaccttttgatttttatttttggccgtgctgttcagcttgcgggatcttagttccccagccagggcccaaacctgtatcct

SEQ ID NO: 2748 - DNA, 600 bp, Bovine  MMBT00144
actgcctcagccagagaggcaaggaggaggaaagatcgacacccctcgtgtctggacctgccggacagycagsgcaagggtgctgctgtggtggcccacatgcaaacccaggcggggagagcaggcggcaagagtgagcttctgagatacaaagaggaygccatggttgtgctcaggacccaagcatggggcaccaaaagtcgtccccggcggaggagaaggaagatctgaaaataaactggaagatgagtatttgagtcaggaaagaaaaagaccacacagaaaagcgatgaaagaagygtgatgtgggcagcgcatctctttcactgtaccatgcacaccaccccagaaggtcctgggcagacggaactgctgaccttgcaggccaggcaactaaggctcccgaggcgaggctcccatgggtctcaggcctgttcccacatgtgccaatggctgcagggtctctgaggctgttcttcagcccggggatcacattggtttgaagcacgaggttcacttaaccaaggggttggtttataaacgcccagctcccgtggggcctcagtgggtccccagcaggcctgagcctcctcccccaca

SEQ ID NO: 2749 - DNA, 600 bp, Bovine  MMBT00150
gctccttgcccactgaagagtcggggtggtaaggagctaaaaattcaaaggcctgaaaatggtctcttcctgctttgctgatagtacactgattcacttcttctcaagccacctcttccatctatttctcttttgaattctttgcttctacaattgggacaccctggggytggagagctctcaccttyctccccactgaattctcgggggctagcacatggcatatacgcagtgagtacttgcttagtgaatcyaggaataaaggacttytgcgttttagcttcctttctgtagtcttayactcccttccctcatggtaaggactagaagaggctgtgcatgtgcagagagcggagactggaatcacgcgagggatacagaatgcttaactgcagccagcctcagctcaacaccctgttcaggccacctgactgagtcttcccagccgttctgtaaggtgttattaatatgattatgcttagtccactgcaggggaaactgaggcagagggagaccatacagcaaggaagagggactgctgagaaaagaatccagtagtttaactatacagactgctttgtatactcaagtatactgctg

SEQ ID NO: 2750 - DNA, 600 bp, Bovine  MMBT00424
acaaagtacacttgcaattcttcaattatcacactcattgtggctattaaataattatgcatgtgctcccttccctagactataagctccatgagggtagctaccatgtccatcatatccaggattaaatcctcaggacctagtgcaggggacggttgaattcattaattagcagatgctccaaaaataatttatcaaatgagtgattaatgaatgaacaagtgaacagaaaataagagaatatgtagataaagttaaaaaaaaaaaaagaggagaatccagagaatgagaaaaagtgaraattctacaaagcaagacacatattccattgccaagacaggtaaggagatgattactttggcagctgaagttgccatgtttccaggagccttctggattgggatgaaagcctacaacgcagccacagctgtaggagcccagggtgttggtgcagacagaatctgggccgcatcgtgagggatcctgaaggcactcgtcaatatctgcaaaaaactcaaagatatcaaacagtgcagaggagtaaggagattcttctttccaaggaggtccaacaaacttcctacacccctatgcagtccg

SEQ ID NO: 2751 - DNA, 600 bp, Bovine  MMBT00428
cagggctcaggaacgactggccacagccctgcagaagctggaggaggcagaaaaggctgcagatgagagtgagaggtaaggacgctttgaacctggtggcatgagcgtttacttctgggaaattgaggtcctgccatactgccaacctcccggagctggggtgagagtcagtgagatcccaaggacacacgtgtgtacacatacatataaatgggcaacaataccttgtaaaccatcatgctgtgtgtggaggcatttgacgtggcagttatgaaggaaaactaccaccagacagaggarggcaaaaaactgggcmgatataaggctgtagctgcgactgtcgtcagcagtctgtcckcagagcgctgtgtctcctgttgtctctgaaagtcactgtgcatgtggttgtcagcattctcaagacatcggtgtccagggtgatatgagaagacgggggatgaaaactggaaatgggctgtctgcatgaataactattagcagtgcttcaggccttgagtcactggacaactgtgtgtcagggacatgcacaaaaccactccaattaatgtatttgcaactgatagcacttcttacctccag

SEQ ID NO: 2752 - DNA, 601 bp, Bovine  MMBT03376
  misc_feature (1)..(1): n is a, c, g, or t
naaaatgagggctgtgctagtttgtagactgtgcctgtttctgcagtgtaggtacatgcactgtagcttctttttaagctgtcaatatgacatctctgaaaggcagagttggaaagagaggctaacagtaggctctctctagctggygtgggtacaagcccgcaccagcacagcaccgactcaagagaggatctgcctgggcttgagtctcagctctgccgcacgctagctgtggttgtggtttagaaactaactcccttaggcttcagcatcttcatctggaaagtgggattatggtagyacttgttgcagttacttgaacgttccttaaggtgagccacgtgaagaattaagacagtgtctggtgcacgaccccaagaggtrtgacctgcaattcctatgattgatcaaattcaaagaagatggagagatggcttccaggtgaaggattccaggatttaaggacgtaaatttttttttttcctggtgggtgtggtggggattgtggaagaggacagcatggcaaaaccaggtaggtaagaagagaccagttatatgctgaaaattccatggagttctgtttagttggaatattgtgttt

SEQ ID NO: 2753 - DNA, 600 bp, Bovine  MMBT12554
tgctttgagctgaatgaagcaacccatagatacacaatccccagacacatacacacttaattgatttatcttctttctcttacatcagttgtctatatgtgttgcttaactagtgtgcaccatgctgttgttcctaaattgtttacttttctacataaaagtgtttaatayagcatttcaaacatgaataagagtgctggttatgagaatccaaataatgaacaaaagagaaagccttaagtaatgagaatatttaaataacaaaacactttgaaagaaagagagaatcaagcctaaagraatcacattgttatatgaggcaaggctacaaaaataaatgaattagtaacaatgaaaaagctctacacatcacagttatcatctcctttaagtggaattgagaagcatttgcagtggattgaaattaacaactataaaactgagtataggagaataccattttgtagcatctgttctcacttggcactatatgagcaatttctgtatctaaggaggtaattgtccaaacaacaaatgctagatttctattttaagccaatgarttaaaaaaaaaaagaaaaaggaaactaagacaatgaa

SEQ ID NO: 2754 - DNA, 600 bp, Bovine  MMBT07591
aaatacaagcttatttgaaatattcactaccaaatcaagctgtatcttaagaaatatgttgccaatatakagtgatactctctttaaagaatactgatttaattgtcccttataagaatttatagccttctcattttatttacttatgccttttacrttctgtgacattctgccagtatttcaatctcttcatagatttgggaatcacgaaatctcaatagtgaactttttcaaaagtaaagagtcacttagaagacttcattataacaatggcaacaaaaaaaacattcttacttttcrtagaggactttattctacttttaggctggtggttaataaacatttgtccttaacaagcattctaactataccagagtatatcccagtgaacacattcttgaaatttcagctgccagtgcttattaaaaaacatttgagaaaaatatttttagtctttagcagcaaatattaccattgtagcactcatgtcatgtcttagtccttaatactattcctacttaaagaagtagttgattccaagactggggcagggatgagtacagatgatagtacaggtgacgtgtgtgatgatagacagca

SEQ ID NO: 2755 - DNA, 600 bp, Bovine  MMBT07812
tctcaatgtttaaatcagtgtacacagtagcatttgttaactatttattgtaggagcgaatgaatagttcccaaattagttggggatggagacctgggatctaattctagttctgaatcacctgtataagcttaggcaagtctttatttttttgaggtctccttttagcacctgtaaaataaaagcactggatctctaacctaagttagcattctttctagctctaacatttcatgactgtgcacccttagtttttaaatgcttagtagatatagaacaatattttgttttattttcaartaaaattttatacagaatcttaatatctaagacagataagaatggagctgctctgaatgaattgggcttagggataggaacaggagaatgaggcctttcaacttggctgcctgctggcaggctggttcttcctgtgagctccacgggtttgtctaagaaacacaaggtctctctcagacacagtttgaaaattctttctctagattaagtcagaaatgggaagtggccatrtatctgcataaaattctgttygtgtgkagatatggatttgatggagatgttgaataatgaaaraaagat

SEQ ID NO: 2756 - DNA, 522 bp, Bovine  MMBT13180
ctttctctgcccagctggccaattgttccaatccagtaaatcacagattcggcaaacacacttagggaaaaggggcagatgagtaaccccaagctgtgctgataaggcgaccaggactaagtctttgaatgtgtgcacaatggaacaaacaccttttatccctccaacccaccaggcaagccacaccaggaaaatcattttccaattagtcagcaggtttcagcgtcattacctttgagatcagatttgctaccattcaaaaaggcatcagagacagtggaggaaragttaagcatcatwtctggcatctgaggtctgggaggaggtgcaattagattagctgcaggaaaatgggagggtttacattaccagaggggctctacctggctccaggcttcacagtgaacaacgctttcaccatatggcattacaatggattagtgatcaagtacgattaatcctaatagatcgtcttttcaacctcagtggcttgttaggtgagaaaaaaattgtctgtcccca

SEQ ID NO: 2757 - DNA, 600 bp, Bovine  MMBT16293
ggtgtcacaggatgcagccttctgtacctaatggggctggggtcccacatctccctagaggcgacaactctggcctcagaatgcaaagggccctgtaaacagagaaggggacaatccagtaggggacacaggctccttgtcatcagaacaggtggcacagctgggctgagctggagcctgtgtttctagattctcagccccgagtctaacattcccactctttgttgtcgttcttgttcagtctctaaatcatgtccagttctttttcaaccccacggaatatagcccaccaggctcctytgtccgtggatttcccrggcaagaatattggaatgggttgccacttccttctcaaagagatcttctcaatccaaggatcaaactcacatcccctgcattggcaggtggattctttaccgtgagccccctgggaagcccacgctcaccctttgggtaaacataagctgattcatcgggctcaactctaggccatttctacattctgaataatatttgtaaatgacctgttcccgtggattgttcagaaagctagcacttagattttgctgtatttctttgccatgaaaaaagcacttacgg

SEQ ID NO: 2758 - DNA, 600 bp, Bovine  MMBT03312
tagttatctattttataaatagttgtgtttgtatgtccactctaatctcccattccctcccacaacttagatgcccactgacaaatgaatggataaagaagatatggtacatgcatacaatggagtatcacttagccataaaaaggaacagcattgtgtcatttgtagagatgcggaaggacctagagtctgtcacacagactgaaataagtcagaaacagaaaaacaaatatcatatattaatgcatatatatggaatctagaaagayggaatagatacacaaacatagagaacaaatwtaaggacaccaagggggaaaagggaggtggggtgtggratgagaaagaatgactkgaacaaactcattcttcaggatttttgaattttcagcaycaaataaacctcttactttggagctcttaaagcattccagtattaacctaaaaaaattatatgtgtgcccatggttgcatcatccttctcagcccatcatcaagctcatttcctgtgcatgaagcacaggtttacttatgtgacataaaatgcttttgcctctgtgacatcctttttcatcgacatcctttttcatctctctctgt

SEQ ID NO: 2759 - DNA, 600 bp, Bovine  MMBT07054
gttggttctggagctaaactgatctgtttcttacagctacttcatccgttccagctccaaagacaacagaccctccttctgccctcccatctgtggcctccttgcccagcaccacctcctgcgctccgcttctgccccctgcatcccagcacactgccactctgccttccctgtcccagcctggggacctgtccagcagtcccctctctcagctcagcaggtacggggacaacagggacccagagtccgaggcaccaaggccaagtcctgaagcttctggacggctgtgtccagggacakagcccacacttgcccctgcctgtcgtcctggcctttcgcagtaatgctgtgtggcgggggtggggtctcaggcgcccggtgtgaaagtcttgccgcctgtaacgcctctgctgtcacacagccctgggtctttgggaatggggtggggccagagggtcgcttctgctcctctttagccctcaggaggggaccccgtgcctcagccctgccccacattctgggccccatcactgtgatgtggggtgaaagtgccgggggatttctgagcaggtctcttgtgtggcacttgctgtgggttca

SEQ ID NO: 2760 - DNA, 600 bp, Bovine  MMBT08595
cccagctgcggtcattgtgagaaaaccctgtgccttcaagacagttacaaagactgaatagtttctgcggggtttttggtttcagtgtcatttatttttgtattttcaaagaggaagtgtgcaagacatcattatgtcagcagtgggcaaaaggctggtagactcttaataagtggacatacatgtttacacttcccaaagtttctctttctgtcaaaaggtctaaccggctgttggtatctctaggttgggttatttcttcccttgatggtaagcttaataaaatacatttttaagttrtaggtggaattttgaaagcctgtttctgcaaacctcagatttggcaccttattttgcttgtcaagatttctacttaaaataaataagtaacatctaatcctggacacggattaacaagttaattcctttccttttcaaaatggaccaattagcaaaaccctatctctgcagatttctgataaagcctaaaaatcaaacaaaagttgtattcatcttgaaagggcatagccataagaataatcacatattaaataaagtattcagatcattgctatatttaatatttcccatatgatacat

SEQ ID NO: 2761 - DNA, 600 bp, Bovine  MMBT12893
atgagatgaactcagaaggaacatgataactatctcaattactggaggagttataaagtagaaggaaggaatgaagaaaggtattacatgagggaatactggtatgtcaggcacttccaaagggcatccatatttaattttctttaatgtgaaaatgttgcctgattttataaccccagaaagtaaaagagggacaaacagaaaagacatgagacagaaggggaagtacggatagaaggaggtcggtatggaagtgcagtagaggagaaagggaaccaaagacagaaytggtgacctccraagacaacagactggcagaccctggcaatgctctagtcctgactggatgactacttgccttggagcctgtctgaaagaatggggtacgagtttcacactcttcccaactgcaaaatcttrgtctatgaagtgaggaggtttacagggtgggtgagaaccactggcgccatctgtggtggaaatcggggcagtgggggctgtgtcgggtctctttaaccaaagacacctgcagcacctacacttacactgtgtctgccacgactcccctcctaagtgccagcctcgggagagaagaagggt

SEQ ID NO: 2762 - DNA, 600 bp, Bovine  MMBT15592
cgaggagcaaatgggaccctgagccagctggacccttgaacagacatccagcagaattccatctgggctcggctgggaacttcccttgcagcctgtgcaatgggggaatgttccctggcttcatcctcatctggttctttggcctgcacctctctgccctgacccacagcctgttccacgtttgacctgctcccttttcctgctctgactcttggatataagcccctgttgccatgactatcatcccttggtttttgactcagcctggcttctggtcagagcttttgcactcacacatarctagcgctcagttttagctttggattcagttgcagtcttatttgtacacttgattcaggcctctaatttaaccataactttcttggttttacacattgaaatacaaggtctagacccaaggttccaaatatgggcctgaaggagaaaactttagcttgattattggatgttatctggatccagtccatgtccttctttagtgaatggctttgaaacagcacttcattactcatccctagtagggaatacttccctaccgtaatctaatatctctcaaagccatgagtaaatcaatcctgc

SEQ ID NO: 2763 - DNA, 598 bp, Bovine  MMBT17029
  misc_feature (1)..(218): n is a, c, g, or t
nnnnnnnnnnnnnnnnnnnnnnnnnnnnnnnnnnnnnnnnnnnnnnnnnnnnnnnnnnnnnnnnnnnnnnnnnnnnnnnnnnnnnnnnnnnnnnnnnnnnnnnnnnnnnnnnnnnnnnnnnnnnnnnnnnnnnnnnnnnnnnnnnnnnnnnnnnnnnnnnnnnnnnnnnnnnnnnnnnnnnnnnnnnnnnnnnnnnnnnnnnnnnnnnnnnnnnnnnntgccctcttccttacctgctacaaggggatatagcagcatatgtattgctcatgtggttggtgttgatggtggacagcaccyggcctttcagattccaaatgaggacggtcgtgtcactggaagcagtcatgatgaacttccctggaggtgagggggcgtaacacgagctgaggtcaatgacctgatcaactgacttacgaaggcctctgctgcccttcacatcatgctcccctcccgcaccaagggtcgccacagataaggatatractgaagactggcgattacctgcctctcctagggacttgctgtggctcccaggaactccaggggagcccaaacaaggtcccttttgtcacaccagaactgagcatacctctca

SEQ ID NO: 2764 - DNA, 600 bp, Bovine  MMBT17505
ttcctagtcaacttacagtcatatacttccataaacttttgctgaatacataaaaaagaacagtctgagtcagctgaggggtcttaggctctgggacttgaatctacttttatatttcaccagctatgtgaccgcaagctactcacttctttgtctctgcacaattttatgttgataaggaataatatccctttgttataaggttgcataaagaaaacttgatagtatgtgtgtatatttgcctcatgttatttagttgctaagtcgtgtgtgactctttgtgaccccatggactgtaastcaccaggctcctctgtccatgggattctccaggcaagaatactggagtgggttgccatttctttctccatatttgccktaatatagggatttaatatttattccttcagtctttgatagaaacaatatcttaaagcttttctttattgtattcttcatagccaaagaaattattttctctttttaagaacacacaggaaatccactgtctttgaccgtcatggtttgtttttcactggtttgtcgattttcagcactgattctgaagcttttgtgctaatgctcatcttacaatgcaag

SEQ ID NO: 2765 - DNA, 600 bp, Bovine  MMBT02203
agtgtacctacccatagtgtaattggaataccaaaagcagaagagaaacaggaacagaagaaatatctgaagcaatcatgactgagaatttccccaaattaatgtcagacatcaaaccacagatccagggagttaacaagatggatggccaaaaaaaaaaaaaaaagaagaaggaatgatagaattctttaaaagaatggtaaacaaaaagtccatatctgatatatttgttttaaaaagttttatatcctgaagcaaaatccacttatttcaaaagtgatagtctctttttctgtcaaratgtaaaattgcacaaacaagggaaaaaagcatcttacttcttttcggctcaatcagggaaagacatacaaagtccagtcttaatcaaagtaacagtcttactatatttatattttgtggtcaatacaagaaacataatggggactctgaaccagaaccaggggtgtgagtgattcacttgttcctaccaagaatgcagtgcattgatcagactgatggtgactatgggtggcaggcagcaagtgtgcctgaggcagggcacagaggaggcagaggtcccccaggcactgagaaaaccag

SEQ ID NO: 2766 - DNA, 598 bp, Bovine  MMBT03080
  misc_feature (1)..(115): n is a, c, g, or t
nnnnnnnnnnnnnnnnnnnnnnnnnnnnnnnnnnnnnnnnnnnnnnnnnnnnnnnnnnnnnnnnnnnnnnnnnnnnnnnnnnnnnnnnnnnnnnnnnnnnnnnnnnnnnnnnnnnaagttctgaaatgatgccttatattctctgaataaaagataactgccttcagggtaaataatatgcctgcacttgcagctctcttcctaccttaaaccatcactataatggcccaaggctctgcttctcatcactacacaggaagagagaacaaggtgtggcttacaaagctggtagccctaggyacatgtcactttacttttttgccttctcttttttcttccatttagagtcwtctgtgccaactctcagattggtaaacagagggtggggctaaaggtcgaaaggtgacagatctcaatctgaactcactagcttaatcagctgcatttcttcattttaatcaggaaatcctggagtgaccsagtcagcaagagcacttgtggggcgacaaagaagggagggaggggaaggagaagagggaggagtcctgtatcgaggaagggaggggcgcctctctcttttctgggctcaaaatggatc

SEQ ID NO: 2767 - DNA, 598 bp, Bovine  MMBT05683
  misc_feature (1)..(104): n is a, c, g, or t
nnnnnnnnnnnnnnnnnnnnnnnnnnnnnnnnnnnnnnnnnnnnnnnnnnnnnnnnnnnnnnnnnnnnnnnnnnnnnnnnnnnnnnnnnnnnnnnnnnnnnnnnctgagttctaattctaagatagttaaagacaaattcaaagttgttttaggcaatctaggtagcataagtttactacaattctccagtcatctagtaacctttttatattaaattaacaaagatttgggtaagcattctcaagaatgagtgttttatatgtactggaaaaaaggaaagtggtcatcccttagactgytgaatggctaataaattcaaagaattattcttgtctattaacacttgcagaattrtgttatgaaatattgagaaagaaatatggagtttactattcaatcacaaacacagcttatttcattattcttagcattatttmaagaaataattcatggaatgtctcatatacaaaaggataattcatttctagtatctttcaagtatatttttggttcatcattaaatatgtgcaattccttcagtcaaacacattaaccctctttataaaacagtttgacagaaaatagacaaatctaaaa

SEQ ID NO: 2768 - DNA, 600 bp, Bovine  MMBT05881
tcttcctttcaaaaatccaatcaaatcaggccacataaattcaacttgacacattgataaagatttttgggaaaaaatattgagaagggcagtgggagctttcctcagctcaggttaaaccagcttcatctcataagaatagtggcaatcaaatttgttctcgcctttcttaaaaatgtaattagaatgcagagagaagtatatgaaaagggatggggattatttataaaagttttagaataaatctttctgggtcaggagatttgcccaggggcaagaatttaatacataagcataacyctttagagagttgctgctccagggaattttttttttttccccaaccagggggaacttgaggaaatgaaaaatttcaaagaaatgttagaagtggatgggcgaaacccaatttgatctccactgtaatggtattattccattttgcattaaagaataatatccataatgtgaagattatgccaagtactctacaaaagcctgcaaaccttgaggcagtcaccgcagacttgcttccaattgtgcttggaatgacacacacagatatgctgagaagtgtagtgtcagcagagctttggggct

SEQ ID NO: 2769 - DNA, 600 bp, Bovine  MMBT07192
gttattcatatatctatttgttagagtagttttattttattttttaattcacctgaaagaccaaatttgaatagcagacagataccccacacacagggaaaaccatttttcacctataatgagcacattttacaagaaaaatgccacacaattcagtgtccctaaagcatatttaagatctagtcactggttacttctgcaaaggtcagtgctatattttcagccaattttcagtttaattgttatgagcctgggatccttgttacaagttcacaaaaataaatagttgagaaaacttayttatacatttattgtaaatgagtgaaatcatattaaaatataaaaatcatataaaatatatattccatacctaatttttctcagtaaattcagtgaccaaataacatgcaatagtcaagggattctgtttgtttcctactaaaaataattggctttcaattgtgatggtatacaaaggacatattgtaatgtgaaatttaatttaataaagaccttattatgttttggctttgttcagagacagtcaaaagaatatatctttattcccattgtgtaaaacatagagcacgtctaaccaaa

SEQ ID NO: 2770 - DNA, 600 bp, Bovine  MMBT10120
caaattgctaacttttattcacaaaaattagtctaattactccagttctacgaattgtcttgttttccttatcatatcagaggtactatatctttttttttttttccagcaggagacaaatgtggagagtttttattcattatgtcagtgttactttaaacctaagcagtccgtacccagaccaactaacacttcctcagatataagaaaatgttgaggtatcagttaaatggctgtaaatcttgctaataagcttctctggttatttaaatcatagttttgtctgtcttccagaattgrgaaaagaaacagcttgttgatgggtttgtctttccaaggagagcgctgtcttttgctgtgggccacgccacgcagtgcagtgtggccggrccgttgtctggtgytggtgccgcactaggtgcctgagtgctgttatctgatgaacactggtgtaggtgactgcagctcgtatgctttgtgaattacaggtagagtaaggagtgtcgtygttaccttgggggatattgccctataaataaagcctttttagagatggcttcctcaactcactgtccccttccccagggcaggggtggcagt

SEQ ID NO: 2771 - DNA, 601 bp, Bovine  MMBT11881
  misc_feature (1)..(1): n is a, c, g, or t
nggggaggggaccataatgtatgcctatggctgattgatgttgatgtttagcagaaacaacacaattctgtagagcaattatccttcaataaaaaaataatttaaaaaattaaaaaaaaattttaaagtttaaaactatttggaaatgcttatatrgattcattgctaattttcatatctaaaagtatttaggttttccatcacacaaacatgagaaaatgtgaaatggatatgatttatctatgataaatatatttctataaataaagcttatttcctctgttctattttttctcctttycccaaagacctcacagtgtttcaatttttgaaatctttcctctaaccaggaaaaattaagcagctgctacagataaaatgagcatyaccagcagatattaaaactgtcacctgatggaaaccggggctcaacattaggccttcaagcaataaccagcagtataattttgtaactcatatatcaattaactttatattactgtcacacatgacactaacagctaacaatattgcttcatgctgctatcttaattgcaaagtatgggtgctgaacgtgaatatcttaagatgaaaatatgtc

SEQ ID NO: 2772 - DNA, 600 bp, Bovine  MMBT15581
ggagagtgacctgcctggacagagttcagtgctggtgcactgttttattttgaggaaagattcctgctatctgcagattggtaatcatgcatccagggtctagaaatggttgtctctcctggtttattaaatctaaagtcagaacaggagcatcaccttccagatgccatctgcctgtcggctgagcagggtgcacttcagctgtgctcaggggccgtctgatgaacatctgatctgtgactctgcagaggagaaccatttcctgagatcacagggtagcactgtctatgttgtttatcyaatcatatttaaaaacccggaaaggcagacacgagcactgactttactgataaggagtgcagggttcattgtacagcatgtctgggtaaaagtgtctggtgtgactcaggaatcaatctttactcagagttgcccacttttagctttaagtcttgtgtacttttaattgtgaaggaaaatggagagtgtgtatgaaaagctggagatgtaatttttcatagcaatgcctaaaaggcaaattctaacgaagaatttcggaatggttcgcatctttcaggcaatgaaaccccagccccaact

SEQ ID NO: 2773 - DNA, 490 bp, Bovine  MMBT18403
ttttatttttttggactgagaaatgtyggaaaatttacactgccagtttagacactgcaatgttaggaggatcatttgagaagcggcaacctcaaagtaattttatactccttgagttacttttcactttgatccttactctggcacttgaaggcagctcatggagttgggcaggtggcaggcacagagccatggacctctggtgtttgagacaactcaaaaatccatcctgtgctaagtcagtgagaatggaagatcttcttgattagtgagttttaccactggcaccattatattctkgtacccttggtccatgttctaaagtaattaggtcttattcctggagatccaccttccctcactactccattatctactgtcaaatgtccctcatgttctccaggttctatccagcttcactcatacttattttgtggggtttctagcagtttttctgggcaactatagttcatccctaatctcaggtcat

SEQ ID NO: 2774 - DNA, 600 bp, Bovine  MMBT18408
cactgaagtgrgttgccatttccttctccaatgtggctatcctaaactcccaggkgttatataaaatactgagtgggatccttaggggaggaaartaggtcctctctgggatctttctatagcagccccacactaggtaacctgagttactttagttcttagtacactacccatgggtctcacttctgraaatgctaaaagcccatctacatatgtgtttgcatcctgctgcccctcagcacgtggggctggtgatgcctccaagactgcagcagtgactgcctcccttcacgggcagcrgcctcccacccccttctgctgcctggtccttcacttggactggagcagacctgctccttctctttcttctgaattaacttccttacctgaaaaatcttctggatccccttccatccccacaccagatggggtctctagtctcctcccgcttagctcttccatgtcactgtcctgctggctttcctccccacacacctcaaaacggggcaggagttgtctctagtcttggatccctcaaacatcaggaaacatttggtcacatcaccctccrcacagggctcatttcagcatataggggca

SEQ ID NO: 2775 - DNA, 600 bp, Bovine  MMBT18965
tgaggtacagaagaaactgagagtgtgtagtgttacaaaggctaagggaaagagtagctcaagaaggacagagtggccacctgtgtaaagcactccaagaagtcaaggggataatgaaaaaaattgtcagttgaattccacttcctgtctattagggcaggtgggaagggatgagacccagaggacatggaaaaggattagctttggtcaggagaaaagattcctcctcctttgcaacagaagaatgggtacagayataggtaggtttgtaaattmattgcaaatacattgtgaatttcycacatyagaggcaaaataatctgctaaaactgagaagagaagccaargagtctagaagctttgaagtggtaaccatggagagcaggtggatcagtcaagggaaacttggcaggatgtatgagcagtgttgagctcccagttgaggctggcgatcatgaaactgtagtgataatcatcagcatgttatgtgatatttcccctgcacttctcagctgcctgatgcaatcacagaaaagacagatcgctagatgagccagcatgaggttttggtaggagcagaggttcttcatcagagtttgt

SEQ ID NO: 2776 - DNA, 600 bp, Bovine  MMBT20089
tatcaaagtaatgtacatgcatttaaaaataggaaaaaaacaaacagaaaagaataaaagtcatccataatcccagaatctagagataacctcttgttaacattttagattttttcttcttttctatatatccatagaagtatatacatttcttttgtattcctgagatcatagttttattttataatctctctttatttaataaaatatcatcaacattgtctttcatcattaaatattttttaatggtatgattttttttcaccagttttattgagatataattgacatatagcattrtagtagttttaggtgtacaacatagtgatttggtatgttgcaaaatgatcaccacaataagtttaggtcttacattcaagtctttaacccattttgatttggggggatgtggtgktaggatagaggtccagtttcattctgttttcatgtggctgtccagttttcccaacaccacttattgaagagactgttctttctacatcatatattcttggctcctaattaattgaccatatatgcatgagtttacttctgggctttttactctgttccattggtctctatgtctgtttttatgct

SEQ ID NO: 2777 - DNA, 600 bp, Bovine  MMBT20445
ctcacacctccgcggcgagcggagagggagctggcgggtctcgagggctttaccctgccggctggcagaggggggcggtgctgggaccattaggaaaagacgcgggtggggggtggggagcgagggtcgcttcggaggagcacatgttatctttctccctcaactaaatcgagaagccggaaaaaaagggccggaaagagtcccactgaactttttctgtgttaaggccttaagttgctcaccattgtgttgccttagaagtgggacatcagtaggggtctttgttccctacttatcagytgagatgtcacttgtcacctcccatcctcatttcattcaactgtaaagtgggggcaaataggtccgtcttaaagtgtggctgtcaagtttaaaggtgagaaagtgcctggcttcgcagaagtgctgggtaaacgtcccccttgcgttcgtttgtatcttcctttcagccctattctgcgggagacttgctcrattgggtctcttaatgcgggtcaattcgccttaattccgaggtgacggagacgccaccgccttggtgcgcagcttcctcctaaaggggttgcaaacggctggcttacc

SEQ ID NO: 2778 - DNA, 600 bp, Bovine  MMBT20731
tactgaagacagctctaatctaaacaaatggccatagccttgagagcttccaaagctgatatgcaaagatggctgggattcaaggcaatgcaaaatgtgctacaggaagctttcaaagcacaaattaacccatttattatgtctgtggtaaagtagcatgttttgccttgtataacatttctcatgtttccataaaccatagtttaatatccttttggaagattaaaactagaagtcatttctagtgctaacaaatactttgattgagaggtataactgttctattgggtctcacaactyggcagctggtttcttcaattacactttttaagtagaacaaaactctgaaagcaagcaaacccttgactctgagtcctgcagtgggattggacatgctgtgctatctccccaaggcacatttccttaagcaaaagtgtgtctttgtagatggttacgtctgkttacttacaacatcatraacaattacattctcttttctggttcctataggccagctatctaaaattaagttaaaatatacacatttttgtaaagaaaacagacttgatttaaatagatcacgacaagtaatcattcttt

SEQ ID NO: 2779 - DNA, 601 bp, Bovine  MMBT21016
  misc_feature (1)..(1): n is a, c, g, or t
ngagcgatttcataaaaaagagagtcatttctgtcaacttggagttaactgatttttataaataatcgaattgcattgatactccaaacaagagtttcttctagataaagaatgacaagcaaatgccctacagaatgacaaatgttgcaggtggatctgatagggaccatctttacaaggagaccaagttagctgaatactttcggcttatactgtgaataaggatcctcagaaacaagtccatttttctgatcctcatatgtaatcttyataaataaatatttctttgctttacatctgygtggaaaatttgcctcctacacaagccccaccttccagccaggtccaaatctctcactacyaatgttatcattatccttkggagtccagctgctttgggttatgaggattttttgcaaatacgaaccraagggagcaaaacataaagcacttccatttttttccttcccatttccccaagttaaataacagtttattctgcaggctttcaaatcactcccacaaaattggcaatccaagacaatcgacacattcatgctaatccacccagaagtaaatacactgtggtaaaactgtgaca

SEQ ID NO: 2780 - DNA, 600 bp, Bovine  MMBT21052
ctgatcttaaatatttgttgcatgtctttctgtgcagttagtgaaggtggctgttttcaaggatgattctttgaagggaactgcctttcactgtgggttgtgtaatttctttgctccatctgtctcatctctgattatgatagcctgaatgttggcatttcctagtggtcaacggctatgctgaattactaaatctcttaagtctgtcgttatactgttacrgatcatggctgtccctttctgctttacacattgtagttctttggcagtgatatcatttcagtttaacctgagaaagcyttttattttgttttcttttaacctagaagttttaagagagtaatgtaaycttaagagaggttacattgcctgacacggagacaagtcccagtyctttaattgggatccttatgaactggctgagtcttaccttgccagatccactcagcacaaatactccactgtacttaaaccarcgtctcatayatccatactaaatgtttatgcggtttttgtagtggaattttagtcttaatcactcctctatcttctaaggtccattttatgtgagagactgggacctgtgactcctctttgaac

SEQ ID NO: 2781 - DNA, 569 bp, Bovine  MMBT22206
ttcccatctcgatctcttagagggacagtgggacattctttatcattttgatgtataggatgtatgaccaaatagaggaaaatgtgaaattggaacttctatcattgtcctcctgggctgccacacccacactgtgaataatattcgccttactcatactaagacrtgtgcaagccaagatgagcctactcaaaaaacaaagcatgtgctttaagccttcctggagctgctggaattgtcttgtgtttctcttcaacaaaatgcaacgattgctgagacactgcattacctgctgagcarttctgagctagacagcgtgagaaccctttcctgaatgccaaacaggtattgtcttctgtggctgggttgttttaaagagatgcaccccaggtctgaaataaactttgcaaaggcagtattctgtcaagagggctatgattatggttttggcccctctgctccagaatcttgactccaagaaacatactagatatagatggatagatatatacatacatacatacatgcatgcatacatacataggtcgatctctgcatgtccttagtaa

SEQ ID NO: 2782 - DNA, 600 bp, Bovine  MMBT22509
agtcggacaggacggagcgacttagcaggcacagcacacgaaccttctctgtaaattcaagtcaaggtcgtacacgaattctccaggaacatcactgattctgtaacatgttacactcgctcccctttctagggtgtgattttaaggtcttgattgtccccactgctcaaggcaaacgcractgtgtttaatgttacactgaaagtttgaaaaagaactgtttgtgtaaatacttactayatagaagcaaaatgaccaaaggccgctatttttcctcctcttacgaaaaataaatgctaycacgtacatcagggagacaagtgaagccgcataaccaagcgtcaggacaacctgaaaacaatacaaagacacaccaaagtcaagaaaatgaaacattaactgagggagaggttacaagcgttgctgaagcttctcgtcacacatgctctctgcgtggtttctgtttgggtgtgtgacagaccaagaatggaaacggcactactgtacgaaactgcatcagtgtgaaagtttaccaggaattgctgtgtaaagatactctctgtgccattgttacttaccaaagcaaatacaattcggctt

SEQ ID NO: 2783 - DNA, 600 bp, Bovine  MMBT03629
ccgtgaagttaaattccttaagggcatgaggtcagaggcagggtgggctatcacctgggtgcttgggcctggttcccaggccacctggggcagagggaagctgtgtggtggagactcacggagggacgcagacggaagtgcgcaggtggccaaggaggggggcgcatgtgaagcaagggggtcggtcagtgtggagggtgcgctgtgtgtgaggcatgctctggctgtctgcctaggacaagcctgagctccagcgtttctgggctgattcactacttcctctctccccaaaggaatccyctttatagctctccaggccggacccctggatccctgggaatgctgtctgacagctgtgtgagtgcaaccgtggctcctgaaccgggtgccagctgggcgtgctctgggagccaccgcttgggatgtcagaggagagctgctgcagccgcccttccgtcagcaggaagcccagccgcatacacttggacaggaagccccggtgctggccagctgagcaagctctggtttctcctgagtctgaggctttggcccagcatggagggaggcgagccaggtgctgtggctgggcggcactgacag

SEQ ID NO: 2784 - DNA, 600 bp, Bovine  MMBT04487
ggaacaaagttcaatgtgaactggagatttagccactgatgggttgtatgatcagcatggtttaaaccaatttatacaactctggccaaaagttccttttgggatcagaatgaatttgttgcctactttgaccaaattgactagaaattgactggctctgttcattactatgtagatacataaagcaactggggaacaggtgtcactctggtggcaagtagcagaaggtgactctgccagagaagctgtttactgaaaggatcttgggagctgtcagatttgttaggagaaagggagagycaggcttgaagctaagcttctargagcagtgaaaacatcacttygtagacctggactgagagggaccgctgcccctgctgtggtggaagcaccaccaagacctcaaggaaaccacactgaccctcttccagaatgccaaccttgtaaacattgtcatcccaaaactcaggcttcttgccaccattctgccagcaaaatggatctcctggaaatctctttccttaagttcctctctttggaatcaaagtttaaaggagtgtatctgattggcagaacccgagacatgtctttattcatgtt

SEQ ID NO: 2785 - DNA, 600 bp, Bovine  MMBT08688
aaaataatatgaagttcaaaaaataaaagtgcaggaaagaacattttaaaacatgccttagctgtggaaatactctcttcacttgtatgttaaagaagaagtactatttcgagagattgtcttaagattaaattatccactttgcagtttgcaaggtttttagtgtttatttcagtattattttatgtatttatttttcttttaaaccttggcaaaatgttaagttcaacagagcaagaattgcttgggacaatcaaatcacatatggttaacatgctggtagatgttactggtatcacwtttgaatgactttcataatgctaataggaagtttctaattgaataataatgttaaaatgtctctttctgtgcaatacagagactgttctttgggtttctaataacatgaatatatgttactcttaaccttatttatttggagaataatgcatatgattcattgacaatctagaggttactagaatgctgaaaagaatacaacagatacactaaaagaagataaattctttgaaaatgtatattctaagtattgatattgagcttgmaaataggcttatttcagtaaagagratacttttg

SEQ ID NO: 2786 - DNA, 600 bp, Bovine  MMBT08691
gtttgcaactgactttacttcttgaagttgtttaattatattatacatcattaattaataactttaaatcttgcactatcattttaattatgttaatgctatcaatccaattacatgaatgctctatatataacagagagaagaaatgtcagaaacwaacttttagtactttaatgtcttctctgatagatttttgtccctaatataattttcttaacattttactagaagaggatttcagcactgagtctcaatttcagtgtttaacaatgataagcctcttgactgttacaatattasacttgcaaatgccccattacctcaattataacacttttttcagattgagaccatttctcatttatatttcctttcccagttacatataactctcagtaaattttaaatcaataaaagtacaaatgaatgagtggaatatgcattccagttatggaattaaatagttctcttgcatctaactactttcaatgagtttattagaccaatagaccaagaaagaactattaaatataatgtacatgcttccaaaattacttggattccagaatgtgtaaagattcatggtgagacaattcagac

SEQ ID NO: 2787 - DNA, 598 bp, Bovine  MMBT09321
  misc_feature (1)..(74): n is a, c, g, or t
nnnnnnnnnnnnnnnnnnnnnnnnnnnnnnnnnnnnnnnnnnnnnnnnnnnnnnnnnnnnnnnnnnnnnnnnnntaagagaagggtgggtatgggtcatctatatgaacacaaggtggttcctattttaaggggcccagaaagaactagggcagaggacccagagatcctcgagagagacaagatcactgcagcagcttccaggctggctgtgcacagcatggcaaccccacacgttactgcctggccttctcggcaaacctgacccgcaacgcactcactcagcaaaaagcaagcactsggaggatgcaggttaggatggaagtcagcttagctcgcagtgctggtcaaggaccacagtgagggaaggtgaccccatgctgaggctcccatcccctctcatcaaccaagaccaggcccaccttcaaccctgaccctcgggtgcatcagtggaagcctggctcatagccagcatggcacagctctcgtcttgggccggccctgagtggtggctgcccagacctctcagatggcccagaggagggtacagaccagcccactcaccttcttggtgaacttggtggtcttgatctccacaa

SEQ ID NO: 2788 - DNA, 600 bp, Bovine  MMBT09402
tggtcgcagggtctctgctccagagttctgtggttcctggctcggccgctccctttgacttccaagctgcatacrgactgagcaatgagatggtaagtatctttcctggacacactgctttttttgttgacttgagaaaaccaatggctctgggccagtcctgacccacctcaggcgcacgaccatagacgactaggtgtctggggtccctgcgctcactgctgtcttcccacaggccctggccatcagtgaccattacccggtggaggtgacgctgacataagtcccttctggggtccrgaacctctgccccacgctgggagctgaagacaacaactgacccgtcacagttaagagcggagggcggagcttaaggaacccagtgccgttcgtccccgtgtgccctcaacyaccccacagcagctggaatttgaggagagggatggaaggtaggcttttcctcacctggcccacttccattgtaagtgtggcggtcgtgtcaccagagcaccccactttctcagtctggaaagaaagtctaaaactaagaaatgccttttaatttaaataaagctcaaaagggggtgttgtcattcacgc

SEQ ID NO: 2789 - DNA, 598 bp, Bovine  MMBT10175
  misc_feature (1)..(43): n is a, c, g, or t
nnnnnnnnnnnnnnnnnnnnnnnnnnnnnnnnnnnnnnnnnnncttcctgatgccctggcctcatgggacactgatggagatgagcctgtgatgtttcaggacccagtaaccttcgaggaagtgtcagtggacttctcccaggaggagtgggcccagctggcccccgctcaaaaaattctgtaccaagacgtgatgctggagaactacaggaacctgacttctgtgggtgagtgtggttggccacctctcttcgttagtagattttgtttttcagagctatcagtggtagcttacacgtstgggagtttacatgtctgaagtaaggtcctggagcaacaccccccaacatgtacacaatgggcaggatgtcattcatatttttttttttttttaagcagatttattatttttaaaaattatttatttattttatttttttggctgcactgggtctttgttgctacgtgtgggttttctctagtttcagcgagtgggggctactcttcattgcagttcacaggcttctcattgtggtggcrtctcttgttgcagagcacaggctctagggtgcaaggaytcagtagttgtagcgcacag

SEQ ID NO: 2790 - DNA, 600 bp, Bovine  MMBT11287
tgtaatcatttgagtctcctccacaaggcagcaaccggtttgattttgttcacctcagctgctcagggctggcmccagccctgggacccccgagctactcaaacatttaaactaatgaatgaattttgagactttctaaatactttgcaatcttttctatgatgcttttttgcccacggagatgtgtgagagcttgatcactttttgacaagaaaaccagaggccagagggaagactggggacaacagcagtgactgtagactggggtggtgtgggaggcagcgctgagctcctgagggygctgcgagtgttctttgtaaaaccttgacraaaaatgtaaaaatgccaaaaagaatgctaggatcagttgcatttaaaaaccatgtaggaaaactcttcaaaatgatacccacctaaagcaagtcaaggtcccagtctgatcttcaagacctcatatagtcacaagaagtctgaggaggtctcgaatatacaccctgagttttaactaagcaacccaagaaaccaaactttgagtgtggttttcagaaacatcagcagtgcgattttctaggagagttgtagacagtagatgctttgatt

SEQ ID NO: 2791 - DNA, 600 bp, Bovine  MMBT13187
tgtgtctgaatataggaggggatggggaaggaggcaaaaataatttaaaaaatgatcataagggaaaatagaatgaatagttggtttgggggtaaaatgattcattctccattgccttcactattctgactgctcatgtaatttctaygtaggacagtgacccaattccacctaaagtctcccacatcaggggtcatgatgggaagaagagaagatgagatgaagaaggggtcaccatgaactcatgtggtataagtagaagaaagactcgcacatcatcctctcatagctcgtgtccartgacactagaatgctccctgtcatgacaaatttatagaaagaaatagtatgcagtatataacatgaagccttttgaaccattttttaatgacatggaaaatgttcaaatgcaatgtcaactgaaaaaatccagtacaaaatagaatagacaatgtaatccacaatacaaagaaaactcatgtatatattgtctatataatcatttttgtaaagtctatatatatgtgtatgtatgtgcgtacaaatatattagaaaaggactgaaagcagttgttagttcctggtgtttagattaagggt

SEQ ID NO: 2792 - DNA, 600 bp, Bovine  MMBT13261
ggccatttctcaaaactcatttgcaaaccaaaacggccaagccyggtctgctttctctgatttcactttggggaaattccttggaagatatttgtggacgccccagagctgtctgctaggtgacattccaattgagtttacacaaggccaacagcttccttctggatccccatagtaatcagtttagccacgttacttgtaagccaaaagcactgctttatcggccacaaccagagcctcccaagtcccatgcatgacgcggctccgtgggacgaaggaggcaactgtcctcgtggaggrgracaggcacgcctggtccgcagtacactgctgggaagaggctgggggcctgtggcaggcacccccttgcccacacctctgactcaggacaagcatgtcatctctctgagcctgcttcttgactgcagaaggaaggaagtcatacctggacggctgcaaagtttaaatgaggttaaaaatgtaaagccccaggtataaactaagtcctcagtaaccatcaacagccctgcactagatggaaaagccatctaagatagacctttctttctctctgcttttacataaaaacacaactgcatc

SEQ ID NO: 2793 - DNA, 600 bp, Bovine  MMBT13265
gggaggactgtgaaatgagacaagagcaagcggcaaaccagcggctctatcaggactgacttgattttaggaaaaaaaggcaaatgctaacaatgcatgtgggcaaatccagccctcctcactcacgtctctggagacggggatcacaggagactctagcttccacaaggcattaaaatcaaaacaaaacaaacaaaaaaacacgtaacgggcatgcaacttggctggtaattacaaaaacaaaacaaagcaaaacaaacaaacaaaaaacatcggagataccatttcytctaaaatccrggctgggaaaggcaaggcctaccttaacaaaagccacggygggaggtgaaggcayggagaataaaggaccccagcctgggattccaggacctggctccagccccacacccctgccttccgacccgatgagttgcttccttcctctgagccccagtttccatgtctataaacagcaagggtggggaggtgggtgggggtggatcaaggccactgcctgagcttccacaaatgaccaaagaaatcattgattaggtttgttttacaaattattaagcagcttatacccacacccactatgct

SEQ ID NO: 2794 - DNA, 600 bp, Bovine  MMBT16215
ttttttcaggctctgcatttcacacttcaccataactagctctgtctggcaagagaggttaagactagtatccaggtctcagactgatttttcccaaagttaaacagctagttaaatgattgctattaattttctaaatgttttcatttctaaatatgcatatattattagaaatctccaccagaagacttaaagccatgtaataaatcacccagatcatgccttctctcacagtaatctcttacacatcctaccatatccattcattaatttgtgaggcaaatgaaacattcaaatcaycctaaatattttyatgctttttwattacttgtgcattttttcctgtgatccagactacttctatcttggcccagtgcaaaataatattaacayaagagcagtattaaaatcacataaaatattaggggaaatgattaatttttttacttatgtcaggtggcactggtggtaaagagcccacctgccaatgtaggagacataagggacgcaggtttgatccctaggtcaggaagatcccctggaagagggcatggcaacccactccagtattcttacctagagaatcycatgcacaaagca

SEQ ID NO: 2795 - DNA, 600 bp, Bovine  MMBT16774
tggtggccacaaaagtgttgaaaagataaaaaaatatatatatatatagagagatatactaccaggaaagtggtttgccaaaatgttaagtagctacagaaattgaaaggcttgaaatgagtcaaaatgcattgtttctgggaaatccctagaaatagaaagctgcctaacataaacttttaggttgacaaacatgattttagaatcaagcatttaatcacactggttagtttgaatttgcatgtttagagtgtaatgaatctcacagtatgtaatggacacaaattttacattttattrgcatttacttgatgtattttgaaacagtaattgatactttataaacttataacaagtttttttctcatgaatttaagttgaaatatgatttatgcaagaactgaagttgttactgctaaatatcacatatgagaggaaattagattgtagaataacagataaggaggaggctctagatgctgatagaattataattccatttctaggtgggataaatgggaaattttatgtcattagttttgtagttataaaaaacaaacaaacaaaaaccaaatcatgccaactaagttgatgactttt

SEQ ID NO: 2796 - DNA, 600 bp, Bovine  MMBT19820
agcaggctgatttcactcttcgttagtggtggcacagactgtaaaatatttatgttcatattctaaatatgtattcctggagtaaataaataatttactgttcaggttataaattatttacttagttattctaaatatatgtatatactatttgcattttgctggaagcaaaacggtagactgatgrtctttaaggggtcctaaaagaaaaaataaataaatcaagacttaagctacaagaggaagtgttctattaaagagawagagagagcagaagatagccccaaatacattgccttyctygtagaaaatatcgattttatctgataaccccagtgcccaacatgaattttgtggattttgtttgaaatttttaagttgggcttctggattagaaaattcgatattacaaaaaacttttttaaaaattactttaattccttaaggcttgctgtgacttcaaagcaataggtaagatattgtcctgttcgggttgggggcaccatctaacgggctttggggccggttcattcattggaatcactctgtcaaagatttcagatccccagaaatgactcggagaaaagcttcttcttgaat

SEQ ID NO: 2797 - DNA, 600 bp, Bovine  MMBT20226
ctgctgagtaagcagcagaggaagcagagaaaggagagagatctcccaaacttgtgtggtccttagattcyagggccctgctgcagctgcaatccagaggtgaaacaaattaatttaagcttcaacccactccctgccagctgctagttttaaaaagccaaagaaatcagcctttcatcctcagaacacaggaaactgcgggttgggctaaaggtcaaatctccataatttcatttaaatctagaagtaaatggactaaaactgctgctcagatccagctcagtctgactcaatgaaatrtgaatgatcagccaaataccccagctgcctgagagaggaaagaatatgccccatctgggaaaaataaaggaaaaatattatctaggttacttcttttataaaaaaggtccagtatgaaacaaactctaaaacatgcaaagaagtaaataagcataattcataattaagaaaaagagccaaaagaaagacccatgtataagaactttaaaataattatwaaaatgttaaaagaattcagaggagaagatgaacagaatgagtraagagatggaggattccagcaaagaaacagaaattcta

SEQ ID NO: 2798 - DNA, 520 bp, Bovine  MMBT22699
cgccacctgcccggcccctcgggaatgaaacagagcgtggccaaccaggcctgaagcgctccgtcagccgagagcgctacgtggagaccttggtggtggctgacaagatgatggtggcctaccacggacgccgggatgtggaacagtacgtgctggccatcatgaacattgtaagtgcctccscctccctggacatggacccccaaaaatgtggagcccacctccagagtcaggaaaagggctgtcaccatcccccccatcactgatcaaatgccagtgaaacagaatgggaaggggacrgggtgcctcagaaagaaagcctgttagtgaaagtagcctagcacagtggttaggagcatgaactcaggagctagccaacctggccttaaatctcagctttgccaatctttgactgtgtgcccttgggcaagctactttgcctctctgccttggattacccacctgtaaaatgggtttaatcatagtaccaacttcataaggctacgtggatacagggaat

SEQ ID NO: 2799 - DNA, 508 bp, Bovine  MMBT00804
gttgcttttgcctgtatcaggttttttgtgggtgtctttctacctgactatatcttgatgagccagttcagtttagtctgaggaaaaaaatgttactggtggtgtaaattaaacaaccatatgaaagaaaaaacaaacaaacaaactgatataggatccagtagaacttacgaagacaaagcctgaaaccatttcagggccagactttatactatagcccgagaggggaaaatatgtgcattttgaagaactgtagacatttaaaacaacttttaaatggtaaaagttctagatttcagmacaatcagccaaagcatagaggataagtaagcaagctctgacatcctgcactaaagcgaataatatccccaaagacaggatctcagatagcgagcgagtctttcaaagataaagctggttgggagtctttgtaacagatatatctgagaaatatatctgggtcacctaaagaaaaacaaatgatcctctgataggggaaattgcttat

SEQ ID NO: 2800 - DNA, 600 bp, Bovine  MMBT02374
ttctttgtggcccacatttccttatctcaccagttcttctaaatgaaatctaaccacttgggagaaaccactttctcccagaacctgttaatcagcttacggacagtagacacatttatcgctggtgctgactgtgtccctagcccctgcctgttttgagtgccccacagacttagggattccgagaaagtatcctgggagagtttctctcatctcagtctttatattacagcaccgggagcagtgactcctacatgacctccttcccagaggagggaatagaaaggcaaggagctccakggcccaataccgagttctctgctatttcttgtctcttgaaggagcttattggcatctcagccaatcccatagcgatctacacagacaggctgtggcagcctctgttgtgggaaattcacatactgtaagtcagacgagaacgaatgcaacaccgcattgtttctgctacttaccttgtgtgactcctctgaccttcagtctccttattgttaaataacaatgatacctgccttctagggttgtgaggattcaaaagggaaatatatgcaaaggccccacacaccagacatccaataaaag

SEQ ID NO: 2801 - DNA, 600 bp, Bovine  MMBT03945
caaagagtcggacacaactgagctactgaactgaagtatgtacaatttctagatttgttaagtttacttaatttttataagttaaagttaagcactgaaagttaagcactgaagacagcatcatttcaatttttatttttaaaaagtgggctcaattttatttttaaatagtttatatataactagcagcatgtggggaagggagagttttggtgatatttatctgaatgcctcttagtgagctaaggggtcatacagagcagacttgggatagaaagaacattccaagtaactaatttyctcactttatacaggaaagtagcagttgaagaatcaaagagtgctctttctccacgtggaaaagtacatgacttttcccccaggcaaaagcctgcttarggttcttttcagcaaagggcaaggatgacttgagtagagtcattttctaaaaggccaggaaatagctgctcattttccccctactaccttgctctagttactctatatttgaaaaggtgaaataaaagttggygcatttatgtgagggccatgccaaagtgcttctggccttattgctctcctgcttccctgagccatttt

SEQ ID NO: 2802 - DNA, 598 bp, Bovine  MMBT05695
  misc_feature (1)..(30): n is a, c, g, or t
nnnnnnnnnnnnnnnnnnnnnnnnnnnnnntgctgggagggattgggggcaggaggggaaggggacgacagaggatgagatgactggatggcatcactgacttgatggacgtgagtctcagtgaactccgggaattggtgatggacagggaggcctggcgtgctgcgattcatggggtcgcaaagagtmggacacgactgagcgactgatctgatctgwtctgataggtaycacaataataatgaatgttattctaagtatttagccctttgcttgtaatactaatccagtagatggttytccatacgaaaggattacattttataagatcgcaagctttcagaattcaagaaagaaatgcaagtataatytgaagaaatttttttcaaaactgcgattcttaactcatgtattacacggaggttatggtgctttcatatttcattaaaatgtttaaaaaagtttatatgatgtagaccaattctgcaagactatagaaatgaatatgaatggttaatcatgaatttaaaaatcatttagtgtctatatatcatcccattttttttgccattaaaatattccctgtttctcatcagga

SEQ ID NO: 2803 - DNA, 600 bp, Bovine  MMBT07522
tatttaacttaaaatactcaattcagatttcaattatccagtcaacagataagtatttttaaaagactgcatacagatttaccttgttgtcagccaaaatctgtgaagttttctcataaactgctgactacagaataaatttcattatatataacttttatttaaacagaattaaataacagaatgatgagtgatattaaaactagttttgagatagataaaagcatataaaatatagacattatcatagttaacttttgtatcattctcaaaatataatcttatttctttcagaaattygtacttatactaacagcaaaattttaatcagtatagactaatgatcagttagacaatgtaataaaattcacataccaaatttcaggtatggaaagattgcattaaatacattaaaataaagagaaaataagaatattctgaataagtattcagtagtttaatatatgagtgtccagtgcatgcctttcaataacagtgttttttctcataataaatttatggttagttaaattttgtcayttctactaatcctcagtttatttggggttgttcatcatacagttttatagaaatacttgt

SEQ ID NO: 2804 - DNA, 600 bp, Bovine  MMBT07618
agccaacaactgacaatatgatacttatctaaaaagtaaacctaattcccatcacaatagttttttctttccttataggattcctggtacttaaaaatttatctgaataattaccaacctgttaagaaacaatcttctttacttttaaacttcctatttaaagttataggtgccaggcacaaggtatgcaaatgaataaaaaatagatactgttctataacactgataggaaaaaaagaagtacagtacaataatgaaacagaatactggaatacaagagagtacagtctttggagtcarattgtttgggttcatgtcttagttctaccacttgggattcccttgtggctcagagggtaaagagtctgcccacaatgcagaagacctgagttcgatccctgggtcaggaagatcccaaggagaagaaaatggcagcctactctagtattcttgcctggaaaatcctatggatggagaagcctggagggctacagtccatagcatcacaaaaagttggacatgactgagtgacttcattttcttttctttatttctatcacttgtactcgatgtggctgtttggagcagcctcaagggcct

SEQ ID NO: 2805 - DNA, 604 bp, Bovine  MMBT08146
  misc_feature (1)..(4): n is a, c, g, or t
nnnncccagggacagagggaagacacaacacggtaattccttgggaccttaagggttgctgcccagaattccagcaggtcaaatgggctgtgctaagtgttattgcaggaacactcagtttactaacggataayaataacctgtagctactgtaagaattcccaggacacctggtttagaaactataatatgcaaatttacaatcatgtgacattatgtgtgtttatccaggcaaaccatgctggtttttcattgttttttaaatgagggggaaaaaaaaactgctttaggaaaacaaatagtrtgaaatgcttcactaggatcacaatttatcaaatactattgagaaaaaaaaagaactgaagacaggcagcagcttagaaccactgatgtagttttctggtgctaacgaaggtcacagacttccacctaagaagtttctttaattgtaacttcraaacccctctgcagtgggataagcctgttcactgaagtgtgtggagcaaccaggagaagagcatggttcagcctggatctaatgggtctgacattttgtaatgactattaaatgcttattcctttttgggggttataatttgttaaa

SEQ ID NO: 2806 - DNA, 565 bp, Bovine  MMBT09471
aggttgttctaaaggagaaaaatcaccatttcagagatggaggggcaagtctgaggcaacagactgagaataaatagagcaattatacatgtgtgtgtgtgtgtgtgtacacacagaaattcttttccattagttcattacaagatatagaagtatacaactgagtcgctctgctgtacaccagaaactgaacattgcaaatcaactatatttcaattaaagagagagagagagcaagcaaaatctatcagcgaaaggcatttgtgagctaaaagccagtttgcaagggcacaagattakttgcattttctgctgaataccttcctcaccctgggtccatggctgatttcctattgctggttcattccattggcttgggcggtgtgttttctctcgttgggaagataatttttaagtagtttcacaataagcagcattgattcacatgtagaggaagatcctttgtcagttctctttccatctttctgattacttcaagaataaagtctcagtctcataaaaatctgagtcctttgtgtgtgtgtgtgtgtgtttaataaaggga

SEQ ID NO: 2807 - DNA, 600 bp, Bovine  MMBT11523
tagcaaccatgacaaaaaagactgggaatgtcatattcagaatcttgtaatttctctcctatacctgtattttttttgtcacttcctgatttagtaccaatttaattcattcttgttgaacataagttctctagggcagagatacattagcaagaatctcagggtagaagaactctcacatttggatactatgtagtgaagttcttccatctagaaactgaagtgaagagtatctgtcctttagctgaaaccatgtgtcagcttctgaagtgacctggtttaagacttcagcatgtcacytgccattgtttagctgttacagcttctcactgtttaactgtaggactgtggcaacttgaagcactagatattttttaaagtaagcagagtaaaaagctattttatatttgattaagtgttttattttgctattccccttcaaatgaactttgcacagtctatttcatgaggagtgtggtttgctttggcgtgtaatcccctaaagccaagttccttttattgttattgcttaagtcatatatttttatacaaaacatcttattaccttagttttattttaaatcaaagcaaagtttgcaa

SEQ ID NO: 2808 - DNA, 600 bp, Bovine  MMBT12299
ggaaaggtcaagccatcctggttaaagttaaaaattagttacctttccccatgatacgactgaataagcacattaacagtttgtaaaagaggttgtgaaacttcctaagggggaaaaaatattatgtaatcagtttaggagagaggcttgcctgaccccacctctcagtagggggttgaactgactgggaggttcattcctatttcaaaactattattatttctctggaagagcttatcttttattgctaataacacttcactctcaactactctgctctctcctctcaatctacgtcaycaatcataccctgaaccaawataaacatctacccaacattggagcactaatctttattaagtaaaagcrgtgctgtcttttcttttttttttttttaattttattttatttttaaactttacataattgtattagttttgccaaacacggttataaactgaaatgtcataaggccaagctttcctggactttgtggttagaggacttgaatatctagccgaacccaatctgacaaaatgcacacagaygtcaattacaacaatgattcccaaacgtatattgaaaagccacaagaagtct

SEQ ID NO: 2809 - DNA, 600 bp, Bovine  MMBT13990
gaaagagacagcccttggggccactcctgggaaggtttcctggagtcacaagtgtgtggggccagcaccagactccacccccaggtgccccctcctcagggcaggccttgagcacaaggagccaagggtcgatggtgaggaccccgtagtgggaggcgggaggccaaggtcccccctcatctgtgtgtgtcccttctggccactcgggggaggcagactaacaaggggccctcctggacaccccctgccacctggttcagtgaaggtccaagttcaggagaagaatgaactcccagaaaycccagcacaggacacagacaccgtcaacatgtcttccaccggtttattgaggctgcgtaggagcaaggttggcagggaggccagtgtgaggctgggggctcagttggcggccagggtctgctgcacccagttgacgagagcagtgacgcgggcgtacacgccaggggtggacgtggagcacgtgctgctgccccaggacacgatgcccaccagggtccaggctccattcttcttgcagaccagggggccgccagagtcrccctgcaggacagggagcggggggcttggagctggcagccc

SEQ ID NO: 2810 - DNA, 600 bp, Bovine  MMBT14928
cttttagaaggccaattggcttatattccttccttaaagcctatttactagctcaggattcaaggccatctacaatcttgctatatctcactttagatctattttgcttactacccacgattcccaaaggaatctctatattattgggttggccaaaaagtttttctggcttttttgtaacrcagaaactccaaactaatttttggccaacccaatataatattcattcatagtttttcatttcacgtaattcctacttcaaatatttcccatgcatttctacctctgttgcaatcactrtgcccttgaatcagtggcatgtgcttccttcttttacataagaaaagggtaagttgggttttacaattctttgtcttcttcacattgcctgaactggtgccatattgtagacagtaggttatctgtaaatgtttcttggttaattagataatttatatacagaatccccttcatggatcactgccttgttttggtgaaggggcttgcataactcaatgaagctatgagtcatgccttgtagggccatgcaagatggatgggtcatggtggagagttctcacaaaatatgatccactggag

SEQ ID NO: 2811 - DNA, 515 bp, Bovine  MMBT18649
tggggtcagctccctggccsgccagggagggtaggaactgatgtgagcgaagyacaaactccacacttcacatatgaagacatttgatcatcaccatctcccaggartttgactcacgcccttaatgtagggctcaatgtagatagggaaaataaagctcagaaaggttcttattagtttatgtcctgcctggttccaaaaaggataggaggcagcttacaaaaggcaaacgttaaaataaaataaacctatgaggaaatggaaataaaaggagaatgagagaacccagggatggagtcygcacattacagatgattatcacttatacagttggggatgctgggacacctgtagctgtgaacttcctagtggtcatagcatagagcgaaacaccatcaacaacataagataaaaataaagtcattgcttggagattgagacttatttgttgtggtctggctcccacagtgttcaggtgtctgctgacaatgtgtcaggtaccaaagatatctttt

SEQ ID NO: 2812 - DNA, 600 bp, Bovine  MMBT19431
tgaaatagcctatttgtggcccatcaaacatacattgtacatctgctctaatcgttaaggaaaagggcacattgacctgaagtaaagaatgttcaagttgaaaataaaaattaaatgcctcccttcctgggaygcatgttggccctcctttgatgataagacttcccaggtgccatgttgacttgctgtgttcctgctggtctggttttatttgaaaccttgaagaaatgcatccctgccttgcttaatgttctttgttctgacaagataaaactgtactgaagaccaggcttctctggrgcaatttctcagagtaatctaggaaactgacttctgggctrtattctaccaactatagaaagctattttctattcttattataggtggtttattgatgatttttgttgacattacgaaaggaaaacaaaagygttgccttgcctttttgggaactattgcttttcccacttctttaagtacaagagactattccttctctctcttgcctggatttttctgggctttcttacttcatcttgacatgttattttctttgggtttatcaccggggctcctccccctgctaactattttatggg

SEQ ID NO: 2813 - DNA, 603 bp, Bovine  MMBT19712
  misc_feature (1)..(3): n is a, c, g, or t
nnnttgtcttttaagtctgttaacaagtgcgttgctacatgcatgctcagtgtgtccagctctttgtgaccctgtgactatagcccaccagacttctctgtccatgacattttccaggcaaaagtactggagtgggttaccatttcctcctccagaggatctgcccgacacaggttcaaacccgtgcctcctacgtctcctgcattggcggaaagtttcttcaccactggtgccacctgagaagcccctgggaacatayacttttttttttttttggtaacatatacttaacgtaaaacttamcattttggccattctaggtgtaccgttcagttgtgtggagcacattcacgttgccctgcagccatcaccaccatccctctgcagaagtcttttcatacttccaactgaaatgtcattagacaacaaggccccagccccctgcccagtccctgatgaccaccgtcctagtttctgtctctgtgcattttgactgtcctagggccttcaagaaagtggatgataccatatttgtcttttgtgaatcgtttatttcacttagtgtggtatctccgaggttcacctgggttgtagactgtgtca

SEQ ID NO: 2814 - DNA, 600 bp, Bovine  MMBT19773
atggtgctgttggacatcacagtggtggcaacaatacttgtggcttcggtgggagtaaagagtgtaaaccagctctgcatgatgctgtccagggcataaacacctgccaagaacacagagaagccgcattactgactggctgcccaggggtcttgccktacttccactctttaatcaatgcttacactgttwactagcacagaacatgagcccggccagaaaatcctgcaaggtaatgtgcctgggagcaaccttttacaataaggttatgatagactgttattcagtgaaatgcytaakgaacatgaacttcctgtaataaagagcraatcctctcggtagctggtatttgcgctgtgctgctgcctgcctgccgtttcagacaacggcttcttgctaatgagttccagttcactggggcctcctgtcagttaccgactrcagaatgggagtcagaaaaagtacaaccctcaccagaatagggagtctttatgtgatgtgtgtggtgtatgtgcccaagtttaaagtacacacaatacaaaatgattaaacacacaaagaagcaaggaaatgtgacctgtaatcagagagaaaaaagtc

SEQ ID NO: 2815 - DNA, 600 bp, Bovine  MMBT19826
tctctgttgcaacaagggtttgtcatgagacacagtaaggagacaaagtggaaacctattgagaagatttctgaaaaacaakacactttctgcctctccttcactttagacctgccagaggaacagcatccttaaaaccacagatacgaaaattcatgtgagtagagatgctccagtcctgggctgccaagttcgaagcttcttaccatgtataagaaataactccctaactattcaagccactgttaattgcattttctgttacatacacactttccacctgatacattatttaattcytattatatctctatggagcattagggtgaatcacatagaattttgacccacaaaaatggyaattttattcaatcacttttcataattcatttaaatactgaatatctactatgtgcaaaacactgacactagaacactgccccttattttcaaatgtactaccaaaatactttcacccaaaattcataaaactaaattatagataatttaaaactaaaaggataactacttgaatatgagtcagatatgataggatgaaaattacacaggtacattattttaagccaaacagatgcttaa

SEQ ID NO: 2816 - DNA, 600 bp, Bovine  MMBT21298
ttaaagacaagtgaacagaggaaataaagcctgaaatattagattcatgtatagcttggttttgttttcgaattacgcttctaaccactttaggccctgaaccttgtcaatttgacgtttatttcagagagaaatcatataggtgcaagtcataatgttagaagactaaatagaaatcctccctattccatcttatcctaacgaaatgtctttcacagattaactccttcagttcctgagtagaaaatatccaacagctgcactttccaaaatggtaattgtagctacccgcagctactsaacacttgaaatatagccaggttaaactgagctgtagttgtaggtgtgaaatgcataccagattttgaagacttagtatcacaaaaaaagagaatggaaaaattttcaacaattttrttttattaattgcatgttgacatgataataccttgaaaaccctgggttaaataaaatagattatgcaaatatttaacattgcacatgtagctcaccttattttttgcctgatagcgctgttctggaatcctatatgtaacatttattttcagacccatttttgaggttaatgggggaagaatt

SEQ ID NO: 2817 - DNA, 600 bp, Bovine  MMBT00696
cagacagctctacacagtgaagaattatctgacctaaaatatcaatagtttgaaggctgagaagctctgatattaatgggatgaatatatttgtttatgagttaaagttagcgaatgtggtgaggtgtgcattcatggattcatcaaactggtcagtgctaggctacagatgaagctgtacctgaaaggaatttcttcctggatgcaaaaaggttctttgcttttcaggaagatgttgtgggaaaggcctaagttataaaatggttctcttcggctacggttattacctggaaggcgtcyctgttgcctcagatggtaaagaatccgtcagcaatgtaggagactcgggttcaatccctcggttgggaagatctcctggagaagagaatggcaatccgctcgagtattcttgtctggagaatccaatggacagaggagcctggtgggctatggtccatgaggtcacaaagagagacatgactgagctacttaacacacacatacacattacctagaggcagccgaagtcctagaaagctcaagtttgtgtctcagtttccatggaatccacgagaracttcctttgttcattcaagcatt

SEQ ID NO: 2818 - DNA, 600 bp, Bovine  MMBT00901
tcccttgtacccaattggatagtctgagacatttagcactgaaaatcaagtaatcatatttgaggaaactgtttcrtcgcattctcctggcattatgtagtactattctgctctcatcgtattagaagaaacagaaagggcaaaatcagataatctgagtgctcttcatctcttcttccttttaaaaagtgttttaagctatatatattgttttagttttcaaagtcatagctacggtattttttaattaactggaaatatttggttaatgaatttttcttttctaagaaacccttcaarcagggatcttaatacagttgtcttggattatgaaaagcaatgaagcattaaatatctagtctgatgacatttttttctcaaatttatggatgtacaaatagaatatagaaagatcttttaaactgtagttaatattttagtcagtactaggaattgctttcttgatctgaaaattttctcatccactctcaggcttagaagctgtttagtttttatgatcccacctactttcctttttgtttcagattatcccctttatttgccctacttgttggagtagagaatccagttcttgtttga

SEQ ID NO: 2819 - DNA, 600 bp, Bovine  MMBT01073
ctttctgtttctgagtagcattccatggtatagatacatcactgtagatttttgcaaagattaaaagggaagacatttgtaaagtggtcagttcagcttctgacacacggcaagggcctggtaaattgccattaatgccgtaactattacaactactgtcaacaaaaccaagaaaaaggaaatttgcccctcactgagaaatgacttcctgtgagaaacagaagtcacagctcccgataggcccatcttaacatcttgagttcttggcttaaaaattccactgctttctagtttgagttycctgtacttacatattaagcacctctagaacctttcagaagacggttgtgctggggctcagagcagcccaccccaagatataccacaatggcatattgactgttttaagttagttatttaagaaacagccagcgggaaaaaaattgatgttgaaaaacactctgaactccttctttacccctgaaagtgggaaataaatcttccatgtcaaagtaccctacccaaaccaagaggagagaaagcaacctcaccaccagaggtagggaattcaaggctaagaaatttgtataaacaaatttt

SEQ ID NO: 2820 - DNA, 394 bp, Bovine  MMBT01268
attcatactgttagagaaggatgctaaatcacagaggtctgtcagagcatgctggcacagcatagaaattttccatgatcatcttttttctgacttcaaatttatattaatggtcatcattcctcagaaagcttccctaagaagtgctggccaccaagaatgaaagcaaaataagccatatattgcctcaagcaggaaatgactgctgttaaattgcatgaatgccaatttaagacatttcactcaagctgcctatgacaaggcatatcccatttcataaactaagcacatatgtcttawccagcttaccctgtatggacaggaaggtattagctatcctaccacaaagatagaaattcagaaatagaacaacttcatatagacaaaccatttc

SEQ ID NO: 2821 - DNA, 600 bp, Bovine  MMBT01818
gttggaggctcagcgtggattactcattttgactactcatatatagtatgattgtgtagaacagaattcttaatactaacttaatactactgacaatatattactatgagtaataataatactcatacttaataaactataaagctgtcatctattataaagtgtttgcgtatagttttcccyggagaatttcttattatagtttgtattcaacattagggtccagatggtccccctggtccagctggaactactgggcaaagaggaatcgtcggcatgccggggcagcgtggggagagrgggatgcccggccttccaggcccagcagtaagtagctgcactggtcaatacttcatctgattatgtgcaatatcatttgtgaagggagaatgtatctttatttttcttaataaatttaaaatcttttaaaggcactaatacagagtatcttataaaccttttgactttaaatgtcaaattcttaagtacatttgaaaaatatatttatttaaccctgggactagaaacttagacaaataaggatatggatttttggtgactctaaatctttcttcaaagattaaaaatatccgtggagct

SEQ ID NO: 2822 - DNA, 600 bp, Bovine  MMBT01821
gtgattcaagggataatacagaagtgtgaatgtgtaggagatgagtgtcaatgaaaagttcctaggacactggcctactgtcttgagtaaaacatgttcttagtaaaggtttattgaattaaattgaaggaacattttggtcacttagtgtgctaggcacttcacagaatgcttaaggtaataaaaccatttcttgctttcaagtagtttacaatctactacttgtaagccaagccagcaagaaaggctgaagtgtagcaactaacaatgccttgaggtataatgtaatagttggtgaawaaagattacaggtgaagtcctgaaagaaatcagggcaaagaataaattcagcttggaggacagaaagaaratggcttcttggaggaaatggttgayactttagatatcgaaaaggcttttgaaactgagtggagaaattaaatttaaaggaaaaagcaggagtcatagcaacaagatgtgaaagcaaatggcatttttgggggagtcagtacattgtagctataacttaatgaattttttcatgttaaagtaattacttaagtttctaaaaataagagaaattttatttttcaaccaaac

SEQ ID NO: 2823 - DNA, 600 bp, Bovine  MMBT02628
acacagcagtcagaacccccaccccttgctgggtgggtggagggcggggtgggcaggagcctgcgctcactctggttacacgctcactctgattacacgctcacgtgaggaagagacatatgagctctcttgatacaactttcattcaacatgagcacacaggtgaaatgacggcctgtataatgtggatgtagtgtaatgtatggtgattatcactaaagcacagtaaatagaatacggtatattacatatgatatgtaagtgtaatggaatacttaccataacagaccaccacgccgyactcctctccaaagcacacacgcacactcagtgcagcaaagcgctcttgccccgagaggtgtggactggtccaggctgagggccactcggatgcatgggatggatggaagccctgtgcctgtcccggagcgtggaggtcctcccctccccctcttccctgcccgcagtgttctgctgggagcttcggcaggcaggcaaggaaaggatctcgaagtctgcagcatgcagcccggagcagcgtggggcgatggagtcgggggtgggggggtcctccagagtacacgggggaccccaggctgc

SEQ ID NO: 2824 - DNA, 600 bp, Bovine  MMBT02695
aagctattttctattcttattataggtggtttattgatgatttttgttgacattacgaaaggaaaacaaaagygttgccttgcctttttgggaactattgcttttcccacttctttaagtacaagagactattccttctctctcttgcctggatttttctgggctttcttacttcatcttgacatgttattttctttgggtttatcaccggggctcctccccctgctaactattttatgggaggcaggcaaagtcagcacaaaggaaacagaagccagtggtctgtgagaggccttctgstgctggccacccacyggaggcactgaggctgagaccagtgacacttcctttgaaacagagctatgtgcctgctatccaaatcaaaggtgcttataaaaagaattccctcttttgggtctagggttttttcttcctcccagcttcaggtcctgctgtcttcctgctgtcacaaaggaaggacccacagtctcgttcctgctttgaatggcaaaaactttaaatggtagtacctgttcctgctcatcttgctaaagccaattttgtgtgtggctacaaaatctggcctggagctgttaccta

SEQ ID NO: 2825 - DNA, 600 bp, Bovine  MMBT02829
gtggtaaagaagccacctgccaatgcaggagacttaagagactcagggttcaatccctgagttggtaagttcccctggaggagtgcacaaccaaccccactctggtattactgctatggatggaggagcctggtgggctacagcccatagcgacacacagagttggacatgactraagcaayttagtaagcacatggaagatacagactaagggaaaatagcttcctatttatctcaaaatttccaatctaatactgaacttggctgaagatggaaacaaatttagaggtattgttagcstcttttcctctgtattcytagatggatcttatattcaaggagctaaaatagaaattaaaatagagatgtgataggtctttgatatttaattgcagattaaagtggagttctgaatctctgaactggttaattttcatttctgtactccaattttaactttaagtggaggaaaggtgacacataatatggcttgaactatgtgtyctcttctgggcttttctccagaaaatgaaaaacagcaaatagctcatctgatcttacattgtgatagagatgatacacactgccttgtagtctaaa

SEQ ID NO: 2826 - DNA, 600 bp, Bovine  MMBT03536
cttttcatctttttttttttttggtcaagattcacactacccaggtgctgtgaaacagcagaattaaccccagtttataaagggaaaacaaaggcaccatagtgagatctcaccagggccagagtgagaccacatttactttctgatttatgtccacagccagattctctttctggacgacattaatttgttcaatgatggaagtaagtgatgtgggatttattgtgggagaactagttctggctctgtaggtaaaaagttcacagggtggacaaggtagagaggacaatttcagtgtgwaacrggttaatgagaagaaagttaaaaccggagtacagactctattcagacagagatcacttttcagacatataaatagcaaaacaaggatagggaaaaataatagctatagagtttctcatttctaaaccaaggggcttttacaaaatcactttaaaagtaggagctttcttgaagacaacccttaagcatcttattctccccgcgttccataaaactcctgtaaggtggagactactaattttttactagggatgaaagtgagaagtaatgaagttaagaggctaagaatgaattctc

SEQ ID NO: 2827 - DNA, 600 bp, Bovine  MMBT04617
ctggtgggctgcagtccatggggtcgctaagagtgggacacgactgagagacttgagtttcacttttcactttcctgcattggagaaggaaatggcaccccactccagtgctcttgcctggagaatcccagggacgggggagcctggtgggctgccgtctrtggggtcgcacagagtcggacaygactgaagcgacttagcagcagcagcagcatagagaaagtagtccattgtgactttttattgtttgcagagagctcacataaaagccaactgcccagccttaccctaagaaaaagyttgacagtcttcaatttcctgtcacttcaagtctattttctatttaatgttaggctcgtgatctttgaaatcccttggatctgggtttctcttatagaggagaaactccccatgagtatttctgcatctttggtctagttagaagtttaaaccagcaacccagaagacttggctcttttattaacctgaaaatattcccaaagtagtatttatttgttttatgaatttgctgtgggaaatttataaaactgtatagacaatatggagttttttaaaaattctgaaaacctaaagaaaaag

SEQ ID NO: 2828 - DNA, 598 bp, Bovine  MMBT06172
  misc_feature (1)..(75): n is a, c, g, or t
nnnnnnnnnnnnnnnnnnnnnnnnnnnnnnnnnnnnnnnnnnnnnnnnnnnnnnnnnnnnnnnnnnnnnnnnnnnattcacataaaagcataacattggccacctcctgctaataatacacatgtttcacaaggggcaagtagcatattatccaaacagattaaaaattatcatccagatagataattcctagaggagtggggagcactttggcttctcattgtgtgaattatctggattattgctccaattccgttttttgccctgggagtaagggtttagactcagaagcctctaagrctacagcagctctacctttagacccagaaaccatggtaactgatagctacagcraaggcaactttcttagcagctgtgtattttcyagacctttacagctgagacatgaaacattgcttacaaccagccaatcccacagaatccacagtgagctcattgccctttattgatatgactggcaccattagcttctggatgaatgtgcacatcaggcaacattgtagaaagaagagattaattgtgtgctgttcttttttgctatcatcattatgtggcaaactatggtagctctctctat

SEQ ID NO: 2829 - DNA, 600 bp, Bovine  MMBT07620
cccttttttttgtaattatctttattaccaccttgcttcctgttagttccctgaccaggaattgaaccgggtccccggcagtgaaagtgcaaagtcctaaccactggaccaccagagaattccctggtatcttaaagttccagactcaacttactttccttctcagtgacagtgtcactgagatagtgctttcttctccaagaactgagcaccatgtggagcctctgcagcttttggaaaatgactcctcatggtagtgggtctatgagcacacagtaaagacaatgatcagaatttcaratattgttctccatatcaagaacttagcatcaaataaattacacatgcgacaatgttatgcacacctctcacctctttgttataacctccgttaatgatagagtggaattacacttggcagagaaaaagccctgggtgtgccagaagattaataagtacataatacaactccattagaaatytgacttcaaaataatgtgcttgctctaatgagcattactagttgcttatactttatgagaacagggaagggggtggtgatttagatgattgcctttggattcaattttcctatcataa

SEQ ID NO: 2830 - DNA, 600 bp, Bovine  MMBT08143
atatttgagccatagcaatggccctgagtcatcaagaaaatatgaactcacatcaagaatattctgtttagtaaggaaaataagtttgcaatacatttgagaaatattctcatcccaataactacatatccacgtgcataatatttaaattattatgttttagttaccggaaamaattcatgtatagagagcattttgccattgaaaatgctgactgtaaagatctttgatttctataaggttatttcttctgagggtgggtgctgggatgtcccttgattatacactcacttgtaagaygttaattccttggtctaagatgaaatgtccctgagtctccctaggtyatgtgagtggggctgaactggaataacaggtaaatagaaggggagtgaacaaaacagggaaaaaaatatacagtggaaattttagaatgtatgttatggaaagagaacgaaacagcttatctagttgctaattgcttactcagtttttccattcttccctgcctcttttctgcttcctttcctcatttgagtgatcatgttcctttccaaaatcaccaggaytccatagacaattgctctggtgaacggataa

SEQ ID NO: 2831 - DNA, 600 bp, Bovine  MMBT08575
taaatctggctctccccatgtgagctagtataactttctaaaatcaaaaatgaaccaaaaataagagtaaacagccagggtgagaaggttgacattgtggggtcacagcttcgcagctgcacaccccgtggcccccaccctcatccccggcacagccagtgacagagccgctgcagacgcgcccagcagccaggcctgcgcccacgccccagggctcacgctttccccacaaagctgacatggaagaggcttcaggacagttgaggatctaagactagcgtattgtgtcatctcaaatayagaaaaaagtggcactaaaagagagctgagacacaagaagtcagagagcaatgaaataatttcctaatgtggtgaaggagagaacggtcattttccaaagggtcaacaaacgtagagaacatgagacactccaaacaggaagggccctttgagatcacacatcactccagcctccagtgttattgtatctgaggagtacctatagatggagtttaacgggtcattaggaaatgcagataataagctcagaggtcatgcccactggcccactggctctgacatcagtggagaattgaggtg

SEQ ID NO: 2832 - DNA, 600 bp, Bovine  MMBT08591
acagtccctcgtgtagctgtgtgttttataaagagtcatgacgtgtgcaagattggaaagtttggggttcttctcttccaaacaaaccttttaygagaagaaagtcaactagtgatacaatagcctgatgaatraggaagaaatgttagcaattttgctctaagccccagcagcctggaaaactgatcgatacatttttgggggcagcygcagaatacttagccatttaattttcaccaattttttcccacttattttctcaataatgaaatgaccatgtgaatcagccrcccagaaacrtgaattactagtgatatcagttagtaycttcaggtttatgaaacgttatcaccccgagcctggtaaccgctgttcaacatcgggtcttggatctgcctgagggtgaagccttaaggcctacctgagcgattctctcagctacatccttacagaactggttggggttttcaaaatgctgtatcagctggggcagaagacacaagacattcagtggaaaccctggattagagaagatacaaacggagatacgtgaatatggtgcatttgagccattaacagcatgaaggcctattacagatt

SEQ ID NO: 2833 - DNA, 600 bp, Bovine  MMBT08931
ccaagacctgaaggactgaactttcaggatctcaagaaccaactccaacacatggtccgtagcctcaatcaagctagccgtggattttctaagcaacagggagcacatctattccaccgtggatgacgatcattttaaatccacagatgcagaataactggatctaattgggtatctgagatattttccagttggaccttttttttgcagcctcttgtctccagctgtgcatacaattggcgagttgacttctaggaagtagatttcatctaaaaatctcaactgacatccttttgaaayttactactactcttctgtgtttttgatggacttccctggtagttcagacggtaaagcgtctgcctacaatacgggagacccaggttcgatccctgggtcaggaagatcccctggagaaggaaatggcaacccactccagtattcatgcctggaaaatcccacggaccgaggagcctggtgggctacaatccatggggtcgcaaagagtcagacatgactgagcgacttctgtgtgtgtctgtgttaaaaagttttttaaaaaataaagtaaagctagcctatgttgtttgaagtcaggtt

SEQ ID NO: 2834 - DNA, 598 bp, Bovine  MMBT09040
  misc_feature (1)..(129): n is a, c, g, or t
nnnnnnnnnnnnnnnnnnnnnnnnnnnnnnnnnnnnnnnnnnnnnnnnnnnnnnnnnnnnnnnnnnnnnnnnnnnnnnnnnnnnnnnnnnnnnnnnnnnnnnnnnnnnnnnnnnnnnnnnnnnnnnnnnattgagctcttcacacatttttaatgatgttactatacttctaaagagtgaacttaaaaatacaatgtacaccctgtacttggtctttgagaaaaggaataatatacacaagtgcaaaacttttaaataagaacagaaatttgtagcttggatgttttgaacatctggatrcttgatgtacatcaaacagctgaaaggattaactgagactttttgtttgtgaatatgttagttttggagtcatgtggacacaactaatgattcatttgagaggaacacattagctattccaagtttattaagaagctatatctttcctctcacccgtggagtcaggccctgttattttataagccctattcaaamgcatctgcaaacagatctctatacacagcaagcatcaagcatgctgaatgcaaagactactacattcagcagaataagttctcatttattttgcttatgttta

SEQ ID NO: 2835 - DNA, 601 bp, Bovine  MMBT09052
  misc_feature (1)..(1): n is a, c, g, or t
ntggatggaacatatgagttctcagagcatttacatcaacgttaataataatgacatagttgagtactgagtgcttacatatgctgtcaacttccatggctaaacttcctttggcctcattttcagagataacctagggctagggggattgatttgagtcttctgtgtgtttctcaagttagtcctgacagtctgaactgatgccatttttgtcttccagattactattaaaataagtgtcttgggacatggcacatgtgtctgtgtktttgtttttttttttttaatgaaatctaaaackggcgaacattattttgatttgacttyttttttttcctacaaaaccctaaatgggactcatgagaagtgtcaggtgaactyggcccaagttttcaggagaacgcactccttccccaaggatataaagacaagatttatgactccaggtgaaaagtataagaaagctggtgactgtagaacactttagctttgggtttctggttcattgggagtctaaaatgaaacttggtgattgcaggggcaagtctctataaataagcctttgcacaatctgtgmaaaatggacttcagtctatggcag

SEQ ID NO: 2836 - DNA, 600 bp, Bovine  MMBT09488
tttatttaaggaaggacactgcatctgttttatggataatcaagtgctactgtgctgtgcttaggccctcagtcatgttcaactcttgccatgtcctcctccagggaatgttcctaaacaagggatcaaatctgggtcttctgcattgaggaggattctttaccatctgagccaccaaggaagccttaatcatgtgatacagagagtccaaaagcttgatgacattgttttaagttacacaaaaaggtatccaaagacgcatacccgttcttgtctcaattttgatcctaaacaaaaatycaatttcaaaatcagttaggaattattttaatctaggaaattgtggaattgttgcaaatgtgcaacccttgtttctgagattcaggttcctgtaggcccttttctaatcctctcactacaggtccaacccataaatgccattggctgcagagtctatgagccctaaggttatcactgggataacactgcaatttggtggattctgctaataatagttttgttgtaaatgtgccttgaccagagggcaagaggtggaccgtgcagagacaagttgaaataacagggctgaaacttctgtcc

SEQ ID NO: 2837 - DNA, 600 bp, Bovine  MMBT10249
gtggggtgccataccctcctccaagggatcttcccaacccagtgatcgaacccttgtgtcctgcattggcaggcagattcctttacccctgtgccacctaggaagcccctttttatttattattatcaccgttgtcacatcagctctccatggcacacattctcaccagcacggggttagcggctggggcagcatcttgcctttggtcccattgctccctcgctctctcttctccctcccaccctcctacaaggcaccctgctcgcattcagtacctggtctgcctccttggaactgctstcctctgtgtctctggaccccttgactgaaggagccartgcccacctgccagtccctagaagcctggatagggttctcgccacctcttggttccgagggcatgaagtccggccagaagccatgatcttctctcccgagggcctcccagggcctggccacactggccgggagacgctggacacccagggcagcctgatcwtcagaaacgtgacgactctagatgcgggcagctacatggtggtactggaaaccagcaggggacgcaggagtgcgacggagcagataccgatcaagggtaat

SEQ ID NO: 2838 - DNA, 600 bp, Bovine  MMBT11380
taaagttattttaaagttgtaattaataaacttggttttcctatagattagaatatacctaaaaataatatacttgtctgaagtaaatattaggtagaaacatctaccctaagatattaaatagaaatcttcaagtagaaagttgtagtttgaaataagtaaaaatatgctaaaaagattaataacgacataagcggcagaaataatatgtagccttttgtgactacttttgaagtccatcattacaagtaattctagtgattttcttttagggtgaatggttccagtatttctgacccmaaatttcaccttttcatttttcattgctagcctttaagtatttattaaactacctgattagtggacattataacagatacttggtaatttattgcagctagcagtatgtagtggttatcttgaaagaaatgaactttgaggataaacatttaggaagatttgcagaaaattattttctccccaaacacaaattaattgtttgaattatggttgctgtatctagaaatctgagtgatcacttttcttattttttaagatatcttttctaagttttaagttatggatttcaaagagaaagaa

SEQ ID NO: 2839 - DNA, 600 bp, Bovine  MMBT11699
tgcctcacacatatggaaacgcttttattcaaagctcaaagttaaaacaattcagacaaaatttctgcatgtattccagccytactcagctaatgggactctatcagggtggaaaaacacatacagatgcccagcagacacatgaaaagatgctcagcatcattaatcatcagggaaatgcaaaacacaaagtcaatgagatcccacactatagttagaaagacaataaataacaagcattagcagtgctgtagagaaaagggtactcttgggccttggtgctggtattgtaaattggtrcatcatttatgcaaaacagtatgaaagaktctcagaaattaaaaaacaaaaaacctattatgtgagccaggtttcgcacttctggccatttactagcagaacagaaaaacactaatttgagaagatataggcactcttaatattcactgtagcattatttccaatagccaagatatggaagcaacctaaatatccattaatagatgaaaaattagaggatatgtgtacaaggcgcacacacacacacacatacacacaggaatattagccataaataaagaagtctagccatttgcaaca

SEQ ID NO: 2840 - DNA, 598 bp, Bovine  MMBT12139
  misc_feature (1)..(190): n is a, c, g, or t
nnnnnnnnnnnnnnnnnnnnnnnnnnnnnnnnnnnnnnnnnnnnnnnnnnnnnnnnnnnnnnnnnnnnnnnnnnnnnnnnnnnnnnnnnnnnnnnnnnnnnnnnnnnnnnnnnnnnnnnnnnnnnnnnnnnnnnnnnnnnnnnnnnnnnnnnnnnnnnnnnnnnnnnnnnnnnnnnnnnnnnnnnnnnnnctgcaaggagaaaagacacgttattttgaaggctcactctactttctatttaagcttttctaggtgcagattccgctcctctgacagcaccacrgcactcattatgtacygcaagtcatcaagctgaggttaggagagacaaagcctgttccctgaagcaatttctttcagcagtgctgctggagcatagttcagaattatctttaatatgaatgagaagctagagccacttgaataggcagatggagttttgttttttccccctagaccaggaacttgtctgcttctttttyccaagtacattcatcatcttggttgctattttgtctaaccttgttctgccattctttccaattactcagtttagtttattcattccaggttagctaattggctttgcttagccct

SEQ ID NO: 2841 - DNA, 600 bp, Bovine  MMBT12161
aatgccttcaatraaaaggcctcttgacagtttctttcatttagtatttaactagtcaataatcataatagccataatattaatcttcatagactacatcatgccctcatcatcagggttaggcaaattaaccctgaattctcagaagctttaaacaaagtttacttcttgctcacacaatgttctctgtagatccaaaagtcctctactaaatggtgactcaggcatccagtctagtatcaccttgtgatatcatcaactcaacacrtgggtctctacaatccatatggcaaagtgctytggctcataaatgacacctgtcacctccacttataatctactatttagaataaataagcrggcccaatgtaaatgccaggaaggcaagaaaaagcagccttggcctggctctaaaaaggaaaataaaacaggaccaggtaaccatgtaccactgtctctgtcaccaagaggcacttattctatgcctaattaactaccatgcatctgaagtcttcatatgtattagtatctttaatatccacaaccacttctagataggtattattatcattatgccattttacaaacaaggaaattgag

SEQ ID NO: 2842 - DNA, 598 bp, Bovine  MMBT12210
  misc_feature (1)..(119): n is a, c, g, or t
nnnnnnnnnnnnnnnnnnnnnnnnnnnnnnnnnnnnnnnnnnnnnnnnnnnnnnnnnnnnnnnnnnnnnnnnnnnnnnnnnnnnnnnnnnnnnnnnnnnnnnnnnnnnnnnnnnnnnnngtcttaaaaccagcaagcaaactttgagtaaaatttccaaaacagcagaaattatttaaaaaataataaagataattattttctcctgattaaacttctaaacattcagagycaataaaagtttatacttaccaaatgtgtcatagttttcaaacacgttgttacccacattaatttccayagctcctcaatattatccgggagaggtgtgtaaacataatatgccccaaggacccccacgatcagaagcaaaatcgtctttcttcccatcatgttttccaactgcacattctacttggcagcaaagcaaatacacttctgaaatatttgaatgttgaaatttcataacagtttttggatttatcaaaaagtgttatcttacttcttagacacaaattccattggtccarttgtcattctgcaagctgctgggaaataattaactcagaaaaagtacaaagaactctgtgaaatccata

SEQ ID NO: 2843 - DNA, 600 bp, Bovine  MMBT12681
ggggcgctgggtctcgctctggaaggtacccgggctcccctttctggcctgcggaggtgacagccctcttgagaggcagcccctcggggcacccactgcagtctctcctcgtccgggatatcgactcacccccggcctcagggartggcagaaccccgaactcytcaaccgaaccgctccccgwctcacgctctcacttcagtattgatgaacccggaagtaaatagagaatgctggggaaagacggcaccggaagctgtcatctgacgcacgccgggaaatgtagttctaacatggtcratgtgtggtgttctgctaaaaagaccagacgcggaaggatttaaggcaagatggagaaaccgagatgggaaaagaaactgcacggttgcttgggtcttgacctcggagtgcccgtctttcatcacttgggcataagttgcctcactggggtccttggtcccgcccctcaktggggagcgcgccctcattaaagatggcgcctgggaggcttcgacctggaacggcgctgattggatgagtctcggaggacttccgggagttttccatccgactgtggaactgtggagaggagtttgcacg

SEQ ID NO: 2844 - DNA, 600 bp, Bovine  MMBT13393
tttctttctcaatttaggaarattttggctacaagtatgagaaacaccttctctaactgccttaaaggttatagaaatgaatttttaaatatactaagtcctgtatcagagcaggattcagctatgtcaattccactgctcagtagcattattagaggtcagtttccttgttctgccagtaacagcattggcttaatcctcaggctggttgcacttatcaaaagatgacttcttataataactcagtctatctgtttcttctttcacatcaatcagccaaatataagaaatgaaaaactktcttttttttcataattatagagtaaatgatcttcccttcagccctcttggaccaagttaaatgcccagtactagattaaacacggtttttagagtgtcacctctccctgccaatcagccctacctttggaactctgaatgagagtatcttcctctaggcacaaaggctacctagagggctttgtttaggaaagaaaaatggagctgtgatactacctagactattcacacctaatacacatccctttcttcctctaaaaatgacctgtctcatcaaagagccttcatgatccagtgagc

SEQ ID NO: 2845 - DNA, 600 bp, Bovine  MMBT13941
cagctcccggcagggaggacaagccattggagggatgaggaggaaaggtcacaggccacagggtcaggatggagagcccgcgggtgagatgaacaaaaaaccatgccagaggccagttagcagggggagaaacagaaaacaaaaacgcatgaaaatacatcgtgtaaacatgacggcraaaaagtaaggtttcacgcatgatactaaaacaaagaacattggtgcaaattaaacatgtgtggatcgcaccgcacggcagattccaggctgtgctgaccaggtgtcccgcccccctgctcrggaccagctgctggggccctgaggggcacagctccagaaaaggccagttctaactccaggcccagccccagccgttgggaccctgagagaacagcctctgactcaggtcacactgacttctggaaaatgccgtattcccaccagggagagccaggaaagctggacgggaaggggggcgggacggggggcagccgttcaaatggaatgcaaaacaagaacacgaggcctagcacggctcttctcagatttggcgaaagcagctgaggtgaagagcgtgtccccggttggcagtgggctggg

SEQ ID NO: 2846 - DNA, 494 bp, Bovine  MMBT14110
aacttccatccatcattctccacacactatggtgtgcacaccagccaagagaactttaaaataagaaataaaactcagtgaactcacattcaattaatattagtcatattattaatccttgctggtgcagggcttatcgggagataattgaccttgtcagtgtttcaagcctgctgcattgctgtaggacctctcactcctctcacgcttaattagaatgcaataaaaccaaaaagattttctttttcctgcttaaccgtaaagtgtccatttttctcctcctttcttctatccaagaaygggaaagagaaaatgtggatatcgtaggtatataatcttctcaattaataaagtgaaagcaccgtcattgctccccagggcttgacaaatgcacctgtcggcagatccagacgactgatgttccttacgtgcccagacgcttccttcttttttctgtgttcaaagaaaacgtgattttaattggactgtgaaag

SEQ ID NO: 2847 - DNA, 600 bp, Bovine  MMBT14652
catcactgaatcagaaacactgaagcaatcggtgtcacacacatggccagttttctatacaacagtccggataacctttctaaaacatcattctatatatgctgttcccttgctccaaaaaacctttartagctctgaataatgcagtcagcagtatcaaatctaaactacacaaaataacattcaaattcactaaatgctaattaccattaaaggctaacactccatgcaactactttgtccgttctactggcctctgtgccctcctcccgttacaagggtaatggtccatgctgactrcccacctctgcccccaggcccgccacagaccacacctgctgaaatcacagcagctggaggcaaggtaagactgggctcccttcaccagccccaccgcccccacaactacaacccacacgaacatctttattagactggtcttcagtattcattagcaatattttagtatccctactatggttaattatctttatgctttgctctcctcaaacagactgtaaagccccttattggaagacccaacaagaagacattcacccaatcctccaattcatggagcacttacttagggcaagcaca

SEQ ID NO: 2848 - DNA, 600 bp, Bovine  MMBT15692
ctgtggttcgtgtgtctctggataccatcaacagcggctgcagctagctcatttcagccctgacaccctcccccgcagaatcaccatggagcgcaaacagcccgggacacaggaggcgggaagccgcatttatccgagctctatgtgaccagctgcgtgagaagtttgcctcttctcgggcaggtcaccctggattctcattttttcctctgtaaattgagagacggaaacgagttcgatccaggagacccgtggattactcacagatgtggtctattaactcactcaagagggacgcaygtgattttttttttttaatgttttaaattagttgccaacatttaaaaatttggagaaattgcttgaaaatccagatttcggttagctttgaaaaaattagaaaatttgacaccagcacacaggacagccgtaaaaccgggcaccctattagatgctacagaccatgctgctccctgttgccttggcaatacagaggccagtgtcagttttccctccatacgtgtcccagctcgttcagttatatccccttgccaggttgctaagctggatgaggtccccaggcccagttgtctttaaagc

SEQ ID NO: 2849 - DNA, 522 bp, Bovine  MMBT16093
ctctgaccccactttcctctctgctcccacaacctaaagaatgttagatctagaaggaagctgggagacagacttttaaccaccattttacagaagaaacagaggcccagagggaaagtgaatttctcarggtccctcaagtgagagccaggactagtcctctaaagtttcagggtgagtttttggaggcctttctaggacaacatgaggaaaataaaatggaaggaacaggcaaaaagcaagggaactagaggggaggctggtgcaatcatccaggctttgaaatgaagaggagggaaygggcaaggctcaagtcaatgagaggtatggaagatcctgtgatgggcagacccagaacccagaagactgggtcccagagaggggtctgtccccactttacacagccctgcccttcagggaactgggccatcccagaaggggcagcagggtcatgctgctaggatcttaccccggcacagagcttccagggccagtgcccacagtgatcagccccatacctcc

SEQ ID NO: 2850 - DNA, 600 bp, Bovine  MMBT16463
acctcacatcttaacctaaaccttcacatttctttctgccaaatttgacttagggcaaagcaataaaaaactgccagcgttcacttaaatggacagagcgatgtaataagttattcagaagagcagatcactcaaagatcacctctatttgggtttataataacaattttcagctgatttactttcttaattatatttctcttaggttattaaatttgcaactcttcagaatatactaactgggtggcagaggcctggaaaaaaatcagctcttctgaaggagccaactcaggtcacatratacactggggggaatttccaaagagaataayccaaaacagagtgcatcaagtgtgtgctccagccttctagaactgctttcccttttggtgacagtctaaggaaatatcacggggctttctcctttaggttgggcctctaaagaaaatcctgattcacaaaaattgtcatgcagtgttattcaaaatrgtaaaaaattggagacaacttaatatccaacagtaaaggactagttaaacaaattataatacatcawtaagatgggttcttgtactattaaaatagcatttatggagaatt

SEQ ID NO: 2851 - DNA, 600 bp, Bovine  MMBT16635
tggtctggatataatgcaatattatgaacaattataaatagggtgcttctatatattactttttttcagtcagtgctgatgaacttttgactccatgataaatttgcagaaacataagtcttctgcctggtgtgcttactattaaataaacaacatatactgtaaatgacaagaggaaatttatctccttggtctaggcaattgatttggcatttgattatccttcacctatttgttctgttctacaattcaataatttaatttggccaaaggggaaaattgagtcctgaacaaaagtcwgtttaagctggagtgagctaaggagtgggtcttttctaaaaacattatttttcattacagcttattgcaagatatcaaatatagttccctgtgcttatatagtaggaccttattgtttatctgttttatacacatagcttgcatctgccaatcccagactcccgatctgtccttcgcctcccctccccattgatagccatagtttgttttcaatgtctgtcagtctctttctgctttgtaaatacattcatttgtttctttattagattccacatgtaagtgatattatatggtatttga

SEQ ID NO: 2852 - DNA, 600 bp, Bovine  MMBT16658
cagtcccaaaggcgactcccctagaaatgggatcagmccgccctttcctgattccccctctatcaaagcygggtcttagggaccctgatgcaactcagtttctcccaggatttcctcttcaggaattccccaactcggccacaaacccaagagctttccaactatcctgccataattttctctggccccaagttccagctttaggggcactttgctttcagcagagttgatgtgatcagctgatgagaacaatggtgtgaccgggtcactagatgataacagtggctttcaggcttcctkaccaatacctgaccttggttcccagtacagctgtgcctgcagccygctccctcactggatcgccctatgggagtcgggagagacccaccctaaagtcagctggtaatttcagtctaagggaatccaagttattcataaaccaggtcattaaaatgaagatattgggggcaggtgaccgacgtggagttgcagtgatgaaacctgacaaagtcagacaagccagccccctgccgggtggaccagacacagtacctgaaccaaactcagagctcctttcactctttcctgagagactgaaac

SEQ ID NO: 2853 - DNA, 600 bp, Bovine  MMBT16841
tgcctctgtgtgtgatgcgccggtccagaggcctctccagagactggaagtctgtacctctgctaggtagaggaggagcgttctcatcctgcttgctggggaggggttgatctgggtatctgcttcttaaacagttactcgaccatcctgccttgttttttttccagtcttcgttcgcacttccagaagtccctgcacctaaaaccctgtgggcatggttggtgtaaatggaatgccctctgtgctttctcttgctaccagtttagtatttggctccagcttctaaattttgttctgtcrtctctttctctccctatctttgtaaaattccccttcctgtgattttaacataatttttgaaaaaggtagagctcaatatgttgattccacaatctcagtcagaagtccactcggccctttttccccttggtcatgggtgagttgggtcacttgttggagggtgtcagatgtatattttgtttacagagaaattaattttctttaagtaaccataggagaacttaacccttcacgtttttgtatgtaaaagtcagagtcatgactagaaaacggtcgtttttaccttatgaggtttttctg

SEQ ID NO: 2854 - DNA, 598 bp, Bovine  MMBT16928
  misc_feature (1)..(78): n is a, c, g, or t
nnnnnnnnnnnnnnnnnnnnnnnnnnnnnnnnnnnnnnnnnnnnnnnnnnnnnnnnnnnnnnnnnnnnnnnnnnnnnngaagtgctgaaactccccagtggtccgtgtataccaaacaacagaaacacctggaaaggctgctttcttggttttaaattcagttaagatttctatcaggtgctaggcatgttaattatgtggtatgtcacttcattttcataacaagctgtgaggtattaagttggtaacagagagaaggggctggagctgaaaccacaaagggtctaaatgtgcctgccktaagtgaattattcatgggagcagtaagtcaagagaggtggcaatcagacttcagaggctgagtgagggatgcaagaaaaggaggcagcttaggaaagaagctaacacgctttgagtattttgagtcttgagatgcctttgaaacatccaaaaaacatgaggagctcagaagtctgaattgaagatggactttggagtcatcagtatatgaacaatagtaaaagcagaggataagaatggccacattcggggagagcatggacttcagcaaatacaaggagcaagactcccctggtgg

SEQ ID NO: 2855 - DNA, 598 bp, Bovine  MMBT17239
  misc_feature (1)..(185): n is a, c, g, or t
nnnnnnnnnnnnnnnnnnnnnnnnnnnnnnnnnnnnnnnnnnnnnnnnnnnnnnnnnnnnnnnnnnnnnnnnnnnnnnnnnnnnnnnnnnnnnnnnnnnnnnnnnnnnnnnnnnnnnnnnnnnnnnnnnnnnnnnnnnnnnnnnnnnnnnnnnnnnnnnnnnnnnnnnnnnnnnnnnnnnnnnnngcagtgcagagagtggtaacttgctccaagtttgcactggagaagagagactgggactaactaccaaaagtgtgatggactcaggaggaagagggggagatttataaaacatctygtctctgcctgtacaacctcgagaaagttagtcagttctaatcagtgtttattgaacatccatgatgcaccagaaatctaccagacttcttaacggagggtccctgacatccccgtctataaaatgagggtgctggctacactgaattccttggctctttgtgaggcattagtgaaacagcatatacagaagcacttttttaaactaaaaaagtggttttaaagtatgcatcattgttgttaagtcttctgctctgggaattgattaagcagaaaaagatgacttccagatggtgcaa

SEQ ID NO: 2856 - DNA, 600 bp, Bovine  MMBT17440
ctaacacacacaacacttggaaatggtactgactcagtattcacctgggctatgcttagaaataatctagtctagtagttcttgtcctctttttggtcagggacccttttgagaatctagtagagaatctaaacagaggagatcagtgaatgacttcaaaaggttcatggacctaggggctctgtgaaatctattttcaaaaatctataattcagatcaaaacctcttttttgattaagaaaaatctatggcttataaaagataagcaatttaatgtcaaacaagtagttaaaatggaaragcaatgttagcctaattccmaaaacctacatatttccttttcagccacattgtctctctgagaaggaacaaagacattgtctctcataattctcttatttttctcctcaagttttactyaaatatagaaatacartagaatagttagtgaagagggaaaatggaatttaataactgatttccacttcttggagatttacaaagaacctcaacatattaaaggttctgaggagtccagctgcaagttaagacttagactgaaatccctgaatgtcatttctactatattctatcagtcaa

SEQ ID NO: 2857 - DNA, 600 bp, Bovine  MMBT17698
ttagaataatactatacttcagttttctgaaagtggtttgggaagatccctgtaatgcttcccaggtattaagcctgctccaatgtcagttctctgattgtttcacaccagttagaaatttcaagggcttataatttcagactgtatcagcattctccttcctgttttgaatcaatggccattaactcattaatttatcagctttgatcacatttttgcctgtgctcttaagactagcataaaactcagaaaacaataaaaattttagatcattttaactcatttctgaatctatttgtrtcctccagcttagcccacattctgatcttgaacatggttaagattcacagtgacctttccccatgacataagtagtgggtcaactcttgacattgattcctcctgatcttcccacaacctagtggtgacaatatattttatttcaacttacacaaataaatcctaaaataactaccttgtcaggctgggtgaaaaaacgagctggcagtaccgggtctttaggagattccaaactatatgtggtgctttttgacatgatgatattcatggcaacatcacatacagtatacagtttctgca

SEQ ID NO: 2858 - DNA, 600 bp, Bovine  MMBT18048
agtccatggaattctccaggccagaacactggagtgggtagcctttcccttctccaggggatctttccaacccagggatcgaacccaggtctcccgcattgcaggcagattctttaccagctgagccacaagggaagcccaatcaaggatgcagggatgatttttaaaaagacatcacacagagaacaggctcgtggctgccaagggcaagggggcgtcagggagggatgcagtgagagtttgggcttagcagatgcaaactatgatatctagagcaaataaacaaagttctactgtacrgagcagagaaccatacgaaataccctgtgatgagctacagtggaaaagaagatgaggaagaagcatcttattcttgatccaggaagatcccacatgaagcagagcaacaaagcctgtgtgccccaactactgagcctgtgctctagagtcggggagctgcagctacagaagccatgccctgcaagtgaagagtgtccccccaccccactgcccctaggaaaaaagcccctgaaagcaacgaagacccagcacagccaaaaacaaaataaattaaaaaaaaaaattttttttttaaaagac

SEQ ID NO: 2859 - DNA, 600 bp, Bovine  MMBT18167
cagacaagcaacacggtggcctcttctcctatactaaatgggtcaaggtcgttaatactgactctaaagagacacccatatggaaattaagactcgtctaaaaggcatcagagagcatgtgagaatgatgcttgatctttggtatatcacctggacaatcagagaggacaaaaccttcttttggcctgattatgcctgatgacctgagcaaagacacctctgtggctgtatcagtgaggttgctccagaagacgacaccagtggtgacagatccyggagctagaagagacttagcccacrctccccattttacagataaggagtacagacagatggatttaattgtccgtgtttacacaggagagttggagtaggaaatggcaaccgactccagtattcttgcctggagaattctatggtcagaggagtctggtgggctacagtgcatagggggttactgagagttggagtaggaaatggcaaccgactccagtattcttgcctggaaaattctatggtcagaggagtctggtgggctacagtgcatgggggttaccgagagttggacatgactgagcatgcatccacccacacatacaa

SEQ ID NO: 2860 - DNA, 600 bp, Bovine  MMBT18567
ctcacaggacagagttttcacacttacatgtcagaagctaattgcttaaccatgaccttgcattatagaaagaacagtattcaaactctggtcctataacttattgatgacataaatttgggcaaactcttggacttgtgttttctcatttataaggtgggatgccatcacctcgtcaggaagtgtattttagttgctgttttgttttgagcttaagcggtgttcgttcctttccttccccgtgttgttcgctcctttaggatgggcatctcatactgttaggtatctgcctcagccttrctcaggcacccacaggcttaattaatcctgggaactaaaaggactgtttctgtgcagattatgtatatggatatatctctgtggatgtgtgtatgtataaattgcccagaacttgtagtgattcataggagatacacaataaagggtagtctacctttctttcatccacctctttgcttcatggaaacgaactctgtgctagatggcaatctgaaatgtgtcattttcttgtttttaattttgggggcaaaattacattcttttgggaaaattatgttcttatttttcgtatgaacattt

SEQ ID NO: 2861 - DNA, 591 bp, Bovine  MMBT18624
tccttctgttgctttctttgttgatgaaatttccttcataagcttgggaatttccctgtcaaattattagaaagttctttaaatttctaaagtttaattcacaaaagtatcttaagattaaaaaatgtactattagtactctgtaattagtatttaaatatggaacaaaaattaaacaggttcacatactctaatacaactgcaatatggcgatgccgaattttgacccagaggtcatcatcttcttcaaggattgcctccttttccttcccatctgtcttatatctacaagagaagtaygaaacttttggattatttygtgccagataaagtaaaagaaaagtttttataaataacaattttaagacacagctcaagaaactgaagatttttaggaggataatgaatacctatccaaaactaaggcatattgctatccatacaacaaaaatcaagygccatgcccaccatgacctttttactttcaatgttattttttgctgtcattattacagacttttatctcagtatcttagaaacaaaaattcagtgttccacagtcaactttaacaagaggaatttattaacaat

SEQ ID NO: 2862 - DNA, 572 bp, Bovine  MMBT18625
gttgatgaaatttccttcataagcttgggaatttccctgtcaaattattagaaagttctttaaatttctaaagtttaattcacaaaagtatcttaagattaaaaaatgtactattagtactctgtaattagtatttaaatatggaacaaaaattaaacaggttcacatactctaatacaactgcaatatggcgatgccgaattttgacccagaggtcatcatcttcttcaaggattgcctccttttccttcccatctgtcttatatctacaagagaagtaygaaacttttggattatttygtgccagataaagtaaaagaaaagtttttataaataacaattttaagacacagctcaagaaactgaagatttttaggaggataatgaatacctatccaaaactaaggcatattgctatccatacaacaaaaatcaagygccatgcccaccatgacctttttactttcaatgttattttttgctgtcattattacagacttttatctcagtatcttagaaacaaaaattcagtgttccacagtcaactttaacaagaggaatttattaacaat

SEQ ID NO: 2863 - DNA, 600 bp, Bovine  MMBT19400
aggagctacaggagacagaggttccatcctcagaaagattccctggagaaagaaatggcaacccactccagtattcttgcctggagaatcccatgaacctggtgggctgcagttcatagggttgcaaaggatcggacatgactgaagcaacttagcatgcaagtatgttaataataatattaatgtaaatattaaatctgacatgagyatcatcctgaagtagttcaccagagcatattaagatcatggatgttgagagctgargtgaagtgtaacctgkgttaaattgttctgtaagcstcaatttcttcacccataaaatatgttaagaatagctactatcttacagcrttgagaaaattaaatggtatcataaagccatacactcagttcagtggtgatattaagctctcaaagtrtttagttattattaatattaccatcaataattatttctgccaattctctctttgactgaaaaactatcaggcatatcctctaaaaggagatggacagaaatcatctgttggaagagttaacaatagaaaacctataattgttggcagggactctattttaatctggctcctgaactcttgt

SEQ ID NO: 2864 - DNA, 600 bp, Bovine  MMBT19583
atgcaggagactgaggttcagtccctgggtcgggaagatcccttgggaagacactggctactcactccagtatccttgcctggagaattctgatgacagaggatcctggtgggttaaagtccatggggtcacaaaagakttggatataactaagcgacttcctgctctgcctctaktttatattatgaactatttataataatcctatgaacacagataatattattttctttcaattttcaaagaacaaaatttgaacttacagagtaagtaacttgcctagarctaagcagcttgcaygtggtggagctgagattcagagtacagtggctcaaagtgactgtaacatgtaatcctgaaaagtttgcaagtgccttggggtgtgaagctgagatactttctaataatgcgttgcttggcaattactctggcacccaaagtgttttccacaatacattcttatttactttactgttatataaacactatatgttatatcagttttkatattttcctttggtatttttggaaaatataagaagcaaattataagataaggtcgtttttctccatatttatctctgctatggtatgatcatt

SEQ ID NO: 2865 - DNA, 600 bp, Bovine  MMBT20259
acagcagttctcctttctgtgtgaactctgtgcctcctctgtgtgcataaatggccttgcctctcagtctgcaccagctgtgtcgggtcctgagccagggcttcctcagcctccgtgtttcctgagcctctctgggaggtgctccatccctttacagtccgtgacttctctgaagagtcttcttcacatttgggtccactggacccagttcaaagcctggtacccagtaggtactcaataaatttcagctctgtctccgtctctcctggcasacgcacgcagacacacatacaaacacamgttcatttactctataaatatgtaagttaatgaaagttcccttatacttgccttgggggctttagtttctgcttccaggtgagagaaataaaaaatgtgaactgctttacatttcttgggtataagtactatataaatttgggattattattattatggtagattattgcaatactttgctttacgactttcattttaattaggggaggttgacttcagacggcttaatatctggtctttggtcctgaagggagcaatatgacattggcaggggccaggcctggatgacctaagagtaat

SEQ ID NO: 2866 - DNA, 600 bp, Bovine  MMBT20441
tctgagtgcgccttgactcccgacgagatcccttaggtgtagctgatcgctcacagttgaactgcgagagtttgccgctagaggacacagcacctttgcaactcgtttgcctgggaggacaggaagctcgcacttttcagaaatgccgctctcctgagaaagctatggatctgcgcctccacgctacgcccagagcaaacagcgacctgactgagtggaccgaacgcactctggaagcgcaagggactctactgcgaagattcgcttgaaaaccgacgcggagkgggagagggtgcgcgsaacctcattacacaaacccggatcccgggattggggtggttgatggtgtgggtagggggaccataaagcttgtgaaatccccacctctggtttttgtcgactgtggcacctccaccccagggctctggattggtgtccttggacgagaagggcaggggtgaagggcgattgggcataaaaatatggaactatggaacgggactgttgtaaaagccaagtaagatgtccaaagaagaaaggagggtgggcggaaaattttgtaggatgaaacttacttcttgtttcagctgttttatgcag

SEQ ID NO: 2867 - DNA, 600 bp, Bovine  MMBT21026
taccactgagccacctgggaagctctgaatgggattagtgcccctttaaaagaggtccataagagcccttgccacttaagctatgtgaagtttcagagagaagatggcaatctgtggaccaggaggcaggccctcaccagacatggaatctgaacacctcttgatcatagagttcccagcctccagaaccgtgagaaataaatttctgttgtttataagccaccaatctatcattttctgttagagtagcccacrtggacgaagacagaacattttcttaaaaaaaaaaaaaagtatacrtcagaatatacctaaagcaaacacaaacatagcaaaacgtttattattgtatcctttaaacagtactgacttgatattcaaagcacagccataaatgcatgcaaagtagagcakcaagtattaaggtgaaaatttggttcagagacttttatagttactctaaaacatctttgctttattgtgagaaattataagaagtttgggaatatatatatgacataaattttacactgtagctctggtgccacatgttccttcatggaatttgttccaaatgaaaagctagaaaactgatttctc

SEQ ID NO: 2868 - DNA, 529 bp, Bovine  MMBT21094
cctctcacctctttgttataacctccgttaatgatagagtggaattacacttggcagagaaaaagccctgggtgtgccagaagattaataagtacataatacaactccattagaaatytgacttcaaaataatgtgcttgctctaatgagcattactagttgcttatactttatgagaacagggaagggggtggtgatttagatgattgcctttggattcaattttcctatcataagcagaaattcatagtcagtcagttgacctctttccctaaatttggggaaggttctctttaacartcattgaaagaatagccattggtgcatagatgtatatatggtaatatatgtcccatgttattaactttacaaatagtgtctccaagagcacttgggaaaaaagaagggcctttctgtatatgctcataagaaaacaagtttagtatttttattgctttctgagcaacataatatttcatgttatttgttctaaatattcacctctaaactttcaagagttaccccctaa

SEQ ID NO: 2869 - DNA, 601 bp, Bovine  MMBT21106
  misc_feature (1)..(1): n is a, c, g, or t
ncataaaacaaaaggtatttgtcttttaaatttttaaaggcttcttttaagagtttttttttaaacatctgctttaagatctattcaagactgaaatgtattttgtttaaaggtataatctctgtgaaacttaggacagtaacttctaatcaggctacagttctctgaaagggtcagtaaaakcatcatctatgcaactgatgaatctcacaggattccttcacagttttcctgattctttgactaatagtttcaacagtttagcctatagaatcatattctatatttgttattttcattygtgttctgtacatttctaaatcaagcatagccattttttcagaaagtgatagttatatatggaggaaaataggaggcaagccaacccccacckccaaggaaaaaagtatttctaaataacaggtaacttatatctaattggattaatttttcattttaggacttgaatgctgttgcttttaggtttaaagataaagagagaccacggggctatacctctaagattgcaggaatattacatgtaagtttattgttattttactctatactttggcacatagagtgtttcagtgatcctgta

SEQ ID NO: 2870 - DNA, 600 bp, Bovine  MMBT21141
gtcatttgtaatcacactttactgtctgatgtgtccttctaggtctcatttgtgtactttcacaactaagcatgcatttgtatatagttaagatcacacagctattgtttttaatttaaggaagaaattctgaaatctaaccttcagagttgctttacgagggccgagtccactgacataccctcgctgacaacatgccccaggagggtctgkgagtacagctctaattttaaaatcgtctctttattttaaacatttctgcagggtttcactatattctagtctattcatgcctgtttkgctatccactgagcatctctgccccacacttctttagacagagagctgacattccaggatgatggtatattgtgcacacgctgcaaagccctgtgacgtgtgccatcagccgcctgtccccaccacccactcccctttcaaaggcatggctgtccgaggcagcacaagcacagggcctggtgcttggtaaggcttccgtgatattgcttgaaaacaacctctggaattcaggctgaagagatcagcaggtaaagggctctttggagagcgcccgtttgcccttctcctgcccggggacct

SEQ ID NO: 2871 - DNA, 598 bp, Bovine  MMBT21156
  misc_feature (1)..(26): n is a, c, g, or t
nnnnnnnnnnnnnnnnnnnnnnnnnnctgcggtcttctgagaacacagctgttgccaactatttgttccgggcttctgagatcaggccacccctgccccctctttggtctgagaggcaagtctgtattggaatgtgtagctgtaatcagcagcggctgtaagcgggggtggggacagacacacacccttctgctgcctgttyctgggtgagaaaaagccacagatgtgatcaaaccagagtcttacaaaagaaatatatatgcttctagggactgctgtttaacctcatgcttagaacargactagagtgtcccttgggtggcctgaaattcttctaaaagtaagcttttctgaaaagctccacatgttctattactgcttttgttactgttcagagttcctttgatgcagasacaggcagagagagtggggaccctattggagcacttcctctgtccctcaggaagggctgtccttttgacttgtgggcagagtaagccctggcgaggattttgagcagtgttggaaataggaagcatctcatgctatgtcagcaggtggggaatgctgctgctgctgctgctgctaagtcgcttta

SEQ ID NO: 2872 - DNA, 600 bp, Bovine  MMBT21768
tgcctcctctttatgtgggtcaaaatgcaaggcaaagccattgtgtcaaacggccttcattaaattcattgatttgacctgtattttaaagaccaaaagtcaaatggaatgggaagttaaagttcccatacaaaaatcttctcctgggcacttgtcggcttccttgaactctctggtgtggaggcaaaggacattggcgaggctctttggagtctagctcgcagctacacaagttttttggcgaaaagttggagtttgtgttgcattttatgtaagaacaaaacaaacgctaaggttgarggaagctattgtcttgaacttgattttcttcccaaagaggtactgatagtttgtctgccttatacagcatccttgcgagggtctgttctgtgttgctctgcacagaggtctctgttcctgctcagaactctctgaatgaattgtcattcttttcatcaatatgcactttttggacttaaaatgaggttaaattttctggacgttttgaggcacgtcagcattcaaagccctatcttttycttgtgtgtrtttttatggctaaaatggccacaaacagtgctcgttgaaaacagggggtgg

SEQ ID NO: 2873 - DNA, 600 bp, Bovine  MMBT22029
cattatgaggtttttaaatcatgaccatgtgccaggtttatcctgtgattgtttcttcatccactgtctcctagagacgtcctcgggtttcccttcaccttgcccgccctctcccctaaggtgcagtcctccgtggccgtgggcaccccggactacatctccccagagatcctgcaagcgatggaggacggcatgggcaagtacggccccgagtgcgactggtggtctctgggcgtctgcatgtacgagatgctgtatggagagaccccgttctacgccgagtccctcgtggagacctaygggaagatcatgaaccatgaagtaagccgtcgcacttccaccccgtgtgtgttcgagtccctggggaagagggatgggtggagcaggctgggcggccagacgggtgtccgagtgggctgctgacccgggagacgagagcggagggggmcgctcccgttccctggtggagggtggtgggtccrttgggccagaacccctgcaggagatgtgggcttcgggagctagacmcaggtccgtgcggggccaggtgggygggaactgcccaagggggctctcgggcccctgccgcctgtgtgcccg

SEQ ID NO: 2874 - DNA, 600 bp, Bovine  MMBT22139
tgcatggtctgctcctgtaaacgtatgcttttggttttttcctgtcaaaaaatcatgctaaaatcattattttaaccagtgttcaaacagcaagctcatgtcaactcttggctggaggcttctgcttagaggaaaccaaagacaccagaacatccatttgcctcaccctgtcatgtgtggaaaattttaatttgcctagttaatcgtgtgggacatgggagacagacaggcagaaggrcatgacagcaaagagcacrgttcagaagcagcctccgccgttcaaatcctatatccgcagtyagtactcgggtgaccagtcctagaccaggagcacctgaaacctcctgttcaccttgaggctttcatgccagyacctgtggctttctgcgggctccaaggtgaagcacaagatcygcccccctacctttcaagacctccacatgcatcccttccccctctccagtccactttgtcttctcagaaaaaacctccatctgtgtggtctcttgtggcaacccactcagtattctcgcctggagaatcccatggacagaggagcctggcaggctacagtccatggggtcgcagagagtcagacac

SEQ ID NO: 2875 - DNA, 600 bp, Bovine  MMBT22140
gtcattctctgacagccccctgaagggtcctacctgtccaractgcatggtctgctcctgtaaacgtatgcttttggttttttcctgtcaaaaaatcatgctaaaatcattattttaaccagtgttcaaacagcaagctcatgtcaactcttggctggaggcttctgcttagaggaaaccaaagacaccagaacatccatttgcctcaccctgtcatgtgtggaaaattttaatttgcctagttaatcgtgtgggacatgggagacagacaggcagaaggrcatgacagcaaagagcacrgttcagaagcagcctccgccgttcaaatcctatatccgcagtyagtactcgggtgaccagtcctagaccaggagcacctgaaacctcctgttcaccttgaggctttcatgccagyacctgtggctttctgcgggctccaaggtgaagcacaagatcygcccccctacctttcaagacctccacatgcatcccttccccctctccagtccactttgtcttctcagaaaaaacctccatctgtgtggtctcttgtggcaacccactcagtattctcgcctggagaatcccatggacagagga

SEQ ID NO: 2876 - DNA, 600 bp, Bovine  MMBT22280
acctttaaaagcataagggttctgtatggggcaactgcaggtccagcagcatagggctatgcattgccagtgatgggagccacggtgggatggcaaagactgaccagactcaggtatctcacatcagggaaggaagttgcagtggaaggtccacagggcctccagtaactaatgcacatgcttctaatgggaagtcaatgtgttgactcctgcatgcagagaatctgaccatcagtgttagatgcaggaacagtagcaatgaacagtaatgctttgcaaatccacccgctaaataaagtracattttggccttttttccttcctgttcttggccacagcatactgaatttactcccaaatgaaagagggaagagtaaggaaatagcttgcaaccaggtatgcagttgcawgttttaacaaccaacagtggctggaaagttatgaaatctgcccaaaatatcactaagaaaatgagggattggacataacacagttgaaagccaaaataaaacagttgcctcattatatgccacttagttgagacttatcaataaataggaaatatgtcatcacgctttgtctctaaaattctaaaagttg

SEQ ID NO: 2877 - DNA, 600 bp, Bovine  MMBT22709
ggtttataaatgggttcaatgtttttgaaactcagaacagctctgtgaataatgagttgaaaagctgttaatatctttgatcctataattatccccaaagaaatcctcccaaagggtgggaggagtcattgtaygtaaatgctcccagcagtgctcctcgtaaaggcaaaaactggaaacaactcagataccatataataaagctaaggctgagcaagccacagtgtggccaccctctggagtgtgggatggcatggaaatcatgttgaaactcagcagtaagcttataaactagggggsagtgaagcaacctgagtatgaagtagtgggttcctrgggattagaaacacaagtaccttttgatttttatttttggccgtgctgttcagcttgcgggatcttagttccccagccagggcccaaacctgtatcctctgcaatagaagtctggagtcctaaccactggactgacagggaaytccccaaaacacgtgtagattttgaattccctcccccagcattgcctctatactccagccacacgatacccattcagccttaatgtctgctcctctcagagtctccygttattttctctgc

SEQ ID NO: 2878 - DNA, 600 bp, Bovine  MMBT22808
ctgtctttaattattactttgatacccataagaaactctgttaaacagacaggaataacagcactttcacatagttgaagaaatggatgctcagaggggtaaacacaattcatccagtcatccacgtttcacaagtgaggccatgacatgatatcaggaaccctgattgcaagtctgaggctaatttcatcttctaggatatcttcctcaaaaatctgaggatctaaatctcaagaagtactgtaaaagaacctagtcacatgaaaaggatacaaagaatcacagaaatttataagacaygatctcaatactgacccataagagtgcgtttttcaggtcatgagaactaggatgtcagacttggcacaggccttgccagaacctatatgacaccaaatctctgtgaaacaaatggcgtaacattctcccttatctcagaccacactcacaaaacatagcacgtgcctattgctgtgtagagtgactattacaaactcattccttctttggtgtttctagtagtccgaaaatcagaatgttattgtcacatgctactcacgtgcaaaaaagtgacatatgcagtggcctagtttcctatat

SEQ ID NO: 2879 - DNA, 600 bp, Bovine  MMBT22920
tctctaaatatcttttgcaccttgatgaatatttattcttgtcttttgtgataagctttactgccttcaattttactaagacaaagatggggagggacacctccaaaagagtactaaagaycatggttgtggaatgggtgtttctgtactaaaaaatatttaattaagatcatttctgattttgaatctccctctgtgctgatgaaraggagagttataaggaagaagcagggctcctgccagctataaacagggtagaaaaaatacaccccaactccaamacaaggaaacgtggacccstctactgactagcaatgggaggaagttatctcccacaggcttcagagatgactcccagaaagtaatatggtatgagaacyataggcacttagggaaggtagaggaaatggagctaaaccactcactatggtttagttccactgttgtatcatgacacagtcagatttttgaaaacaaatggctcagactttatatttcagaaatcatggctgtaatatttctaaaggggtgcggaggatgttccctaatactctattttagcagcagaatgatgtatcaatagactgcttttgtgcatca

SEQ ID NO: 2880 - DNA, 598 bp, Bovine  MMBT22946
  misc_feature (1)..(239): n is a, c, g, or t
nnnnnnnnnnnnnnnnnnnnnnnnnnnnnnnnnnnnnnnnnnnnnnnnnnnnnnnnnnnnnnnnnnnnnnnnnnnnnnnnnnnnnnnnnnnnnnnnnnnnnnnnnnnnnnnnnnnnnnnnnnnnnnnnnnnnnnnnnnnnnnnnnnnnnnnnnnnnnnnnnnnnnnnnnnnnnnnnnnnnnnnnnnnnnnnnnnnnnnnnnnnnnnnnnnnnnnnnnnnnnnnnnnnnnnnnnnnnnnnactctatatatactgaaacaagctgaacaaaatctttacttataagccatagattgtgctrtgaagtaagctaacagaagaaggtgggggggagggagtggaatgtaaggacaggatccagtaacaaaaagtgagttttttcccaacacttcagctgtttaaatccctaaaccggccctggtggtastcaccaccattartttgggaaaatgtccccatcctcttgctaagagcgagtgctggggagatttctgttattccattgcactgttgccaagccaacctgaaagtgtgtgggttctcagagaaacatctcagtatgcagtgttaagtttcatagcattcttgacacagtattc

SEQ ID NO: 2881 - DNA, 598 bp, Bovine  MMBT00037
  misc_feature (1)..(212): n is a, c, g, or t
nnnnnnnnnnnnnnnnnnnnnnnnnnnnnnnnnnnnnnnnnnnnnnnnnnnnnnnnnnnnnnnnnnnnnnnnnnnnnnnnnnnnnnnnnnnnnnnnnnnnnnnnnnnnnnnnnnnnnnnnnnnnnnnnnnnnnnnnnnnnnnnnnnnnnnnnnnnnnnnnnnnnnnnnnnnnnnnnnnnnnnnnnnnnnnnnnnnnnnnnnnnnnnnnnnnnctctctgtcctaggccccctgtaatctactcatccctgactcatctccaaggaagaggaggagtatttgcttcgacaggtgatctcarcactgttctggtctgttcttctcctcttcccagatccctctccaacccccagctctcatgtgagagcccacaaggccacagtgaagatcctggcagaaaggagagtgccacccagcacccatccctcaccttccatattcctttctcaacacctgctagggcctggcaaaagagcttttcccagaagacttaggggaaaccaaactgatattttttttttggccaagtcatacatcttgcaggatctcattccccaaccagggactgaatccaggccacaacaataaaagcgctgaat

SEQ ID NO: 2882 - DNA, 600 bp, Bovine  MMBT00203
tctcctttgataaactgtggtaataactggggttgcatgaggaataaatattcagtgtctgcacacagcactagctcaactagtctgtcctctcctctcttccctctaccactatttcacctggaaagtcacttaatttctctggacaaatccccaccaccaccccacccattttcttttacacaaaactgagatgatatcttgcctccacatatagttactcttcaaacagttggggggactgtcattttgcttaaacacacctggtctctgcctgattccacagttgttactggtttygaggagtttttggcaggagtctcaacctacctggatggttttagtgagcttcagagcaggggtcactgtcccaatgggtgggctcatgaaggcagcaggggaattccgcttcaagctgattttctcccgggcatcagcaacctggtggggcttctggggcactgtgctctgctgcttgcgcgagttcagcatctctctggcatcctgcactttccctttgatccggaaccgagcatctttctgcaaaagcttttcccgggcatccttgactcccagcttgaggcgggcatctgagaggcc

SEQ ID NO: 2883 - DNA, 600 bp, Bovine  MMBT00454
tgtgtagttcacggaggaggtgaaagagagcaaggctcctgaagaggagtctggctgagttcattgactccctccctccattcatccatccatccatccctccattcagctctctatccacccacccatccttccatttctccgtccattcattcctccccccmctccctccatcccgagagttcgctcacaaggatgtgactttctgagggtcttggtgagtgggaaccaggggccaaaggacagccaagactgtttttcacttttgttactcctctccagccaggagagcggacgtgyrtggtctgagggttgcgctgtgtggcaggcaccccgtccatctcttcagctgccaggagagagtagctctcacacctcagctgaccgatgagcttgggccataggaaaaacaagaaccccaaatccgagcgggctggatgggyagagcagggagtggacgttcccagttagtcctcactcagctcattctcctgacggctcaggcgggtgtgttcctgagactgtggacagagggcagacatttattaggcactgcctctgtgtcagatgctgaaaatacagtggtgagcgagtaaggcc

SEQ ID NO: 2884 - DNA, 600 bp, Bovine  MMBT01177
attgaggtcatagtataccatataaaaaacatggagttttggcttgtaaatacctctctcagtgacttcctacttactgttttcaatacttcaaagatatccttagtgtctagaaaacttaagtctgtgtagttgattttaatattatgcatgtagattaataggggcaacattgttggtaaaatgatagaaaactttctttaaaagttaaaagggatttgagcttcttgaggtctacaagccaattacgaggcttctggctcttgcattctcatctacctttccatggtaacctcttcyttgttttcttcctaaatcatcacatttctttcctttagtaggcaggattttaaagytgcratttctcaggaagctttagctatttcaggaaggccttrtatcttgattagcagctcttgcattacatcttgttcatcttgttcagaagcctcagaaattaatttttatgtttgaaacaatgattgaaatatgagcaagtctgcttgactgaaatagggcgcatggtccaactctacttacctagggaactgaaaaagcaggactgagttttcttcttatacaagttttctttggtaatat

SEQ ID NO: 2885 - DNA, 600 bp, Bovine  MMBT01667
gtaaccagatttctttaagaataccattgattcctctttttgcctgagtttgccatcatttcatcttgctaagagttatattgatatactatatcaatataaattgtattgatatattatattgacataatagatgtaatattagttatattgatataatactaaytgacaaactctattagtcctgaattttaaaatttaagttctcaagtttcctcagctttccttctaagaagcaatatttctgttattctggaatgaacataaatcctcaagatttctttagatgtcatctatctytgttcctccttacatctcttttcatctgaagaacagagtaagtatgggactcttaastccttcgatagcytttggtggagtggaaakamgccyctctctacatgagccaggagacccagattcaataccagggtaaggaagatcccctggaggaggatgacaacccactccagtactcttgcctggagaatcctatggacagaggagcctggtgggctacagtccatggggtcagcaaaagtcagacacgacttagagactaaaccatcaccaccaccacatgagccagaacagccagta

SEQ ID NO: 2886 - DNA, 600 bp, Bovine  MMBT01905
atcttctgtgagaccagggcagagtggatggttgctgcacaggcctgcttcatgtataattttcagcgtacgtgggcttccttaccttcttgaagcatggacctggtgttgtgggagagatgatacttactatttatgataagtatttcctcccrggataaaattctgatgttaattttaacctttgttacaatttaagacatactggtttgttcagttgtggaacaaattacccgtgtagtaagaggacttgaacctattctgaggggactttgtgggtctggggaactaaatctacasctgtgggtcattgctctgctaccccttctcagaattgtcctttaaagttagtgtcatcttgttaggccatttttacagttgacagctggcctctaaagcacttccaacactcaaacctagctgctagttaaacgatagagactttttatgttgtataaatataagacgacttgtggaagttgtgatgcctgtgaggtcgtctgagaagtttcgttcagaggttatggtgtcagttgtggtattaaacatggacattgttttatacttcagatgaaatggaaaggatactttttatcatca

SEQ ID NO: 2887 - DNA, 600 bp, Bovine  MMBT02494
tcatggtctctctagaaatccatttctgaaatctgtttttggaattggtccttgtcctcttcctcccctctaggccagccctggactctagggcagacaggaacgcmatggctgcatgtaccatcacaccctggtgaacttgctgctgctctcctctttttgcactgaaatgtctgcataatctytttgatttgctaagctcttactttttacctgatgattactggtccagataagaagactaaaataggaaattttgaaaaggaaaagagtgactttctttgttctcttgtaagccawcgttataaataggaaggccatatttgtggcattaactctattactgctcatactatttttacagttcatacttctacaaaacaagcctaagagtaaaaaaaggtgaagggaagggtattccgtaattgccagtcttaggatcaaaacaaatcaattttcactctcccgtaaaactctcccaacaatgcagcattgaacgagcgttcttcctctcactcagaagctgcatcatgcctgattggcccagcatgccaagctgcgggtctcactgatgagctctaccgtctcactaggaggaca

SEQ ID NO: 2888 - DNA, 600 bp, Bovine  MMBT02573
cagaattgctctgcctcactccatcaaagcacagagttccagctcattcttgggatttctatcataatcccttctctaactratctattctctgcatgaacccaagtatctcaaaatcaaacatgtctgtaatggaactcagaactttccactccatatgtggtccccttcctgggttccatgaatggcaccattaacctctcacttgcccaagtcacaaacctgggaaacatccttgatacttctctttcatttccaaccctcagtcaccaagtcctgcctcttcttcatcctaaatayctgtctcatccttctccgctcaatttgggtgtaacaatctctagcctcaatggtgcaatagctccctaattaggctcccagcttccactttccctgyactacattttattgtccaccctgcaaccacagagctcatcctataatagaaacatcacatttctctgcttaaaacccttcagtgattccccaaggctcttagataaagaccaagtttttttattattcccatttttagaagagaaaattatgaattaacaaggttaagtaactagctcaagatcagtaagctaggaagggaag

SEQ ID NO: 2889 - DNA, 600 bp, Bovine  MMBT02710
gattttagcagaaaaaacaattagaaacagttagtaaaactgtctaaagttcccctttagatrtccctgtttggatgaggaatttcttgagaactcagtgcatggttcttgattgttagaatatggttgctttacatgggtataatttctatgactaattttaattagaggtatcagttgtgaaagagattgaaacctctaaggaaatgttaattgttgtgttttcctattggcttctctatgattttatatcactctgtgcctcagtcattacatttcagccatcccggctttttctgmttttkaaacattccacagtttcccacctcagagttttgtgcttgctatccttttgcttggaatgttggttggctccttttcactcatgtcttgattcaaacattaggtttcctagacaccttccctgcccttccaaatcatttagactttatcctgctctcattttctcatggcatttactactcttttatgttattctatttgtttttttttttttaatgaatattgactgtctttcttcactagaatattaggtacatgagaataggagacactgtcttaatctcaccatatacctag

SEQ ID NO: 2890 - DNA, 600 bp, Bovine  MMBT03375
atttattttttattgtacagtatttgtaaagtttgcattattttaaaaaacagagtagagcatgatcaaggaggaatraaaaaattatggattaattacctcctaaactattgaattttaataatttttattgaggttttaaactctttcatggaatatttagctaaaaagcagatccactaaaaataggtgcaattgctcagttgtaagaatatgagttcacaccttaggcaactcttaggttatgacatcagtttatttgagtgcaggctcagacaaaacatcttctgaagtatcacygttggtagagtctrtttggatatttaatcaaaacacaatgtcagtraatacagccctagtctagagtttatagtcttcggtgagtagcttacaagatggtcaccatttgtttttctgtttccttaagcagctatcttgatatccaaaatgtcctgtttataaactgtcatcccgggggccagggagcaaagtgagccctgtgatggatcaccctcagcaggctgactccgcctgtcgttcttgctgctctaattaaaagacggtgaagtcaggggtctaaggcagggatgacaatagggc

SEQ ID NO: 2891 - DNA, 561 bp, Bovine  MMBT03672
cgccgccgtggtggctgcaatgtctccatggccccggacaagggacatatgccactagggaaggggccctgcgatgacaggagatggcaggagtactaagctagggatcccccacccacgcctccgcgggtagggcttcccgtggcttcggggaacgtctgtctaaccaatcaggccccaacagcagtccctgcgaacagacccgccggttcccagaagggggcgctcaagttcccccagggaccccgcccccacggatcgagatctggtattccgacgttcccagggacccacagaaastactttccaggccggaaaggggcgggcccgttcttttcgccttcacgccacccctctctacacctggatccggcaccctctcctcacacctcgaagtttcgccacctcagctaccgtacgcacctggagctaagacccgcctcccgggctgcgcagggtcacagtacgcaggcgcaccgagatggcgcgggaggctccgctttagtctaagctactttgaagaggaaagcgagggaaggcttgcacatgcgcaggtaggcg

SEQ ID NO: 2892 - DNA, 600 bp, Bovine  MMBT03982
ttgtgttatcaataaccccagaaagaacaaggatgcagtggttcttggctcccgacctcctggggctctagagatacacctgcaatctgtttgtgctataactggctgagtgagaagagccttctcttgttttaaccagctcttaaataagagtggcaatggagaatcaaaataatcctgtcccttcattactaaaagtatcataaaaatacatagtcaagcatcaaatttatttaatatctcagttcatgtagaaatatttacatagatgtcaatattgcttcctgtatccaaactggraaactcatggacatgacaatcaaaatataccacttaatctccacatcttctcttcagataaggaattaagaaagaataatcctgtgattccctctggtaaccaactcagaatatatcgaatggtcaacacatttgattcttgagtcaataaagaatgaatgcaatcaagccatttaattagttatcctaatcctgaaatgaacaatgtgttgctcacgattcaggttgctgatacagtgagaatatattcaatatgtccttactgcagccaaaactaaattgaatgggaagaaactgtca

SEQ ID NO: 2893 - DNA, 600 bp, Bovine  MMBT04260
ggtttgggggttttgtttttgttgttgttctttgaaggttcggagtttttctgtttgtttttcccttgtctttattttagaaatgcgccttggagaggcctacatcagagatcgctgatctgatctatttacatcctcagacaaccacttgagcacacctagagtttagacaaatgagctccttcctttttaacacgttttaagtgctgacttcagtatcttaattaagtgctgttctaccagtatctggtttgctgtgtgagaagtccatttccttagctacacagagctcttagcttkttgggcttatctccacttggagtgaacaagaataagccctttactgtttgacatattgtcaccttcgccctggctagactcaaagcagctctctcacctcaagtcttaccattaaaggattcatacagccgtgatatttcttagcaaccttatgttttaagtcttccagaagatacaaataaaatgcatgatctgatgccatgataagtaagatttacatcttcattgcagcctgtttataacagagaaaacccggaaacagcataaatgtctagcaatgaggaattagttaaataaacg

SEQ ID NO: 2894 - DNA, 600 bp, Bovine  MMBT04283
attttccaaatgcaataggttcatagaggaatgtaacatcaaagcatgaaaatgtatcagctcatttctgacatttcatgaggtaacttggcatgatcctaccagacatagcagcttaaaccaaaaaactgctttgagctgaatgaagcaacccatagatacacaatccccagacacatacacacttaattgatttatcttctttctcttacatcagttgtctatatgtgttgcttaactagtgtgcaccatgctgttgttcctaaattgtttacttttctacataaaagtgtttaatayagcatttcaaacatgaataagagtgctggttatgagaatccaaataatgaacaaaagagaaagccttaagtaatgagaatatttaaataacaaaacactttgaaagaaagagagaatcaagcctaaagraatcacattgttatatgaggcaaggctacaaaaataaatgaattagtaacaatgaaaaagctctacacatcacagttatcatctcctttaagtggaattgagaagcatttgcagtggattgaaattaacaactataaaactgagtataggagaataccattttgtagcatc

SEQ ID NO: 2895 - DNA, 600 bp, Bovine  MMBT04365
aaagtttagttaatgtgcaacttgggasatattgagggacagtgtcagtgacattttataatcgtttctttaaagtagatcagatgtyatctcagagcaagaaagctggaagaatactactaactcaacctggggctgtgtgaagattttaggaaatagaattggtattaatttgagtgttttattactgaatttttaaaaagttcaattcaaataactcacctttgtttcctaagaaaatacatagggttacttgattagagttagagaataacttattttgactgtttgattgaaagwataggcaagaggtttgaaagtcctgaagtgtgtttaagcttaggcttatttctggaagtgctgtaattctgtttcccattcataaaatctggattaatattgccttactatcacttcctataacttcatggatgttaggaaaataagttggcctttagcaaaaaatttttttaaattttattttatttttaaactttamaatattgtattagttttgccaaatatcgaaatgaatccgccacaggtatacctgtgttccccatcctgaaccctcctccctcatccctccccataccctcc

SEQ ID NO: 2896 - DNA, 600 bp, Bovine  MMBT05044
cataaaaatttagcttttatttttcttaaatgctattttaactggaatctacattcaactcaggcatttttcattaacctggacaattagcacctggctcattcttaactcgatcccaggtatattcagggatacttataaattctactaataaaccctctcttgtctacagttaccttcttctctgtgaccaatcttaagtttgtttcaagctctggcctcttttctcttggaatgcatttccaaatgcttcatgaaattttttcccgttatggctcactatgcaaaatcaaaacacaycatttccccaagtctcttaaattcttctaatggtactatttatattgacaacaaccccattctcctcgggaataacatttgacatgagtcgcatttttggttyttccctttcactttaactgtatgtctctgatgggatgacaagtcctgcattattctaatatttctatcttcttctttccattaccgatcaagttccacggccctatgttcaggcctttatcaccattcatctataattcccaagagaccgccccaccttcactctgtcattgttcgatcacaactcaaattttacaa

SEQ ID NO: 2897 - DNA, 600 bp, Bovine  MMBT05539
cagcatcagggtctttccccatttgggagaggcctatgtgattggataagtggcttagcctctgagtctcagctttcttacctgatggaggattagaaatggggataaaaaccccccccccacctacctcaaagagtccttgtggggctgagatgacctcacagagtccttgtggggctgagatgtgttggaattggaaatactcaggaaactgtgaaaacattataaagggagatgaattgaaaaaagcataatgagggaccatatcctctgacttgagacagttagagtatagaggtrttcatctcaggtgrcttaaagtaagaaagttgagtgaaagggctatttaaggaggtgtgggcaaggytaaaastacagacaagataaaatgaggcacctggagattacccacagtgggaggctgttacatccccaagactcaggtgcaaaggaacaaractgttactggagctcaatgagagtcagcaggaaggaccagtagccctagaagcaggcagttcttactaggtgactgggtgctgcagcagggtggacaggaggacctggacttcccactytctcatcttgtgctgcttacct

SEQ ID NO: 2898 - DNA, 600 bp, Bovine  MMBT05696
ctaaaagttaaatagatcctttattaaaaatgaattcctggattatccttgcaggaaacaagatggtcataagccacaaagtcagttttgaagtaaaatgctatagaaattgaggttgtttcttacaccttctgataaggaatgctgcaaattataagaacagactatttactgaaatgagcataaaaatagccagacaggtattcctttgcttttatagacttcaagactccaaaccacttttagaagtcaaaaataaaactgtaacatttctgtcaaatcttaatattcaagtaatgmtcacagcaacacagaatatagaatttgataatgaggaagaagatacaatatttctaagggagtraagtttaaatgcagaatgcatatctgaaataaagttattattttgatagattcagtactttactgttgactgaaatcagtaggccggccgcgattagcagacatttggtaccgtccaaaaccttcataagacatttggtccttgccaaaatgtccttgaaatttggttctttccaaaacttccatgagcatgtttggtctatgccaaattgttttggacaggatcaaataccaagt

SEQ ID NO: 2899 - DNA, 600 bp, Bovine  MMBT05753
gccctcatttttattcatgtttataggagaacatctgtttggttgacatttgaaaggtgtctgtactgaaataaggctaacaaatgttatttgacacctcatgtaactaaaggtcataaatctaaaactgttcaacaagatgaggtgatatttacatcatttaacaaaactgtagaagtgctacaaacacaatttacttttaaacacctttatgagatgaggaaatactttcagccaatcacagtgcttagattttaaaatgaaacattcttaacgtacatagaaaaaattaactctgtraggaagcagagattatgatatgcagtaagattcagactcaaggaataaaggttaatagtatacagagaaaaataaatgctttaatttccaactttctataaacagaagcaatttaaatacaataaaaagcaatgtactatatattttcaatgtatgcttgcctatatatacatatagaaacttcttacaataacacacacttgttatgagctttattcttgtcaatacattttcacatgtatcagttctaatctcgcagacacactctaaaatggacagcagactttctgatccccattt

SEQ ID NO: 2900 - DNA, 600 bp, Bovine  MMBT06008
tattgatcttatacttttgactttctwttccacctaaaatgaatatgcctctcacattatgcyaatgttgaaagaacgactaacatttcaatttctatcacatacagctagacaaaatatcctagaatggggaggcctcttactaatcctaaatcacactgaattgttgaacacctattgggcttctaaaataatctgtaatcacacttcttatattttacagaaaataatatttatgttatgatgtattcctgttttttgaagtggaagtatttactaacccacccttaacaaggacckattaacagaaatcgctggaaaatataacacattttcattttgttccaactcctcccatgccatgagtgtctttccaaaagggaaaaaatgacaactttcagtaaaaatgtactttgacttgcataagaccactctgtagtccaccacaatgattaaagcgaagttatatggaagggatcaacacagtataagaaagagcaaagtgtgaaaaatgcagttacttactctgctgccacatacatctggatgagaaagtaccaaaacctaaaattctacatgattcttgaaagtatcacagct

SEQ ID NO: 2901 - DNA, 600 bp, Bovine  MMBT06033
actttagatgcaattataaataaaaattcttacaccaaacctgaattttagcaaagacaagaatccacagagtatgatgtagtcatagaaaatgaaaaacacatcttgcccagagataacgtagatcctcgctgccttctacataaaccaatgataactgataagagatttagcatttcctcagactsaggtacatatagaggtacatctcctcacagaartgctatcaagcccagggttcggatcagcttggaaccacctcaatcataccatgttcctgtacgtgctcctggcttgtgygtcatgggtcttggaaagccattctgccccgatgaagataatcagtgggtctacccaggacaatcacacrgcagtctgtgctgagattgagaaagaactcatggctgacaacgttacatacaaggtaagtctgggtcttcatcaaatatcactttactctcagtggccctctgtgtttctaaccaacttttcctgcttccagggctccttcgaaaggcctcagaacaccagtgaggtaaggagcagtcaacccatggtcatttctgaccccacttgaaagggaaatcccagggcagagac

SEQ ID NO: 2902 - DNA, 600 bp, Bovine  MMBT06272
cccttccagctggtgtggggactggtagctgcctacccctcgaagctcctgccaccactctgctttttagggcagttgatcgggctccttcattaactacagcaggccgtttccattgcaaataaaaaactgccttcctaaatgcctttcatcctgaggtcaaaggctctgccattgttctgtccaggcacctaaccctgctctgtgctccggctggagctccacaagtgccccccctctccctgaacctccgctcccttggaacccactcagcgacagcttggcgggaagtccctggamattgaaacagcatctactgcctagatgttcaaatgttgctaactaagatayagtactatacagtatctaaataatagttaataattattgacataaattattcttttatattatacattatattttatatattatatatataatatatatgttaagttaattaacattaacttaatactgaaataatatctaacaaggtcayactcttacctgaaacaggataatagttataacttctgtcataactgttagaagtaatgacactaaagcaaagatgagtagagtctatcatagtcacgg

SEQ ID NO: 2903 - DNA, 600 bp, Bovine  MMBT07512
agtggactcatctccagcagagagagagagtggaatttagataacagagcaggcagacaataagttaccagctgtcaccccaagaccaaccacagtgatagccggaggttgtygcacagacctccctttctcagtcccttaggacctggtgagctaccctagcttctcctcttccccattcagcagctggattcttaaagcaattcatgctacttgcctacttaaaatcatccaagtttcacgtcgatcacaaaataaaaatccagacttcttccccttcatctgaccaggcacacctcyyaccgatgttatccagaagcagccacacagatctcctttttgtttttcaaatgcaccagcctctttcctgcctcaagaccttgccctttcccattccttcagcctaaaaaagcactctagttctcttagaatctttttttcaaatgtcagctctcctgagaactctttactggccaatccatctgaagaagcaccctttccaatggacctgccccatcatatccctcaaatagagcaacgattagcacagtctcattacttgccttgtttactgtgttattatctctctccctgagtaga

SEQ ID NO: 2904 - DNA, 600 bp, Bovine  MMBT07635
actttggccacctgatgcaaagcgccaactcattggaaaagaccttgatgctaggaaagaatgaaggcagaagaagaagggggtgacagaggacgagacgattgggtggcatcaccgactcaatggacatgaatttgagcaaactccaggagatagtgaagggcagggaagcctggtgtgttgcagtccaggggtcacaaagagttggacatgacttagcgactgaacaacagcaaccaggatcactaaacacacttttgttttttgagaagtatagaaaattcacctaaaatggagcawattttctgctttcagaaccctttgaatgatttttttaaaatctagtaaaacaaaaaccaagcacagaaataatacttaaaaggaaactgataaaactccacagaatagacactaaagccactaactttggtgacttcttagccccacgttccccctctgaaaattagggtttttctatatcttctgtgtatctgtatcatttccatactctgtttttatatctatcctggcaataagcaagacgacaagtccaaaaagattataaatttctttgtttaaatctaacattgatggattcct

SEQ ID NO: 2905 - DNA, 600 bp, Bovine  MMBT09848
aactaaataaggcagaaccgatgttgtgagagagaagcatttccccacacccactgcctgctgctggaaaaatgcgtaagtgattgaaaattcagatctttttaaaaagtatgtgtaatttagtgaatgcatggatgtctgaagttatgcctgagggaaaagaaaacaaggatccaatttcatttttatacagtattcgtacaatttacgagcatcacttttataactgaggtaaaagggggcgatgctgacatgaggccagtgacctgttaatctcctaaaagccccaccgatgctccygggagcccactcgggtcctgccgtggtcaacacacctgctctccagtttcaacaacaaaacctgcaggtctgaaaggggtcagctttattatccaggattttttgtctgtagaaaatgatcattttttaaataacatatacccacttcctcttgtacattatttaggacatttaataaatacttttcctcatgagtttccataggtctccgcccaagtacattaccaaaaatgagagcagaaagaaatcacattagcccagaatcacaaggttacatccttaaactccacgttcaaagac

SEQ ID NO: 2906 - DNA, 600 bp, Bovine  MMBT10250
ctggaatgatctctctgaatcccagttctttctgtgtttctgtctctgcagccctacctctctgtatggcacattgttttattgtgctccgcagataccgcattttttttttttttaataaattacaggtttgtggcaacgctgtgtctattggtgccattttcccgacagcctttgctcgctttgtatgtttgtgtcacatttggtaattcttgcagtatttcaaggtttttcattgttcttctatttgttatggtcactgatgagtgacctttgatgtgaccactatgactcactgamggctcagacgatggttaccatttttaacaagaaagtgttttgtttttgaaagtgtttcttaagttaagctacgtacttttttttttttttttcaggcagaacgctattgcatacttgctacagtacagtgtaaacgtaatatatgcactgcgaaactgaaaaatttgtgtgacttgctttattgtgatcttcgctttattgctgtggtctggaattgcacagtaaatagtccaggacatgtctctatttgtctgtctttgcttctctctccccacatctctgtctgactcagtggctctc

SEQ ID NO: 2907 - DNA, 600 bp, Bovine  MMBT10259
aaaaaaagargaagaagaagcgacctcgataagtttgatgtaaatagtaaatcttttactatcagggtgtgcgcatgcgcccaaccagagcctcaacctaaggactgcgcctgcgcaagctcgccccttcactgtcttgttccgcgaggtcgagcgcgggcgagcccaacttgggcgccgcttttcctgtcgccacggtcgaagacggccacgtagctacccaagaagacatcaccgaggatccagaagggccctgagggcggaggcacgtccagagccatgaagccggacaaacagacmctgaagccactccgagtaatctacagggcgataagaccagtcacaggtgtcacgctcaccggcctgccttcctcctaggagccagagcttcgccctgcccacccctagacgtgtttctgtgccgcttgcttggacctagtgacgtctcactcccagccccacccttccaaacgcgccactctgacgtcattatgacggccacctacctggatgacgtagtcctgggccgtgaggttaaaccagacccccccaagaaggaaggagactggggggagcgttgggattttcgagcattcgatg

SEQ ID NO: 2908 - DNA, 600 bp, Bovine  MMBT10285
gcctctgctccagttaccctccgggtgctctgtgagtgtcacatccttgacatcttccccccgcctcagtctccccacatctcacatgcctgtttcaggtcttcctcctcttctgtctgcaaaatccaaggacttcacagcaatggagtcctgggtcagagaattcccactgactgatgtgtgatcttatgcctccctgccttggtttccttatctataaaatgtcagtctcctctccttgtgaagagtgcaggaggtagagcatgcagaatgcctggtgcacagtaagccctcatcaaycctagccccttattttactcttcacaagggcccacactgtattagtcagctattgctgtgtaacaagccagcccaaaacctagtgcttaaagcgacagctgctttttatttgctcacaagtctgcaggtcagaaatttgggctgggctagtgcttctgctggccttacatcatgtggctgcaatttcaccttcttggctggcaaatggcgtgggctgtcggttgggcctcgtgtgtccagcacgctggcctgggcttccacttggttgttttccaaggagagcagaagctgcaaggccca

SEQ ID NO: 2909 - DNA, 598 bp, Bovine  MMBT10437
  misc_feature (1)..(218): n is a, c, g, or t
nnnnnnnnnnnnnnnnnnnnnnnnnnnnnnnnnnnnnnnnnnnnnnnnnnnnnnnnnnnnnnnnnnnnnnnnnnnnnnnnnnnnnnnnnnnnnnnnnnnnnnnnnnnnnnnnnnnnnnnnnnnnnnnnnnnnnnnnnnnnnnnnnnnnnnnnnnnnnnnnnnnnnnnnnnnnnnnnnnnnnnnnnnnnnnnnnnnnnnnnnnnnnnnnnnnnnnnnnnggctgggcttgaccttctttcagcctcacccctgatacttccactttaggcttttgctgtagttataacagactttgaactytrcctgagctttgcccagaactttgctcttgaccagcttattacccctttcaagtcattattcactatttcaccttttcaaagagacctactctgacctttaccaaatattttaattccctatatcctgccccagccttcagacttcaccatcacttatcttcttatctactaaatatggccttattatttgttacttttatggtttatctttcaccattagactataagctccatgagatccatgagacctttgatttgttcactgttgtatctcarycacctagaccattaccagg

SEQ ID NO: 2910 - DNA, 600 bp, Bovine  MMBT10559
aagtcccaaacctaggaaatttagactggagaaggacgaatagtgtggaaacttaaaagcgcctttaaggagaaggaggaaaaaaagagggttggagatttcattgtgtgaattaacagtgctgaaactggatagatcaaaggaaatgtcaaacaattaagcaggtagcaagccctgcaggcctagaggaagagcattccaggaaggagaacagcagttgcaaattctttggattgggaggaaatggaatttgcttgaggaaaaagcaaggccagtgtttcaaaatgctgggaagagatmatcatcaagcgttttgcttctctcttagaactgagttagctagagtcagtttctgtgcctgcaagtaaaagatagttaatagcgagttgcgttctttcaggagytctgtttttctattgataacctctgtgttttttgaggcaatgtcactttgttttgttaacaggtacgttgattatctgttaagattactgttttgttattgccctttgtgagtttcctttgtctgttttgcttgttctttcagataaaatttactgttttattaatgttgccaaaaattgtcagtaaaattagcaa

SEQ ID NO: 2911 - DNA, 545 bp, Bovine  MMBT10928
gcttacagttgctattttcatggtgtatcttttttcatccttttgctttcaagctgtttgtatctttgaatctaaaatgcctcctgtacacagcaaatagtcagatcatgttactttttcaacctaatctgataatctgcctttcagttggactgtgtgatgatccatattttagtatcatccataaaccatattactaatatggttgaatttacatctgacagtttgcttttggttttatgtctcaaatctctctgttcttctgtttctcttttactgcgttcatttgtatttaatggrtatttcctaggtggaggactagaggccctattctttctgaataaaggtcctgcaacacaggacttttgaagaaagatgaaaaatgctggcagcctgcccctcacatggtgattctgaagatatagctggctcaaacgtcaaagactctcactgttcttactaagatttactaaatttacttgaatgaatattgctctaattgctgtttgcccttaggaaagttatcagagactatatacaatttt

SEQ ID NO: 2912 - DNA, 600 bp, Bovine  MMBT11259
ggcaggaaagcactttgtctgtaatctgtgtgaygrtgattggcttaagagcatcttgctgatgatcactgcagaaactccctccccaaaacacagtgcagaagccacacaagcgagtagtaaaaggtacttaataagtaataagggcaaacactgagcacttactatatcgtatcactgctctagttactgcacrcatagtgaccaattgataccttacaacagtcctacagggaagcgtttgttattttcatcctcattttgcagagtgggaaactgaagcacagagaggtcaagtarctggcccaaggtcaccctgcacgaagtggcagaactggatttgaacccaggcagctgggcttgagcatcagtcccttyaycacgactctggtgcatctttacatttacaacagacaaaccagaygttgttgttgttcagtcgcaaagtcatgtccaactctttgtgaccccaccaactgtagctcaccaggctcctctgtccataggatttctcaggcaagaatttccttctcctggggatcctctggacccagggattgaacccgtgtctcctgcattggcaggctgagtctttaccac

SEQ ID NO: 2913 - DNA, 600 bp, Bovine  MMBT11595
catgataaaaaggtattgtggraaaaaaaaaaaggtaytgtgaaatgtaaagctaatattggtgggactgttctgaaatcagaatccaggaagggctgtggctttgttcaacagcaataaatctattagtaactaaggctatttagcagcaactctttactcaagactaaccaagtcttgaaagtagtcattagcctagaatcaacaattatgccaggccaactaaaagaaactgattttatctgttctatttattgcccaaaattttaagtgtttgcaacctccagcaaatataaagayacttccttgctttatttggagaataagagagtatgctttaagttgaccccacttgctatttttggaatttactagcctctcaaccagggacccactttctagaacactttattagcactctaccgtatctgggtttccttccagcagtacattgatggctctgttgacatctccattgcagtcatgcaaagcaatgacacattcatcctggttcttgcctgtgatatcaatcagctgaaagagaaagatcaacaaccattatgaacaagcttgcactccccacaaaaggaaaacagatga

SEQ ID NO: 2914 - DNA, 600 bp, Bovine  MMBT11720
ccagagatgccctaaaatagttcagttcaaacggggaataaggaagaggctcaaggtgataagaagaactaagttatcatgatggtgattagcatgccctcacccctacttgtttcctagggagatctaaagcattattttctagctggaggtcagtcccacaaaacaaaaagaaatggagctacactaaggagcaagaaggaggaagtctgagttgctgaagctcagctgtctaaataacaagctagacagctggtgggagaggaagtcagggaaagtcaaagaataatacatactgcraaaatccgatgtgtgtatagagccacagtctggagaagtttccaaccttcactgtgctcattctaatcacctggtttgacagagaaaacctttgcccyrgtggattctataaaaagattcagggaatgaatgttctacagaggctgtgtaatgayttttagtctggaagcaatggttgggaaacaaagtctaccctagaatcaagtctatttccagggataaaattgggtgcactccaaaagcctccaagtgcttttcagggggcaggggggaaatagagttggaggtattgttcatcag

SEQ ID NO: 2915 - DNA, 601 bp, Bovine  MMBT11922
  misc_feature (1)..(1): n is a, c, g, or t
natatgacatctctgaaaggcagagttggaaagagaggctaacagtaggctctctctagctggygtgggtacaagcccgcaccagcacagcaccgactcaagagaggatctgcctgggcttgagtctcagctctgccgcacgctagctgtggttgtggtttagaaactaactcccttaggcttcagcatcttcatctggaaagtgggattatggtagyacttgttgcagttacttgaacgttccttaaggtgagccacgtgaagaattaagacagtgtctggtgcacgaccccaagaggtrtgacctgcaattcctatgattgatcaaattcaaagaagatggagagatggcttccaggtgaaggattccaggatttaaggacgtaaatttttttttttcctggtgggtgtggtggggattgtggaagaggacagcatggcaaaaccaggtaggtaagaagagaccagttatatgctgaaaattccatggagttctgtttagttggaatattgtgtttacctataaaggggcaggaagtttccawgcttaggggttaggctgggctgtgttgtgaggctcttgaatgccaggagatcagac

SEQ ID NO: 2916 - DNA, 600 bp, Bovine  MMBT12123
tgctaattcctcagcagaatgtgctgcttgtccttcagacagacagctccttgttgtctgctccttaatttgtgatcatacttccttgttactttctccttcttcccagatcccatcttagttcctgtcttatgtaaactccatgggtaagcrttggtgagttgttaatttgggaaacaaggcctgcaatctgtggagcaacaagaacagctggtgctgctgctgttcagtttttcttggcagatggatgtagagggaattacgaatggggaaatttgcctcagccttggctgctatttygtacagcaatrtaacattgccagctctctctctctcctatgccaccactcctgcaccacagcctgatactttaatgtgttcccctaacttcatgatccaggtcttcctgggtagcctttgttatatgcttcatgcccartatacctttttgaccacaacaagaggcattttcagttttacttaagcagttttaagtgtacattaaggaaatgttattccacatccccagtaatttgaggtcaagacctaacttgtttgtccacttatttattaattttaaartaaacttcaatgaatgtc

SEQ ID NO: 2917 - DNA, 600 bp, Bovine  MMBT12927
gctcccttcactctgaaccctgtcaggggaggaagccatgggcataggctgaccagtgctcccctgtgggaacaactccccagtgcccagctagctgatgctgttctcctygtggtcggaagcactgtggggaaagcagggcaaaggtggggggtgaggcacagaatggtgatcagacaggccgaggaggccctgggggaccagcgtgccctggctcgggccagcacccctttctccatgttctcgcttccccagcttcctgccacgttctgggcacttaggatgaatcatttcacctayagacttacacacgcccaactgccgtcaagcactttagttagctgtggtgtcatgtttggataccagtgttttatatttatacatagagaattttctaatatagcctattatctatctatctatatatatgcacacacacatatccacacacagccattctcccctcccagacagctcttccacaygggaatgggatgaacccctatcggggccttgactgcagagccggagctccaggggctgggggagggagccacatgtcccgatcaccccagggcctgagctttttcaggaaaaggc

SEQ ID NO: 2918 - DNA, 600 bp, Bovine  MMBT13225
aacaaccaggcttgtgatgggaaggccaagggcagagttgttaccaaagcaagtataagaaaccagtggcatgacatgggggcccattctgctaaaattaaaaaatacaaacctacacacaccaagaataatcccttccatgataagtcacaaagagaaatggaaaaaaatctctgagatcaaagaaatctattcttttaccaccactgagtagaaggcacagacagacccttgggaagaggtcttaggaaaatgtttccacttttcgtttttcaagagytatggcaaatatgatatagktttaatcagcttgatttatggagtaaatgataaaagtggagtgctacctctctttcataaactggttttcctttttagaatagttaacactattatgactgaagatttactgtattcttacagtgagcaagaacacacagaatgatgaccccactccatcagtcagggtccgggaaggaaaacacaaaccattgtaggtcttaataaacagaggtaatttaatttaggggattggtcctagaagtaatagaagtactgagaagccaaacagcagatagcgatgcaacccagagattagcc

SEQ ID NO: 2919 - DNA, 598 bp, Bovine  MMBT13692
  misc_feature (1)..(127): n is a, c, g, or t
nnnnnnnnnnnnnnnnnnnnnnnnnnnnnnnnnnnnnnnnnnnnnnnnnnnnnnnnnnnnnnnnnnnnnnnnnnnnnnnnnnnnnnnnnnnnnnnnnnnnnnnnnnnnnnnnnnnnnnnnnnnnnnntgtgggtgttacgttagttcgtttaggacagtatagaggaagcagatctaatcagaaaacgaagacagagatgctgaaactgccaacacacactctgtgattcttcaacaggtgcggactgcctgatgggtgtgtatctgttcttcattggcctttgcgatctaaagtaccgmgggcagtatcagaagtacgcgctgctgtggatggagagcttgcagtgccgcctcctgggcttcctggccatgctgtccactgaggtctctgtcctcttgctcacatacttgaccctggagaagttcctggccgttgtctttcccttcagtaacattcgtcctggaaaatggcagaccctggccgtcctcatctgcatctggattgtggggttcttaatagctgtgactccattgtggaaagaggattattttggaaacttttatggaaaaaatggagtatgtttcccactttattatg

SEQ ID NO: 2920 - DNA, 600 bp, Bovine  MMBT14506
ttctctctgacgttatgtctttttccttcctccagctctctctgctccagctcagagatccttccattcgctgcttcctcctccctcaaatgcacgtggttcactatctccaagtctctgctctcatgttttctatccttgagctctttcaggagcactccactgaagcacagagcaaccataccagtgcttcgcatccttctgtttattttccccactgcacgtaccaacacccgacacgctatttcttaccttgttcgtacattttctgtatcccayccccaacccttgccccaccartgagttccattagggcagggacttttcgctgttttgcttactgctatattcccagtacctggaatagttcctgacataataggtgatctaaaaaatactttttgagtgaatgactaggttttcacaaaggcatgaagtggcagtatattcaattaaacatcccattaactttaaagaatgaggatgcaacttcagtagaaaaaaactttaggtattcccaatactaaacattaaccatttaaaaaactgtattcttaacatttctctagtaaagcatttcccaacataaaactagttatg

SEQ ID NO: 2921 - DNA, 600 bp, Bovine  MMBT15303
ggtagaagatctaacagattagaagatgaccatgtgctttggcacaggtttgtaaataagagtcctatcactggtccataaaatgaacatgatgttaccttttctcattttaaattctctggaaattatgcattacacttctgcccactgcttcctcatagtgtgaaataacttaactggaaaagagaatctattaataatcaagcacctggaggtctgcagctaagcagtaaagatgatgtgaaatctgttgatagtgactctgsgttcctgagctgtgaagttaagtttttaataatmtttctaatcaaatggcaacagagttatcactttttcaggctttgtttcatctgaaaacaacagtgaagatttccattcaatcaaataatttccatttgttcaaaaaggtatttactgtgtatactttagtggtggatatcaaaaataaaaacaaatattaattcaagatattatcttacaggcaacatattaagaaattttcatgcataattataggtaaagaagctactctttagaaaggttaagtaacttgcctaagtaatagagctgagaggtgacagaaccaggatttgaacatag

SEQ ID NO: 2922 - DNA, 600 bp, Bovine  MMBT15629
ctacaatccatggggtcgcaaagagtcagacatgactgagcgacttctgtgtgtgtctgtgttaaaaagttttttaaaaaataaagtaaagctagcctatgttgtttgaagtcaggttaatggttactctgggggcatagagactgggagggaacaagagaaaggatgtgaggggctagcgatgctccaagttttgatctaaggactggtaaccgtacagtctgatttctgcacttgtatgtatcacacttcaataaaaatttacctamaaaaatgactgatggtagagaaagaaggtarcaacatgacttcaagtggaagtgtctatgagagcgtggaggaatggcaagcacctggtataacaaacgataaaaggatagagagccctggatggcggtcgatttatgacagggaaagacagagctagctacaggaaaacgggatgtttagagaaggatttaaggtcaggagaaggtaggaggagggtaacagttcatcactgtctagctttctaggtcttgctaaatttggttgtgcaagagtgagcaaagtgccccagggagaggttatcaacaagcagtactgtcatcatcaccctga

SEQ ID NO: 2923 - DNA, 600 bp, Bovine  MMBT15827
tctgtggggtcgcagagtcggacacgacttagtggctaaacaacaactcagtctcatccataaaggagagtttgacttgggtaccccacggtttcagtgcctggcatttaatacatgtggtatagacaaaaatgtttgcctatcaaaatttaacgtaacagattagaaaattgggcaacttaaatgggagatttgtgggacggacataaccaatcaaacgcacagggcgatgatggagcaccctgattcttgaattttctagaaggacagaaacagatgtatccacaagtggaagcaggrtttgttcatcattatgaggaaaaagagtgttttggctagaaattaaaaatgcaaattaaaacaagctttaaggtatcattacaaactgatttatccagaaaggaaattaaacacgtaataggcaatggccggggtgggagagtccataaacgtctgcatacttggcaggtttataaatgggttcaatgtttttgaaactcagaacagctctgtgaataatgagttgaaaagctgttaatatctttgatcctataattatccccaaagaaatcctcccaaagggtgggaggagtcattgta

SEQ ID NO: 2924 - DNA, 600 bp, Bovine  MMBT16616
ctctgatcagtgttataccgtaatattagaaaaatgacaagtagaatattgagaaaaggatgaaactggtaataaaaaatgatttctgtcagaatcaagtaagagcgtgtatggctattaatcagctaaggattcaacgttcatagtaaattgagtgcatcacctaaaaagaaggtttacttaaactctgtttagcagctacagctgggattgtaggtcctgctacagatcaccatagcaaataccacagatctgctaaagaccaccaagaaagtctttggccttctcttctgagaagcrctgacccatgcagatcatgtgtgagtcaggccagattggctagcaaaacaaaactggacatcaggagaaaaaataatactgctcaaaaaatcctcaaagtctccttagtaatgttctaccgctaatatgtgaagaacaaagattctctttgtgraaagctagccaactgggatttaccaatctttcatctcttctctgaagaactctttctcaaaaacagacgcactccatccatcacagaatactacacataatttaccataaaatagtgtattaattcataggaattcaagatatcac

SEQ ID NO: 2925 - DNA, 600 bp, Bovine  MMBT17358
ttggcattctgatattgataaaggaaagttctatttcactaatgtacatatagcctttatcagatctttctcaatttatctctgaagtatgtttagagcttaaaaatttttaaaagaggaagttcagtgattagaatgagattgactcattttgaagatgattttcacaactccagtgattgctcctgatacactaatgcctattacaggaaagaaggctctaaataattcaagaaaaatataaaagtattgtgaaagctgcttcaggctgaatgtactttgtgatggggtatcacctgyctctgcttccaaatgtgtgattgacatgggttttgaacctaggrcctaagctacaataacaaccggataggaggaaatgaaccagctagtccagggtggaaggctgtcaccattaatgattttctaaggctaagtttttagtctggaagaacttcttaacaatcgtgcgtgtgttcatggataaaaaacaaacatgaactcttctcatcaaggaggagataaaagttcaagtgattttctagtctaataaagtcacgagacgatcattttcattgcctccctttattaaagacccaagct

SEQ ID NO: 2926 - DNA, 600 bp, Bovine  MMBT18400
tctttctattccttatatttacctattatcaagtccttcaaaatttaccaatttatttctaggagtggaaatctcttctcacctagagagataaatcctagattgttaccttgattaggcctatctcatttttttataggaactacaggaatctcataatacctcttccttttccaaatttatttcctgtaattacgtggtccacatactttcatgtatacccaaattatcactgtcatggaaagctaaccacataatttccattctttaaatatttccttggctccccaatgcccacartttaaaagtaatttagagcatgaacagtattccatcatctgacccttgtccagtcttgattctcatttcctgtcacttatggctcatctctaattgtccagtttctccaaactgtatttgtctcttgaacataagactgtatcatgtctctgcctttatgcttctcaattcctgaaatgcctttattaccaatttcttaatctctactcccactttctgcttgcacatggcaaattcttgtgcatcttctaattcttcttttgatctcacttttttcaagaagtctttgctgggattaag

SEQ ID NO: 2927 - DNA, 598 bp, Bovine  MMBT18643
  misc_feature (1)..(32): n is a, c, g, or t
nnnnnnnnnnnnnnnnnnnnnnnnnnnnnnnncgacagcttgataatagtctgccctggtggaattttctcccccaggacattccttcaactgagtttcaaaacacgagccagcagtgcccagaaactgagacagccttccggtctcattagtgtgctgtttccctgttgttctgctttgctattgtggtttctatgtgtgaatgtgatcacttgttagagtggtctatttatacagttcttctcttttgtttattcccattactcagcaccctagaaatcaagagaagtcagtgcatcrcgcttatgattcctggggcccttggttgctaggtgtgtgtgtgaagacctggagcttgaggaggtgctcagygtctgaaccagcgtcaagctgtttcctccaacccatcctcaggygcacgcaccagtgacactcgttatggctgacgagcgtgtgcatcagaaagaggctcctggagaatgccagagtgttgaggttgaatgggaaccgcacgcacacgtgcacaattgtagtgcttcagaaaggcctggcagggaggagaggcctagaatattaatgaagtgtgggaccgtcaagg

SEQ ID NO: 2928 - DNA, 600 bp, Bovine  MMBT18704
tctgccctcataccacgactagaaatcacaattttccaggagatagtaaccttgatagtagccgatgttaactgacttaattgcgtctcttcgattctcacgragcccttggtttttgctgtgttccggctaaccgtatgccttcacgaacgtcttgttcgagcttttggccgctgcttccagggggtgttgctcttgatccatgtggtagagccccctgggcctcaccgggtggcgagtgtgcttgcagtatactggtggcctgaacctgggcaagcgctttcctgtcccccagggacyttaattctgcgcgctccaacctctcagcgtcttccttcaggatccctgccttcggtgcaatgctataaaggcttttcccacaacagagttgcgggagcatccatgcctggcttctgctaattgttgcgtgattcactttccacaccgcgcctttcctctgaagttgactgtgtgtcttcgtagccgacttcaaatttcctttgaaatgaaagtgattaattgatctattagttcattcatagcrtgctggggaggatacgggagagagggggtgactcacagatcgaggtccaggagaga

SEQ ID NO: 2929 - DNA, 600 bp, Bovine  MMBT18787
gtttctaaagatagcttatgctctcttacgtgaatcaaaataatttgagttgcttccagcttcattcattgagaactccacaaatggaatcttaggggtactttagaaactgcttaatgaatgaaatagatatgcaatagaaaattactgaggaatcctcaaagaggtttgacaccttaataacaaggttctatgaatacattaaagatgctctatacccttatcagctgacttaaagcatgccagtcgggtaatttgttggtgattcttttgtttcactctggatttctccgttgcctyccttaactacatttctaacacagatgacctgatgtgtagccatcaatcgtttttttaaaaaagagtgcactgcatttctaaccatttgttggattattttcaggtgaacaacatatttccttttgttctcaattacatttaagatttggaatattctcattcaccagcaaccttcaagctcactatatctaatgcaataattgcagaactttttatagaaaataagactctcaaaaagagttcatttttatgaaacattgctcataaaaggcaacgtgttaacaaataagctaaatttac

SEQ ID NO: 2930 - DNA, 600 bp, Bovine  MMBT19102
tcattggagtttgagtcrttgagtatgtgctgggtgctgtgtgctgagctcagactacatgggattacaaagctgaataagacatagcttggctccaagaaacttagaccatcatgagtacatccatgtttatctaatgcagaaatggaaataatatggcagactttaaaattaaagccaatattttcttttggagtataattgttttaaaatgttgtgttagtctctggtatacaataaattgaatcagctatatggatacatgtatctcctcactcttggacctcyctcctacccctstatcccaaacatctaggtcaatcatgattcaaaaggacacacatatcccaatgttcattgcagcacwattaacagtagttaatggaagcaacctaaatgtccaatggtagatgaatggataaagaagatgtggtacatatgtacaattactcaaccataaacaggaatgaaattgggtcattggtagagatgtggatagacctagagtctgtcatacagcatgtcataagtcagaaagagaaaagccagcgtttttgttgttgtaaaatggttttatgtttagaatcaattttactatta

SEQ ID NO: 2931 - DNA, 600 bp, Bovine  MMBT19230
attgtttaaaaattaatacttagcaaaattacttcaggataagaataattttttcttatggctgaaataagactttaactggggaaacacttattttcacatgaagataaaagtgagaaagaaacaacattacaatatattgctggattagatcaccgtttcagccttatgtcaaagtatctagagttgagactattttcaaaagttctattctccctccaatagttgatttatttgcaatctccaaagtaatttcatctttaatatctccctatactatcacatcccttgttccttttmcccttacttcctcaataagtggtacttktccagtaattccatttactagtagctccttctttaaatccatatactctgtcttcagccatcactttttctctatgcctgtgtctttaaaaataataaattatccaccttctaaaattatctatggcatctggaattgctgactatccgttcctttaaatgcttagaatcttggtggtggtggtggtttagtcgctaagttgtgtctgactcttgcaaacccacggactgtagcctgccaaactcctctaaccaggctccaagaatactgga

SEQ ID NO: 2932 - DNA, 600 bp, Bovine  MMBT19434
tctgctctaatcgttaaggaaaagggcacattgacctgaagtaaagaatgttcaagttgaaaataaaaattaaatgcctcccttcctgggaygcatgttggccctcctttgatgataagacttcccaggtgccatgttgacttgctgtgttcctgctggtctggttttatttgaaaccttgaagaaatgcatccctgccttgcttaatgttctttgttctgacaagataaaactgtactgaagaccaggcttctctggrgcaatttctcagagtaatctaggaaactgacttctgggctrtattctaccaactatagaaagctattttctattcttattataggtggtttattgatgatttttgttgacattacgaaaggaaaacaaaagygttgccttgcctttttgggaactattgcttttcccacttctttaagtacaagagactattccttctctctcttgcctggatttttctgggctttcttacttcatcttgacatgttattttctttgggtttatcaccggggctcctccccctgctaactattttatgggaggcaggcaaagtcagcacaaaggaaacagaagccagtggt

SEQ ID NO: 2933 - DNA, 600 bp, Bovine  MMBT19815
cttgctctgaagcacagctgggcctctatccatgtggcctgaacgctgagttcatttcctcaggactgcaattcccaagcttgctctgttctagcgtataccacttgcccagtctccttatgaccatcatgcactggcatgaaatgtttagctgggtttcgagggatcatgggtaactctctcggggtacaggttgtctagaggagagcrcaactaaacggrtgcactaaccgcctgaactaactacggataactacgttagcttgtgttacaaaaggacagtagcagcatctacccagkaaagcaagaacatgttcagtactcaatacaagagccaaaatgrtcatacagtgttctaggaataagtgtttacaccaaaatgcttagaatcaagtggaagagaccaggataatatctgtaagacaaagaagaacatgtaatgcatatgctcaattggcatgcagagagattctaataatactggccacagttctttttaaaaaatgagagaggtcaggggttggtgtaaatgaaggaagtttcccaaaggcggtacaacctgaaggccctgagagaggctraaactttctcaaatgtaag

SEQ ID NO: 2934 - DNA, 600 bp, Bovine  MMBT19863
aaaataaaattaaaaaatatacaattaagagtcctgcatgataagttccatcttacatcaccattgcctctctgacttcatctcttaccactctgcactagtcacttagagctccttgctattccttgaatgcaccaaacactctttcatttaaagacctttgcaatgactattctacttggaaagctatgtcccaatatatccctacggctaattctatcacatgaatcaaagctttaataaaaattcatctcaatcaagacaccaactatcttaaactgcacacagtccttgtccatktcttccaattcctttatcctgatctttttaaaatttgcaattatcagctaacatattatgtagcatacttgtttcctatatttatctgtccatctccctccctcttcagttagaatattaataaaaactccagcagggtaggcctgtttagttcactgatacaccctagtgcacaaaataatgccttgaactggtaagctttcgctgaatatatttattacagatgcttaacagtccactaaaaagaataaggaacttatgaaagcagaaatgaccctgtgagaatttcatcaaattatt

SEQ ID NO: 2935 - DNA, 600 bp, Bovine  MMBT20172
ggaggtcagaagcatttctctgtacggtttccctcacctttgtttgtgtgggtgacttagtggcggggaagcagagagattaacttgttatccccatgcagtttggtcagtagctctataggaaggccaataargmggagacagtcccaatcatctgctgagctctatttgcagcataaaggagtaatgagtagaactcttgctattgcacttattccagcaattatgtgtataagaaggatgaggagctgtgggcctaagagagaagggagggggccatggaaatcacacagtgtctcyggggctccccagctgtgtcaggactgaaatatgaatgtcatgcaggttggtgacttccttgtggcatgtacacattatcccacccrtgccacaattaagtcacattcagtagcacttcattattttaattaagcttattgcaagagtaatcatcattgccgtcagtatcaatcatcagtaatttttccgattatggccataagtggtgacagtccatgttgacagtaaatgataatgcctctggcttgaactgacacttcattggactttgcaaggttgctctgaacactcctgggcttg

SEQ ID NO: 2936 - DNA, 600 bp, Bovine  MMBT20878
cggaatcaccttcatgcagaaggccctgcagagtgggaggacggtggggctccatggcctcccctcctccccagctcggcctttcccagtcactcagttaataagggtctgctgtgaggctcccagggaagcggagagagccartgaacccacagacaggccctcagcagacggggacgcgtctcacccaggcccctgcccgccgccatgtgagggtgcaaacgtgcataccccctcacccagggagtgccttctcacaccagagaggtgaaaggtgcacaakgcgctggcattacagasccacgatatatttttttttttttttgcagtataaaaatgtataaaaagttccgaaagtcaaaagctttctcatcaatataggcgccaaaattcctgtggcagcaaaaactgacatgaactgatgtgagtctgtttacatcttaatttatctcacttagtgtgaacagtcaaacgtcttgctacacaacatttggttacagggtactgcccccaaccctgctggagaacttggtggtatacgaaccatactacctttcaataacccagaacattccaaacccagaacacggacgcggaagc

SEQ ID NO: 2937 - DNA, 600 bp, Bovine  MMBT20884
gcatgtttgaaggtcagaacactccaggctttgaagcagccgagatgcttaatttagaactacgcatacacaatcctgacaatggtggaaacatccctgaaccagatgacagcaagttaagtggagaatgaaatgataattaccagaagggaggggaaaacacatacacacacaacacgggaacaaaagccacgcagggccgtttctgagagcttgtgggggagaaacgccccagcggctgctggcaagaggtcacgacactactgatgagccccagccctggaggagcaacaggtgccytatgtcacaaggagccctgccaacgaaaaggggtgccttctgacaaacttcacccagtattcctcttagtccaaaatgattctgcagtgacatacttctcagcctggggataactgctctgtgggtccaagggccaggccgggctgagtgcagtcctggacgcacacccgaagctggcaacgtcaggaacatggtgttcgcctttgctccaaggtccaaggagctgccgacgctaaaaaattcagaggccgagccacaagaccttgtaggttgggatttttttttgtaaaagtatgcccg

SEQ ID NO: 2938 - DNA, 600 bp, Bovine  MMBT21019
gggtacaaagcgctccaaggctaggagtgatgtctagtgccaaccacagtgagaacagtgattgtgtaatgacataagcattcgatggtgatgcttactgacctcagagaggaagagtaggcaactaaaatcatattggcagagtcaagaccgactaggacacatgacaaaagcatgtctctaaataagggcttgctatcgagtcaaacagaagccttatctcrtaggtatttaaagttaggttgataagactaaccggctasagcaaggctaagaaggaaattgatgacttaaatgtgraaacttagataatgtaggaaacagaaatatactaaattttaagagctagaatggcacacaaaggaaraacaaagaaaatgccagagcggtggaatcaagcactgactaaaaaaaagaaaaagaaaaacgaagctggcagctggtaaaaaaaaaacaaaactgcatgaatccagatagaacctacacccacctaatgcatatagttaaaccatgttaagggagagactacaatgaaaaagactccaaaatggcatatacagatacactgtttccaaaagaaactgtgtgtattttaagaat

SEQ ID NO: 2939 - DNA, 601 bp, Bovine  MMBT21137
  misc_feature (1)..(1): n is a, c, g, or t
nccggaagagtcttcagaccattggaagagccttcagaccattggaattcatctcagggaacaggctgaggtggggtggaggggccagaggcggggagggtaacagggaaatcctacccagagacacatttagttcacgtcaagtttccagcagagggatttaccaggtttaaagcagttttctgtgaatctttgtcaagggagtgtatgtacaaacaaacagggagggttttttttttagtgaaaagttaatcggcttaaagtgtgcaactaaataagcaaagcttacatgaaagtgacycacggagaaaggacctgatggaaagaaagttctaggaaatacaatatggcctctatgttcttttgtagttccacgccataaatattcatggggtggtgttaatggggtccgcagctctatrcaaccacaatagtttttttgtttattctcaggaccatgaactttgaaaccatgaacctaaatttcaggactctgcattcaggcatgtttgcagagcaggagggagaggttcaggctggcagaggacagaggggaggaaaccagaggacctgtgaatcatgcctcctggatcttttggtt

SEQ ID NO: 2940 - DNA, 600 bp, Bovine  MMBT22755
tattgagagtctgggcaggtcgggctgcccttgggcgcaggggttgggagaaggttagactgagtttggaggtgcaaggggaaattggattttgtgcttacattccagtgtgtttactgaccctgtactccacccatcttgcagggaaagaggtccaaaatcctcrtcgctccatccccctgggcatcgtgatcactatctttatcggctttttggcgtattttggtgtctcagcagcactcaccctcatggtgccctactaccagattcaaccccagagccccttgctgcaggctttcytccatgtcgggtggaaccctgcccgatatgtygtggctgttggcaccctctgtgctcttacatccaggtcagtgycacaggtttttaatccacccactgtgggattatcaggggtcgtagtccttgggttgagagacaacaggaaaagacttgtgaccccaggaagacagggaacagaagccctggtctctcctgcttctccacatcctcacatgtttccatttcctgtcccagcctcctgggtaccatgttcaccatgcctcggttgatctacgtaatggcagaggatgggctcctttt

SEQ ID NO: 2941 - DNA, 600 bp, Bovine  MMBT22802
gcaagcttgcctttcttgtagactcaaggctgagacagtgcacccatggacgctgttaacagagccttctagaaaggggagcgcttgctaaccagcccattagcatgagagagaatgaagctgttgttcaatcagtcctgagaaaaatctcagtgggatctcctttaacaaacacctgtaatctggggttacaccaacacacagttaattctttatacagacctttgtcgtgcttttggaagcatcctgtgggggttacatagaaagaaaaattcagctttttattacttaatcacatcrctcagtattagaggttttcattgtctcataaattgctttccaggggtaaggaaagggggtttggaagaaagtttgttattgacttgcctcatttccaattttgtgagctttcaaacaaaaattcttgtgttctctttttatttgttgatttaaaaaaatatgacttttgggcaggcaggattggttcatttccatggccattttgtcctgatatcagtatgctttaagaattatttttcttaagtgtaaatggcatagagagctataaattatccacatgcatttgactatgacagtaat

SEQ ID NO: 2942 - DNA, 601 bp, Bovine  MMBT22815
  misc_feature (1)..(1): n is a, c, g, or t
naacttgaagggacatgatgctatttaagtagaatctaatcagaaagaagaaaagcttgaaagtaaaaagacggaatgtttcatgtcgttatttgcaaagcaacygaacaaaaggtgagcaagataattaagtgccttgstgctgagtagaatttttcaaagtgggttgattagaggtctttcttaaaaaaaaaaaawttaaacatctaagtctaggaaatctagttgaaacagctaactcagttataaaggtggagaccagtttgggagaaaatcgacagtattgtgtgtatggtggcakatgttcacaatgatgagtttaattgtcagcaaaatcctgatcagttctgaatarttttagcattaatgatattttcctgtgttttaggtttttgaaaaatgggaatccaagcagacttaacatgtgatggcactaaatagattattttccagtgccttggttcctccatttttcagttgatctggataaataggacttgattcttttattttcccttttgcctgaaaaaataccaaaagcgagtattatcagtcttattataaaatgttatttgtaactgccaggcgaaaatgggatgtc

SEQ ID NO: 2943 - DNA, 600 bp, Bovine  MMBT00840
tagtttcgcataacctctttgagctgtctctctagtctcctctagttggtttacctaaacagattgaacgaaaaatttgaattccctgaacaggatatagcagagtggaagacagaatccaccaatgctaatcagagatgaaaaatctgcattgcataatttgtagagcagatacacagttgaaataattgagactgaatgtaaaagctcttgagttaaggcagatcactcactcaccatcctatatccaggtcttcttttctaataatttatcaattaatcatgataacccagatagayattttccataaaaatatcatagattagcaggtctgatcaatgctacatacatacttggccccctgataatctgtgtttcaactggttagctgtgaaaacatggatgaattccttgacttttctgggtctcatttttgttatatatatataaaggaatattatcatttagctcagaaagttgttatgagaatgagtataggaaaagcacttaaaagcatgtagtatgtgtgacatccatgttttggttttacattcacccaatatggatcacattgtcttctgtggaattctgaccaaagc

SEQ ID NO: 2944 - DNA, 600 bp, Bovine  MMBT00905
gagcaattaagccctcgagccacaactactgagccctaacgctgcaactactaaagcctgtgtgcctagagcccgtgctctgcaacaagagaagccaccacagtgagaagcctgcacagctcaatgaaaaacagcccctctccacaactagagaaagcctgagaacagtaacaaagacccagagcagccaaaaattcatgaaaaaaataaattattttttaaaaagatttctttctctgctacttcaacaaaaacaagttcacatgataaaaaggtattgtggraaaaaaaaaaaggtaytgtgaaatgtaaagctaatattggtgggactgttctgaaatcagaatccaggaagggctgtggctttgttcaacagcaataaatctattagtaactaaggctatttagcagcaactctttactcaagactaaccaagtcttgaaagtagtcattagcctagaatcaacaattatgccaggccaactaaaagaaactgattttatctgttctatttattgcccaaaattttaagtgtttgcaacctccagcaaatataaagayacttccttgctttatttggagaataagagagtatgctt

SEQ ID NO: 2945 - DNA, 600 bp, Bovine  MMBT00914
tctttgtgatcccatggcctgtaaccagccaggctcctctgtccatggaattttccaggcaagtatactggagtaggttgccatttcctactccagggtatcttcctgacccagggctgaaaactgggtcttctgcactgtaggcatattctttaccatctgagccaccagggacttttgggaaaataaattcatttggtaaaagtgggggaaggtgttgagctatcttaggggcctagttgagtgagggctgaatgaggactgaagcccacagacagatggttctttgagaagggaaayaagatgaccattaggttgatggtgtaggaaacagggagatccatgaaaatctctgaaaggagttggcatgacaaggatctgggtcarggatgggtcactarcaggaatccagaacttaccaatgacagagaggttaatggtctcactgctctgagggccaaagccattgtcagctgtgcagtagtagttcccagaatgctctgcagycacagagaagctataggaccttgttctccatgaagtagcttctatccttgtgagcaacacatcttcatgaaaaaactggtaccagatgggcga

SEQ ID NO: 2946 - DNA, 598 bp, Bovine  MMBT00919
  misc_feature (1)..(93): n is a, c, g, or t
nnnnnnnnnnnnnnnnnnnnnnnnnnnnnnnnnnnnnnnnnnnnnnnnnnnnnnnnnnnnnnnnnnnnnnnnnnnnnnnnnnnnnnnnnnnnntcctaaccactggatgaccagcaaagttctgccttattctttcaagtaattaattaattaggctgcaccaagtcatagttatggcaagcaaaacccctcccatcctcattacggcgtgcagatctagttccctaactaggagtgcagtctgggccccctgcattaggagctcagagtcttaaccattagaccacaagggagattccrtgttattgccttattgtttttacacctggttctgtactttattactacctgttgattcaatggatggatgaacaaatgaatgtatacttcaaggatagaagtgtttgggatcagaatcaaactcttacagagagacacaatttaattcagctcaagtcaattttgagtggtgaaaatgtccctggcacttcaccagatgttataggagatccaaaacatatgtcatagtctcttaaaaattttttggacaggcgaagacttatcttcctgaagaaattatacccaagggagaaaaacg

SEQ ID NO: 2947 - DNA, 600 bp, Bovine  MMBT01094
aagaatcaatataaatgtcttgcattaagatttgtgtttgttcatttctggtgtgtacaaaagaaataaaacagtattcccaacagttaatattttaattgctttgttcttttcagtgtattttagaaataaatcactctggtcttatccattaataaaaagttattatgacttcaaatcctcttttggctagattgtgcatacaaataaatatagaatcctttgaaaatctactacatacaagtcatttaaaacagaactgttttcaagacctttctactaagctgtggagaccttttkgttaatttacgaagcctttcctactacagggaaagcagatgaaatagtgacaatcatggttgaactggtggtgaaaggcccagagcctgccaggaactactcccggaatctcaaggtctctctcaagggtcacctccaagtattcaggctactgtgtagcacagtaaaaaggctatagcctgacaggcaaagtgtaatttcaaccctagttcttcttgggtaccaaggagagggggtcaccttaacagcatcaagccaaattgtactgactcttcttgccacatgtttaatgaggacatt

SEQ ID NO: 2948 - DNA, 600 bp, Bovine  MMBT01613
catcaaccacagtgaccaaaatttggtcttggaattacaaagacattagagtgaaatttatgagataggaaatagatatgctgygttgttctactagggtagaaatatgtctcagtataaaatggaggcttggaggagggcattctcatttcttccttgcttgggcaagasagaattcctatgaggacaaattttacctaattcaaaaagcaagcatctttgtttacatcatgtaaagctcatttctggtgatgattgtctctcaccttaccaatgagtaagtaaaagtccaactgcttygctgcttgcactggttgatttactatcaaagaaaatgtaaaatcctcacttttaaaaatgtcaggagaaataccctaggacttttaraagatagaaacacattttattatcacattcttcacttggccattctcatgaacagtactatcaaataaaaagagttcagtcagcaaatagatttcaaaatatatttttaagcataaggagagttcacatctctttaactattttgaacacagcttagtaagtgaatacattattttcacactctcaaagtatataattatgcactgaagacca

SEQ ID NO: 2949 - DNA, 601 bp, Bovine  MMBT01672
  misc_feature (1)..(1): n is a, c, g, or t
nggagagagaaatatggaaacttacattactgtatgtaaaatagatagccaatgggaggttgcaatacgactcagggaactcaaacatgggctatgtaacaaactagaggtgtgggatggggtagaaggtgggagggggattctatggggaggggaccataatgtatgcctatggctgattgatgttgatgtttagcagaaacaacacaattctgtagagcaattatccttcaataaaaaaataatttaaaaaattaaaaaaaaattttaaagtttaaaactatttggaaatgcttatatrgattcattgctaattttcatatctaaaagtatttaggttttccatcacacaaacatgagaaaatgtgaaatggatatgatttatctatgataaatatatttctataaataaagcttatttcctctgttctattttttctcctttycccaaagacctcacagtgtttcaatttttgaaatctttcctctaaccaggaaaaattaagcagctgctacagataaaatgagcatyaccagcagatattaaaactgtcacctgatggaaaccggggctcaacattaggccttcaagcaataacca

SEQ ID NO: 2950 - DNA, 600 bp, Bovine  MMBT01673
tgatactaggaaagattgaaggcaggaggagaaggggacgacagaggatgagatggctggatggcatcaccaactcaatggacatgtgtttgagtaaaccctgggaattggtgatggagagggaggcctcgcatgctgcagtctatggggaggcaaagagttgtacacgactgatcgactgaactgagctgaactgatgaatgatagaaaaatgaacaaagaarttgaggtttttatrtaagtgcttgtaaatgggatgatgagttcaacctcttaatgtcagatcagcacaatactttytatatagtttgtgttaaatgcatatttgtagatgagattgaaggataaagacgcattatcacaaacatagtagtagaggaaatatggataaaaacaaaagaaggattttactatcattgtatccaaaggtacgtatcgcttggccactctgaaaatgaggaccagtggactagmcaaagattcagtttattcctagaatagaaagaattgagaatgaagatgttcttgtatgtgctttgggtgaaggtcagagagttagatcacagaaccaaagaatattcaggtaaaaagaggtttaaa

SEQ ID NO: 2951 - DNA, 600 bp, Bovine  MMBT01786
tccaatatgactattttgttgagtgagagaaactttttaagagatttaataatacaaagcatttgtaaatggcacatagctaaaagtagataaatcttagctatttttcattgagactaccagaatattttatagtactttaccaaatatagatttggtattgtattgctagctgttttcaaccatagtcattgtaactctttgttaccttcttttcctttgtaaatactgaaactgtgttttctccctttcctgactctcttatatcagttttcccttttgtctgcctagttttagatwtagaaataatatgaagccaagtctcttttrtggaatgctggatatggtgttccttttagttatagaccttaccttwcagtagcrtatgagtgacgttaaaagtgtgctttagttagttttcgctgggtaaatgcaygctcagaggaaacrgtctcaaatctttgttcaaaaagttaaagactaaggtagtctaataaatgttaagcatttatctggaagaaaaatacatttttgagttgaaagtgaagtgaaagtcgcatagtcgtatcctactctttgtgatgccatggactgtatcct

SEQ ID NO: 2952 - DNA, 600 bp, Bovine  MMBT01854
gtgtgtttcactatttactggcgactaccaaaataattatttcctgtgtgggtcactgggagtgaggtaatcccgaagaaaatgttccattgtgcttactgggctgggcagtgcagcagctccagacatttccttaaaggaacagtaattgtgctgaatgatgaatctgatgcatgtaccccttggagggagatccatttcctacttgatactttcaggatcttatgagaggcataaaatgtgactgtacacatgcacagtaacatctgtgggtgcccttatcatgttggttcattaaayagttttatagatgttttagaaggagaatttttacaagacctgagataatgctgtctgcccctatccatgtaaaagcagaaacttacttgtacaagttgaattgatttgcctgtctgtcttgagccactggagggcacgcttcattggcctttgtcttctcagcccacactaatgggcccatcactgaatgcaatgctccctaaccatctgtgggtgaaaggatagcttgccaaggaagtgaattccagggaaaggataactaccccgaaactgatttccttggtaccatgacactgagat

SEQ ID NO: 2953 - DNA, 600 bp, Bovine  MMBT01865
aagtcttgaaaaatacataccaacatggtcatatgtttatctaaaagcagtaggattatgaatgattttctctttctttttaatacctttgtgttttaccatattctttcataataagtatgcataatttctatactcaaaaaatactaaagctacttaaamawtttttttaatttatatgcaaaaaaaagccaactgatttaaaaaattaaaacccatatctatatggatcttatctcgttcatcctcaaacagaagggagacgtttcattattgctgtgtgtagcagggtttctcaaycttggcactattgacatttttggctggataattccttgtcatgggagattatcgggtgccttgtaagatgtttggcagcatcactgacctctactcttgtaatacacatcactccyttcccaccaarttatccaaaaatgtctccagatgtcaactaaaggctagactgccctggttgaaagtcactgctctaaggaaacaggagatctggaattaaaccccatgtttgacacttactagttgggtgatccaacctctctgggcttccatttcctcaagactacattwtcttcaagatag

SEQ ID NO: 2954 - DNA, 552 bp, Bovine  MMBT02249
atgcaacttccaagtttagttgcttttgattgttttgttttcacatgtttgtgttctcttgaggacacagagatactctttgcatatattggaaagtgtttagtggtgatagaaagggtgatgaatacccacttaagccagataaactatcctgaacaatatattattctccttcaaacatttttcattcctatccatgaaagacccagattgaagtatcaggacctagaacgagcaccaatggacatgagagactctgattttctacacacttattacttagaaaggttgattaagtakgttttactcaattaaccacagatgagcccttgtgcaccactagtttgtaatcgccctaattgattctgaggcgagatctctggtcagagtcaagccagctgtaggctttgttagtgattttgatggaatgaccccaggaagcttcctttttacagctttgatatgaaaaatgcccaagaagcttgcccaagcctctctgcttacttaattatatttttgataatttattttaccaatgacttctagccaggc

SEQ ID NO: 2955 - DNA, 600 bp, Bovine  MMBT03109
cagagtaaaatgaacaggaaaaatatatataaactgtatgcatacatgattagggggagacaaaaacaaagaagagaaaatgagctagaaggacagaacatgatggttactaggggaatggttcccagtcaaaaaatcttacaaacagctaacaaggtaatttcatgctaaactggtggctgttgctaaaaaaatctgtatgtaagaaatgccaagatctcagaacagatgatcgtaaaaaaaatcaaaaagataatggttaccaggtttagcctcacaaggccctgacatccctcaagyctagacattactaacccacagctggttttgttaaagccccatgcatacactctcgtccacggctggcacctcttccccgtcttggtggcccaccacgtcgccgactatagtctctgtcccggtctcgattttctttgccttcctcgttggattccgtttggccaccatccttttgtcctgagactcccttcttcttcccgaccatctcccaggaatgctaaagaagaaaagaacattcgtgtcaaatcagtataggttgctaccaggaaatgagagataaaactgttgggacaactgtta

SEQ ID NO: 2956 - DNA, 600 bp, Bovine  MMBT03379
aatgtccattggcagaggaatggatgaagaagatgtgttacatatatcaacagaatgactcagccatagtaaagaaagaaataatgccatttgaagcaatatagatgggcctacagattataatattgagtgaagacagtcagacagtgtaagacaaatatcatatcactcatatatggaacctaatttttaaaatgatacaaatgaacttatttacaaaacaaaatcagactcacagactgtgtcaacaaacttatggttgctaaaagagaaagacggagttggggagggataaattargagtttgggattaacctagaaatactactatatatgaaatagaatatcaatgaggatctattgtatagcacagggaactctactcaatattctgtaataaccctatgggcatagaatctaaacaagaatggatatatgtatatttatagytgaatcactttgctgtatacctgaaactaaaacaacattgtaaatcaactatcctccaatataagacaaaaattaaattaaaaactcaagtaaatccttaagtctccaccagatggtaaagaatccaccttctaagcaggagacaggaga

SEQ ID NO: 2957 - DNA, 600 bp, Bovine  MMBT03516
attggaaaagaccctgatgctgggaaagatagaaggcaagaagagaaggggacgacagaggatgaggtggttggatggcatcatctattcagtggacatgattttgagcaagctctgggagatggtgaaggacagggaaccctgacattatgcagtccatggggtcgcaaagagttggacatgactgagtgactgaacaacaaatataaattcatcggacagtttctctccctcaaggtatctctaagttctaatgtttaaggttagatagagactattgaatgggtgagtctgtcattyctaagtgaaatgaataattattcatctagttcctatctaattgaaaacatcttcaattataatctgctaggttgaaggcacaatgtcctttaaatagatatgatatagtgcctcccctcaagacacttccagtctgaaaacaactgtaaagaaatacttctgaattccttaaaacgtatgaacatctcgtacttctggaagatgcacacagactaaggaggtgctgggaaacctctgaggttttcgattttctctagcacctctgtcaaagcgagcattctgttactgaaagcgtgactg

SEQ ID NO: 2958 - DNA, 600 bp, Bovine  MMBT04286
ttggcagattatgaataatgttttaggttgaacagatgtaagcaatttataatttttcccctttctgaaccagctttgtttggataagtcaactggaaattaaaatttaaagtagaacttcattttttaaaaggaatagtgttttcccacattagactatgtagtcagctcctaaatatggacaagagacagtcaacagggaaactggtcagagtgtgtgactaaaatctggaagatcaccacttagcmttgcatcgcagttccagtttctttcgtctatagaaccacatgtaaaaaatmgttttaggtcattccaaactaaccacacttctattatatcttgaaaagayggtttttagctagtgtaaaaattgcctgtttttctctttggttaaaatactcttcaaagaactagagttctggacatgcagaaagtgctgatgaaatgttaagagaaaaggaagtgaactatccttctggcaaggatttgatttattgtgccaaattatattttaagtaaactatacaaattaaaattatattttgaccttaatatagtcaacttaaattgagacttactggcaatccagtttcaggaaa

SEQ ID NO: 2959 - DNA, 600 bp, Bovine  MMBT04300
agtaatggaggctgtacaaaatgtaattaagggaaagaaaaaggtgcagagaagcataagagaaggcaatggttggagacaaaaattaaaatcaattcattttgatgaattgtgcaataaagaagttgcatatctatatatmtatatatatataatttatagagagtaaggcttgtctttgtcagctcaaccctccttattgatggcatgtcatttattttataaatgaaatcatcttcagcatggtgagaaaagcattttacagatttttccagtcaaaatgttgatttatgttaaggrttacatttttgaaactcattcgaagttaaaaatattgaacttttaaagtaaagcaaatgtataattaagcatttattacctggagtaaattaatgcttttaagctataagaactgcccacacatggatattctgccagctagaccagcaggctcacatattcacactgagctggttcctaccaccttttccccttttccttttttttccagtagaacttagcattggaccatttgtctttctaactgcctcatgcaaatgttcagcctgtattctatccgcaaatccctatttttttctt

SEQ ID NO: 2960 - DNA, 600 bp, Bovine  MMBT04306
tttatttcctttgcatttggctggataatctctattaaagagagagaagaagaaaaatgagtcttctttcaagttcttcctttttcttttttacgggctccccgtaacaactttttcttctaccgtgaacattttatgtctaacaagacatctttccacatgtttgctagatgcaagagctaagctctatccttttcttattcctttacagtattattaatagtaagtattttagttactcttctacctcagaggataattgaatatgtagaaacataaatgacagtttttgtgtctgtrtcttttgtamcttattgtacttgttgatttaatgcaacctaaattagaatcaaccwaggataggattttatgtaggtgaagaaatgatgttttactgtacttgacttttgaatattttaagcattctttttgtactaacctgcaatcacttgatttctaatgctgtttagactgcatataattttaacataaaattaaacttataaaactttgagtgtagagatgactttttggaaatatttatttcactttctctcttataaaagaggatacataaagccataactataaaagctttgc

SEQ ID NO: 2961 - DNA, 598 bp, Bovine  MMBT05000
  misc_feature (1)..(105): n is a, c, g, or t
nnnnnnnnnnnnnnnnnnnnnnnnnnnnnnnnnnnnnnnnnnnnnnnnnnnnnnnnnnnnnnnnnnnnnnnnnnnnnnnnnnnnnnnnnnnnnnnnnnnnnnnnntttttgaaagtgaaaatgctgtagttggggttgtattgggtaaaaattagcttgaaaatagaattgtttcattacagattctgaataataaaagaaaaatagaatgtttaagatactgaagttgaaatcacttaatgataaacctactaagtttataaacagtttcctgcccattgataatgcatggctaagccrtgaaatagctratggatacagtgtttgaacttgcacactttaacagttttgttagtatcttacaatctgtgatgcttggcaaagaaaaaaacatcatrctgattaattacctgtcttgaccttttttaatgtcagcatataattccactgaaggttcttaataaatttcttcaatcgatyacctctacagaacatactttcccttcttccagaacaaatgaacaatgcatgctctaacttgcgtgagaaatgtactgtgcagaatggaggttgcagatctttcttcataagttcccct

SEQ ID NO: 2962 - DNA, 598 bp, Bovine  MMBT05342
  misc_feature (1)..(160): n is a, c, g, or t
nnnnnnnnnnnnnnnnnnnnnnnnnnnnnnnnnnnnnnnnnnnnnnnnnnnnnnnnnnnnnnnnnnnnnnnnnnnnnnnnnnnnnnnnnnnnnnnnnnnnnnnnnnnnnnnnnnnnnnnnnnnnnnnnnnnnnnnnnnnnnnnnnnnnnnnnnnnnnnnncaacaatccaaatgaagggaaaagctagacatgtatatgtgacaaatgtcgtatctgcaagggctactgcaccccccaccccacccccaccaaaagtatgcctcctgactacagggtaatgagtagctatctgatcaaayaactaaattattaattcaccttatagtacacgaattggatgctctatcatacaaatattaaaaactgtgcaaattataccaacgtgggaaaatgtttcaagtaaatttaacaataaaacaggcatataaaaatcacacctctgagtaccataaacgatgttcacatatgaataaggacagggaaaaaacatgagtcaagggacaaagatgatgtgttgaggtggcgggatgatagaggatttacacaaggtttaaatcttaaatttaaggtcctcccttcagacaaacacagaacaca

SEQ ID NO: 2963 - DNA, 600 bp, Bovine  MMBT06173
aggtagtgaaagaattagttgtataacagcatgtagagtttcccaaggaaaatggaataccaattgtgattaagatgacaaaacatctaccatgtttcttaatttttggaacagttggtatgcgtggtgtataccatttaaattctagtaaagccgtaaacatgggcaacatatctagtaaaaagaaatactcctttgactcacagtggtattttgattatttttattattatttaatattcaccaagcaaccatgctgagcaaagctctaatataatgtttatcaagtgctgttaagtmctgagataaagaggaccaatctaggattaatgtattttgaaattcagactatctattcatcaaaatgttcggtgaacacatatttctttttttattcttcttttaaaagtttgattattatgagtatatgtttttacagtcagctttttctttagtcaaataagaacctgagtaactgttgcattatattgatgaccatgaacttatgataaacaaagccaaagttggggagctattaaacttgatttggggcttataaagacccttttgaggtcatccaatcttttctcctgtctttag

SEQ ID NO: 2964 - DNA, 600 bp, Bovine  MMBT06531
gatgaaacctcgggttgagcgatcaaccccatccgtttccatcttctctggaaacatttcttcaatcttgtcaaaacacactccctgagtttagagctggggaattcttggcacaatactgagccaaggaagaaaataagaagcagcttaggataagtgacccagaggatggctgggataccatccatgccgggtaggagtggggaaatgctggagatttaggctagacagtgagcaaggtcacagcagtgaaaacaggctgactggggcactcataaagcaagctgaggctaccgtccrgaaaatcaggtcccggcatcagctttcaggatgtctctggtgtctggtcggatgttagcatttttcagtcaaggactgtaagttcgaaggagtgggtggagaacaggagatctctttgatggctggttcctctgaaaacaataaatagcttctggagagaagggcaggcatctgggtgttggcttggccgaagtcagcagcggtttatccacccacagacgacacaaaggtagrgtggaccgaggaagcggaytgtgggctcccggccagtctaatcctgctcccagcagcctggaggag

SEQ ID NO: 2965 - DNA, 600 bp, Bovine  MMBT06623
aaaaaaaaaagaaccagacaagacaacatggcctgagaggctgtgatgcccatcacagtccccagcaatgtgaacaatggagagagcacgtcagcccctgggatcacagagacacagagcggccaccagctgtgtcagagggtctgttctctggggtagcctgcactgttctggagagggtaaatgagcaatggaaggtctcattttttaagaaattcaagtaaggaaaaagcatacagaaattccaggaaagcaacagacccctcagcaaagttcatacaaaaccagagaagagggagyactctggagwgcatgcctgtgtccccctaaacccacgtatgcaagccctaaccccacgctgtggctatatttggagacagacctccaagacagtaattaaggttgaaagaggtcatgggaggggctgatgtgacaggattagtgagggtccttgggcgaacagagccacagcttcctgtatctctttgccaagcagagaggaaaggccctgtgagcacatgcccagatggcccgccgtctccaagccacgaagacagctctctctagaaactgaccacggtggcacctcaatcctgaact

SEQ ID NO: 2966 - DNA, 600 bp, Bovine  MMBT07016
catgcacattgattatatttactgtataacttggggtagaagatctaacagattagaagatgaccatgtgctttggcacaggtttgtaaataagagtcctatcactggtccataaaatgaacatgatgttaccttttctcattttaaattctctggaaattatgcattacacttctgcccactgcttcctcatagtgtgaaataacttaactggaaaagagaatctattaataatcaagcacctggaggtctgcagctaagcagtaaagatgatgtgaaatctgttgatagtgactctgsgttcctgagctgtgaagttaagtttttaataatmtttctaatcaaatggcaacagagttatcactttttcaggctttgtttcatctgaaaacaacagtgaagatttccattcaatcaaataatttccatttgttcaaaaaggtatttactgtgtatactttagtggtggatatcaaaaataaaaacaaatattaattcaagatattatcttacaggcaacatattaagaaattttcatgcataattataggtaaagaagctactctttagaaaggttaagtaacttgcctaagtaataga

SEQ ID NO: 2967 - DNA, 600 bp, Bovine  MMBT07200
gatgagagtgagctggtatcttcagaaagtagcaagaagaaggagctaatccagcaggtgcgggggtctgggaagccttcattctctcacatcctccctctcatgacatcaatgctcccaccgcaacccttgaaaggttgctcgttaagactcccaagaaggtgccaccaaacagacccactgtagtcatttcagaggttgatgctggtctgcaggtggaggttttggaaaaggatcactggctcacgttaaagatttataaacaggcccccagtgtcagtcaaaggcagagtattaagraaagggaaatgctagaatctttgactcctcaaagagagtcggtagcttttctagctctccctcctttctgtctcagcatctgtcctggtaacaaggagagtttggaaattgttttttagcaaatgcattagagggaaggttgaagggaagtgacacattgacaagtgactgagggagcaaacctggagaaggatgcttaaaaaaaaaaggctgctgaaaaggagggctccccagatcccttcaaggtgtgattgcaggtgtgcagttgacccacgtaaactggaagctcaaaggatgcgg

SEQ ID NO: 2968 - DNA, 600 bp, Bovine  MMBT07278
ggaagcaagaatgagcccctgctgccctcctaactggcccagctgacaccatgaggagagcagagggaaaacaactgcagagaagtcaagccagagcctcaagagcatcatgaacctctggatcaaaccatacctgaatcaaaaccatgctgcatttttctattacatgggcccatagtttctattttgattgggttttctgcctgctataactgagagtctaaacagatatcggagttcaccaaatgtgggcagtaactgtttctagggggacaaatatgaaggaacttccattcttcratgtatgtgttttattttatttattatttttatttactctgattaggtgaaactgaaacatactgtcagatgacctcacagcaagaagaagcaaggagcctgatccaagctgcccggtcgtgtgcgactctttgacatctcrtggattgcagcttccaggcaagagtactggagtgggttgccatttccttctccagcggatcttcccgacccagggatcgaacccgggtctccctcactgcaggcagatgctttaccctctgagccgccagggaagccccaatgtatgtgtttcatact

SEQ ID NO: 2969 - DNA, 601 bp, Bovine  MMBT07627
  misc_feature (1)..(1): n is a, c, g, or t
ngacacatttagttcacgtcaagtttccagcagagggatttaccaggtttaaagcagttttctgtgaatctttgtcaagggagtgtatgtacaaacaaacagggagggttttttttttagtgaaaagttaatcggcttaaagtgtgcaactaaataagcaaagcttacatgaaagtgacycacggagaaaggacctgatggaaagaaagttctaggaaatacaatatggcctctatgttcttttgtagttccacgccataaatattcatggggtggtgttaatggggtccgcagctctatrcaaccacaatagtttttttgtttattctcaggaccatgaactttgaaaccatgaacctaaatttcaggactctgcattcaggcatgtttgcagagcaggagggagaggttcaggctggcagaggacagaggggaggaaaccagaggacctgtgaatcatgcctcctggatcttttggttgagattaaaagagaatctgtttagtatgggaggcctcttgtctccagggtctccagctgctccagcctggggaaatagccttcataggcatggagaacttagttactcaagcatatggtag

SEQ ID NO: 2970 - DNA, 600 bp, Bovine  MMBT08088
aagaacaagtcataatgtgcactacrgaatacgactctgccaggacagacatgaacaagtgtcatttgcaatgatatggatcagtctagagataatcacagcaactgaagtaaatyggaacaagaaaagtaatatcctatcatatccatcgtgtgtggaaatgagcaattgttctcaatgaactcactcacatatgaaatgatcatattgtccaagtaaacaaagttataataaccaaaaagaaaaggcaggttgaaggataaaattagaagactgtaataaaattataccaatgattartgtaaaacatattatcagcataggctgacattactacgagagttgtactaaacactctgtaataacctagttgtaaaaaaaaaaaaacatgagaagatacacgcctggctataaggaaacaagattctgtaccactagagcaaacacagcgttggaagtcaactttactccaatcaaaaacacattatttaggaaaagaagaaataatcagacccgagctttggtggctaataatctcacattccattctaatttgtgatcaggaagcaggactatccctaaaactctggttaccgtagc

SEQ ID NO: 2971 - DNA, 600 bp, Bovine  MMBT08661
gcttttttcatatttatgtatatatggatctttcaaacatttagcatttaactatagatattacrtgagttagaaatgtttctaatcctttactgtaaaaactaagtattcatgtagttagatgaaaagtatgaattgtaattctaatttatttatgaataaaatagcctcaaagtttcttctcatttttatcctgaaaaaaaagcatgttcaaaagcttcatgtccttggtgagcattcatttttatttcaaaataaagtgagaatgtaaagttatatcattaaatttcaatttccccratggaaagaactttggagaaaaaaaaaatcccaatttaaaaactcttaccaccctttactttccacatatctcttttcctaagaagcaactcagcttaaaaggactagtgatagaaatttgcttttgtaaaaatggacagaagatataatacaaataaratgaatgctgaacatttgaatatatttcayaaawcctttatataagccctttccaaaggtttataatggatataattaagaattatttcattctcctagagttctaaggaaggaagctggggtttgagatctggttaccag

SEQ ID NO: 2972 - DNA, 600 bp, Bovine  MMBT08723
caattcatactgaatagaaatgaaatcctcatgaaaatgcttatttacttaaattaacatcattttaaaaaatattgattcttctgtaatccatgaactcctaaaaaggaaggcagatggtcttcaatgcaatttattgattatttgacaaaatatttaaatatttcaaattctagtctaggagctgcagagatagagttgaataagcagagatcatttttctctatatagattacaatctatctacccaaagaaaaaaatgagtaattaattacactaaaatgtgaagttcagtgaggmgataactacatccaacaaccttcatgtagacaaaaataaacctggaagtttaatctcttaaaggttgctcctagtattaataacttttgtatgacataaatattagattgattttctacactggtggaatcattagatagatcaataatatacatgcctcgtgaaggtaatgaatagtccctgaattatggggtaagcatagtgctagttttatagatatataattttatgatgcatttgttagccctctatgctaaagttactttatgtttttgaaacttaaataatttaacttagaag

SEQ ID NO: 2973 - DNA, 600 bp, Bovine  MMBT08727
aagatgaacaaatggactaattcagtgttccatcaattgatatatacaggtttaaatgatcatgaatgctrtctcccatccattatgttcttatatcaccatgaaatccctcagttgcatatataaacatgagtgtctcaccttactgacgtaacacgcacacatacacacctggaaatgcaggtataaatcctgtaaatatttttctgcaggcccttttacggttctatttcaaaactacctttaacacctattacttcaaaatacactaacattaacaattcttwttgggtatagaayatggttcratttttttttcttacagttattaatctcctgatagtttaactccaaatttcaaatgtttaaagaaatcttgctttatactgtcatcagtttttccttttgtatggaaatatataggttttatttctaagagcagcrataacatagtagttggaaacattgcataatgtatattattaagcctgcatttaaatcacttttcagaggcattgaactctcttctctctgatcatcacctccagtagctatgcaagggcaagtagagaaggttatctgaagagatctatgttgatt

SEQ ID NO: 2974 - DNA, 600 bp, Bovine  MMBT08984
ctggccttccagtcaagttgccattttccagtgaatgaccaatcacttaaactcatttggtctcagaatatatattctttcatgatctttaaattgtttttaagtttaggtatatttggtattaagtataagtttcagatatacaacacagtgattcacaatttttaaagattatacttcatttataatattttcaatattggctatattccctgtctgtacagtatatrcttgtagcttatttattttatacatagtagtatatgttttattattttgtacatagtagtttgtacctcrtaatccttttcccctgcctttcctcttcccctcttccatcttcccactggtaaccactagtttgctctctacatctgtgggtttgtttcttttatgttatattcactggttttatttttttagcttccacatatttgcaacaacatggatacacttgaagggtattacgtttagtgatctttccatttccaaaattaaattttggaaagatttttttgagaaatgttagtagtttctttttatcaggaaaaatcagaaaatagggtctcaattaatagtttaatattgtaatccttgtat

SEQ ID NO: 2975 - DNA, 600 bp, Bovine  MMBT09086
catggtttcgataccatgcaaagcaagaacggcttgtatttaaatgtgagaaggtgtagtaccggaggagctgaggatataaactgctcctgaagtgagcttgaacagtattgaatcatttcaaatttacttatgtgataaacacatttagtgtattgactgtacaactggggattgtctgagttaacttccattcaacaaatgtttattaaaggataaacaatataaatgtgctaatttgaagctcccgtagataacactgaaactcagcagtaatcacagcaattgtttagaacttasagtgagaaaaggtgtttttgttttattctgttttttgtggtgagagaagtagtttgtcactgacattgcttcaactcactgactcatagggatattaaaaagtagactcaattttagttagttttattgttttactttcagtagatttgcttaccttagtgcctgtgcctgaatgggccattcctgccaccctggtgttggcacatcactgaaaatatcctgagaagcacaatggagtgaagcgtcatcagaagacagtaaaaactgaaaagcattttgtagaggaactgatggagaggg

SEQ ID NO: 2976 - DNA, 506 bp, Bovine  MMBT09475
actacttagggttgttttgagggtgctgtttgtttctgtttgtcaggcatgtgaataacgcctggcatgcagtaagcacatggtgagtctgtagaagtgaaacaaaccagccgctgccttgttcctgctagtctgagacagcagggagggtcccttcccattccctgaatcctctgatgaagaaatccctgttggaggacgtttcacaactttccatgaattttccagtattgcagttgacactcatgcaaatagcatggaatcaataaatgtttctttaatgaataggtggttgggccrgatcattgtttcccatgggaggaatatgagacggtttcaggcgggaacagagatagatgttttaaatgttaatagttaggtatttgttacagtgtgtgttagaaggaaatattaggtagcacctcagagctgagtactaagaaaattgagtttatttaaagacatattactttggggagagggtgtgggggagggaaggattaaga

SEQ ID NO: 2977 - DNA, 600 bp, Bovine  MMBT10227
ttccctcatggtaaggactagaagaggctgtgcatgtgcagagagcggagactggaatcacgcgagggatacagaatgcttaactgcagccagcctcagctcaacaccctgttcaggccacctgactgagtcttcccagccgttctgtaaggtgttattaatatgattatgcttagtccactgcaggggaaactgaggcagagggagaccatacagcaaggaagagggactgctgagaaaagaatccagtagtttaactatacagactgctttgtatactcaagtatactgctgtttgawgatggatgaatattcrgcagtttgatgagcagtgtcatctaatggttaggagcacagacccatgttagacggcctgggttcgaatctagctcggccgtctgggcagcttgcaagccctctgtgatatggagagaacccccggggatgctgygcagaggactctagtgagacctcaatgcacagtgggcactgtgtaagcagtgggtatttgtgatttcttctggaggctaaaggtgctgggaaggggctgagatgctggataaggaagtggggcaggcctaccctgggtggacggtcctg

SEQ ID NO: 2978 - DNA, 598 bp, Bovine  MMBT10229
  misc_feature (1)..(163): n is a, c, g, or t
nnnnnnnnnnnnnnnnnnnnnnnnnnnnnnnnnnnnnnnnnnnnnnnnnnnnnnnnnnnnnnnnnnnnnnnnnnnnnnnnnnnnnnnnnnnnnnnnnnnnnnnnnnnnnnnnnnnnnnnnnnnnnnnnnnnnnnnnnnnnnnnnnnnnnnnnnnnnnnnnnnnttaaatttgcatttcccgtaagacttccccggcgatccagtgctgaagacttcgcctcccaaagcagggaatgtggattccatccctggctggggacttaagatcccacgtgcctcacatccaaaaagaaactgaaygtagacagcagaagcaatattgttaacaaagtcagtaaagactttaaaaatggtcctcatcaaaagagaaatctttaaaacaaatgtgcatttcccygacagctagtgaggccagccatctttggatgtgtcatttcctgtgtggtctctggagagctgcctctttatgttcacggtggtctcttgacttgtttattctcttttcatggatgttctgtgtctcttcagatcctcagtgcctgctgaccaacggcaagctgccgctctgggcgaagcggctggtgagtctgccggggga

SEQ ID NO: 2979 - DNA, 600 bp, Bovine  MMBT10371
gggtgcctgttggtagcctgctaagagaagaatgcttctggcctttgctctagctttgcaccagaatgaatgcattaatgtactttaaaaaaaattttattcagcagcaattattttataaagcttgtacattatgtgaggcttagaaatatctgacttcccgacactccaagctattcaatgcttttcaccaagagtaaaggcatttcctctggaggatctctgtacaagtttatcctgaagactaaatgcttaatscaagtctccacatgcctattagcagcatctgaaatatgaaaygcacagggtcatctatgaagttccccattctaagaagctaaagaataaaagggctcaatatttggagaratctggactcccatatactctgctgatgggaatgtaaaatgtttcagccacttgaaaaagtcaggtagttctgcaaaaagttaaaagcagagttaccatgtgacccaagaattctgttccaagcatatatactcttgaatgtatgcccaagagaaaagaaaacatatgcctacactaaaacttgtatatgaatgcccatagcagcactgttcataacagctaaaaaagtga

SEQ ID NO: 2980 - DNA, 600 bp, Bovine  MMBT11201
aactgattctggaaaagagtaagtattaaagaatgcaattctaggttcttacctttggtggcttaaatggataatcggatgaaaatgtgatatccagaaaaaacacaccaccttcatatacagaacctggtggaccaagtatagtcgatctccattcataaatgttatctcctttaggcccagcactattcaaaagaaattaaaaatcaatgtgtgtatctgtgatctatgaatattagcatcttaaaccagttaagtatcaaaggtaaattagcaacctagaacagtacgagataaatrtaaaagaaataagcctcaaccaacttgtgcagggatgtgtgaataaacacatttgcaaatagttctaacttacagaaaaatcacaagaacraagaaactttatccagaattccactttgctcatttgctttagtcaactccttttctctttctccacccccttctaaattacacgcacacacatgcacacacacacaagggcttttttttctaagccatctgagagaaggtcaatgtatcagtcctttcagaatatttattctcaaataaatatttcagtatcatttcctaaaacaatgt

SEQ ID NO: 2981 - DNA, 598 bp, Bovine  MMBT11311
  misc_feature (1)..(81): n is a, c, g, or t
nnnnnnnnnnnnnnnnnnnnnnnnnnnnnnnnnnnnnnnnnnnnnnnnnnnnnnnnnnnnnnnnnnnnnnnnnnnnnnnnntcagggattgaaaccagttgtcccacttgcaggtggattctttaccaacggagccaccagggaagccccaggatacaagagtgggttcccttctccaggagtctcttgtgttgcaagctgattctttaccagctgagctaccaaggaagccctgttaccaacatatacaagtgtaagtttcatcttccatataatgggaatattaatatttattatatrggattgctatgaagagtaaatgagatagagcagatgcctaggccaatgcccagcccatggtaaacgcccaaagaatgggagcactggtgttagtgttatcatgtccccatgggcatcmtatgtctctagccctttagttttcaccagccatggagacatagtcagtacatcaaaaaatggcatttartagagaacagatataataaaataatgaggcaaagtcaaatttaataaagtctacatagtttaaagtaataaaatgttcctcagggtataataaaataataaaattatagag

SEQ ID NO: 2982 - DNA, 600 bp, Bovine  MMBT11361
cagtatctgaagaactgatccaattaaaagaaagaaaagtactgtagtacaaatgaacacagataaatcctagaattatttttaaaaacacatttggcatgccaaattttttttttttttttggttgttacaactctttttttttttttttctttaatagaaaattatttaattagtatacatgtgttattttaaacagtaatcactaactgaaattaatgttagtttctccaaattatgaggcagtttctctatcctacaatgacattaaaatcaagaatacctggaaaaataaaaatrgaaccttgattgaagacaaagatgcttcagcaataattttcacacaaagcctaattctatgttgtgccccaacctattcttacctgtttctcacaaaagatgttatataaaataatgtaacaatgcacagaaaaaatatgtatctttgtcatattctatgctcacattttagcaatctcaaaaaattaaaaaaacatattccaaattaaatcaagagaaatacttattttacccaagtggtactgtaaagtctagagagtttgttactgacttcaaggaaacagaaaacaactacaaagc

SEQ ID NO: 2983 - DNA, 598 bp, Bovine  MMBT11570
  misc_feature (1)..(121): n is a, c, g, or t
nnnnnnnnnnnnnnnnnnnnnnnnnnnnnnnnnnnnnnnnnnnnnnnnnnnnnnnnnnnnnnnnnnnnnnnnnnnnnnnnnnnnnnnnnnnnnnnnnnnnnnnnnnnnnnnnnnnnnnnnnattgatatacttgtctatttccccaacaaaaataggagctcttggaagaaagaatgttgtgtctctttctgaatggagcaacacttgacacactgaagatgcttcgcatttcacagcctcttgatcagaaatgagagaacttggctggaagaggctcatctcatacagttttgatgatrttaattggaggtgaagaaggacttaagcaaatacattagggaaaattacagcttatcagtgaagtgtgcatagtgagagtgggcttgtagggagagacagaaaaaaaaaatgactaattacctaattttcacttcctgtgcaatattccctggttgtttgaccaccaacttctgggaacatcctgtaattagtatatttattctctacccttaatttgtgtctccaagttttccttggctctctcatccctggcttgttgccctaaaatatcccgttgcctgatggaacactgcttag

SEQ ID NO: 2984 - DNA, 600 bp, Bovine  MMBT11591
tgagcgcggggaggaaaatgagtgagtgcttagccgctcccttgtgttatgtaatcccgcctatagtacatccgaagccttagtgcgctgcagttagtttacaaagtctcctcccctggctctaaaatttcttcgggatggcgccgtgatttataaaatgggatggggcggaaaaagcttattttcgtatggttatatcctgccgcggtgggcgccatgtttatcccagggactattttctcyagattcttagcaccttctgaaaaggagggatattgttgatccacctgctttttctgytttcgcaagttgtcctgctttctytcccgtcagacgcgggattccttcaaactgttaataatactgagcgtttctttgcttgtctaggacattttcagctcagaaaaaggtagagctggaaggagtcttgttagacatttagtccaaatttctttttcgagatggaaactgagatacaggtgttctgtctcggaatagccgtcattctattgcagactgtggcccagccctctgcactcctttagacacctcccacctccgcgcaaaaccccacagacgtgcagtttgactttcaaagga

SEQ ID NO: 2985 - DNA, 600 bp, Bovine  MMBT11688
atattattcatgggacttgaagattttacctataattatcatgttgtattgctatatagtatatttacatatatacacatatatgtacacacacacatactgcgtggacaaagaatgaagcctgccatttaattaaacaaaggatgctgtcrccatcagcccagcaaccactgcagccacccaaacrgtgtacctgaggggattcaggatggagaaaagcaggatccaggccctgagagttaaggtgcgtatcaaaggaatgatttcagggagcccagactcttgcatcttcccatatayagaaaygcacaaaattcactaacttcagatgtctggttttctttmattgtaatcttttgatgttctgactacttatttatttattgcaaaaacctgcatatcctggctcctcccttaccttttagaacagttgcccagagctgagaggctgctcctgggattaagtcctaagtaagtccaccaaataaaacacaacttccaacttttagatggtgcaatattttttttttcagttgacaacacacacacacattacagtgaagtttttaaatgcttttttcctttttgtaaggcttctaa

SEQ ID NO: 2986 - DNA, 596 bp, Bovine  MMBT11925
cacagggactgcgggcccgagtcactccgcccgggcgtcccagctgagcggatctccccccggacgcgagcgaggactcaccggcagtccttgagccatatcgcgatcttctcgttgggcacgtttcctgcaggacagagcgaggggacagctcgttaccgaccccaagggaactctgtccacgggggtcaccctggatacccctagggagaatcttactggggacaaaatgcagcctaagccacacgtagcagtgaccacctgaagggaaatgatggcaccggggtgtctgtgttgacrctggagacgccttgccaagcgcgcgcgtttaaaggtcgaaagtgtcccctctcccccctgcctggagcccaggaggtcttccagaactcagagcagtcgcccaaggcgcacgagactttcctccgccagcccgcactcccccgagctccccgcccgccgctgcccggccgggcgcacggacctctccctgcggccgccggcagcttcgttccggagaggtcgtcctcgtcctcgtcctcgtcctcgtcctgcgtcgtcgcttctgtggacaggtcctctgtctccgacgcctgcca

SEQ ID NO: 2987 - DNA, 598 bp, Bovine  MMBT11954
  misc_feature (1)..(26): n is a, c, g, or t
nnnnnnnnnnnnnnnnnnnnnnnnnncccctcccactkcgaggctcawctccccaggttaacagcacccgtgggaactcagctgctgctggtagggtcacctagagcaaacatggataccaagtcccacagcccagctgcccccagccccaccggaggcccttggggggacagcagcagtcagtgattctgtccacccaagaccgggtcctgctgaatctgggaaggtggttaacttctgtgtcacagcactctgacactcaaggtttacaaacccattctggcagagctgacatgaacrgtctctgtgatttggcttaaggaaagtccagttcctaaaccgagttcaaatcagcaaagccaaaaccaaaggggacaagcagagccccactaagcctctcggagctgcacccctctctcctgctctcctgagcccctaacactcatcacccctcagcgacccgacatcaaggggtaagtttcagatgaagggttggacttgatatgtgagttagcatttgcaaacaactctaaaaatcaatgtatgctcttaacataattttaatttttcatggccacatagtatactgagcaattcc

SEQ ID NO: 2988 - DNA, 600 bp, Bovine  MMBT12008
tttccagtctcactttccttggctcccaggctgtcctgatcttgttcactttgcaacaaagagattctgtttttctattcttgggttccctgacactgcayagaacaaattataattaggaaaccacctgaagggaaggtgacaattcggttgtcagttgtcatggataaaccccacttctatccatgcaagcaaggcaagcctctcaccttcaaaacagatacagtgyggatgctgtygttagctggttcactgccccgagaaggaagcagtcacaaagatgacagcaagtacaacagsggaaaacrtgaacaaacagaggactccctcgccgtgagtaattttactgccggtctgactctaatatggtgtggagtgacgtgaaagccactgcagcaagtggcccttatgaggctaactcggagctgtcatgtcagcgcgctggacacagagataaatgagagctaccgttcaaaagacacaaaacaagcaagcgggtagcttgtggtgggaacacgttaccgctcagctgcagtatgagattttagctcagaatggattaaggagacgttatagctttcttatctttagtcatttgga

SEQ ID NO: 2989 - DNA, 600 bp, Bovine  MMBT12368
ttcttgctgctgttgttgttcaatcactaagttgtgtctgactctgcagcctcatagaccgcagcacatcaggcctccctgtccctcactatctcctggagtttacccaagttcataatttcttaagccatccttactctgcactggtctgagaatagactttggctctcctcatttcatgaattttcagttgatgttagttacagccactgttgggcagtctccaaatagccccttactttgattgtatttttctttacattgaaaratatatatgtttagtggaagaggttgttaaayagaacttttctttatattatgaattaaaatcttagaaccactcccttacttggaatatatgctayagwctccagacagcaaattaagaagcttccaaaatatcctcatccatgctaayttaacyagcagctatgactgaagatgaactgagagtggaatttaatttttggcaggagtatcccaaagcagccacgctatctgccgcatccaacagtcttggcatgggatcaaggtaattctttctgagggcaagtctttaagatcacagtctcttaaaacgagtactctcaaacatcattg

SEQ ID NO: 2990 - DNA, 602 bp, Bovine  MMBT12387
  misc_feature (1)..(2): n is a, c, g, or t
nnacctttacaaaatgaactctactttttctttcttataaattctgaagttcaacacacgcaatttttatattctatcaatgtccaaatctaatttaattagcacagaaatacttgttcacaccaaagtattataatagacactctgagaaattaggttctgttggctcctattcatttaaaatgatcaacaaggcttttagaaggattaagagaaatgatgtatgtaaatcatctagcactgtgtctggcacaggctggtgttcagtaaacacaatacgcctaccccctttaaaagaaagraagaaagaaaatgatcaacatgggtgtgtatgtgagtgtagggaacatcttctattataaagaaaagcaatactgagcctttacattttactctgatggaaacatatcagtgtatcatgattcatggagaaaacagttccagaaagtagagagagagaggtggatcctkagtaacagctctgatttatttcaaggaaaccttggacttactctgggcatctttctctccaaattcaactgattaataggtgtggttaatgctacctcttaaatctctcttgaaactgtcacttgtattcc

SEQ ID NO: 2991 - DNA, 520 bp, Bovine  MMBT12803
ggtagtccctttgttctggtcaacaccaatctcctgatgtccctcctcagttcccaggtgcccctgccctcccggagagctgccctgagcaaatgaccactgtcaccttcctgctacacaccagccatccacgggcgagtcctgtcaatctcagcatccacgggcgagtcctgtcaatctcagctccggggagcatctgtacccaccccattctccactaccccacctccatccccttggtccaggccacacatcccctccagcctcctaactctctccggccttcagccctgtgtactyggcctgttctacccacagcaaccacaccagttttctccaaattccaatctaccttcaaacatttagaaacagaacttaccatttaagagtgcattggatatttgggagaacggcattgaaacatgtaaaatatcatgtatgaaatgagatgccagtccaggttcaatgcacgatactggatgcttggggctagtgcactgggacgacccagagggatggt

SEQ ID NO: 2992 - DNA, 600 bp, Bovine  MMBT13234
gaccttgattaaacctaagcaagtgttcaaggtaagataactaatatgtaaatacatttatgtctctaatggaaatggttggttactaggtcttcaaagtcagtgttagtccaagtagcctctgtactggaagagcttcttatttacaatcgtgtctatgcaaatcctgcccaactttctcaaacatttttcacaaattttctgcaaatcacacagcaagaaataatcactgctttatgtaatcaagtacttcatgattatcacttacagtcttgtattctattgggatcaatcttgaartacatcagtattctaaaatctcactttctaaagagcagttcctaaatgttttttcatgcctaacatttctttcaaaggatatgaaagggatctaaatacatatttcaagataacccatatatacatatatttccttttcagttcctaattacatattctcttaaactagtctattgcatctctttctaagctctgaaatatgtcattttccatcctttctctgccttcctctaccatatgtttattctctcattttctcccttcttttaattatgagtgaacccagttcagccactcaat

SEQ ID NO: 2993 - DNA, 600 bp, Bovine  MMBT13808
taattgcaagttcaaatgttattgtctttcttcactttaggtcttagtacccacagtgtccatggttggaaagcatttgggagcaagaaaggatcatccaggcttgaaggctaaagagaatgatgaaaactgtggccccaccactacagtttttgttggcaacatttctgagaaagcctcagacatgcttataagacagctccttgctgtaagttaaactgtttatttttcattaaaaaacttttttgttgttaatttcaggcttaagaaaaatcagagaagactgaattattgtctckyttatattttgaaaagtttcaatcctgcaaaaaagttgaatagtgaacacctttgcaacacattttgccacatttgttttctttctctctctccacacacacgcctctcagtttttttctgaatagtttgggaataagttgtggctttacatttcacctctgaatacttcttatatctcctatgaccaagatacttgcctgcatttttcacacttaggaaatttaaggctgattcagtattgttaattaaaatacatacagctcatatttttaccaacagtttctataataggtgtttttt

SEQ ID NO: 2994 - DNA, 600 bp, Bovine  MMBT14203
ccagtgatcgaacccttgtgtcctgcattggcaggcagattcctttacccctgtgccacctaggaagcccctttttatttattattatcaccgttgtcacatcagctctccatggcacacattctcaccagcacggggttagcggctggggcagcatcttgcctttggtcccattgctccctcgctctctcttctccctcccaccctcctacaaggcaccctgctcgcattcagtacctggtctgcctccttggaactgctstcctctgtgtctctggaccccttgactgaaggagccartgcccacctgccagtccctagaagcctggatagggttctcgccacctcttggttccgagggcatgaagtccggccagaagccatgatcttctctcccgagggcctcccagggcctggccacactggccgggagacgctggacacccagggcagcctgatcwtcagaaacgtgacgactctagatgcgggcagctacatggtggtactggaaaccagcaggggacgcaggagtgcgacggagcagataccgatcaagggtaatttcacgcccccacccctccctccatggcagggcgggag

SEQ ID NO: 2995 - DNA, 598 bp, Bovine  MMBT14212
  misc_feature (1)..(84): n is a, c, g, or t
nnnnnnnnnnnnnnnnnnnnnnnnnnnnnnnnnnnnnnnnnnnnnnnnnnnnnnnnnnnnnnnnnnnnnnnnnnnnnnnnnnnncctaaataattaaataaaacccatatcagactctgtccttctcttgtcaaatactttctcggcgctctaggatccatgggagaaagtattcattcctcagtctgattacccaagctctttttgatctgaaaacctgccaaccactcctgcctcactcaagtccctgtttcttatttcagttctaaaagacattctccctacagagagtcaggagcmgggttgatgagaagggaacaaatgtttctcaagagaaggagctttttgttattgcttttgctcttgtttttgtttttagtgattgaaagttatctaaacacaatgtcagaagctgttcttgtcattctttctccttcctgggcattttatggcgactctggttctctaaaaataaccttcttttctcttttttctcctccccttttctctctctcccatccctcgccctttctctgtaatacagtcttctctccccccactccactacatctgcttcagaattcttagagcacagaag

SEQ ID NO: 2996 - DNA, 598 bp, Bovine  MMBT14605
  misc_feature (1)..(23): n is a, c, g, or t
nnnnnnnnnnnnnnnnnnnnnnntaaaatgaggataacaatccttatgcttgatacaggtttgtgaagatgaactatggttatagtttaccaaacacttcttcatatgttaaattaggaaaatattagaaatccacaagaattaagagacttctgggctcacataaactctcttgtggatgaagaaggagttaacctgcctggcagtgcacaggggtctgatgggtctggtcagccaatataagcagatggctgtgatgtcattcttgtaacatgattccttgctggggtgcaccggtgsggcatattggagcctcacagaggagcccctctctagcctgcccacatagttcaatttactctcaataaaaatgcaataaaaggctcacttgccttcagactgttgaatgcttgtgactccagattatttggaatagaaatcctgactgacaggatttgggagaagaagatggatgaaatatccttaaagcaaaaaagcaggaaatgaaggaaataaagtggttgtattttaccaaactggatggtagttcaaagaccctgcaagattttggaagtgtataagccaggrctaaaataat

SEQ ID NO: 2997 - DNA, 600 bp, Bovine  MMBT14985
caacagcatctgtttgtatgaccataagattggtttatgaaacacttactagatatcggacactatacttagttcttgatgttcatcattttgtgtaatgtttacagcaatctagtgaaataaatatgctcttgttaactgatagtgttcaaatgtactagtttttctaggattgcactgctagtacaaattggaatttgaactcatcaggctacctccagacaaccattttatacgacttccccatcatcttccgactgtatgatcaactgcatattttactgttttatgcaaaaatgrmaagaaatctgttaaaagtttgtctgtgttgctaatcacagataaaatgatctggtttcacagggctctcatgacaaataacctggatagactccttacctctttagtttgagagactatcaatggcatcccactgcagtagggctaaatcccataaaaaggcaacacagaggcctgttttatgtctcctttaaggaytccacgatatgagactatctccatgagagaaatgataaaagtaasgcaatattaccaagtaaactgccaggacacccttcatcacaaaacaaagactaaggc

SEQ ID NO: 2998 - DNA, 600 bp, Bovine  MMBT15976
aagaagacaattacaaacctttgtaatctgatgctgtttggtgattattgctcatatgttagaaactcaaaattcttacgctgtattagtctattactcccttacttctcctgtttataatacataacattttttgagaaaaggaaagtttggttttttaaataggttgatggggaaattactcaaaggaaacctaaagttaaaacaaaaattactcaaagatttctttttcccaacctcaaggtttaaacatttttctcctcttagaaaaataatgtttgaattaatttaaaactgtcyaaaatggtttatgtattagtccagtttcctattgtactaggatgatttttaacatccttcctaagttacaccactgatgttcatctttaagatastaataaactagtgtcaactagaaaggacttccctgtagctcaaacagtaaagaatctgcctgtgaagcaggagaccagggtttgatccctgggttgggaactgcaatctgctccagtattcttgcctggagaattccatggacagagaagcctggcaggttacagtccgtggagtcgcaaagagtcgcacacgactgagtgactg

SEQ ID NO: 2999 - DNA, 600 bp, Bovine  MMBT16486
tgggaaaaatggcagcattactgtacactgaagctctcaartctggctttggtatccaaataaagaaaaaatgagcttttcctcttttctctggttaggatgaggcaatatttagtactagaagttttgcatgtcttaattacragaaaatggcaaaacaaggccattgtgtgaacataattgacactaataatttatcggtttagcaggaatttatttaataaataccactttcttgttgattaagtttcattgcatgcattacaaaggatctcagatttcagagtatttataactgcyaccacctttctgatgatagtagcaatagttgataattactggatatttactctctaccagccatagcattacccctccatgtgcaacacacatttaatcctcaragccatcttatgagaaagatactatcgttaactccatttaacaaggcaataaacttgagagagatgtaasgtgacttattcaaggtcacatgggtaggatcttctggtagggcatgataccagaattttaaacattgttattactccccttcccgtacaagtgatggtacaaacaagaggcaggaaatttgggctt

SEQ ID NO: 3000 - DNA, 600 bp, Bovine  MMBT16657
gtagtgggagtagagcagagtcaaaataatgtttacttttaaaagcaaggagctgaggctatctgaaggctgaaggcaaaaagtccaggaaagtgctggatttcctaaataaaggggatacactttgccagctaaaccaagtttgtaagaacagcagggtaaggctaatcagacaagcttaagaatatgcaggaagccccaagaacctgctcatttaataaaccaactctgtgatgtgacatcagatggccccaagaccatacttgaaggaaatccaatttataagagaggcacactacygtcttgcaaaaaaatacctgtagaagtttggtttctttcttattgagcacccatcgactatccttgatctagattcttgacccacaaagcctaaaatatttagtatttgtccctttacagaatcagtctgttgattcctgccttagcatcttgatgaagaagtaacttttattgcccagaccagagagccacaggcagattcacagaaaatggtgtgttcgggtacatcgagatttggcatctgacttcttaacaatgtgattgctgcaagatggtccaatgctttttattttgaacagg

SEQ ID NO: 3001 - DNA, 600 bp, Bovine  MMBT17262
gccattgccttctctgaaaccactcattaggaagcagataaaaatgttcaagtggagaagagtttgagaaaaggagtgaaggatgtatgaagggttataaattgttgcaactggacatcaaacagttgcaactggcacatcaaacatcaactggcacaccaaccaggcgcctacctcctgagggccttttggggggcaatgagagcatcctgatcttgggcaggttataaaacctggtctcaaggtctcctctgcaaaaggcaagttgtaaaaggaaatttccaaagtcttcctgctttyaaaaatgctaggattttctaaagggtgaaataaatgctgtattaaaaatagatgttcatggtttccaaatttggtcttatatctttaaaagagtacatagtaagctgtggagggttttctaaaaagagaagagagacaacaaagctattaatatgatgaagakcaaaagacaggcaccatrgaacacatcaccaccttcctttaaccttagttttaggagagggatctgagactcactggtcttattgtacagtccaaggaggactgtgcatggctggtctttaaaaatggagaggaggg

SEQ ID NO: 3002 - DNA, 600 bp, Bovine  MMBT17409
cttcatggagtcaaaggacttggttttagttaagaaggggtacaaagcgctccaaggctaggagtgatgtctagtgccaaccacagtgagaacagtgattgtgtaatgacataagcattcgatggtgatgcttactgacctcagagaggaagagtaggcaactaaaatcatattggcagagtcaagaccgactaggacacatgacaaaagcatgtctctaaataagggcttgctatcgagtcaaacagaagccttatctcrtaggtatttaaagttaggttgataagactaaccggctasagcaaggctaagaaggaaattgatgacttaaatgtgraaacttagataatgtaggaaacagaaatatactaaattttaagagctagaatggcacacaaaggaaraacaaagaaaatgccagagcggtggaatcaagcactgactaaaaaaaagaaaaagaaaaacgaagctggcagctggtaaaaaaaaaacaaaactgcatgaatccagatagaacctacacccacctaatgcatatagttaaaccatgttaagggagagactacaatgaaaaagactccaaaatggcatatacagata

SEQ ID NO: 3003 - DNA, 600 bp, Bovine  MMBT18398
ttaaattttaagaatgtcagaactcctcaaaagtaaaaggtaatgtgtaaatccatatatcatattcatttcaaccaccatttgatagcatgtgttaggctcwacagaatccagaaagaaaaagacargtacattgatcttaaagagctaggggagctaataatgtaagcacatgaatattaaarggattgttttatttaagaataagagtatgtataaaatatagctattgcacagaaaagtgctaattctcataggaagctaaggaaagtgcttcacagaaataaattctcctgtgcrcttttgaaagatgaatttgaatatttgtcagaaaaggaatagaaaggaaagtaaaagaaataccaggcagagagagcacataaaagcttttaaagatacagagacttactcaattaaaatccataacttttcgctaaagaacattttgaaattagattacatatgtgccaaaacaggaaaatatcataattctartaagtctcatttcaccagattgcttaatttatttgcacattggtattatggagtccctttgaaaaatatttacacagaggcattgtaattggccagcagtaagaa

SEQ ID NO: 3004 - DNA, 600 bp, Bovine  MMBT18621
caaaagtgaaaccctttgagtctcagcatttgtgcattctaccaactcagagatctaaattatctcagctggccccagtgatcagacacagataagtagctgatgccaagagcccagagaaaatcaaaatacacacacaccaaatgaaatctcctatgcagtatcaataaaacactttgcatctgttgaaaagacaggatgaatcagttgacagcatcatcagtatctcagcctgtcccattccttctctcaaatagtgtggagagtggggttgaaaaggggcccattttgagggctcaytgtgtctgggtgttctgggaggaccctctaagagacagcagagctagatttcatccatttaaaggccacttattattttaaaaattacttcgtgtatatggccaaatagttcttctcacagcttcctagtcagcactgaaggtgtcttaacaataagtaagaataaagcatggcataataattttaaaaaacctattttataagcacagatttttatggctcagtcataaatctctatcacatattttmattgctttatttatacttccttttctgtggaatgaacaaaataataaataa

SEQ ID NO: 3005 - DNA, 598 bp, Bovine  MMBT19101
  misc_feature (1)..(44): n is a, c, g, or t
nnnnnnnnnnnnnnnnnnnnnnnnnnnnnnnnnnnnnnnnnnnntttattttgattttccttggttgtggtattttcttttatttttgttgaaatgaggaagtttcttttacagactacagaggaagtcttccctctgtaatttgaaaggtctgctacacttcttggttgactaagtcactgtcatattcaaagcatcttaattgaatatctatttattattgtaaataataaatcataatttaataatgaaatgataaaatcataataaaatcaataatgacaataggcttgcttgacrtgtttatcccccaccccctgcagtgacatgggaacttcacgatgttctcttttcactcttatattttctgtttagtgcacccttgmcccttacatggggcttcccaggtggcattagtggtaaagaatccgcctgaaagtgcaggagacacaggagacttgagttcgatccctggaccagtaaggttcccctggaggaggacatggcaacccactccaatattcttgcctggagaaccccatggacagagaagcctggcaggctacagtccataggctcacaaagagtcagacatgac

SEQ ID NO: 3006 - DNA, 600 bp, Bovine  MMBT19401
aaagaatccacctgcaatgcaggagctacaggagacagaggttccatcctcagaaagattccctggagaaagaaatggcaacccactccagtattcttgcctggagaatcccatgaacctggtgggctgcagttcatagggttgcaaaggatcggacatgactgaagcaacttagcatgcaagtatgttaataataatattaatgtaaatattaaatctgacatgagyatcatcctgaagtagttcaccagagcatattaagatcatggatgttgagagctgargtgaagtgtaacctgkgttaaattgttctgtaagcstcaatttcttcacccataaaatatgttaagaatagctactatcttacagcrttgagaaaattaaatggtatcataaagccatacactcagttcagtggtgatattaagctctcaaagtrtttagttattattaatattaccatcaataattatttctgccaattctctctttgactgaaaaactatcaggcatatcctctaaaaggagatggacagaaatcatctgttggaagagttaacaatagaaaacctataattgttggcagggactctattttaa

SEQ ID NO: 3007 - DNA, 600 bp, Bovine  MMBT19437
ggggtgtagtatgtctggtacaaaagggaatgaaaaatgtcaagaaaaatacctaatgaggaagctgcaggatttctgtgacagtttggttgaagcattggagggaaaaaatgtcaaaggcttctagcttgagaggctaaaaaaaataataataaaataaagtgacagtctgaagggttcattttagagaaaaaggcaggtttgatttccaggttcagctgcgctaagtctgtacagttggcagactgggcacacggatgaaggcaggtctgtgggtagggggctggggtgggactcttrcagagagtttctgagctcccccaggagtgagctggtagaaggtgaggcctgagcataaagagatgcccacaggactcagagaaagtggagcaaagagcaggcataaaatagtttggagggcagtcaggccagcagttartggcagcaccagacatgagggcggggtgtgctgaggccacagctggcccccctgtaggcccagatctttgggccgccatgaccacagctcaggctccacagcccacccccattccctggcccttgctgtccccctcctgctcctcctcaccccacttgggt

SEQ ID NO: 3008 - DNA, 600 bp, Bovine  MMBT19441
aaaaaaataataataaaataaagtgacagtctgaagggttcattttagagaaaaaggcaggtttgatttccaggttcagctgcgctaagtctgtacagttggcagactgggcacacggatgaaggcaggtctgtgggtagggggctggggtgggactcttrcagagagtttctgagctcccccaggagtgagctggtagaaggtgaggcctgagcataaagagatgcccacaggactcagagaaagtggagcaaagagcaggcataaaatagtttggagggcagtcaggccagcagttartggcagcaccagacatgagggcggggtgtgctgaggccacagctggcccccctgtaggcccagatctttgggccgccatgaccacagctcaggctccacagcccacccccattccctggcccttgctgtccccctcctgctcctcctcaccccacttgggtccatctactgctctttctcctctgctgaccaatcaatgccctttgtaccacttggtctttcctgggcrtggcctcctacccacagtgccttccccaggccccttctccccaaaccagagcctagaagttctgctacccc

SEQ ID NO: 3009 - DNA, 548 bp, Bovine  MMBT19539
gagtagttttttccctatttcatcaaataggcactgaacactcctgataatatactgtgctcattaaggtttatttgggggcttgctgagtttgccgttggttaactgcactgtttggcttaactgtcaggctgtggagcaaggggtcatccctttaatctctcccctgttgctcttcttagcaatatgctacctgtaatggtactgggctccatgtgccttgytctggtccaagagttagttctagttagcattctttttcttgcaaagaccagaaatgtattcaaaccagtkcaagtrttaaaaggcttcatgagagaatataatgacttctcttggacataaaatataggaagtacgaatcatctcagaagaaccagaaaattgtcatttagttactcctattgtcccygtgaaggtgtcatatctttgtgaatggaggtgtaatctgttctgcttttcctgtaggctctttctgtgtgtacttagaatgcacatatgcacgctcagtcacttcagtcatgtccaactctttgcaaccgtatgga

SEQ ID NO: 3010 - DNA, 600 bp, Bovine  MMBT19819
aggctgatttcactcttcgttagtggtggcacagactgtaaaatatttatgttcatattctaaatatgtattcctggagtaaataaataatttactgttcaggttataaattatttacttagttattctaaatatatgtatatactatttgcattttgctggaagcaaaacggtagactgatgrtctttaaggggtcctaaaagaaaaaataaataaatcaagacttaagctacaagaggaagtgttctattaaagagawagagagagcagaagatagccccaaatacattgccttyctygtagaaaatatcgattttatctgataaccccagtgcccaacatgaattttgtggattttgtttgaaatttttaagttgggcttctggattagaaaattcgatattacaaaaaacttttttaaaaattactttaattccttaaggcttgctgtgacttcaaagcaataggtaagatattgtcctgttcgggttgggggcaccatctaacgggctttggggccggttcattcattggaatcactctgtcaaagatttcagatccccagaaatgactcggagaaaagcttcttcttgaataac

SEQ ID NO: 3011 - DNA, 571 bp, Bovine  MMBT19824
ccttcaggggatcttcccaacccaaggatcgaacccaggtctcccgcatttcaggcggatttatcatccgggccaccagggaagtccaaaaatacaggagtgggtagcctatcccttcttcccgaccccagactcaagctagggtctcctgtattgcaggcagattctttaccagctgagccaccagggaagcccacaaataaacatcarttcttgaacaggctattgagagccataattcccaccatgtaacatcattccatgtaacagaataattwaaaaagtcaattcctcaagtcyaaacccgagttagttggtcccttggccacaatacggagatgaggactcaagagcaattcctttgactacgagtagggggcgagcgagtgctgtcccaagccagaagaatgggtgtcccaggctggcccttctggcatcattagggttatttgttaggccaataagtgtttgcaaagtaacttaatgtccaataggtaaacaacaactcttacccataactctctgtctttggtagagagggcaaatgtcgcacatttaggaaatcaagaaa

SEQ ID NO: 3012 - DNA, 600 bp, Bovine  MMBT19827
ttaatctccagttcacaggaaaggaaactgaagcgtggagacccagcaggaagaggtggcacagaacctcagaccttttgctttcaacagatctttttgaaagagaaagggaagggggaaagcaaagctgactgacttgtgaagcagaggtgttaagaaacctgggtgccaaccccaaggctcccccggaactgcggtgatgagctgctgacggcagaaagcccctttctgagaggcaggaatagggcccaaagcaggggggcccaggaagcccacctattatcctcctcctccaaggaytgcatcctcccttaaggaaggtaaccgtcctgtgtacatttcaaggaggaaagaaaaaraaaaaaaaacaaaactgtttcctttggaaactaaacactggctctgccaatccaacttcactgaggtcatttgagaactgaggagttcaaaggttctctacagcttcgatttactttggcataagatttaacagaaaaagaactaaaggagaatttatatggcccaggctgttttccaaatcgcaaactgctaaagttatttagaatttactttaacttgcaatcacatgtaaagtggctc

SEQ ID NO: 3013 - DNA, 600 bp, Bovine  MMBT19841
atggactgtagcccatcaggctcctctgtccatgaaattctctaggtaagaatactggagtgggttactgagccattcccttctccaggggatcttatcaacccagagattgaacttgagtctcctgcattgcaggcaaattctatgtctaccatctgagccaccagggaagcccacyggaaaatgagtcatgatcatatatgcagtcgtcactcaaccccccctcctcttcaattacctgctgactctggacttagctccatgaaaactgtgaagtcagtcaatttttttaatgtgttmttccactccccttttcaaccaccattgyccctaytctyattcttttctcatatcaggataccttgtgagtctctaggtattcagtttcatctccatctcccatcttgtgcttccttcactktattctccctgctgttgcatgtgaaagatattattaggtgataygtaaatatcagaaattgttatcctttctaaggaaaaaaaaaaactctactggtggacttacatttatataaagtagactagcagatgataattttggcagcaagcaatattacacgtgtctcttatccaaacaga

SEQ ID NO: 3014 - DNA, 600 bp, Bovine  MMBT19855
ggagggggagctcctgcctgggttttttctacaccctacttgcttgctctgctcaagccaccaactgtagacagcaccagtcctgggcaaagaccaggcagaaagggtcatgactttagatgcaattataaataaaaattcttacaccaaacctgaattttagcaaagacaagaatccacagagtatgatgtagtcatagaaaatgaaaaacacatcttgcccagagataacgtagatcctcgctgccttctacataaaccaatgataactgataagagatttagcatttcctcagactsaggtacatatagaggtacatctcctcacagaartgctatcaagcccagggttcggatcagcttggaaccacctcaatcataccatgttcctgtacgtgctcctggcttgtgygtcatgggtcttggaaagccattctgccccgatgaagataatcagtgggtctacccaggacaatcacacrgcagtctgtgctgagattgagaaagaactcatggctgacaacgttacatacaaggtaagtctgggtcttcatcaaatatcactttactctcagtggccctctgtgtttctaaccaact

SEQ ID NO: 3015 - DNA, 600 bp, Bovine  MMBT19856
agcaaagtgaagaactcaaaaggataagttgacaattccccccaaagcaacaaattccatcagacctatgtttggtgccttccaacccataggacaattgtgacagtgaaagcattccttggccctgtggccatccacactctgaagatatgtcaagagcctaactgggcaagtgcaccctgagccagatctctgcaccagggttcttcagcacgggagtttctagagcagtgctggttgtatgtgctgctttggacgtgctactgccatcatcatttctgtgcacagcagacctactckgagcacgctccaatgttacctgtaaccagattttggccaaactttaaagagaacaaccaataagaaaaataacaccatttatattcaagtcaatatagtcagagatgggaaacagcagtaaaaagctattcaatgtttccactcacatatgaattggtgaggtaacacatggcttctagggttggggatatgggatctttcttctgcagtgcctctaaatgtgatggaactacaagctgggtaggaattactacaattcaaacaagctaataaagttttacatacaactcttttcagcaa

SEQ ID NO: 3016 - DNA, 600 bp, Bovine  MMBT20734
tttgccttgtataacatttctcatgtttccataaaccatagtttaatatccttttggaagattaaaactagaagtcatttctagtgctaacaaatactttgattgagaggtataactgttctattgggtctcacaactyggcagctggtttcttcaattacactttttaagtagaacaaaactctgaaagcaagcaaacccttgactctgagtcctgcagtgggattggacatgctgtgctatctccccaaggcacatttccttaagcaaaagtgtgtctttgtagatggttacgtctgkttacttacaacatcatraacaattacattctcttttctggttcctataggccagctatctaaaattaagttaaaatatacacatttttgtaaagaaaacagacttgatttaaatagatcacgacaagtaatcattctttctgaaaaacatgctgcagtcggcatagtttcagtgaaacctcagcaagggtgtttcaagtgtcatgattttagttttactgaatttgaattgaatttatatatatatatatatatatatatatatatatatataaatgaatatatatatatatgaatatat

SEQ ID NO: 3017 - DNA, 600 bp, Bovine  MMBT20750
taataattgaaatctttttctcttattcttattcaattgagctctgtgtttgttatctgcagcatactaaaggtaggatctttctaattatgaggccagtatttctgtactattttcctcattgtttttccaastgtgccatgatagaaagtgttgacagaagatggagcaaagcmgagtccagtttatggctcagtggaattgcattatagcagtaatttctcatattggaatgtaaaagcaaagtatgactcagaatggactgagaagcagctgtctagcacagggaactcagcttgrtgctctgtgatgacctagagggttgggattggtggggagggagggaggctcaagagagaattgatgtatgtatacatatagcttattcatgatgttgtacagcagaaactaacacaacattgtaaagcaattattctccaattaaaaaaattaaaaaagaatattccaatagaaaaatgagctgagtaactttaatactgcatgtcagtatatattgtccttgtgactgtagacatcagtgggcaggtggtaggtaagaacacagtctctggagtgggcctgcctgactttgcatctggc

SEQ ID NO: 3018 - DNA, 600 bp, Bovine  MMBT21107
ggcagacgatggagtactcgaaaccccagccctgggacatcagcaaagagcgctgagaagcccaacaccttgagtataagcaacaccaagaaaaagaagaaaatccttatgagggtagagtgttacttgtttattaagcatccaacccagtcatctgggaccactgtataatctacataaccataaactattttaggtcatttggattggggacagggtgagatgtaaaacaaataaaatacaagagcttaccaagtgcccactggatgccaagcccagtactaggaactgagtcatcaycagcaaaaagtcagggtccacagagggacacagagatgctaacaaacagtgagatctgagtaagagtcattgtcacgctgtctgcaaagtgctgtgggagtagagagagggaaaatagaagactgggagttaggcagggatggctccacagagaaggtgagaggtgggtcttaaaggacatataggattcaccaggcagacagtgcaggggaacgtctstctggcacagggggccctgagttcaggcttcaggttggagcaygggctctgtggtgggcaaagaaaggatagtaaggaaca

SEQ ID NO: 3019 - DNA, 600 bp, Bovine  MMBT21143
gtttgtgtgcygcttgcacagcaagaccaaagaaaccaaaatgttggggtttggagcagagaaaggtttattgtaagggccaaggcaaggagaacaggcatctcaggctcagaaaacctgaactcccttcktggttttcagggaagagttttgaaaagcaatatttggaatgagggctacggggtgtatgcctttcttctgattggttggtggtcaggtaacaggctgctattaccggaatcgcaatcgtcagtctcctggttttgaccagtctgggcactcagcttgtagttaccatcrtcctgggtgggggttcttagtgcctgcagaagaactcaaaggtgtgaatcaggttgttaggtattccccttaagggggaactgggagtctgttttgtttgaggcactattgtttcttgactgcttgggctttgcttctgcatcccccactcccttaattagtaactgcttgaatctgccctttggaactcagggaaggtctaagaggctgaaacctttttttctacaaaaaaaaaaatcgacacagacacagaaatgcttttgtaccctggagagcccctgcagggccctgcttggtttc

SEQ ID NO: 3020 - DNA, 598 bp, Bovine  MMBT21864
  misc_feature (1)..(107): n is a, c, g, or t
nnnnnnnnnnnnnnnnnnnnnnnnnnnnnnnnnnnnnnnnnnnnnnnnnnnnnnnnnnnnnnnnnnnnnnnnnnnnnnnnnnnnnnnnnnnnnnnnnnnnnnnnnnncttttactaaaatatatatgcaattttaaacaaataataaaaacattaaaagcctcggagagaatcttgggctaaacatatttacattaaatgtgaggctcacagcaattcagaaacraaaagaaaagagaaacaaaaagaaaagcagcaatgtgatttataaattacttattatctaataaaaggaaatgcygggcttttaggaaaaaacctttccctcagcactgaactccaaggagaatttattgcttggagcattgtaacaaaagtcaaagtacagtcaaagttacagaggcagtacaraattagggaaacgggcactgaacggaagtcaagctagattctaatccacaaactgtgggacactcagcaagctattagactttttattctgtttcatcatcaataaaatggctagtttgtctccagcatcactgacgacacaggattatttcggtgtttataataaatcatacctggaacatagtaag

SEQ ID NO: 3021 - DNA, 600 bp, Bovine  MMBT22333
atcttattcactgtgatattctaatagtgaaaaagtaaaaatgaaaaaccaggaaactggtaaatccattacagctttccatatcatgaaatatttggttgtttagtcactaagttgtgtctggttcttctgtaatcgcatgtaccatatagcccaccaggcttctctgttcatgggatttcccagagaagaacactggagtgggttgctatttccttctccaggggatcttcctgacccctggaacaaacccatgcctcckacattggcaggtggactttttaccactgatccatcagsgaartccctagcagaccttaaaatgaaggttaattaacaagtctagatacatgcaccaaactgagcctttaatttcatgtcattatatgtacctgcaactctattttcaatgagcaggcatttttataattataaaaaaaaaaaaatcataaaaagtaatcataaccatattttgttggtggttattcatttatggccagtcacattaaaaawtttttttccattttattcagttactgggaaaaaagtctgaattttttttttttcagctacacaaatttgaatgtaggccaatcatct

SEQ ID NO: 3022 - DNA, 600 bp, Bovine  MMBT22786
ctgcttctaggtgagtggctgcctccctccagacctctgaaccttagcttctctgtccctgatcctcctcgatcctcaagaaaaaggtgggagcacaagaaggtgattctaggaaaagccaaaatgcaggaagaggcaccagtgagacacctgtgcccgaggtttgaggacacacacagcaccctgcctccagcttttgggccccgcrgagccatggcytcccaaatctcaccttggtaactttgccccagggactttctttttcctattgcctgccctcccacctgttacccttctccyaggcccagccctccaccttcagtattgcaacttcacactgattccttgccctgcatcctcaatgtctccatgccatgcatctgctrttccaaccacctggactatccctccccaacttggggcatcatggagggagggggtcactttagcaggtggtgtagggtagggagaatggagaaggtgaaggagatcttggagctgagatgtgctgttttgaggggtgctcctgctggagggaaacaggtacgcaaagaacagaaatggcagcaagaccacaggagacactaggagctgatgtgt

SEQ ID NO: 3023 - DNA, 598 bp, Bovine  MMBT22921
  misc_feature (1)..(216): n is a, c, g, or t
nnnnnnnnnnnnnnnnnnnnnnnnnnnnnnnnnnnnnnnnnnnnnnnnnnnnnnnnnnnnnnnnnnnnnnnnnnnnnnnnnnnnnnnnnnnnnnnnnnnnnnnnnnnnnnnnnnnnnnnnnnnnnnnnnnnnnnnnnnnnnnnnnnnnnnnnnnnnnnnnnnnnnnnnnnnnnnnnnnnnnnnnnnnnnnnnnnnnnnnnnnnnnnnnnnnnnnnnggctgggcttgaccttctttcagcctcacccctgatacttccactttaggcttttgctgtagttataacagactttgaactytrcctgagctttgcccagaactttgctcttgaccagcttattacccctttcaagtcattattcactatttcaccttttcaaagagacctactctgacctttaccaaatattttaattccctatatcctgccccagccttcagacttcaccatcacttatcttcttatctactaaatatggccttattatttgttacttttatggtttatctttcaccattagactataagctccatgagatccatgagacctttgatttgttcactgttgtatctcarycacctagaccattaccaggca

SEQ ID NO: 3024 - DNA, 600 bp, Bovine  MMBT22923
gttataacagactttgaactytrcctgagctttgcccagaactttgctcttgaccagcttattacccctttcaagtcattattcactatttcaccttttcaaagagacctactctgacctttaccaaatattttaattccctatatcctgccccagccttcagacttcaccatcacttatcttcttatctactaaatatggccttattatttgttacttttatggtttatctttcaccattagactataagctccatgagatccatgagacctttgatttgttcactgttgtatctcarycacctagaccattaccaggcacacagtaggtgctcagcaaatattcattgcactaaattgtgaacaatttgatttgccattttaactctcaaaatatggatgagattaacaaaggattaataataagtaaaaatgctgaacagttttactactggataaagaaaaacactctagcttcaaagtccttgttttccctcaaaacaagaacctgatagggcatattaagaaatggacacatgatttattcattaccatttgtagcaycttgactgagaaaattaaattgttttgtagatcctt

SEQ ID NO: 3025 - DNA, 413 bp, Bovine  MMBT09237
  misc_feature (1)..(4): n is a, c, g, or t
nnnntcctttaaaaawaaaagattttcaggattcttagttcagtatatagatgtagatatccrtggggtggcrtaagyagctttgtccattccaacagctcagcaggaaacactcatgatgctttatctcaaaactcatatagactgctctgctctagtactgaaaaatcacaccttcattctctttggaatgtaaggggtctctgggcctcaattcccacatggagtaacagtagctctgagtctggaaggatagagagaagcaaatttactcccatcagcctcatctgagctgtggccctgytcctccacctttgaggtggttcagtccccaggaaaattagctggtaggaggctcatagctgggccggctatgcagtaactactgtagtatttgactcatcacacaattt

SEQ ID NO: 3026 - DNA, 600 bp, Bovine  MMBT12459
ccttccaagaagtccgtgggcttccgtgggctacatgaccgccatggatgacaccagcagagagtgtaggggagggagttgtggaaccaggggagctggagggatggggctgggaactaggaagcgtcctcagagactgtgccagatgctgggagaacgtccttgggagctcagaggaggggacagggggaggagaggacttggcggagaggaagggggtcaagggaggcagaggatgcccaggtgagagaggagtcagcagaagcggggggtccgggggtcggctggaggctgttccasctgagagttggagcctggaccaggactcaygaggaacggctggacrtggatcccatacatggaccaccgacagctggactcagtgcagcttgggtgccacgctgcccactccccgctcactgctctcgccctggggtcttctccctggccaggccaaccttccaggtaagcagccctgggctctcccatctgctgatgagtccaccgaaggctcaggctccccagacgtggagagcagggtgaagggggatgggcgcccaggtcgggggaggcagaggcccctggtggctgcttctagga

SEQ ID NO: 3027 - DNA, 600 bp, Bovine  MMBT13309
aaaggctatggaaaaatagaactcttttgaagacttctttttggaatacttctcaaacactattaagaactgtgtttaactcatccccctctttttaaaatttgaaagatatttttccttctgtcttttttcttgatgtaatctctctcaagaaatgttcaacatctgtagccttttttctcaacaaatcttctttataaactgtgtccaatcctgtagtcatttttatcttaacatggaaataaaccactttgtcccctgaaaagtttacaagattgtacttgagggcttattatgamrgtatcgttatgtaagacagttctaattccctcataaatctaaatgtatagctatgctttttaaagactacattttctttcttttttataatcaataattttaaattatgccactcttgatctctggctcagctcagctcagctcagygcattcgctcggtcgtgtccaattctttgcgaccccatgaatcgcaggcctccctgtccatcatcaactccyggagttcactcaaactcatgtccattgagtcagtgatgccatccagccatctcatcctctgtcgtccccttcttctcctgc

SEQ ID NO: 3028 - DNA, 598 bp, Bovine  MMBT14256
  misc_feature (1)..(138): n is a, c, g, or t
nnnnnnnnnnnnnnnnnnnnnnnnnnnnnnnnnnnnnnnnnnnnnnnnnnnnnnnnnnnnnnnnnnnnnnnnnnnnnnnnnnnnnnnnnnnnnnnnnnnnnnnnnnnnnnnnnnnnnnnnnnnnnnnnnnnnnnnnnnaaacctaaaagcagcttgcctaggggtcagggtataataattatcctttatttgtacccctggcttttttttttttctgagcacccttgatgatgctagttcatgatcattgaatcaaattgaactgtaattttaaatgtcacactcaacctaatttaatgyagtaattaaaatgacatatagcttcatcatttttcactgttcaatttagataccctccctcattctcacttttactgaatgccttacacttgccactatgcttagcagacaggaggacactattgagaagttatcatgtgagattcttttcctcgggacatttacaatgttaatggggagagaagaaatgtatgcttaagatttttcaaaccactctcaaatttctgtacaagaataaagtctagagaattayatttttggtgtagatgagtttagtttagacagtgtcagttaaatg

SEQ ID NO: 3029 - DNA, 600 bp, Bovine  MMBT16775
aagtcaaattaagacacataaaaacacattcttcaagtgtgattcacaatccttaggaaacgactataattgatttacaacaaaccagctgtactgagaactcagcagccccaggtgattctgacagttgtgcttgagtaaatctgtgtgcaaaacacactattctggaattgtttactgccagattgttaaatccaaagatgaaacacgtggttaatggggaacgtttagcaaaaaggactggagaatgatgttgcttargtaaacattcatttaaacacattagtaaaaatgtcaggygcattaaaaacttatataaagaatttataaagctactgtgtgtttctaaaatgaatcttttccctctcctttggtaggtcctgctttgtttaagctttcttgtttttataaaatcctggcatacacagtgtactgtatctgaaaatgataaagtgtgcctctttggtacgcccttgtcaattacatgtgccttgtttcattagctacagctaattattagccctagtgttcgaggctatgaatttaaattgaggaaaatgagtggtcattttttatgatttccttctagtcatttcagat

SEQ ID NO: 3030 - DNA, 598 bp, Bovine  MMBT19821
  misc_feature (1)..(106): n is a, c, g, or t
nnnnnnnnnnnnnnnnnnnnnnnnnnnnnnnnnnnnnnnnnnnnnnnnnnnnnnnnnnnnnnnnnnnnnnnnnnnnnnnnnnnnnnnnnnnnnnnnnnnnnnnnnngccaaatgatgaaaatttaaatggaaacaaagggaagaatcacagacacccacttgtagatctcagaaaggacagctccttcatggtcttttgttctttgctccagctgtaagggaatcccaggtcaggtccgtaccacatgatgctgacagtggttcagtggccctgaattccctgagtcttctcagggatcrctgtgaaaactgcaacctttttgactttacggttttatttagtctcactccaaggagtggatccctttttctcactgacctgaaacaacccctctgcagctgtggtcttgagaaaaatcctccgtaaagtttctgacaaagacagaaatggaatcataaaagaatctgagatgttcccttgtctgaratcccaaagtctcctcagatggttgagtgagagccaagagtggagaatgaggggtcagtgtttgttctcagatctgagccaccctgcagccccacccaatggctttactcc

SEQ ID NO: 3031 - DNA, 600 bp, Bovine  MMBT08099
tgcactagacatcacagattctcctaacgagttcactcctttcaggagtttagagtctcagaatctgtagaatgtatttcaagaaaaaatttgtggtgagtttttggtatatatgcatttctgtgcatcagtattctttaaaatgtcataaaatgaatggcaccacacgtgaaaattctgtttccaaatggaatattcatttttaatgttaagttttgaaagttaactccaatgtccttctgctaatctctcagtttggttcgttattagacttcaaatcactgtcactgggcaagcagygaacatggaataattatttcatatttttctttctccctctctatcatctttaaatccacaatatctcaatccaactgatgtccgtaaatccaggctgtcgcaacttttctctaaaactcttaaaactatttgaatgaggtgttgagcagctgtcagttatggatttgaaaataaaaagagcctgaaaattgtacgttcagtataaaaagattaggtgaagcaattcagaatgtttaagaactttaaatcaagttaaaagcagttactatggccagatctcatgaagctctgcttaagagc

SEQ ID NO: 3032 - DNA, 598 bp, Bovine  MMBT12581
  misc_feature (1)..(147): n is a, c, g, or t
nnnnnnnnnnnnnnnnnnnnnnnnnnnnnnnnnnnnnnnnnnnnnnnnnnnnnnnnnnnnnnnnnnnnnnnnnnnnnnnnnnnnnnnnnnnnnnnnnnnnnnnnnnnnnnnnnnnnnnnnnnnnnnnnnnnnnnnnnnnnnnnnnnntgatagttttcaagattgaataccatgcttattccagtgaccacacactatagtcagtcaacaagttaagcactaagcttttctaggagtaacataggacatgcttgttacttcaaatgacggatttcagtgacttgaaaccaagaggaaaamatgaaagtcatggttcagaataactgtgctgaagttaggagcagaatcctggtgtacactamtagtgtggcagataaaatagttctaaggaacagctgtagggtaatggaaagggctatgatgaatataattctgttgsgatgaagctcaggtactgcaggaataaatgccaatatttttccatacaggattaattacatggtcaacagctggaatttacaaggaggtgtattaaataaaatagcaggcaagcttgaactgcattcccacaaaagccataaaatgggaataccaagag

SEQ ID NO: 3033 - DNA, 600 bp, Bovine  MMBT18387
agctttcactgcaagaggacatgggtttgatccctgatcagggaaccaagattccatgtgctgctgagtgtggtatcctcttccccaagaaaaaaacttgagccttactaacattaacagttgtaagttgtaaaaattatttgcatttcatctgttttctgttaacaggtaattactgttttcaaatattaatactataatcaaggcagagttcttaacttaggctaagccatcatcattcttatattaaatacaaccctgattcatgctaatctgctaacttgctaattgctcttcctrtgtgaacactggcttatgtttgatcttcggcaaatagatawgtctcattattactgctaaaaattaaatgttaggtaacttgacatgtagataatgttgccagcttattcaagtaaacatcagttttcycctcaataaagtcaagatctttcaaacccagtgtaaaagcagatttatatttataattatttatagattgtttccatactgtttcatttccctgagaagatgttgtagtataatactcaacacagcacagtattaaytgatccattttcagctggacaaacatcttttgtg

SEQ ID NO: 3034 - DNA, 600 bp, Bovine  MMBT19682
cacatctccagcatctgggaggatggtttactacacaggatgaaataataattcagctctgtattgacaagccaggcagtatatacttccttgccatgaaggggtgtgaatactgtgccgcattatttaaatagtaggtatctcagcagacgcacaaatctaaatgggcttagtccacgtccgtgtgacggacaagcacacggtccaggctgcgtggcctcaattgaccaaagaacaattgagtccgtgtttttgaatgtggatcaatggcacgccattgatggcgtcggctgagcagcrgttgagcctgtcacttgagtcgagggccagcatagctcagtttaaaatgacagtaagtgaccaccccgtgtcagccccgtgaagccctcctgaaaaatacaccatgaactgcagccctgtctgccctccgctttcagtgataatacaagacagcgcaagaaagaaatcagaaagcaatcaattagagctgaaactctggaaatgttcgggaaagatgaatacatgccgagggttcagaaacaggagaaagtgcgagagtgtgtgcgacagggcagcgaggccggggccggcccttgtctt

SEQ ID NO: 3035 - DNA, 600 bp, Bovine  MMBT21520
tagctggggcatgtggaatctactttcctgacctgggattgaacccaggccctctgcactggaagcacgggcttttagccactggaccaccagggaagccctagacctgtgtcctttatgttctaaaacatagtctaggatgagagccagctggagagagcctggaacrtgatgaattatggacccagacatggaaggcctattgggcatcccccagtgcaagttctggaaggccacaggcaaccaaccgtccaggggcccatcaggcaacaggcctccacccacatgaggggatgaaaygaacatgacatcccctagctgaaatgttcctccaccctgaagccaccccttctcactcagatccccatcccagcatcgcttcctcggtcccctgggcccggcgacccctgctagaaactgcgcacagtcatggtcattccctgctgcacaagcagacaagggacgcctgcgtctcacctggtagaagcctacaagccaaggaccacccctgcctcattcagagtgaccagcacacagtaggcgctcagtaatagttgctgaatgatgaaatgattctacaaggcttttcacaggcagccc

SEQ ID NO: 3036 - DNA, 600 bp, Bovine  MMBT21740
accatgcttacacgctatgaggaacaaaagtaagatatgaaatggagagacatttggcctcagaacaataactccatcgatcgagttaaatgtattgactcagagagagagacagccaccctgtgtgaaatcatcatggttcctggcagccaataggagctcatggacccactcagctagctggagagaggctggtaaaccagatgtctcgagctccccgtctgtgtgtttaaaacatcccagaattatttgtgggtattgacagattgaaattcataggtatctctagcacagagctaytgtgggatgtttccaaattccccaagttaatctataactgaagatagaatttccatcacttcctctgtatggttgaaaagcctgttcatgagtccatatgtgtttctgggggggcgttttgacgacatttgctgagcattacaaatacttccactaatgttttctcgccgcatctcaaatagcaccagtaggaggcatctgggatgaaagcgtcatgcatctgtcaaacaacactcacaccagtgcgatgggcccacgtccttcaaacacgattacataactccaggttgaatttcaatc

SEQ ID NO: 3037 - DNA, 598 bp, Bovine  MMBT01231
  misc_feature (1)..(5): n is a, c, g, or t
nnnnnttttgtgttctctctcaattagacaaagacaaaagtcaaggtgggtctctcactctccctgagcagctcggtgtcctcagcaccggactcagttcccgtaggtgagactcactccaccccaggcatctctgtcaaccagatctctgttttcatgtgccccatgctaatattcctgctgtgctggacttcatcttaaactttaagcctggactttttcttttggctattttagttctcaattcctagtaaactttaagcctggacttttttttttttgactattttagttctcaawtcctgaacaccgactttcagataagtcttgattccgggttctccgggtcaaggacaacccccgcccgccctattacagccccagctacgacacgagacaggactcccccagccagcccccacttgcgctcggggctctcagacaggctccccacgaggctctttattcagagatgccgtggcaacagtccaggatccctgtggaaagagtgcctcttccagctttccttctgttcgtcactgctattcaattcaatgagaaattgttgttaactgctagcagagatgagtaattctct

SEQ ID NO: 3038 - DNA, 600 bp, Bovine  MMBT03413
tgagaccattttgatttttcaaatgtccaaagttttcaaatgttaattaaatagattatgcattgaagaaaaccaggattaagtgtttagtaacctcttatgatctattccaattagttaatttagcaatgagcacagtctcaaagggctagataattaaattttatagagaaccctatttatcattacttaacacttgtcacagtgttagtactttactcaaagttctttaattgtctttattattctaataaggttttaagactgaaatggatactttgcattgtttacttttttccmcaccagtttttagtaacttgraaaaaaaaaaagtcttcattgtccctcctaagcatttgaaatcactacaatggcctctatgctggaaaaaatattcccatctacacttacataagtgctgtttttagtccctaagttatgttccactcttctgcgacctcatagactggagcccaccaggctcctagtctatgggatttcccaggcaagaatactggagtgggattccactggaatccctggaaaaagatcccttctccaagggatcttcctgacctcaagaaatgaacccacgtctct

SEQ ID NO: 3039 - DNA, 598 bp, Bovine  MMBT03504
  misc_feature (1)..(30): n is a, c, g, or t
nnnnnnnnnnnnnnnnnnnnnnnnnnnnnngaagccctaaatgttcatttaacctccgaccttagtgtcatggaaacttgtggtcctctttcacccataacatccttgaaactgaaagttcttcctggccaggagattttcaattactttattgatcaaatccatttacaagacaatgagctactcatttgggcagtaaaaaaaagagaaaaagaaactaatcagatgtcctttgcctatatctaatgatttcacggatatgacagtaaaagcaagttacaagttgcctgaattctatayatttatttcatttgatgcaaagaagtaacattatataaaatttaataaatagcttaatttctgttaatactgacccatttatctcactgaattttaaaaatcataatgtttagagaattagccttccatttttgacttataaataaaataaattccatgaagctttctacttgaataactatttgcacagttattgccagatatgtcagaattggtataatattacactttcatgctcgctctcatttaatttacttctgaaatgaaaaatttgaacaagaaaatcagtgaactaaac

SEQ ID NO: 3040 - DNA, 600 bp, Bovine  MMBT03599
cttagactatttcactgcatttgtgcagcttgtacaataaggttttgctgacaacacactaagtccatccccacaaggtgtgtatagatatacatacatagacgtgattcatgtcctaaaaatgtatagatcctaagtggaagtcagagtaaagaagtgaatttggaggctctgaattgctccaactggctttctaacagcctaaattcactctattagttgtgaactactcacatatttaaggagtttatrtagattacctaagatgctaaaatctacccatatgttaataacttcacyttacttaaagagcaaagccccatcatgtaatatttttatatgagattgagaagatgtattttccttccgtgaatagagtatactcaaatagaccagctgatctgattgaccaaaccttccctttccagcacagggctttaaagatctatgatgcattttttttatctttctctggccacagattccaaatctggcactcttggagaactgcttggctattgtcatcgttataatctggagtgtctgagccagaaggaattgctctagattctccacatcaaaatatgatccagctacaca

SEQ ID NO: 3041 - DNA, 600 bp, Bovine  MMBT03962
ttgtgaccctgtggactgtagcccacccagctcctctgttcatagggttttccaggcaagaataccagagtgggttgccatttccttctccaccaagctgataatgaggtaaaaagaaataaaagcattgctcaagaatctgggcttgtattaaaacttgaataaaagggaagggcttggtgctgttatgcctcatttgggcactgacttgtaccctaacttccaagaagtctgaaacttctagacaatgtcgctgagaagacccaggaacccaggagcacaggactcttctcccaacgygaggtctcctggcagacagaggagctgggctctcctccgtctccaggctcagtccttgctctcttcagaaaacctgcttctcctgattcctgcagctggrgctctccccaccgccctccgccaccgagcaggagaagcggtcctctgtgtggcctacagggaaccctgtgtgtgtgttgagggggtgctgggcggagctgccccttgcttcctgcagcccaggtgtctcaccagcccccacccgcctcccggggtcttgtccccagactccagcccacggggtgtccttccccagacata

SEQ ID NO: 3042 - DNA, 600 bp, Bovine  MMBT05845
gaaataagtatttgggtcaagattaaattcctctagggaagatgaagtataaatgccttctctaactttagcagttagttcattggtagtagataatgtttactataatgttttcagtagatttaactgtactattttgatgttttgttttggaaaactcttaaaataacagttgcagcattgtctatcatgaaaaaatagaaataatctcaatgttccaataatatgagaatgactaataatactataaccattccatatatcattcagtcttttaaaattgtaattatggagacagtsttgcaaaagaaaacaatccttttgacaaaatattatgtagagaacaggaatagaaaattatatacatgtgatggcaacagcaactcaaggtatttatgtacaagtagattttatgtaaaagtgaatagtttaataagagaagaatgggattaccctgattttcagatttcctataatgctatgttatcatgatgaaagattagaaatcagtgtagaagtcttaggaactgctctccttagggctctcatgtgtgtgtatgatgattgaccagcaagcattggtattttctttcagttgct

SEQ ID NO: 3043 - DNA, 600 bp, Bovine  MMBT08136
attgctgaaaaccaaacacagaacctcatactgtgtatctacaattagaaaagaataggacattataagttagaatgataaatgtagggatacagagcctctaaattctgaagagtctcctttgctggtgggagattcttcccatccccataataatttaatttgaccatacttaatttctttatacacactgctttgatagttgtggtaaataawaccaaatatgagacacgtatgcatatactgcccttaaagagctgaatcttcttgggaggataagaaatacatacttggaaaagkaataagaataaaaagcaaggtatgactatcagggcttaggatgtaaataagaatgattgggaataacatacttgaactgcccctttaaatagatttaaaatgaaaggattttagaactgaaagcaattaacataatatctaatgtaactccatttaataactgagaaaacaaacaaagagaaacttaacttgtccaaattatgatagcaacttactgggaacagaactctggtctcctgatttctgactctttgctgtttcctttgcaaccactgcctttgtgactgctaaaaaaaaaaa

SEQ ID NO: 3044 - DNA, 600 bp, Bovine  MMBT09344
tggggccaggcgtctattcaccctgggctcagggactccatagtcctggagtagaagggtaggatgggggctgctggaaggctgggggctgctggaaggctaggggctggctggagggctggctgggagccaggaaaagaagtgctaacagtaatcgaccctttctttagtgggcactggttctggaatctcgatgttttttcccgtgggttcaagctgaactctcagtctctcctgggcttttaggggctcagagtgcaaacaccttcctgtaggaccgggagggacactcgctggagygctcggtaggccctaggcatcggagtcggattcccaggctcgcaccaccgagctgagctctcagaggggttcctgggcactctctctcctcgggtcctgaggcaggagaggtgaggccactggggagcccgctctggcaccctgggagcctgaaagtcatgcctcagaccagagcatctctctctcatccttttcctagtgatctgagtgaagacctgtcatgctgaggagacgggccttcgaagggaacacggggcrccaggcgggcgcaggacagagctgatgtgcccttctgtgctt

SEQ ID NO: 3045 - DNA, 599 bp, Bovine  MMBT09720
  misc_feature (1)..(29): n is a, c, g, or t
nnnnnnnnnnnnnnnnnnnnnnnnnnnnnctccccttccaaaaatatcccagtcttattcagcttgctggtgacagcaaaaaggaggggaccagtgtctagaggaggctgagaaaggacaagtgggggacgctgacaagccctgcctgagctggcgaaggccctttacaaatgagccagggtgtcctagaaacagagtgcaggcaggggygggggcaggggcatgcgggtatgtgtgggaggggtgaggtcagggcagagtggagagaagcaggaattggataagaggaggctggtaacaygcaggccagggaggcaggcgaggacctgcagggatgtgcacacagcccaagtgggaggaactgagcatctctcatggcrggtgggctggggtcacagaggggaggagagggtgcagggaacagagtctatggctatggagtagaggactagcccttgcaaatgggytcagaggaccaacttgagggttttagtaacactgaaggatttgycaagcagacctgccagcattatctccctgcctcccttctgcttgaccgtggccaggcatccrctttcaggcagaaaccctgcctatct

SEQ ID NO: 3046 - DNA, 600 bp, Bovine  MMBT10519
ttattttgcctgaacaggtggcctcctctcttcaaaataaaataaaaaacctaaaggaatcccaagaacttatgaatcatcattttattgtttctatcatttttaaaatcttaactatttattctccaccatggatctaaccatccaggtatcaaatagtagaaatagatcacaagctgaaaaatgtcaacaaatgtaaatgctacctcgaagcttatctgctttaaacaatttctgataaacacacacgcagaagaattttcagagaaactaaatctcaccccacaatactgctcctcrttaaagatctgaggaggcagcggaatcccattctgaggtttcttctctccgggaacattttctctcatccacttcctgttgtcttcatctccagcaatatcgaactccttaaaatcgattttattagcttccaaaaagcccacaacttcttgctgtttcttcctaatctagtcatgagaagaaaaggattaccgttagactgttttgtaaaaacccattctccaactataccatacaataccaataactttgctaagtatttaaacaagaaaaatcataaaatcacacttcttcatttaa

SEQ ID NO: 3047 - DNA, 600 bp, Bovine  MMBT10776
aaaaagttaaacataaaattatcaaataagccagcaattccactcctaggtatatacttgagagaattgaaacatatgttcacagataagcacatatatcaatgttcatagctgaattatttataatagcaaaaaggggaataaatacaaatctcttctgctgcatagaccacatttatccatataatggaatactactcagtcataaaaagaaacaaagtagtgatacatgcaacatggatgaatcttgaaaacactgctatgaaagaatccaggcacaaaagggcaaatattgtatgrttccattggtatgaaatgtgcagaatcagtcaatccatagagacagaaagaaattaagagttttccagacatcggggagagaaggttgggaaggcctgctagtaggcatggggtttcatttggggatgatggaaatgatccagaatttattagtgaagagtcttcataccttgtaaatatactaaaacccactggacttaacattaaaatgttgaattttatatgaattcgtagtaaaaaattgcaaagaataaagtgaaggaattacacaggatagacattttccttacactgaaaaat

SEQ ID NO: 3048 - DNA, 600 bp, Bovine  MMBT11458
gctggggaaatgtgatggtcagcagaacctcacgagacagaggccagcttccggttggcttctccaggaagcagatgctgtctgcctttcccagccctgactctgcagtggcctggtctggagccaggagctgggagcctctgatgaaccagcagctcccaagtggctgcagggtcatatcaggggacaatcgctcacccctcagccccttccactcccctctccagtcctggacacacaggtaaggtaccccttgttcattcatgcatccaatacaacatgccaggctgtctaggctcrgggaacctagccatgaacaaggctcctgttctcaaggagcttgtattctactcyaagtcggggtgtgtggtggggagacagaagattaaccagtgaaagaataattgtgtgcattctcagtcacttcagtcrtgtctgactctgtgtgacccctgggactgtagcctgccaagctcctctgtccatgggattctctaggcaagaatactggggtgggttgccatatgcttctccaaaggatcttcccaaccctgggatagaacctgtgtctcttgtgtcccctgcattggcaggcaggct

SEQ ID NO: 3049 - DNA, 600 bp, Bovine  MMBT14736
gattatactgacaggaaacttgtgttgtctaaattctggaaaagatacatacaacttgaaagaaatattaattttcatccagtcaagtaattcctcagaaggaggaatagctagtctgtygggtcttgtgacttcagtggtgcctttgtaatctagactgtcaaggccaggagattactgtcattttgcattttgtgtattttgaggagttttaytccattttcattctcaattcctttccatttcataagccacaactaattatcttaaccatttccactagtaagaactgrttgtrgytgtggtgttacagatcttgcctgttttctttccaaatttcttatccacatgcttcacgatagtctctcgcctcttctttttgcccccattctctcgttttttgacttctgaggactccttgatgacgatggaaaacagagtctctgcctcacattgtgaaatgtgcatgacttagctactattccaacaaacatttctcagacagtgtgggccggaagtaatttttttttttttaaccaaccgaatctcctttaagctacctggaagttgggggcagcacaacatacgtgtcttgtggca

SEQ ID NO: 3050 - DNA, 600 bp, Bovine  MMBT15783
catcaggtactaacttgccctaacttactaacagggctctacaatgtaagctttttataagattcacattaatttcagccttgcagatctggcacacgagagttatagcagctgcccatgatatgcatggaatttcatctggaaccatcagactgcaaagcccctctataaattcatcacagtatgaactacctattcgtcccaacacccaggattgccccagtttttgaaaggcaaaatcccacatcccagtaaaccccacagcctgggcaaacagggaccagtgtctgttcctcaayrtttcaactgagcaactcagttcaccttaggaaaccaatgggcacacagccctccatctctaggccaaggccacaaggccaggtgagtgagcagagggccaggtgtaacacgatggggaaggggacagacagactggacagtaaatgaccctgcctaaggcattagaattaacaaacctgaccgaggttcctaatgctctcatcctctgagatctcatttatctttctcgtcacttttctctcatttctacattatgaacttttattctaaaatggattcgcttttgtaacttctatcaga

SEQ ID NO: 3051 - DNA, 601 bp, Bovine  MMBT16538
  misc_feature (1)..(1): n is a, c, g, or t
naaaaaaaaattcttwaattaaaaaamaatatgcattagtaatagtaataagactagatcaagcttcatcttcccctagttactactaatcctctcatcacctatggaaattgattacatttgattctagaacatctcttgaattattgtttgtaactaatacctatttttttatttatattttgttgctgttgttgtcattgacttaccatctcttagagttctgtttaacaggattgattttyaccacaaccaagaaagctaaaaagccttcaagaatccttgcccttcttctgtatcygtcacagcaagtaaagggttaccagggactgaagacttgctgaagcataaggcatctgaccttgtcaggaaccctcgggcttttgccagcacttctgctcrtctctgcacacagccctccatggaaaagtactgcccagactctatgaattattaatctcatcatgacatcaaatacccaatagataaaaggaaccagtggcctccacaacgagattctcagagaaagccaagagtctgtgatatccttttgaccacaatcaagattttttctgctcccccctggggaagaggacaacct

SEQ ID NO: 3052 - DNA, 600 bp, Bovine  MMBT17360
gacctaacagccactgctgtccccccttcactgctggaatgccgtgtccctattttcccagggccctttgttgctatggtgatcacaggacacagctctggccaatgagagggctctgggagtggcctccctcccagaaaaatggatgctggatgggggggtgccttcccagtctgcctttcctcctggagatgccagggctgctgagcagaacagagcagtgagaagatcccagtgcccccatgacaccactgagctccgaggcagcyttgcacagcctaacaccacatccttgtgagrtgaaaacaagcccttgtggtgccgctccttttgggcaggttttgagtgtggtccagggcatcctcactgatggagtcacatgggagaaccttcctccttttggagttgggaggaggtacagtcttgggaagaccttatccctgacactggcctggtcttcccacattcaaggtgtacatatcacagtattgattgtgagcctgtctcctccacgccttgagctctggacatcagggaccacatctcactcctccaagatctttagaggctgacccaaggctcgtacaaaggagtggacac

SEQ ID NO: 3053 - DNA, 600 bp, Bovine  MMBT17394
aaaatgcaacaaaatttatgcagagaccaatgcagagctggcccaagaatgaatgacaactctcattcatattaagttagatataaatttaaaaatatataattaatacaatatatgccttataaatgacagaggctcaataactgacttgaatttaaaaactagagaaatcaggaattccctggcatttcagtggctagtactccacacttttactgccgagggcctcagttcaatatggttggggaactgagatcccagaagctacatgatatgccttaaaaaaaaaaaaaaagactraaaaaatcatcacttgmaaattttttcttccacttgtaggtaarccacctactgtcrtgatgagaatgaccacattacacagttttagaggttttactgcacaaataaccaatggggtatcagtcactacaaactaccgtcgtaacaaatttaaagtagctgaaaaaattagagcaggaaataaatacctaaggctttccagctgtcagcaaaatgctaacctgcttgaatattttctcggtgtctgttttaaaaacatgagggctgaggtactaaaatttgtgatccaaaactaaactt

SEQ ID NO: 3054 - DNA, 600 bp, Bovine  MMBT17905
gcgagcttcccaggactttaatttttgttacctttaacctgatttaaatgaagtcttcactttatgaacagtaatcatataaccagctcttctctgaatcctcttcctcctccccctccttttttggatacaactcctgtttttgctctgttgcaaacacttctcaaaaggraagcaacattgttctatatgcttttaaagtagctcaaagaccctaaattgaactctttcaaaactttagaaaacatccagagactatttaatttaggcaactgatattataaaaatcaggaataatcrttcaggcrttcaaacaaaagtttctccgtactaattaggcaaccattattctggggggcttgagtaactcgccagctgttgttaggctaaaacaggaaggaatttttgaacacttaggggtgtcttcttcttttaaaatgaacaagagaagagttggagtcaaaataataataataatgattgcttagtgctttgggcatagatttgtgtatccygttgccagggtgaaggcaataattgaatctatcccaaatctgagtgatggagtagtcagaaatgactctacgtgacagaagagcc

SEQ ID NO: 3055 - DNA, 600 bp, Bovine  MMBT18590
wgtacattttatactgtgtgttttatagtcaacagtggtaatgtaggaagtaatgtactgaagtatatcttcagtattgaatttattttttttctgtcttcttaattattctgcaaatgtcagtatgtttatgtggaggggtggtttatgtgtatatcatatgtgtagtctgggctgcacttaaagattcaggcacagaagaaattcccagaggggaaaaaaggtataattccacatctctcctttgatacctttccttgtcttgtagaacggttggtaatgacagttccagtgtgaaamcaatagctccgttacttttcttgactgactgaactcattctagtttcattgcagctctgcttttttttctttctcttctgctgaccttttcctcccccttacctcataactatatgtttaccttcatattccccagaaaaagataaactgtaggaagtctataattgaggggactcgtaaggaagatttttctaagttcattagagagtgctagatatgagaagagaattaccagtgttactgaaaacaaatgagcccagtaggctgccttggggagaaatagggcggsrggggtggggg

SEQ ID NO: 3056 - DNA, 600 bp, Bovine  MMBT19139
tggtctcataggaaaacgtcatcactgaaagccccttgtcacattcactgttcatttcctgggtgaagacgtgtctcttggctgcaacatgagacggaatgtagagcggctcactttgctttgttttgattctgttgactccgtggggcggtgccacactctgtgttgtgggcgtatctgaagcagaaggttctctgtaaatttctgttgaatgagtgctgatgtgtgctcacgttcctttcgtttattcgctgagaccagaaccttgcctggcttgcccttcctctctgtccgtcaatyctctctttatttccttccacatctccatctcctcgcagcaagggctttcagctctgggagcaatttggtgaagaggacctttctcaagaccaagagtgtaaggatgttgctctcgcctccccacctgtggggatctgctccctgttgcacccagacatcaggacaggggcacagccagaactgcccttgtcttcagagagcccaggacagaacacccatggagacacctcccaagtgccctctgaagtagggaccagcgctcctgcctggacaccagccttctgtcctgtgacacttcct

SEQ ID NO: 3057 - DNA, 601 bp, Bovine  MMBT19346
  misc_feature (1)..(1): n is a, c, g, or t
ntgatgctatattaaaaacatgttgtttaaaatgatttaacttgctaacatgtcatagaacctcatcaagctcataagaattatatagctcaaaatttaacctagtaattttctgatctgaaatcttccatcttttttaatgtttctcaaaaagatagaaaagctggaaaaaatttcatttgggtgggatgtcaggaagtaagattcaatcaaagactctagaatgttcaagataaaactgaagattaaactgttccaaaagctattttgagtaaaagataaacctttattttarcattgrtaatgggtagtttaaactgccttaaatgataacaaaacaagaggaaaacactttatacaagtctagaaggccatacttaaaactcattaaaatttgcttacagaatcttcatagatttttcaagctttaacaaaatgacaaggcacttctcgaataggccagatgactgaaaakgttattgagatagacctatctcataccttacaacataacactcatgatatatattattttattcttttagaaagtcaagacatacaaaatgattggcaggagttttttatcagaagaaaatctctt

SEQ ID NO: 3058 - DNA, 543 bp, Bovine  MMBT19700
  misc_feature (1)..(1): n is a, c, g, or t
ntgatgctatattaaaaacatgttgtttaaaatgatttaacttgctaacatgtcatagaacctcatcaagctcataagaattatatagctcaaaatttaacctagtaattttctgatctgaaatcttccatcttttttaatgtttctcaaaaagatagaaaagctggaaaaaatttcatttgggtgggatgtcaggaagtaagattcaatcaaagactctagaatgttcaagataaaactgaagattaaactgttccaaaagctattttgagtaaaagataaacctttattttarcattgycctgcctctgacgcgtgtgtttctgccggtgaagttttactgacggggccgcgtctgtgttggccccgggcacgctgcagtttccccgtcaatctggacgtgcctttcttcagctcaaatgataggaaataaagaaaaccagctccagatgtaagtgattttatgagcaaggggttaaggagttcaagaggatttcatattgttgggaagacagactcgcatggggtgaagcccatctgtgg

SEQ ID NO: 3059 - DNA, 600 bp, Bovine  MMBT23384
ttaggccrgcttatctacaaccagtgtgaggagatgaaatactgccagaaacaatgccgacgtctagggaaccgcgtccagagcctgctgcagcctctgcaaatgctccaggaccaaggagagaggaacctgcccccccagataactgccgcgctgagccgtttccaggatgccctagaggaagctaaggagcggatagacaagttcagcaataagtccaatatccagaagtttctaacagcagggcatgacagcataatctttggtggggtgaaccagaggctgagcgatgtctgggargagctctctctgctgctccaggtggatcagtggaggcatacttcaagcctcagcctaggagtgtcctggcaacaggaagatcaacaggatgcagaggaggacaggaaagctatccaaggactgagkggtgaggacttttttcaggtggggggatgcacatacaggtgtattcgtctcattttggaaaatcaggaaggttgaagtggttttgrcaggtatctgttgacragactcagaattycagacgtctgagtggagaggggtgcccaccatgaggctgcagccrgagtgtggatgtat

SEQ ID NO: 3060 - DNA, 600 bp, Bovine  MMBT01256
ggagggattgggggcaggaggagaaggggacgacagaggatgagatggctggatggcgtcactgactcgatgaacgtgagtctgagtgaactccgggagttggtgatggacagggaggcctggcgtgctgcgattcatggggtcgaaaagagctggacacgactgagcgactgaactgaactgactgactgataaaaggggaaacctggcccagagacagacacgcagagggaaggtgatgtgaagatacagggagaagatagccacctacaagccaagagacagtctaagctacggaarctaggcaagaggcctgtgaagagtttggtctctgctgagaaggaaagatggagaccctgggtactacagctggctccgatgatgtcatgacagccggtactgttcctgctgtcattacagcattttaacatttatttatttattttggttgcactgggtctttattgctgtatgtgggctttctctaggaagagtagttggggttattcttcctagtagcgcatgggattctcattgcgtggcttctctagttgcagagtagaggctctaggcaggcaggggtcagtaagtgtggcatgt

SEQ ID NO: 3061 - DNA, 600 bp, Bovine  MMBT02481
gcgaccccgtggactgcagcctaccaggctcctcagtccatgagattctccaggcaagaatacgggagtgggttgccatttccttctctaagggatcttcccgactcagggatcgaacctgggtctccctcrttgaaggcagatgctttaacctgtgagccaccagggttgatttgacctcaaagccctggaactccrtactcccatggatttatagagctattgattatrtttataaggaactgtctcctttaggtttctccaccattgttaatcatattgcagaaaatctgccttccyagtgttattgggtaaaatcatcatgtttagtgaaataatcttgaaatgaccaaccctatgttttattcttaaagcaataggaggtagatgtacagacctgacttagactaatgtagtcacaggttctgaattcacactcagttattttcctttctgataactggctcatccaactaattcataatgatggtgtctgcttcatgaactctacctaacacaatcacagcacaagcaaatgtaaaagaaatgtgagtttttaatgtaactgtccaccctcttttgtcagaaatgtcttcattt

SEQ ID NO: 3062 - DNA, 600 bp, Bovine  MMBT02659
ccccagtgttcttgcctggagaatcccagggayggggaagcctggtgggctgccatctatggggttgcacagagtcggacacaactgaagcgacttagcagcagcagcagcagcaaacccatattgatasttatgatgytaaacacagaatttctaayaaaaaagaaaggaaggagtagttactgaacatstactttatatctagaagctaaaacatgttatctcatgcactgacataaaagagaaattatttccctcatattacagatgagggaagaagggtcatagagtaaaagatgygtcagtggccccacagttagttggcaacagaacttcagcttgaatgcacgtctaaattcgtgtttttgtgtctagcatcttcgtgaaaaatacactctatcccagacygtggaattgatgtcagagttttcatcgttcttctacagacagtcagtgcagtaaytggctgctgctatgtgctatcattacagaagtcactaaatctaaaagcgtatttttggcacagaatccttttccacttttatcacaattcaccaattttctatggttcatgttactggtgcagtgctttgcaatgct

SEQ ID NO: 3063 - DNA, 558 bp, Bovine  MMBT02663
ccccagtgttcttgcctggagaatcccagggayggggaagcctggtgggctgccatctatggggttgcacagagtcggacacaactgaagcgacttagcagcagcagcagcagcaaacccatattgatasttatgatgytaaacacagaatttctaayaaaaaagaaaggaaggagtagttactgaacatstactttatatctagaagctaaaacatgttatctcatgcactgacataaaagagaaattatttccctcatattacagatgagggaagaagggtcatagagtaaaagatgmactagcgtatctaaagggatggtgggwtgatagatggcatyttacaggttttgatatgtatagaggtttcaccaaggaatgtgaaccaaatccatctaaagaactcagagcttgccctgaggccttgaaagaactttctcctgttttcaatacctcctgctttccctgggaccactgtcagaatggtgaaaagccagactgcatttggagaaggaaaaaaaaaaaaaattacagacagtgagagtataaggaagtcat

SEQ ID NO: 3064 - DNA, 600 bp, Bovine  MMBT03178
tgctcaggaacctcacagagcacccccgcccaaagtccgaagtagcctggggcaggctgaccccacctcccaccccagcctccttaatgatgcctcacactcagagagggtcctccaccctgggcccctaacaggcagaggttgaaggacaccagggttggaagacagggctgccacggccccagggactggacttgtgtcagggacatctcacgaagggctctatcagcctctaagccccagggtcacaccaagctagggccttctcagctcggggcctgagcctggactctgcccatmtacagccagccccagtggggaggcctggggccctagggggcagcctcttgagtcccacctgcccctgatggccacattctcctgccagcctggcctgtgtgattcaggccaactccctaaccctgttgggaccctcaaagtatgtgagaccccaatgtgggtagcaccccaaattcaggttctgctggccattgactgggaactcaggacaactggctgaaactgaccagactgtgcttgaggctctagaagctggagcctggtacatatggggcccgttcaggaaggcttcagaggagg

SEQ ID NO: 3065 - DNA, 600 bp, Bovine  MMBT05247
caaggaaaatcccatgggcagaggagcatggcaggctgcagtacatgggttctcaaagagtcgacatgactgagcatgcacgtgtgcagcagggctggggaatggacagtagaaggaaagtcactaagggggaaagctaagaatatgggattcttgctaaaccaagcaagcattgacaggattctggctaaaagcaggccagggtgatcacggttcaactggaggatgaggaatttgatcagatattaagaattctttctgaactaatttagcagaattcttattaaaactgggttctayaaggacagagacggaagcagagggctcaggggagcctgaccaaagtttggcaaggagagaatctttgtttcatgcattgtgatttaatattcacataaatcttcttaggtgagcttatcattatcatcactgtgcttaggaaaacaggcttaagagtgctcaagtgacttagtttagggtagacagggtgtaatgtggaggcaccagatcagctcaggtttatatgaatcaaggtccactgctgattatatatacttcactgtgttgcccagaaaactcaaatgcttctcaccaaggtga

SEQ ID NO: 3066 - DNA, 600 bp, Bovine  MMBT07547
ccaaaattagataacttagatcctgcgattaagatatatttacctgatctattagtttaaactttatatataccttttattttatawttgtaaatagcrtttccttttagagattccaaaggaacaagtctgagcagttaactcctccttctctaggacgtttggctaaatcatgattctgcaacacactgcagacatcttttctgtccgttttacttgctactaccattgctgcttggtctttcttatttttggttctggattatttgacttaacagtattcaataattacttttcttyactatacagatgaaataaatacctatctgtactttatacagacatatagttaaatgaagcaagttattcagctatattaggatatcactacttaaagaaaataataamaaattaaatataatccatatttactttcatatcactaccagtttgtccatacttgatatttttttctcttgagtaccattaaggaactcattgtactgcaaaatatttatatattttaactaaccataattattattgatgctctaattgttacagccatgtcaygctggttcatttttgtcctttttttcc

SEQ ID NO: 3067 - DNA, 598 bp, Bovine  MMBT09383
  misc_feature (1)..(22): n is a, c, g, or t
nnnnnnnnnnnnnnnnnnnnnnataattttttccattctgactaatatcacatcctgcaactgcaggcaagaggtgaacatctgccaataaacacagaaaaagtcaaaagctaactcatattctccagaactattaaaaagaaaacatctccaagtagstttccttcaaaaaattgcacttatgtmtcaatataactcataaactgcctattctgaaaggaaaactgtattgcaaacttccagatcttagtaactgtaagaaagtcaaggtttaaaataaatgcaaacccaaatactgtyggttgttttacattattactcattttatgaattcaaaacatgtaagtctctaaactatgcggtcagcatgaccagatgagaggcgtcaggcctttggaagaaaaaggccactctcgcaaatcacatctgcagaatcagaagtcagagtaaatgaatcttcgggaaaatcatgaaagtatcaccgtgacctgtattaacccttttctttgggtcccaaacgccatcattaactaaaatttcaggaccaaagtacaaaggtaaatttaaaagctaagagaaaaggtaatgagagagaact

SEQ ID NO: 3068 - DNA, 600 bp, Bovine  MMBT09743
gcagtggaccgtgggcaggacgtgttggcaggctttgctccagaattagatttttaaagaattactttcacagacattgcaactcaagtccagggaccttacaaaaccaattttattagaaacagcatttacaaagataactatttgatgcagtgttgtagctgatttaatgcactcagaaagaaagaacactttttccttattttgctgaagttagaagagcctacagtttcaagtcaagagggtggaattccatgtgcaaacacagacaggagaaagaaaaatttacaacttataatrtgggagaaggggagtagaataggactagtaataagtggaatattagtcatgtaatgttttaaatttccattagttgtacaaatattttgtggttattttttaaaccagaaacatttttcaaatgttttgtatagacagaaaaataagaaatgcattagcgttattaagtagcaggacttccctggtggcttagatggtgaagaatctgcctgcgatgtgggaggcctgggttcgatccctgggtcagaaagatcccctggagaagggaataggtacccactccagtattcttgcctggag

SEQ ID NO: 3069 - DNA, 600 bp, Bovine  MMBT10030
ctttacaaccagaatgaaatggcttcacattaatggatttgccatcaaaagaattgctcaaaatgtgcaaaaccaggtaaactggatccatgaaaaaatttgtaattatactctttcttatttttactacatattacacttggcactgtgagaaacattttaaaagtatgaaatgtgacccttttttgtctcagaaatttaaggaccagattcacatatgaaagaaatacactcttaaaaggtataatatatagcttataaaatatgaatatttttctccatgaatgcaactaagttttraataaatactggactttatgggcttcccagtggctcagtggtaaggaatccacctgcaatgcaggagacttggggatgcagatttgattcttagttctggaagatctcctggagtgtgaaatagcagtccaatccagtaatcgtgcctggaatattccatggaaagaaaaccctggtgggatacagtccatgrtatctcaaagaagtgaacatgactgaattgacyaaaaacaatggtgacatttacatttgtaaatatgtaggaaaaaagtgaactctatggatagcaaatcattaagg

SEQ ID NO: 3070 - DNA, 600 bp, Bovine  MMBT12285
aggagggcatggcaacccactccagtgtttttgtctggagtatcccatggacagagtagcctattaggctaagtccatagggtagcaaagaattggacatgactgaagtgacttagcaagcacacatcctgctgtatataacttcaataaagctctttcaaccatttcctcatcaaagagtccattacattttgggtctagccaatcttgcagattccccaggagacctaagtttcatcatggaaagagtcaataatgtgttccaaggttcagaacctcaatttttacccaaggtcccargaacaatttcttgtgactcctatgacttccatttacttgtgacttgggaatcagagaaccaagttcaaactctttctaaacttattctctcaaaatattttcyggacagatccagatgtgaagtccaaaatctttaagatatgtttttccttttaatgttaaatttcaagrcttgaaaaattatttcttaattagccatgttattagaaagatatamttaagagagtaatacaaaagagcagaaaactccaaaataattttatttttcttcatccctagcaacctatttttatgtttgaa

SEQ ID NO: 3071 - DNA, 600 bp, Bovine  MMBT13541
gaagaggagaaaaagaactcttggtctcagtcccatttctcaactccattcgccttccgacttccaaagccttgccctgcttccctcccacccagctctcatccactccagcctccaagcctgtctgcaccacaaccactgcccctggggtggctactcttcactgtgtgcggaccaaggcctcccyttcatgctcagctgcaagaaacacacaagggcctcaaatgcttgaaggagggaaattgccccaggtgggagccctgtgagcaagccaaggggcttggtttcctattaagtgcrgggaaggagtggcagttaaacaccgagcttcaaagagtctagcattttcaaaacttgcttttggggaatatgcagcttttattggaggtgtcagacattaatgagagttctggatgttcccagcctgaagagccctctccctctcttctcttcccccaccccttctaacaactagatagcccctccttgatgaatcaagagaggctcagcctttaaggggtattcctgtcccatggctcagcccacttccccacccccccccatcacctctgtaataaggggtggaagctgagaggatgc

SEQ ID NO: 3072 - DNA, 601 bp, Bovine  MMBT13773
  misc_feature (1)..(1): n is a, c, g, or t
naccctgagaatgccattcctcccaccaaggagaagtgtgattgcttgcatatgccatctgcttacaaaccccagtgagctgaaattctcccccaaaaggtttatgtaagccccctgtgaactcaaaccactatgctttgctcagctcaaataaacatcgaaraagtatctaagcatttgaacttataataacatatttatcccaacacatgaggctactcatcattggtgtgtgtgtaatatataattgcagcatgcagaaaacaaacagctctcgatcagagaagtctctggatcccayggggcactaatcatctaccaaaaatagagatggttggggaaaataacttataattgcattggcaatccactattaaagtataatttcatgttgttttcatttctagcaaataaataataaaaaactgatttgaaaaaattgcttattgcacttaccagcagactccaacatgaaatctagaaattgagtatgtatacatattttcataagtgtgcatttaaaaaatctaagaaaaaatatgcacacacatatatatgaacttgaactcttaatttataaataaaatttagtttatattca

SEQ ID NO: 3073 - DNA, 600 bp, Bovine  MMBT14221
tcttgcctggagaatgccatgggcagaggagcctggcggactgcagtccatagggtcgaattgcaaagggtcacaaacaccactgaagcgacttagcactcatgcagagctcccctcctttcaactaggtcctctacccatmggcaagcactgacctactcaaagggatctaaccagaagcctcacctgggactttcttaaaaatgcaaattcttgggtcttwtgccagcctaataaatctgaaattctcagaatggagctcagctatctgttttgtttctctttttgttaatcaaagtrtaactgattaatataacagttatattaatatacaatgttataaacaattaagataaacaatggtatgttaatttgagggcacatcatcgtgattcagtatttttacagtaatattttaactagcctcccaggtgattctgatgctggatgaagtttragtccccatttgcttagcatacaaatggacttagtccaaatattttagccactttgaacccaaacaagtttttatcaaattaattgacggcagcagkcaggtgaatctatggacctactgattcctgtggccttaccagaaat

SEQ ID NO: 3074 - DNA, 600 bp, Bovine  MMBT17043
tagttacctagtagcgtagtaagttctcacaatggtccggctgtggagacttgctcctcctcggcacgcatcgtcatagatgtccggatcacggagtttccacctggggaggtagttcatgttgcattccttgccagtccttcccgttcagctccctcttccagtcttggggaaacctagagaactatttggacgtttggtctctgtctctgctaccttctgaagagatgctgtwttcagtagttacagtgctggctctggagcgtaggacgcctggctctgaaactccacctttgtcastttttagttaagacgattgggggattattttcataccttaatctcctcatctttggaacagttagatagcggtagaacctacttcatagaatgattgtgagaattaaatggattcctcacttaagrctcacagaagagggattagtcataaaaaaagtgctcaataattgttaatatttgtaataattatcaacaagaagctcatgcttccatgctcctcacaaatgaacctacataacttgcaatgatatggctccttatctcctttcatcttttcagaactctgtgatactaactcag

SEQ ID NO: 3075 - DNA, 600 bp, Bovine  MMBT18543
agagaggagagggttgatgagtggaggagggatgagtgggagacggattggtctgagcaaaaggtgtggtcccgctatgtcaggatggtgtgtgtgtgtgtgtyggggggtggtcaggcatgacccaggtggggaagcagactcatcgtgggacctcttgggcaggggtacaggctttggaggagggcagggtaggagtggcctgaaggcatcctttttgtctgcagttttcagaatcacgcatgcaccttatgaagtctatgtgctcctgagaccttcagatgctgccctggggctgckctctggggctctggcagagtcctctcggacctgggctgtgccccctttaccttccctcagagcaactctcccttgcaacagaagcttatgatgtaggagagtgagtcctgcctcttggcgtcttttccccactggcaacatcaaaggtaactgtaccctctccttccagttaatgcattttggactgagaagatagactgtagcaaaacagcgatgaagacaataacatctcgacagtracagcaacaratgccattttaagtgcttgtttcccaccaggtgctggtcagcactttacag

SEQ ID NO: 3076 - DNA, 543 bp, Bovine  MMBT18744
cccccgcggctgaatcccgccgccgagccgcagggctgagcacgccgacagcggaagtgaaacrccggaaacgaccttcgcgcatcggggaaaacggtgcgggctccttctcccgaggctgcaaggtctcttatgacgtggctacacccgaccgccactcgccacacggaccctcacttctaatctgaccagagcgtacataagccctgggtccagaggggccacatgtctgactccaaactggccacctcctgtgggcagcattggcagacgggcatctctgagcttcatttcttttamctgcaaatcagagatgagytcagcttccaaaaagttcagctgtaactctggtatagggaccaccagcccagctaggccagggctcagtactgagctgggtctcctggaacagcctaagctttgccttcagggccccagccaggactaccccaccctgcatcggatgacatagaagaactcccagtatgacactgtgtgattcttggtttccagcagtcagattcaaatccaccttaaaatgtc

SEQ ID NO: 3077 - DNA, 600 bp, Bovine  MMBT19245
tttgctctttggaaagacaaatgcagaggttaataacacccgggttgcctgctcctgagagcatctgcatcactaggacagtttgataatgagattttgtataaaagaaatggacattttttgagagaagtcatgatgtaaagtgtattcttagtaagacatataagagaagctgaaataaaatccttgtaaatttcagtggtgagactatttccagaattagagctctctaattaatgattttttggaacttgttttaatygaagtcctcatatgtcaactcataattttactgggacytataatttgcaaagtgcttttaaaatttacyckcctccccccaaatcctatataataaacaactaatttcttctgagataatttattcttagctcaggctaagaatgctgcttaaagttttatgaaacatctacaaacataacagatcatgcycattttcttagcttttattcttactttgttcccttggcctcaaatccataatttcctgagggcatttcagtgcactttaccttagagaaaaactagttaactacgtcctaatctcacgtcatgagaaattcacaaaccccttccagt

SEQ ID NO: 3078 - DNA, 600 bp, Bovine  MMBT20842
cctcagtgtttgtttagtcttcatattatgattcctgtccaagagctatttggataaaaatgaaaaggtcccaaacaaggtccttgaactcagatcactcccagggagcatatgatgcattgaaggtatgattatatcagtacttaaaggcatatgccaaaggaatggccygacaagaacccaaaacatggcaattcagccacatctgttcttgaaagcgcctgcagaatgaactttttaagaggtatcayctgtcaagattcctcgactgtccctctggaagctgtctctctggaaacktattccaaaggcaagcccaaggacctcagcattccagtctttgataaataagcccctctctctgatagcctcagcaacagataaatctgtccacccaaggacattttccaagcgggacgggctgtttmaactccttaccagattgcagctggcacccgccacgttgatttttccctctccttataatcataatgggatctcagcaataaagatggatttgttaatttccatccccttctcactttctcttttaatcactgtcgagcataaattaatttcagcttaaagagctttcaacaa

SEQ ID NO: 3079 - DNA, 600 bp, Bovine  MMBT20921
taccgggctgacttgatgggcaggtccacacggaatccctgaaaaaggaagctcaggagtgagtcagggactgcacacagcacgaatctggacagtcacagaaggaaatctgcaaagacagtgctagcaaactcccttccacacagacacacagaaatagaaacccttctctacttcataaccatggatactttgcagctcagcgtctactgaacaatggamcttttgcctaactagattctgaaatgctgacttgttagctactaatattcaaatggcatactcctcctttaagagcasaataaaaatccacaccccacttacttcaacaaagatggtatacgtacctgaaaatatataacaacagcgaacacgaaaactgtggcaatgaggttcatgagattgggcaaattctgacgatagaaagcctccctcagggctcggactttgtctgtcctggtggccagtaaatgaaagagagctatgactgcgccctcaaactccgtacctgatgaatcaagatagaaatcagctgcagcctcatcacccaaagttgtcccaaagtcaacaagcaaccctaaagctccagtacagggcrga

SEQ ID NO: 3080 - DNA, 598 bp, Bovine  MMBT22007
  misc_feature (1)..(152): n is a, c, g, or t
nnnnnnnnnnnnnnnnnnnnnnnnnnnnnnnnnnnnnnnnnnnnnnnnnnnnnnnnnnnnnnnnnnnnnnnnnnnnnnnnnnnnnnnnnnnnnnnnnnnnnnnnnnnnnnnnnnnnnnnnnnnnnnnnnnnnnnnnnnnnnnnnnnnnnnnncaagttttcatcaggttcattctaatttcaaaaaccagaaaactctggaatgagagaacccccaaatggcagtttaagatcttatttccaaaatcaggcttcaggataatccctcagctctattcatttgtgtgctggagaggggatygcttttggctgaggtcagtctagaaaactgtattcaaattgtgtggaagggaagcaaacatttygcaacaaatcaaatcaagcaatggccctctmagacaatcatgacgttaatgatgtatctgtcaattcacgtatatatataagtgtgtatatatatatactggttatgcatacatatatataaaatcaacagtattaaaatgtgtagtaacataataaaattaagatttcrccccaaacaaatggtagagtacaacatttctgcataaaattactaagaggaaaaaattcatact

SEQ ID NO: 3081 - DNA, 598 bp, Bovine  MMBT22645
  misc_feature (1)..(37): n is a, c, g, or t
nnnnnnnnnnnnnnnnnnnnnnnnnnnnnnnnnnnnnccgacccctccatgcccccatgccattcagtcacctgtcaggcagcatgagctaagcaggcgggggccagaaaccgctgcctcttttgcttctcccactttccagggttctgatatacccctcttccttccctctgtccctcccttctttccttcagataccttgctaaccctatggtacaggcatatattcactattgtaaggtatacmaaactacctttctcagacagatttagccccaccaccgtcttcccccatccatkggagcacacccctcacctgagtcttctactgcagtctttgaagttgccagtttcacaaaaagctgtgaggaccagaaaaaaaacaagaagaggaagtcaggaatgctgggccaggcttctaaaggcaaaacaggtttaaaagcaaagtctgtgaagagacaagttctaagtcatacttatgtttctcttgtaagttaatcactcaacttgctctttaatcttcctaaaacatatccctaccttctgattgctaacaatctttatccagatttcataaaattcaatttatwaaagaccc

SEQ ID NO: 3082 - DNA, 600 bp, Bovine  MMBT22738
atgatgacccctccctgtttgctcagtgcttagccgggcttaggcctgcaggggccacccccaggcgttggctaatgacctcacttccctcccaggtctccacaggacatctgtgtttgatcgcctcggcgctgagaccaaggcagacaccacaacggggaataaagtgagtggaaagtgggggagcccctggggcctctcaaagcttggtcttccctgagtgtcattcctggtgcttcctgcgtacacctcaccctgtctcacgtagctttccagtccagcgcccttgtctgtactccstgtctgtctgctaccctgatctctctcccgatttctagccccagggatctcgcagacccctggacagtgccctgggacccctcccaccagcatgtcccctaactggcctcgaatcttcctccaaagtacctcctcctcctgtatcgggggctccatgcccccgttccaggcaatcctgagtctgagggcaccatctgtctcctgtctgctgcctcgtcccattgggatgggcagtggccccctagctggtgtctgtgcagctccaggggaagccctccagccccttccccacagcagcag

SEQ ID NO: 3083 - DNA, 600 bp, Bovine  MMBT22976
gaaattcagacattggggttttgagataaatcatattaaatgacactctttagtatcaccagactgaactcacttgcattctaagggaacattttcaaagccagacataagtcagccaagccaggtttttctcccatttagttctactgaaaaaatacatcaagttctcttacaagtgctttcctggaagttaggtgggaaagaaaaatttttgtaataaattattgtgatattgcattgctracaggtaaatgatggaaactgggatggatttggtcctgtgtttgaaactaggtgatrggatctgcaatcatgcaaaaagcttgcaatcttgcagttgtgtggaacagcataataactaaggaggagagaaaatatctcaaagttcagcaccataaaacttaagtaaatgttaaaaggagtcaaacttttacttggccccattaccttggtgaaagaaagcttcatgcagccacctaattcaaatagaagagggatgggggaaggaggaaaaaatactttaacactcacaagaatagctcactgaagtagcaacatgactaagtgattgagatttatcaccagtgaaaatgttactta

SEQ ID NO: 3084 - DNA, 602 bp, Bovine  MMBT01288
  misc_feature (1)..(2): n is a, c, g, or t
nnctgcccaatgcaggaaatgtaagtgatgcggstttgatccctgggttggaaagatcccctggaagaagaaatggcaacccacttcagtattcttgcctggagaatccccacagacagagaagcctggtgggctatagtccatagggctgcmaagagtgggatggacatgactgagcacgaacacacacacactgcacaatccttcatctcagargtcacagtgtacacacagacctcacctggagtctcagatgtgcctggaccatgctatcctcatcctctatcctccatactctctayaccayacataggctcccaccygcctgtgaagtcttatgcctcagtttcttccactgcacccgacaaacatcccacccataggtcctcacaggacaacacacacggcccctttggagcatcaacagccagggactgtgtcattaagctgctgacaggtggtccctaccagcagctaccctccccccacccagttctgcatgcccagccttctgccagagccagacagtaaagcctgcctcctggcaggcctggccaaaattgtcaggaggttgatgatgtgtctgaaaaggggggaaaaaa

SEQ ID NO: 3085 - DNA, 600 bp, Bovine  MMBT01670
ctaacatatcattagtttatataaatctaacattgtctactttaaagtaatactccacaatgaaactacaaaagcaaaaagaaaattactttaacttttgaaaggttaaattaagaagtcactgctgtagtctaagttggaaatagagcttgggttctctttgaaggcagaaccaatttgtctgttttctcagcactcaatgattgtagagatattagtcaacaaaaaaataagtactaatagcttttggaaacattagcctgagaaccattttccatttagtctgtagttagttaatcragtgtatgttcatttgtccatataagctataaaatcctacaatgaagatgtaattataattaacattgctgaccagttaaaaggcataaacagtagtgtgcccatcaatatgcactctcaatttgccggcatttccagttatgccagatggtgaatttaatgatggtgccttgtggtgcttctaatgatttttgtgcctgatggtatttttatagggcctgttgtatcatagaatgctgaagggtgacttaataatgatcttcaagcatatgaaaggtcatgaagagtataaagtgacca

SEQ ID NO: 3086 - DNA, 600 bp, Bovine  MMBT02029
ttttttaagaaatagcttttgattgcatttcctyttcttttccatttgaggaaactctcggattaaaaaggatgaaagtcagaaaggacctacttagctatctttagtattatgtttttattagtgtaaattaattagggtaaaatcagataattcaaacagcttttaaagattttatatatgtgtttggtatgtatgtatgtagatggtaaacaagagcttctctattggatagttctctgagtggggggcagtttcccctactttcggaagcttgtgtgctaggcagtgtgtagttcyagagtgtcagactgggtcatgccaggagtgagaactttgaacagcgagggaagggacagtcacgttctggagaaatggagttagctggacttcagagttagcaacagctggcttttgagggacataagagcaaactgctgcatgaagggtgggcagtggagttgaagccagcagaacaaattggaattgcaagtgtagaattactcgtgtagagccagtaagtagcctaatccaaggtatgggcaggtaagttaaaaaccagcatgtctgttggttaaatgattcgaacagagatgcctg

SEQ ID NO: 3087 - DNA, 600 bp, Bovine  MMBT02126
atacttggggttgggatgcttggggaagggtgttttaaaaaggcagaaatgggacaatgctggtggtacagtgattaagaatctgcacttccattgcagagggtataggtttgatccctggtcagggaactaagatcccatatgccacacagcacagccaaaataaataaataaataataaagtttaaaaagaaaggcagaactttggctgaacctgaggataagcaagaactgttttctcaaaaggaatctggcacaaggttgatgtactgaaaataattgggtagtgacactatcccmtaacttcatgaaggcagggatttttgtccattttgttctttatcatattccaagcacagtcccaggcaaatagtaagcactcgaaatttctgttgctcttgaatgaacaaatgaaggaatgaaacaatcaagttgcctgaagtgatatcagccggaacattgaaatttcagggcaaaacatatggatacaatctgacaatcaatgggaaaaaagttctaaacagaagagtgaaatctacccttagcttcctttctattttctacattcttttttctaccttgctattctcctctcttgtt

SEQ ID NO: 3088 - DNA, 600 bp, Bovine  MMBT02369
ccgaactcgggcgccggggctactggggtctgcgcgtggcgcgggcggtgcgtgcgtccccggggatgctctccccgggtcggactgggagtttccatccgccgggtgagggggcgctcggagcagaaatgctacttaggaaacttaaacctgaaaaatcaggaaaagtagtttgggccgtaagctggagccccaccaaggctaatatggagggagagtggggagggggagtgaggacgagcagggccgattgggacagaggcggcgacacgagcaggagccgagttcaaaaaggcgctygagttctttccttcacttgagaggaatctgagaatagttggagccttctcccttccgagtctgtctcctgggggatggggggcggtccgaggagctcaagagattcttcttttagggcgggatatatatatatatttttttttttttttctcttttatagagtaagattatgattctctgatttttttttctttctttgtaaagtgccctgggactttgtgttactatcagagccaaataacggccttttaaaaatctcagtttttttcctaaactgggcattgcgcaagtatgagcaat

SEQ ID NO: 3089 - DNA, 600 bp, Bovine  MMBT04940
tcccaaacaaggagatagacatgatgtcttctgagacctcgcagccataatgggacctggatgatagaagaagccaactgtttgagcctccagtgttaatcattagggtttarttttttttttccctccctaatgttttcttcattttcctccctaatgtctacttcacttttcattcactttaagtcgtgtattctcagtggggcaaaaattggttcttggtgtaaaaaaaatcttaatgcagtggattatggttctccatatctttattctacacaataaaatcttattccttagtawttctctcattagggagaaatgtaatttaaagctaaatttattaattaaatatattttttcttctagggcaaggggcagtggtaatgaaaaaagaggttgaaaaaagttatttttaaaaggttttatagatgtattgcagtccaggattattgtgttctatgtgctatgtgtagtcatattaatagcggtttgttgcaagatgtttggacccagataatgtttacagtataaattcctggctactctttatgctgtaatttcactctgtccatcatggacagaatcagaaaacactggtca

SEQ ID NO: 3090 - DNA, 600 bp, Bovine  MMBT05960
gggaacttccttctctgtaagaattttgtgctaatcgattgaaaacatacacacacacacactcacacaacacgcatatatgttcctttgtcactaagagaacagtttaccaacctgtctctttgatggtcctcytgtctagcctaaggaaacaggagaggrggacactgaggatgctgtgtgtgggcataataaaaaattcctacgggggcacaagaacttcactatagacgtcattaaagctgttatccttagaggaactggcaagcggcagatgagttgtcacaacttgattctttsatttctgtaacaggaatgatcttggcacagtttacaggcagcaractgtgcttagaaaatggtggtgttttctcctatgtatcagaatagataaccatatgaaagatggtgtgatgaagagaaatgttatacctgttaccaagtgtatgttactttaaactctttccttaatcatattcccccaaactaaccaatagtacttttattaccttacatagatgagtattatttggcaaattatgaaacagtttgytacactttttaaaaagttaataacacagcatctgattctttttaata

SEQ ID NO: 3091 - DNA, 536 bp, Bovine  MMBT06986
acacgtcagcttcactttctctgcccagctggccaattgttccaatccagtaaatcacagattcggcaaacacacttagggaaaaggggcagatgagtaaccccaagctgtgctgataaggcgaccaggactaagtctttgaatgtgtgcacaatggaacaaacaccttttatccctccaacccaccaggcaagccacaccaggaaaatcattttccaattagtcagcaggtttcagcgtcattacctttgagatcagatttgctaccattcaaaaaggcatcagagacagtggaggaaragttaagcatcatwtctggcatctgaggtctgggaggaggtgcaattagattagctgcaggaaaatgggagggtttacattaccagaggggctctacctggctccaggcttcacagtgaacaacgctttcaccatatggcattacaatggattagtgatcaagtacgattaatcctaatagatcgtcttttcaacctcagtggcttgttaggtgagaaaaaaattgtctgtcccca

SEQ ID NO: 3092 - DNA, 600 bp, Bovine  MMBT07253
agatcggggtcccccgccacactctacgcctggcgccccgtgcgaggacacgagtgtggacagatgggctgactgggggaaggccccaggcacactgtgccacgtggacatcgtgattgcctagccccgggaggtgtgtcgaggtcttatgcctcatttacaagacgaggagacagaagtgcagagcagtcaagtaccacggctaggaaaggtccctgtagtgtctggctccgggcccacctttccagcaagcgcttaatttctctgggtctttgtttgctcatctgtaagatgctccayggtcagagacacctccccctgcagactggagctagccagccggggactggaaggtggcggccaccagaccccgctcctaccgcctgctgggtgaacgacctccttcagggtcaagtctgccaaggaatggccaccagtagggagttctaattggtgaggctggcggcacagagcccagcaaygcagccggtggctgatgctgttgcacaggaaagcgctgagcacagcaaatatagccgttgacccaattcagttctgttctgtcttcgagaaaataattgagtttaaatgaataggttt

SEQ ID NO: 3093 - DNA, 600 bp, Bovine  MMBT07336
caggcatgaaatagatgtaagctgttctgcccattgctttataatcccagcacactagtacagagaatgcccggtacagaacacaaataaagggtcagagatggaggggttcccttaggcagggctgaagacttcagtctctggaatttggagttgaggctgcagtcccrgtttttggatggaccactgggtgtgtggtacagtccatgcttttaaccagatttgaacagaacggccacttggcccgggtagaagtggatgaagtgttcggtgtcatgtgtcacataactcgttcctccmcatgatgcagcaccagatgggggtgtgcttcttgccacactccttcttgatatgggcckcgatgcccttctgcatattatatatctccagtgcctgagtagcaagtcctccgagtcctgtcgcatctcctctgacatgtcagcattcttgatcacggcctttgggtcaccaagaagcaggggctggccggctgcgacggtccctgcgggaggggttggtgaggctcccacccgcggagaggggccccagtatgctctttcgaccactgtgagttttgcctgctcctgagcttcgtgtaag

SEQ ID NO: 3094 - DNA, 600 bp, Bovine  MMBT07353
gtttgtctgctttcttcagcttttgctaaaggctcagagacgaggctgaaccaagaaactgaaatgaaactttttgattatctgtgtttttccaattaatcctgctccccactaarggatcatgagttggctgcatcactgtgtccctaagtgatgaatccccatttgccagctggccatgcatgaaccggatggcctggcatttcatttcttcctatccagtaaaatgagaaaactcaaaccagacactgaaatgtctttttcttttattaaaaacatttctcaattgtgtagctgggyactctgagagtgaacttcaatatttctgaacctctgaatgytggaaacagggaaaaaactaccattcaaagaagtgccagacaattacataatctgtctctgatctatggttctcaaccctggcaccccattaggaacaactggagagctgtaaataaaaagatacctgccaatctgcccccttcttacctgaatggggcagcaacatcggctttaaaaacaaaacaaatcaaatcaagccaagcaaaacaaaacaccttccatatgataatatgcggcaagaatcaagaagttcactgg

SEQ ID NO: 3095 - DNA, 600 bp, Bovine  MMBT08491
agctgtgtcaaagtggtagctctcccaaggggaggggagcctgggggctgcagggcagaggcagcagagaggatgtggcagctaacaggtgtcctcattacaagctggggctgctttcttgctctcgaacttggacctgtcctttgcctctctgagcctcagcttccccatctgtaaaatagggctaatcctgactccctcccattaactgggaggaatagatgagaaatgagagaggagtcctggtgcctactcagtaaatatttagcaaaacctccccactcccctgctgatttgctrggtcggttctacttagccttctggtcttagcataaacagcccctctttggagaagaccctgcccctcccctttcatatcacaacacactttagaatgtttgctgatttacagctggactgttacagctccacaaaggcatggcaggtctgtctcatttgtcaccagaagccagtgcttctcagagcatgttccctggaccagaggattcagcatctcctgggaatgtatttgaaaggctaatccttgggtcccgccccagacctgctgaaccagatactcaaatgcgggctgggtgctcg

SEQ ID NO: 3096 - DNA, 600 bp, Bovine  MMBT09056
tacaaggtcatcttatatctgaaaaaaaaaaaaactttaaatgaacttatttacaaatcagaaacagactcagacttagagaatgagctttcggttctgtaggacgtggtgcaggggagcgatagttagggagcgtgggactgacatgtacacrgtgccatattcaaaatggataaccaacacggacctaccgtatatcacagggaactctgctcagtgttctgtaacagcctaattggaaaagaatactgaatcgctttgttgtacagctgaaactgagaaaacatttttaatcaaccrcactccaaaacaaaataaaaaattaaataaaacattttattcttaattttttttcagggacattgaatggcctagtggaaaatcatcttctgagtgttccaggggcttttttaaaatagaatttacaaagatgttcagacatctgcacatttcttagccttggccatcagtcaaacatccaatgacaaattcctctctgtcttaaaacytctggagaatttctttcccatgttggatttatttgctttttttctttttgcttctgtaataggtattgctctgacttgggcttccctttag

SEQ ID NO: 3097 - DNA, 600 bp, Bovine  MMBT09579
attacctcagtccccctggggcctctggcctccagtcctaccaaatcctcagagggcaaggactctggggcagcagaaggagagaagcaagaagtgggtgatccggactgcttctcggagaaggcagagcccgccgaggaggaggcggaggaggaggaggaggaagaggaggcggaggaagaggaagaggaggaggaagatgaggaggaagaagaggaggaggagggctgcaaaggactctttccaagcgagctggacgacgagctggaggacaggccccctgaggagtctggggccgckgcaggtagtagcagcaaaaaggaccttgctctctcaaaccaaagcatttctaactcccccttaatgcctaatgtgctccagaccctgtcgaggggcgcagcttctactagttctaattccgcttcttcctttgttgtctttgatggtgcgaacaggaggaatcgtttaagctttaacagtgaaggcgtcagggccaacgtggcagagggcggcaggaggctggactttgctgatgaaagtgccaataaagacaatgccacagcaccagaaccaaatgaaagcacagagggggacgagggg

SEQ ID NO: 3098 - DNA, 598 bp, Bovine  MMBT09857
  misc_feature (1)..(12): n is a, c, g, or t
nnnnnnnnnnnntaaacctaactggaggtgattagcataactagagatgattcagcttccatggaaaaacacaaaagcaatgaatcaggttgagttttgaaagacagaaatggaaggttatgctttcaactgcaggctgcaaatggaaacacagaataaaaccatattacccctagttcacctaaaagccctaaattgactaggttggtaaggacacatagacttgaaattctggatcagattttaaaagtctctatggaacacccaagctattaaaggagaaccaaattataatatatraagatgctactagggctgggacttcccaggtggcgctggcggtaaagaacccgcctgccagcgcaggaggcgtaaaagagtgggttctatccctgggtcgggaaggtcccctggaggagggtggggcaacccacgccagtgttcttgcctggagaatccccatagacagaggagcctggcgggctacagtccatggggtcacagacagtcagatacaactgaagcaactcagcacagcacacactagggctggggttttgagagatgccatctgtatccctgcctttgaggaaggaat

SEQ ID NO: 3099 - DNA, 600 bp, Bovine  MMBT09867
cttggagcccttaaatctcactatggagcattgacgtctcgtctctcaccactgttcatgaagcagattctactcacaagtgtgtttgccttcttaatgtggcttcagcaaagtactcgagggggaggctttgagggaaaattattaataacttggctctaagctcactgggtctgacccctctgtacccctcggaggtggtttctgaagggccactagacccagatgcctttgctgcttcggaaacgccccccccgtatctgattcccaaagcaagtgggatttctgcagtttttctaytgctgtgcyggcaatccagccaagtggagtacattatttcacagtaaaataaaccttcccttctttttgttccacgggaaattactcagtgtggagtccaggcgcgtcaccttcacatttccaccggatttgcttccttcaccattgtggattctgctgcatttaagagtgatcaaaagtcacagaagcctagtttccattcctcctcttttgttacttcctaatctccaatttcatccacctccctctccygcctcaccattgtgcactaacggtagcgacttcgagtcaaacccatct

SEQ ID NO: 3100 - DNA, 600 bp, Bovine  MMBT11384
tagaaggaaattacaagacccttctctctgacgttatgtctttttccttcctccagctctctctgctccagctcagagatccttccattcgctgcttcctcctccctcaaatgcacgtggttcactatctccaagtctctgctctcatgttttctatccttgagctctttcaggagcactccactgaagcacagagcaaccataccagtgcttcgcatccttctgtttattttccccactgcacgtaccaacacccgacacgctatttcttaccttgttcgtacattttctgtatcccayccccaacccttgccccaccartgagttccattagggcagggacttttcgctgttttgcttactgctatattcccagtacctggaatagttcctgacataataggtgatctaaaaaatactttttgagtgaatgactaggttttcacaaaggcatgaagtggcagtatattcaattaaacatcccattaactttaaagaatgaggatgcaacttcagtagaaaaaaactttaggtattcccaatactaaacattaaccatttaaaaaactgtattcttaacatttctctagtaaagcattt

SEQ ID NO: 3101 - DNA, 600 bp, Bovine  MMBT12251
ctggcacctccatctgccttcgggcagctatttgtgtgaaggcaatagattactgcctttggtgctactcctgtgtgtcagccgctgccatttgcctcaattacaaagtcagatggttaaacgctgaattcatatttatattatttacaatgattattcattgcatccattgttaaggagggtctcaaactgtttctacagttagaaataaataaataattttgatcaactttagcaagcatattcaaacaccgatgcttatttttaaatgtagtaaataaaatgctctaacaaataatkcagtgaagttgaaagatcatagtgtttaagtttctgacttgggtttattgtgacttagttccctttctgtgccttaagtccctctgaaatatttaaatttttgaaagtatgttgtaaactgtaccaaagcataatttaaaaatacatgcatttaatcataaaatactgttgttaaatayagaacttctggaattcaaaagcagaaactatcaaggaattttcattttaaacwtcagaagtattaagtatttttcattagcatgagatcaataatatgatcataatgttaacaaatccaga

SEQ ID NO: 3102 - DNA, 600 bp, Bovine  MMBT12392
aagaagtcagggactggtcacctcaggcaattgctgtagtttcacatgtaagaaactgggtgtttttgaatggttcaaagtttgtcccrtctttatatggcattaaaatcctatgcaatgtcattcattcaaagttccaacatttgagatagcttataccactctgttggattatatttcatttttgaatcagctaggaagtgttatattcattttacaatacaacattgcaagagccaaaaattcataccccatctgttatgaactaccaagtattcctggagaagggctgagaatgarcatactatggtctggtcattatagaatgccaagtgatcaagtgaagtgtgtgtgtgtgtgtgtgtgtgtgtgtgtttaaaaggaagtttggttttttttttagcttttgattttgttatttacttgaagtagacaaaaatgtttaaatgaacacatcactatccaaaattttggaatctgtactatacatatacttaaaatagtatttgtaacctacagatgtaaagtggaaatgtaagccttatactccttgaaaataaaaggtaaaaatggttgaggatatgagactgaaaactacta

SEQ ID NO: 3103 - DNA, 598 bp, Bovine  MMBT12441
  misc_feature (1)..(32): n is a, c, g, or t
nnnnnnnnnnnnnnnnnnnnnnnnnnnnnnnncttcggggattgtagtaaaatagactgtgctctttctctgctgcttgtttactgtattagcaacactctggtttttgtgtttgtaaaaccacggtataaataacttgcccaaaggggggaaaaaagcaaaagacatttaactggtcatgatatatgagagccactggggatacatgatatgatcttctcagagtttatcacttatgcctatagtgttactgctttaattcatattcaagattagcatctatgttgattgtacagcttrgayataatagttttcactctcttttggaaatatataattcagaaaccttaaaatctcatggacttktaccctcaaatcctcaaaagtttaatactataagactttgtcattctttgttttcattgatgtcatatgagaagacaagatgaaaaaaaatttaatgcagtgactatttaataccatctcagtatgggttgtctgatttgaagatggagtaaatagatttattcaagttaacatggtatttggttttgctttataaatttggagttcagcacaacacattccattagaagtc

SEQ ID NO: 3104 - DNA, 598 bp, Bovine  MMBT12796
  misc_feature (1)..(198): n is a, c, g, or t
nnnnnnnnnnnnnnnnnnnnnnnnnnnnnnnnnnnnnnnnnnnnnnnnnnnnnnnnnnnnnnnnnnnnnnnnnnnnnnnnnnnnnnnnnnnnnnnnnnnnnnnnnnnnnnnnnnnnnnnnnnnnnnnnnnnnnnnnnnnnnnnnnnnnnnnnnnnnnnnnnnnnnnnnnnnnnnnnnnnnnnnnnnnnnnnnnnnnnngagtacaaaagatctgtggtaagtctggctcccgtctgcagtgactgcactggtcttgaatggggaagagaagagaggaggtatgtacctgagtaactgccrttcccccatgaggtgatgctgaagctyttgccctgtaaccctctataaagctaagaaaatgtggcctcaaagcttatttataccttgtgagtctcactgccamtttgaacctctacttatgaccacgttgatacaatatcattcgaggctctcctttcatcaccccttctgccctgctttccaaccctgcagatgtggggaataccaacacaaaacacaaattaagaatgtgactcaaagactatgtattgaatgcccgctatgtgggaggagaaatgagattttcaacaaaatctct

SEQ ID NO: 3105 - DNA, 600 bp, Bovine  MMBT12804
cataagggattctataatcttcaccagtagcataccaccaaatgcgtgttttttttaaacttaacaaaccctccgactcaggataccctgttagaaaaggatttcctgtaattctctgggaacatgcaatagaggaaaattcactcaatctaaatttctgaaaaacatacaatttaactcwattacgcttcttcaaatttttaatcttggtaaaaaaaaattgttatccaatgtcttgattttccttctaatcctctcactgatgtttcaatcattcctccctcaatttaggtcttaatkctagaactttgcatttaccatttgtttcctatcatagtagattaagaatactgcaacttcaatcatctcttggattttaatcagtgcaaatatggagtccttcaagcaactgtctgactaggacacctctttgacagaaatgcaagttcttacaagacactaagctgaaggaggcaagtcgaccagatcagttttcagctgcttcctgacatcaccatgaatgactgacatcccatgacgattaacatctttagcagtttcctctccagaagaggccgcttctgactttaagttcgtaaa

SEQ ID NO: 3106 - DNA, 600 bp, Bovine  MMBT12875
ggcttggcaaattcaagttttgcttttttggaacgttccagaattttttttctgaatatttttgatccttggttgattgaatctgtggatgcagggcctgctgacaggaagggctgactggatacaatttcctgtaactgcatcacaactttctttgttatcattwcttggtcttttagttatcaccctggcttgctgtgtgataattcatcacgtgggtgggctgtgctttgcttcacttctcttcaattattgtcacttgaattgattcctagtgctgatgatgattagccatggagygtgggggcttttcatactttggtctaattttcttagaatgaattcccagcagttggaacatcaaagcaaaggggaattagtgtttcagtgctttgtgtttcttgctgtcatattctgattctgcttatccccttgtctgcaatgccctgcccattcacttcttgggatagtagttatctaagataaagaagctttattttctaggttctattctatccccctgcactgcctccatttcctctaggtttctgctttgcttgctgtggaggctgtgttcccacttaagggtgggtgctgtaa

SEQ ID NO: 3107 - DNA, 600 bp, Bovine  MMBT14066
tgcaaaaatgtcagcttaactttccatttcaagaacaggggtccagggttaacaaagaagcaaaatatataacatgcgatcgatcatgtggtcattgtgaagaatcatttacttcataattatttgtttaaggccataaggtaaaacagactaaaaaattagcttctaattatatattccatttcaaatgcattagactgtgtttttcataaatattctagattgacgtattcagggtaaagttaaatataagattcttttatgatatacggaaacttttccccaaagaaacgaagtgcygaaaacacccttttccactcttgtccttctttagttgctaggtcatgtttgacttttgtaacccacggactgtagccctccaggcttctctatccatggaattttccaggcaagaagactggagtgggttgccatgccctcctcccggggatcttccaggcccaggaatcgaacccgtcttcctgtgtctcctgcrctgcaggcrgatactttactggccaagccattggggaagcccaaccccttttaaaatgaaaaaagaagctttgtatgtgagcagccacaatatatgtattgtcc

SEQ ID NO: 3108 - DNA, 600 bp, Bovine  MMBT15718
actggatgaacattggcccggctgaagctggatcttggctccccgccaccccccaccccagatgtcatatgtaatatctgggtatatgccccagctcggagggacctgggagaagctttccctgcacttgcccgctgagtttggtgcccctcttccgcacgtcgtcccatctatagtttactctgtaatagcaggaaagcctcaggaagattgcatcagtagttccaaagtctcagaactcatgcatgacaaaaaagtcaggattcaaatctaagtatgtcagacatcaatatatacttrttccatcatggttagttgtctactgaatgaattaatggatcctcgatgcatagggaagagccaacaagttgaattcagcaaatagttaatgagtattttcaggataccaggccctggttcagcccagagggataaagagaagaattatacaagatttcagtgatcaaaaagtttatcatctattgaggaaaataggcatgagcagataaatacagaggcacatggtgagcaccatgttggggatatgaacataacaggcagtgggggcacaagagtagaaagtgcctgacattgagtggg

SEQ ID NO: 3109 - DNA, 534 bp, Bovine  MMBT19368
gtggcctttttctccccatctcccacccttctgcagtagctctgacaattgaattctcactggtgataataataaaattcataagacagagtacagctagttatgcctctagcaagatgtcaaatttcacttgcacaaaattaattgcacctaattaaactggggtcattggcattaccgtaaagtgaggctatttattagacaaagaaaatttcacaaatatcaatttgctgtcctttcaggtttgtaaaagagaagaattgcttacataattaaatttgttttgccattttaatagtrttagtcctyaaaagatcctcttcaaawtttcctttacttttaaaattgtgtaatattttagaatactggaggtaattcttggaggagggcataaaaaatagtaagagttttctgcagagtacccgatgacwtttcaaatagtatattaaaaaaaagaatttgtaaactatcatttgcaatggcatgtaccttggaattactcatatgaaggatattctatgcaaattaatagtg

SEQ ID NO: 3110 - DNA, 600 bp, Bovine  MMBT22459
accttgctttcacactcaaagttgtaatggatcccctgcaaatgcaggcagttaggaatgggagaaggaacctacttgcatgaggaggttggccataagttgaaagtgaggcttatatttgattcacaccagatgtgaaaagatcattgcacacttccaaagcctcagggtctaccaaatgtacaaaagtcatagtccctgccatctgatggttaatgacattctctaaaccagagtttctcaagctttttgtgattactaagcttagttccagcccctcctgaaagtgtagttgctackgtgccttcctaggtaggaatgggattaagagggtctctgaactagaaagtcttcgtctgtctggacttcactgtaaatgttagcattgcatcttggaacacagaaacttggtcaaatctggtagcaagatggtaaccaactagtacaaagtatgcctagaatctgacgatgtagagcaaggcaatgcccagacaaactcaggcctatcgtgaactgctctaaagcaaaccacaagagtacaaacctgttggttttgtttgtgcctccttagagtcagggaagttagtagaacagcaagca

SEQ ID NO: 3111 - DNA, 601 bp, Bovine  MMBT22881
  misc_feature (1)..(1): n is a, c, g, or t
ncargctgttctttattgggaaaggtcccagtgcctacattcagatgtctcaattttggacggatgccaatagactgccccagaacccactggaaatgtaggagtgagaagatagcgaaagtaccaggttttggggtgtattcatagaggtgatgataaggacctgatttactgaagagaaacgcagcaaggagactgagatagaagttggacattttcttctagagcatgtgaaatgcttccttttttttgatgctctcagttttccaagaattctaggctcagtggcttttcaagtgtyaacacacactctctccagcctgtgcctctgcctttaattactctactgactgcagacactacctggagccaggtcctggctgtcgcagcttcagagggagtttattgccaaccatgcattgtagggactaattgtgagccccgtgcacctgctggtgccccctgtggcagggacttcagggggaagggttattaatgagcttgttgctcattataataaaacaatggggaagttggcagagggactggaggtccaggtgtggtgtcagcaaaggttagttggcatttctggaaacaggac

SEQ ID NO: 3112 - DNA, 600 bp, Bovine  MMBT00074
ctttgagaatgtgctcgagcatctctcagctcacgcatgcaccccggcccagctgggagagagaatgcaggaggagtgggcagcttcccttgagagggcccagcagctcagtgggggcgggggcagacgcccaggggccaccattctagatgcctgcactctggaccccaaggcctggcacgagaatgttcccagcctgctctgtgcctcctcctctgcggccctctcactgccccccaacccagaggcatcccctgaggagtgggaacaccctgttacagctccccaggaggtggggcrcccrgcacaccgtgttccagaggccagggagagcgtgttcggcctcagggcggtggaccgtgtgtgcacacctgctccaaggcccagtggcttggcaagtccctgtcggggacagccacactcagccggacatccagctcagcaaacctkgagatggccagagataacaggaactcctgggagactccagcctgccccccttaccagaggccctgcaaatggtccaggagaccctgacagcccacctctctctctctctctctctctctcaccggggaaagagcaatagcagaagcagtg

SEQ ID NO: 3113 - DNA, 603 bp, Bovine  MMBT03601
  misc_feature (1)..(3): n is a, c, g, or t
nnntagttcagatttcctcatttttggctctgcagttaagctcaaaggcctctagactctgtcctgttggctgtggcttctgtctcaagccacactttccctagtcttcatttggtaagctgacctcagtaatgaagtctgacccctctgagagtagtaataatattcacccaaaagaaatatgtagcagttttttttaaaaaaaaaaaraaaaagaaaaatgtagcggtttaaaagaaaatgcactttaggaattatgtattatgaaaagtttcggtagattccaatttgaaaattaacccrcagcagcatctttgtgagaatgtagacctctcagataaatgggtgagattctgaccatagtagataccatggccacctccagacttgcccttcttcctgtgtgtcttccagagataaggacattaacagtctcgcctccaaagaggcagtatctatttgaacataattctccaaatttccgactttctgaaygcagatcaaagtaaggacccacactttcttcttctaaacatttgttacatccttgagttarcaaaagcagctcaaaggcttttctttcaaaggctgttgttaatcagt

SEQ ID NO: 3114 - DNA, 600 bp, Bovine  MMBT04178
agagggctgagtcacacaatccactgtctacactgctccaggagggggcgagctgatttatgagaaggggagttgggtgggagggactcatacagcagaacctgtctttagaracctaaaagacaaattgtagccctgcgacagttatacaatgatgtctactggggaagaaactcctctccccaattcatctatgctcagataaatgctgtatccactactctgatcctgtgcgactcgtgtgagtcaagatgaaaacagagtgtaaataaatggcttcaccytggcttccgtattacyattaatattattaaagataaacagatttggaagaaaggaagcttcctgggggctatgaatgaagatggttccatacctgtcaccaaaatgctacggccacattcagaatgtgaggtttgcatcaagactaataccttccttcaaacgacagcaagagtgtcctattaccaacagaacaaaaacaacatccccatgagagcagtgaaactcttggccaggaataccaagcccacmgcaggtcttcgaggactcagcttgagaagctgagggcaaggccttgggctgggtgcattttgatcg

SEQ ID NO: 3115 - DNA, 600 bp, Bovine  MMBT04489
ctagatgcctctatctgaagaccaaggagcataaatgattaattcctgctattccatttttaaggaaaagaacttctcaaaaaccctcattcaattttatcaagactaagaagcctaatattaagaagttgtaatcatttatgttttattaagtagtcatcaacagcaatatcctaaaagtcagtcacatttcacagctagagggaatcatggcccccggctgccatctctcccgggctgcccatgagcatcagttaagaggggcctctgctccactgctgcttccagaccacacacccygcccctctgccctgaaaccccagctcgcaatctctcatcatcagaatacaccatccattgccagttttgttgcaaatgcctgggtcagtccctcccctgcgtgaagaatttaactactagctcactgccattctctctaaaaccactccttctttctgtttattccttctaagaycccgctctcaaaattcccatagttctcttccaatgcgcttggcttccactacctgagtcactgactgctgtggtcatctcctggatgatatcactaccaacaacttcaaactgtctataatctga

SEQ ID NO: 3116 - DNA, 600 bp, Bovine  MMBT05839
gtcataaaggaggtcaaatggcagagctgatacccaaagattcttccagcagtctggctctagagcccacattcttaaccaaaatgctgcatacagtcctccatccaagtggtctgcagggaccacatcagcagctgggtgaatctagatacgtagtgcagactacactaggctattctatataaggggcttgagcatccgcatatttggggatccacggggatcccggaaccagtccccacggacaccaagggacaactgtactagtatctctcagtggagagaaaacaacacaaaaargaagggggtcatagatgtatttagaaacagacaggcctgggaaaaaaagactgatttggaagcatcctaagggaaatcagcctatcaagcagctgaagtcctaatggcctcaaaaccagttcccagagagtacagtcccagagctggggccaccagagagcagcacagaaggtctttgagaaggtcaccacccatcccttatctggtgatgaggctacttggaagttcactgtgaaagaacaggcacagtcacactctcagccttcagttcatcctggctgaacactttctccctctctc

SEQ ID NO: 3117 - DNA, 600 bp, Bovine  MMBT05853
tgtaggccatgacgtggagaaattggaacctccttgtacattacttgtaggaatgtaaaatggtccagccattgaggatgacagtttggcagttccccaaaaagctaaacctaggattgctgtatgacccagtgattgcactgctaggcatatacgtgaaagaactgaaaagaggagcctgaacagacagtacactcatggtcactagggcactattcacaatagccaaaaggtgaaaagaaccaacaatatggctatttacgtctcctgttctgttatcagtccccgtggaatatttartgattatgttattatgctggcctaaagttaggcctgttttattggcctcaagtttcaattcaaacatttaaaaagcaaacaaaggccagaaccctctcacaaatgtgaagtggtcagagaactggtcttgaagataatgatgacaagaaatcaccttggggttttctgcaaacttcttcttggccactttccgaagactttcctcaattccctttctagatttttccaggatgtcctctgtttggtccaccaacactactgtgtggccagttgctgcagcaacctagaacaaaacaaaaa

SEQ ID NO: 3118 - DNA, 520 bp, Bovine  MMBT07265
cgataaagtttttcattcacataaaagtctggggaaaactgattgaatctggggtgttgcagatcaaaatctgagtctcttattccctgacttttgcagaaacaagtggcagatggttaaaactggaacatcgggcccctgctcctcaattgggaggcaggccgctgtgacggcaccgtggagcccggggatgctgagccgcggcaacgtgttctcaggtaccactcactcagagcgcacggctggtcttctctgggatcggcagcgctgctgggtgaatgccgcacacagacacttacygcttagaagaacttgccacagggggcaagtgaaatctctgctctgactgacacaggatggacgagcagaggagaccatccatcagtgtcaggaaagatctgaagcacctggctagtcagttgaaataaaataaattatttactgatctcagaatccagctgctcacttgactgctcakaaagactgtgtgctgccctggacttcgcagttgattctgttt

SEQ ID NO: 3119 - DNA, 600 bp, Bovine  MMBT07355
cagattttgagagaaataaatgaaattgtatgtcaagatgcataaacttattattataagtagactcattattatagattttgtaataaagaataacatggtaccccaaaactaatatatgtcaattacactttaattttttttartttaaaaattattttcttttgattgatgaatatttttagtaaaattgctaagagagctagagataaatattactctggatttagatatgattttttattgtattgaagaaaggaagttatccaagatttattaatgggcactagtgctacatcygtcatctgtacttcctgtttctcagatttgtatgtcttcctttgcttccaagccccttagcctttcaaaaggaaaaacatgcttttagaccagaggttgctcaaccctggcttctcagtagcatcatctaggggcttttgaaaaacactgatgcccaggccttatcccagaataactaaggcagaatctggacattggtcattctaaaagctttccaggtgatccaatactgagaatcactagtagcaaatgaaacaccacctatgctatttaaaaatcacacacttgcaacaatacact

SEQ ID NO: 3120 - DNA, 600 bp, Bovine  MMBT08397
ggattctacacacttctcctatattgattgcattatcagtagtgctaatcacacatatcattaccagccaattacacaagcacatatctaaactaggtaacttattcaccaacattatctcttacaagtcttaattttgtaatgaagttgattatcctcttacccaattgagtatagctacatattttgatctagcaggctaaatgcaagtttattgaattatatagtagataattacttacctatgtttgtaacaacacaaaatgagggcaatttgagagtagtctgtttcttattctrtttaaagagtgcattagagaaggttaattgttttaaataaaacakacccaaagatatatttggrttaaaaaaaaaaagcaataaaagtgtacttcctgcacacaaaacagaattgggtatgagaactggtacttggggatgcartcattcagacacccaggtaggtttctcacatattcagttcagggtcactctgaaagattcattttagggagaaaggacatggaggactaatgaaggtgtgtatgggctgaccttgacagtgaggaacgctaatactctataggctaccgtttagtc

SEQ ID NO: 3121 - DNA, 600 bp, Bovine  MMBT09284
agtcacatgactgagaaattctactttgccacttcaatggaatacttattaaaccatatagtcaatatggatacagcaaaaactaaagataaaaataaaagggtatctgaaagcaggatggttcagtgtggtaacagctcaatcctattttgaataacctgcttaaaactgaatattttgaagctgaactttgcaaactggatctttctgactctaaaacaagggaacacaataccaacaaaagatcttttccctattacgtaccatgtaacatcaatggtgtatggtcatgcaggtgtrtaacttacaggctgctatcgagtaaaacattacaagtagactcttaagttctcctgtcatttacaatgctaacacaaatgacacattcaaacttttacatagaccagcttgtggtacaattcaatcatgctatgtatctggaaaggagacctttggtttcaatttttaagacagtactagtttaggtcaaaaaatttctttctgggatsaatcttagggagacaggaaagattgctcccataggtactgttttaagatggagacaatctgacatctagatatacattatcattatcagaa

SEQ ID NO: 3122 - DNA, 600 bp, Bovine  MMBT09935
cttaatcatacccattggcacatgcgtgtgattagtctatcttccatcattgttggtgacggaggcaataatgacatataattagttactcccttctaccccatcattaaaatctgcactggtgttccaggctctagatttttaaagactgaggaaactgcagggattcttctgcaaaattcgagaaactcggtgcacaggacaaatgtgttaggaagagtgtgctattcaaaaccttggctgacagagaagcagcatctgataacttgagagatggagtatttcctgccgtatcagtamacaaggatgtcacaggcatcagwgattgcagccttccagtgtgagcctcagggcatccaggaaagagaacaatacctkcsatctagcagtcwtcaggcttcagccactccctacggtaagccccaaaggagctcaggatgtgaaaacacaggatactgacgcagaatagctaaaatgcctataaaaggaatgacttcagccagcccagactcttgcatcttcccatacatagaaaagtgctaaattccttaacttgggatgtctagttttccttaattcataatactcttttgatgttca

SEQ ID NO: 3123 - DNA, 600 bp, Bovine  MMBT10516
taagaaggcttaatgtgcttcagacttctcaaatacaattgagactttaaaattgaatttgcactcccgtgggggaaaagagtgtggagctacccgcagggcatccagtggacgtgcagtaggtctcggaacagaactgcaggtaccccgacggcctctcccctggcagctgatgctccgggtcaaatgaatcaggactgagctacaaggtttaaacgtgttgccckcctttgaaagcactgagccccactacacgcctcacagaccacaaacatcctcatgttctgacttatccttctmggccgatccaaaatgaagcatcggacaataagagattcgtcacatgcagaccagcacacaaagccctgtttgggagttgtgtgttttctggctctttttttttccttttaataaatcgcaatatcctttctctctgtgttcagttgccctgaattaggcgttaagattctgtgcagcaaattagagttgagaaaaggcacgcattttatttaackcagtcttgctaagtttgcggtaagcactgcccatgaggaaaacaaaccagaacaagggaaggacgttccctccagcttgggtggg

SEQ ID NO: 3124 - DNA, 600 bp, Bovine  MMBT10633
aagtcaccattgtaaagtgaacaactcagcagcatttaggacacccatggtgccctgcaagctctgtatccacactgggcacagcaccaacccaacacacgtgatgggcaggagcaggggaccctggctggctcaaggagccaggcacgtgctcgcagctgcacggatcctggacgaaggcccgcccacccacatggggtcagcacccaggcatgtctgcaggaggacgccccacgggggtcaggcattgggggagccccggcttacctggccatggaaggatagtacagcatgagggcrccctccacgctcagcagggcagccaggccccaggtcatsaggtggtacagcaggatggtgctgggggagagagaatacaggtccagaacctcaggtccagcrcctgcccggscccacactctgcgagcrgcggtaaaacacatgcagagcagamtctcagcaagtagccccctgattgtgcctctgaggttgttttgtttgtttatttgtttaaacacagccctccgtacagatccggccctctgcctgcttttgtaaataaagttttattggcacacagctgtgcccacttgtgtatgt

SEQ ID NO: 3125 - DNA, 600 bp, Bovine  MMBT10730
catttggaatgcttcatggagaaaaacaaataaagcgctccatccttaatttcctgagttacattataaagtgaatttgtcacttattagagatgcctctttttacaaattggtgcttaaatacatctgaagtgcataagatttcatttaaaataatacattttacagtggtataaatcacactgcattcctgactccccaaatcctgtaccagataccattattttgcttgtcatccaaatacaaaacctctcaccatgagtcaccaagtccttcctccattctctgtagtcatccctstttttggacagagataaccaaagttaataaagtaaaccaggcatcattaaccctagcatgatttttttacataagtacagcaagtatggtaactgacctcataggatttttaagtttgctttgctggtactttgcataaggcatcacagatgagacttttcaaagcctctcttggctaacacacttactcaagacctcaccatctggcttctcttgcagggttcatagatttagatgaattcctctctttttgaggtccccaaggtagcctgagtttcctgggcctgccaaaaggtggcc

SEQ ID NO: 3126 - DNA, 600 bp, Bovine  MMBT12584
atgagttcactctcttgccaccttgtatcattgtgattatatttgtaaaggcacttttgagtgctgtaagtactaactgttgtaactttgcataaattttggttaaactgtgttttctttccaatggccagcttaaccataacttttctggctgttcttttaagtttctggctatgggccaaattgctaaaatatgattgttttggatttattattttctgttttctgtgtaacattgttcagatgttagtayatatcaaataagtgtatcaagaagaaagaagaaaattgaaaactagwgtgttagtaatagagtatttttaaatgtaagcaaatttgtatttattaaatcgatttgtatgtgtatgatgtttatatttttaaactccagtgaaaaactcagtggtagatctgataactttctgttgtggtagctgttaacaattattaaaacaatttaagataatttaaaaattttttactttttaaaaaatacattagattgatgtctgcaagagcacgctatgagagatacagtggcaatcaagttcttttttggtaagtatttccttaattaacaatgtttaaactttggactgt

SEQ ID NO: 3127 - DNA, 600 bp, Bovine  MMBT13789
cacttcaggattcctggtgcaaagcgttctgtaaatgctcacaaattcaggcttccatggccgttacgtgataggccacttcctctaaagtgctctaaagcgcacagcacgtttmagttagacttttctgtgtgtaagagaaaagtggtgctgtcacaagcagaaaacctaacagccactgagggccaagttaaaaaaccaaccacattaacrgtggactaaatagaagagttgcttctcaggataaaagcctccattaaataatcttcatcagytggtttttagccaaacttgacagayaaactactcatttgcagctgtggtgatttcgagtctaygactttttcctttaagggaccaacccatggaaagcactggttgtggagggagcctcggggagaaagtggtaaccttcccctctctaaccaactctgcgctgggggaaggtatactccttaatgggcttccctggtggctcagacggtaaagaagccgcctgcaatgcaggagacctgggtttgatccctgggtcaggaaaatcccctagagaaggaaacggcaacccactccagtattcttgcctgggaaatcccatggaca

SEQ ID NO: 3128 - DNA, 598 bp, Bovine  MMBT13826
  misc_feature (1)..(238): n is a, c, g, or t
nnnnnnnnnnnnnnnnnnnnnnnnnnnnnnnnnnnnnnnnnnnnnnnnnnnnnnnnnnnnnnnnnnnnnnnnnnnnnnnnnnnnnnnnnnnnnnnnnnnnnnnnnnnnnnnnnnnnnnnnnnnnnnnnnnnnnnnnnnnnnnnnnnnnnnnnnnnnnnnnnnnnnnnnnnnnnnnnnnnnnnnnnnnnnnnnnnnnnnnnnnnnnnnnnnnnnnnnnnnnnnnnnnnnnnnnnnnnnncacacttaaaattactggaaaatgttggagctggcaggcatcttagacacaatctgccccartatcttcattttttcagaggaagaaaccgaagcacagagaggggcagtgacttaaataaaggtcataaggcatggtgaagacttcttgggaacaggaagttggttgtctcagcctgtgtttataccctcctaatccctggcatttcaagtttaatcaaagtcagaaagctatccagcccttcagcgctgcatttgcttctttccgtgaaacttaactgtacaaatacctgccacttgggagtcagcaagcccaagccaaaggctgcgaattcttgctgcaccacttgcagtacttatt

SEQ ID NO: 3129 - DNA, 600 bp, Bovine  MMBT14090
atctatgagtctggcagtggcctcgctgtacggcttctccaacaccatgtccccctgacgtgggaggtcaaaggagatctgcccgaccttctcgttcatgccaaactgaacaatctgaagaagaaggcgtggccagtggtgggcatccatttctgctcacaggctcatgggttttataaaatgtcaacaaggcaacatggacactgcatgcacacacttcactgcagaactactcttcaacccggcaaaatgacatggcagccttgagtcggccaagtagaccaggtgttctgcatagayggggcagtggggacaagaccagaaatgggcagacaatatgtacaaccaagacaggcagcaaacaggtggggacagaccccagcagtcatgagacgtgcgtgagatcactctgcatgaggggaggcaaggaggagccagagcctgtgacagacggaagccatgaccttgggcacccagyrgctcctcctgcatcacctgggctgctccaggaacttgggaggggtgcctgcactttccctgcgtccctggggcctggctgggctgtagagacccccacagtaaccatacagaaccccaact

SEQ ID NO: 3130 - DNA, 600 bp, Bovine  MMBT14863
atgtaacctgtagtaatttttcataaatrtaattataatataaaatgcaattatcatctcaaataactatattgacttaaatataaattctaaatcccttcttagaataaaaattgagtgattaatctttgcatagtcatggttcaactctttaaatgactatacaggtgagactatccttattcctagaaaaccctacaagtatccttattggtgatatccaaacatgttttaagaaattctcatttcttagtatgacaaatacagtattgatgtaaagatgaaggatttgctacaatrtgtctttcttcctttactttcatctcctctagttttagttttgcttttttmtttcagtcattaaaatgcctactgcttaatgaatgaatgatcataagcaatgatataagaaatgaagaaagttgtaatggtcaaaaaagaaaattatttaatgaaaaatagcatcatgtaaagttactttatcactgactaggtaaggaagttgacttgtagtaaaaaaaaaaaaaaaagtgggggaagaaaaaggtttgataaatggatgcagtgaactacagataaataaccacaataatatgactt

SEQ ID NO: 3131 - DNA, 600 bp, Bovine  MMBT15894
cattgaaggaagaaaaggcaggtgtttatgaagatgaaacaagatgagttatgaaaaaatttaccacagtaaaaagttagagaacaattttgacatttttctaccacaattaaaatatatcccaatccattactaaaatatatgtatatgattatttataccactaaaaatttaactatgtgtaaataaccatatagatatattttcatagatataaacaatattaatagatatcctaaaacaaacctaaatatgcctagtggtacctctgggacaaccactcttcgcttccaagcctgyaggtcacgctccgtagccatctgactgcgcggagcattctggtgcatctgacggacaccttccacttgtccactacgacgcagaccaatatttggaggagactggatrtctaagcttagtcttctaaaacctaggaaaaaattgtaaagaatgactgcaaaacaaacgtcaatctaatatgcatacacattcctcctaatatgatacaaaccaaaataaaacgatctactgaaaaaactttggaaaaaagaattaatgtgacttagataaaaatgtagaatacagaacatgattattaac

SEQ ID NO: 3132 - DNA, 600 bp, Bovine  MMBT16670
ctgttagggaggcatccatgtttcctcatggtctggcagagaccatgggcatcaaggggcaggaaaggattcaaaatactttctggagacctctcccaccatgtcagtgaatacctcctccctgagcccactttaataactagagctacttaatcttcccaatttatgcctccaagctctgagcagcacagagtcagtttggtacctacatttctcaggcaatatgctaacactctacacagagaagcatcagaagaacatggtgctttccattcaaaaaccagcatgtgaaattcacaratacatcatcagtgtcatctccatgactgtagttgatttcagcactcaaggttaatggttggaaatactcaaaaatgacagaattggccactggactcctgggctcttgccataggcaaagccaattgccgatgtatttctatatccccagtggtctagttccaagaataactcaatgccttaagcagcaaagtccataaaacagagctggaaagaattactcctggtgatgccatagcaaataatgagttgcctcagaaatggaagctcatataccagccctgccccatgggcacccaa

SEQ ID NO: 3133 - DNA, 600 bp, Bovine  MMBT16780
ttggcctccttactcctccctaccgatgcccaagcatcaggcttactcctttgcctctacttgtaaaattcttgtctcagatggttataccaaatttcctctgtatctctggatcatatgtgactttatcaggagcactcttgactatcctataaaaatttgtaatcctccatccagcattccataaaaacctttctcttatttttcttcatagtacttattaccatctaaaatcttacacactcatttatttgctgccccatgatctagagagttgctctttttcactcttatcctcarttgctagaacaggcctgccacattacaggccctcaaatatttatttattgaatggataaatgaccttagatctttttttaggcaataagctccttaaaaagagctaaagtcaatattatgtggcagcctggatgggaggggagttttggagaatggatacatatatgtatggctgaatccctttgctgttcacctaaaattatcacagcattgttaatcggctataccccaatacaaaataaaaagtttaataaaaaaaaagaagtgaagtctactttgcgtctcccaggtcactttgta

SEQ ID NO: 3134 - DNA, 600 bp, Bovine  MMBT16913
agactttatgtctttttggaagttgtctaaaaatggagtgaggtgattccagcttagtttgatttggtaaactgcttttctatgaatacttttatcaatattaccaaatgaatgtaagcaaatatttacaggtctctgctttaaaaaatactatgacagaaaataatttctgtatcacaaaattgtccctcataacttaaataagtagttttttgttattcatcccaaatcttttttaaaaacggaatttccacatcactcaagtgataaacatacggtgaagaggaaaatatctcacarattattgatttcgtgtattaaaacaaatgtctcaccgataggatgccacttatgcggagttggactacatgcccctgatttctagagaaaatctaggtttgctcctgtagttagagagaggttgtcaacagtgtcccttttattctcaaaggttcctatttgtccaataaacctataaaccaaagtagtggatttctaaatgagaaatttctgtcccacattcagagtctgccagagagggatgggatgtaacttggcagtaagtccccactgcaggaaggtatgagaaataagatttcc

SEQ ID NO: 3135 - DNA, 600 bp, Bovine  MMBT18229
ccttctgaatctgaagtacaagataaagactggtaactacagaaatattggatcaaagaaattcagacattggggttttgagataaatcatattaaatgacactctttagtatcaccagactgaactcacttgcattctaagggaacattttcaaagccagacataagtcagccaagccaggtttttctcccatttagttctactgaaaaaatacatcaagttctcttacaagtgctttcctggaagttaggtgggaaagaaaaatttttgtaataaattattgtgatattgcattgctracaggtaaatgatggaaactgggatggatttggtcctgtgtttgaaactaggtgatrggatctgcaatcatgcaaaaagcttgcaatcttgcagttgtgtggaacagcataataactaaggaggagagaaaatatctcaaagttcagcaccataaaacttaagtaaatgttaaaaggagtcaaacttttacttggccccattaccttggtgaaagaaagcttcatgcagccacctaattcaaatagaagagggatgggggaaggaggaaaaaatactttaacactcacaagaatagctca

SEQ ID NO: 3136 - DNA, 600 bp, Bovine  MMBT19078
acctcatgaactgtagcccaccagactcctctgtccttggaattttccaggcaagaatactggagtgtgtagccattcccttctccacgggtattcccaacccaaggactaaacctcggtcccctgtgtctcctccattgcaggcagattatttaccacctgacccaccagggaaacctcaataactagtactattaaaaaaatactttggtagcaaatgtttatctctgtcatcttgattaaatgctttctcagattttatggcagatataaactgacmtagtatgtcttagtactagygaggtaagcatttcacaaatgatattgatgtacaactaaatgttcatgataaatatagagtattcattttaagcactaatgtttttcattgcattgttgtgaaagtagcaaccatcaataayagggaaagacagccttttgtaattcactgcccgtgagcataccaggccattggaaacaacacgaacacaggaagcatatcttttcatccactgttttagcacctacgtctagtatggtgcctagcacataataggagtctaataaaaatgtgtcaagtaaatgaatgaattacgtatr

SEQ ID NO: 3137 - DNA, 600 bp, Bovine  MMBT19094
attgatatatggcagaaatgaacacaatattataaagcaagtatctgccaattaaaaataaattgttaaaataatctgtttttgacttgatcagtggatgaactgttgtgctttgtatttagatatcacttgtggaaataaagatcccccagatgatatcaaacagcagctatttactcagagattgatatagcaagggagtcagccatcatcacttgcatttggcagaggatcaaaagtgttcacaagaggtgagaagctttataatggaaaaaagagaaggcttcaggtatgccctgmttagaagttattggcaagaagaagctggaagtgccctaagtggcagcagggcaacctatgcaattggtttggagaatatatttgattttttctggttggttctgaggtggaaggaagggcacaaattaggggagctggcaggtgttgaccaaatcctgactattctgggctgattgctacagggctagtggattggcttcatgggctcattattgaagaagttgttggctataattctattgtgatatatggtctagtccttatctgtttgtatattcaatctcttgtgctagtttgatt

SEQ ID NO: 3138 - DNA, 600 bp, Bovine  MMBT19395
ggggtacccaaagggcaaagaaaaacaaggtaaatgataatacattatccacctcatattttggcttcaagtcaattctacagcaaacaggaattttcagaaaatcatcatatttcacacttacttctgaaaaccctaagaacaaattrggctaatcctgtaacaaatcacacttggcaaaatcatatagcaataactttacataatgaagaaaacaccaaaraactgaatctcagccctggttccaaattactctgtgtgrtcttggaaactgtcctccagcatcaacaactataaacraacaascttctctatgtatctcatttattagaatgaaatgagtcgacaaatgtaaacatcttatttgcatgtaacaygtgaaaacatgtaaaggactacagttgtcaaatgagccatggtacagctagcagtaaacatccatttacattctgtataacttaagatcattgtgagtccccaaagaaaggtattacataattcccttcaaaagtatttaaacagacattttccataccatagaagtgaataatcctcaagcttaaaatacagaactcaaagtagatgcaaaggtcaccaagt

SEQ ID NO: 3139 - DNA, 600 bp, Bovine  MMBT20288
ctgatcagacacctctctaagaaggtagattttttttcttaatgggagttcaacattgagggatagacagcaaagtcactcactcacagtctcaagccaacacggtacagcaggttamggcagtgagggaccagtgtgagcggtcagaagcctatccaggccaaaagcaggtcactcaagaactccctaagaaccaactgctgtgcagctttctccaggatggtcacagtggtgcggtttrtccagacaaaccacagggaytaggtcgtgccctgccctaagtatttcaagtttcccagytccacgacgaactccccaagttcactatccctgggccctttggactaggggacaatctgtcactatttcaaacttcctggtccctctccagcctgcatttatgtccccagagaattggggcagcagttggccagactcaagattgtgatgaaatggagtaaacagtgggtccttgtgtgtgtttagaaattaaatgaactctctttggagtcatgggtactcctagctctgcactaggagtaggatattaaaaccaaaaaaaaaaacaccttattttaaaagacactcacttccccaact

SEQ ID NO: 3140 - DNA, 598 bp, Bovine  MMBT20882
  misc_feature (1)..(62): n is a, c, g, or t
nnnnnnnnnnnnnnnnnnnnnnnnnnnnnnnnnnnnnnnnnnnnnnnnnnnnnnnnnnnnnnaacttaatgagcacatttgaataaagctggaatttaaaacaggagttctttggaacaaaatagccacttagagaaaagtacttgtaccctcaattacagacaagacatcaaagctcagggaggctaaatgactggcccaaggtcactagcttcaggttgctatgctatgctaagtcacttcagtcgtgtccgactctgtgcgaccccatagacggcagccgaccaggctcccccatcragagtactggagtggggtgccattaaggcacagcaaaacctgaacttgaacccagtcaagtctaacatccaggcactcctccaggagtgctgggcactggagaaacacctgctactgtgattacaaggtccatgctggccaccaaggggccctgaggcccaaaataaaatgcccacagttctcccaggctctgtccgtacccctggggccccggtgactgtgcagggagagtctggcccagggtggagtggggtctgagcagggaagcatcaggtaaagaaccccactcttaatttag

SEQ ID NO: 3141 - DNA, 545 bp, Bovine  MMBT21055
gagggcttaattgrtctatggaaacaggaagcttacattttaaaaattattggcagttgcatcttacttagcatcactctggtaaatgtactrgatgggagaattgcttaggagatgtcttaggtgagagcttgctgcttctctgactttgtcaaggatgacagtgatgactggggagttgggcagctccagtaaaatcgtgggctctgttcttcccaccaggcagagaggtggccactgggtgcactggcagatctttgaggatgaacataccaccacatcratgcctrtttactaacrgckgggcagaactgggcctattagcttgcttcccagttgggagaatgggcagtgtaatgaaaagaaccaaggcttcgtggtcagaccatcctgtcttgaaatcttatgactgtcactagttgtttaactgcccttgggctagttagaaaaatattgaatgtgtaactgtgtaaagtggcggtttagtcactcagtcatgtctgagtctttgcgacctatggactgtagccgcctggctcctctgt

SEQ ID NO: 3142 - DNA, 600 bp, Bovine  MMBT21656
cctctatctccagttcttaaatgtgagtgcgaggggataataatcagtttggtaccttgcactgttgtgaagtgtgagtagctgttttattgataattttctaagaattcatatgtatatgaactttactgaactttaattaattttgtttaaaatgtattaaggaaatcaacttgaatcacagaacaagattacacagattactttaaattcagatactctattacatgcactctgcatagtcccctggtaataaaatcttcattctgttttcccataaagctgattacaatactttcygggtacaatayaatataagccstctttggaataatccatttggatattactactagtattagaagcaggacaagtaaagggaaggagttcctaccacagaaawttttaaaccctcctttggtagcaaaaactaaagtcaagcccttttaatagcagttacttggtgacccaacactcaaatctagcctttattgtgactctatggagacctctggattaactcacttttcaattttcctattggtatagttaatttagtaattattgtatcataaatataagattgtgaataaatttgtc

SEQ ID NO: 3143 - DNA, 600 bp, Bovine  MMBT22426
cttcctgggcctcccaggacctggctctccagctctgcctgttcaagatgagttattcccccgtttagctgcatttctgatggcgcctgccccactctggggacagcagagatttaagggccgtggtgtcttgttacagtaccagagattttctctcataaaacccacccggggaaaggtttaggagatttgtggtcttaggctgaggaggcagtcacgaggcaggcagaccagcggtaggggtgagtctggagtaggggtaggctctggagaagctcctaaggctgccctgggcagacyctcctgccccrggatttgcccccatcccgcgtgaaggctgggactccatcctgctcctgggctgtccaggaagcctgctcctttggggcagggaaatrgtaccctaggcaacctccctctgagcctccctctgagcacagcactgtcctacctcctggtcttagccagccagagccttgtcttgctgaagaaggagggggtcctcggctgaagggtccaccctggtttgcccgttgacttttctgtgttcttttggcccccttgcccacccttttctttctgtttccagtttgcaggaca

SEQ ID NO: 3144 - DNA, 600 bp, Bovine  MMBT23293
agtaaacaagttcagtacttgtttacttaatcacggctacatttacacattaacatattgatttggtgttttgattatgttttatgttaaggtgagttaaccttgggcttccttgttggctcagtggtaaagaattcgcctccaaagcrggagacatgggttcagtgcctgggttgggaagatcttctagagatggaaaggaagatctactctagtactcttggctgagaaatctcagtgacaaaggagtctggctggcggtcaatgaggtggcaaaagagtcagycagacaaaacttasggattaaacgaacaattttgaattaaccataacactttaaacaggttcattaatttttacttaatcttagccttgaaactgtgaattcctattagtcaagtctgctactaaattaaacctgaaaaaattatggtggttgcattcaaaacatttaatgaagagtaaacattttcctcttatggaagggaaaaatgccaaccctaaaaaagaaataccaaccctactctacttgctgaaaatgatttctcattgagtgctcacacagctttgcatacattattacccatgaagacgtaagtg

SEQ ID NO: 3145 - DNA, 598 bp, Bovine  MMBT00133
  misc_feature (1)..(56): n is a, c, g, or t
nnnnnnnnnnnnnnnnnnnnnnnnnnnnnnnnnnnnnnnnnnnnnnnnnnnnnnnnacgtgtcggctgtaggcagcgagcaccagaaacgcaccaagccgcgggcggtgggtgcctgatgcaggcggcatggcttccacggctcacccctgttcaaccaggaaccagcgagggtagggggatcaagtttggaggtttcgcggggaccgagggcgcgtttctggacaccaccaccagggggcgtcccagccccgacgtacgcgacgccttaagtcctgctttggatcggtattgttcctgycctgaagtttgcggttaccctccagcagtgatcacgggagtgctccagccccgaccactagggtgcatgtcagccctgactccctgggcttcccacaactgcccaccagcagagatgcagccggtccctggcaccaggaaacatcccaagatgcgagctcctgggaggtctgcccggcccgcccgccccctgcacctgtggggcgatccacctgaccccgcctcttccaactcactcgagctgataagagaagctgtagttgtctgggccgactccggcggtggccgcttcctcccag

SEQ ID NO: 3146 - DNA, 600 bp, Bovine  MMBT00960
cagtctggcaggaagctgagaggacggcctggtccagacactcacacgatcttcacagtgttgagcatgtcggacaggacatacgtgtcatcccagccctttccgggcttcctcagggtctgctccaaggcccgrgccatttccaggagctctggtgtagcgagtttgcactcagagtgcagctgacagaacaggatctcgttgacttcaccctcgattcgccggacgtacaggagggggaacacagccttgagcccggccagcactgagtcctttagccccaggtctcggcacacaagrttgaggataaagacacctgcagggtgagaaaggagaatgaccgtggttcagggaacacaggagacaaggttctgctctgaggaataccaccattcctgatcccgggaggcaggtggagcaagggacacatccatggcagcagtgactgtgccgagaacacacagcatacgaaggaagagagttaggggatgcgtgaaccataaggcttcacgctcatttcttgctctcttgtgctgctaacaaatatgaccattctctatgcctctgtttcacaaaggacagtttcaactctgtatgcaa

SEQ ID NO: 3147 - DNA, 600 bp, Bovine  MMBT01276
gcctactggggaattgctaaacttgcaaaacctggactttgccaattttgaaaactctaatggtttgaattctcttctgctgtcctacacccatcctttggggttgatggaaataaaatgacttgaagggaggtgtatgtgagtaagtcctctcagggctcctgagaatgctcatcagaggtactaaagacatcagtgcatccgtacttgatcacatctttgtagagagcggtagtgtggattgtgaacgaggggtcctggagtgtcagagagatattggggcccgatttcatccatgcyttgctccatgacagttgtttctgacctgggctcctgtctctagtctgtctcctgacactccaccctttttgctgcagcctgggagatctttctgaaacagaagcacagacagrgcagaaccttgcttccaatgccctggggtctcactgcctgcagaaattatctccaggtacaatagtatctaaccctcaaaaagcagacacctatgtttctttcttgcttcactttcaaggatgagatttctttctatttgcactctcaaattaaaaaagaagcaaaagcaggcatcagaatccaagg

SEQ ID NO: 3148 - DNA, 600 bp, Bovine  MMBT01721
atctatggaggacactaggcatcttctcaaaatagagggagaaaagtgagttcttgaaagaagggctaggcacagtgtcagaactccagggaagcaagctgagatgaatgcagaggtctagtccaagtaggaatgtaaggtccaagtcagatactgggccgtaactcttgtgtttactgtatgtggcgtaagagactacagcctggaaaacaccataattccattgtctagggattcctggtaggcaaataacagtttgagggcagagtctaattctggaggactggaactccgcatatwttggcaagtaccatcaggattaactcagggactgcttagggctgagcctgcaagttgatctacaaggttrtaagtgattatagctgagtgagggtaacttgaccatctcagatggaaactagtatgagctttctttgacagtaaccactggctagcttttccgggaagactttgagaactgctaggaatatgggcaagaaactctactcactggagcatggtattctttttaatttccattttaaaatgaaagtgaaaatattagtgacagttatggtatgtcccagccctgtatctaaa

SEQ ID NO: 3149 - DNA, 600 bp, Bovine  MMBT01850
tatggggcccttagccacttacacaaataacctgatgcttggtttatggccgttgagggattataacacaagacaggrgagctcactaaaacagtcattattgtacaaaatgacatttcttttagactgatagcagttatgaagaagttgcattttatgtttgttgtcaaagactacaaaatgggctactgggattagattgtcaaaaaatctgtagaatctagccccttgcttgagtagcttgtattgaagagttgacataaattatagcaagggtccacatttttaaaatgtcttgtyaggtatgggaaygggaagttactagaaaatttacactctagtgtttatgtcattcttctgaaaaaataattatattctaggtgcctgctttgatcatgaaatagaaagattaaatgcattttgccaaattaggatttctaccaataaccaaaggatttgagaatatagttgagaacttggaattttttcctctgtttttgctttttgaggtttttctatattttcttccttgcctatagaataactcaaccaattatagaaacatcgtgcttaaagaatctcaaaaataatttggtaaag

SEQ ID NO: 3150 - DNA, 600 bp, Bovine  MMBT02009
ataacacatactctctaaataacagctccatttaaattattagcgttagtggggtgggaaaataaaggtgcagagtaagcattaaataaatatctgtgagttgcaagatttccaaaagagaaaacagagaaatctccagagccttctgccaagtgtctggcttgtgtaaaacttgagaccttgaggaaggagtgaagaaccgaactgggacgcaagttggaagtctttgaggtcatggaagtttgcaggcggcaaatatgacctagagagcttagcttcggaaagtgccatcagcactcrgaatgctccagtggttgtcgagggtgagagccaggaaacggcatctgcgggggtggttatcatcacatactccccagaaccacaaaattgcccacatcctgggctcatggaccagggtttccactttagtggcctgataacccaraggtcttattgacaaatcccagaaaggaagaggacttcatggatttgtgtgtcttggaaagctgagtcctatctcccctgactcactctggaaaagtggaagtgtctcttcgcctgacccaagggaagctgatgtttggtgtttcctgggagatc

SEQ ID NO: 3151 - DNA, 600 bp, Bovine  MMBT02051
gagtgtttcagggctctaaatttcctctgattccatttaagaattcttcctatgcagcagtaaagcttagtacttttattaaatctcaaaccttaagtatgtacatctttttattatcctagcggcaaaacaggaagtatgcatgcagtacttttgctgcataccacaatatgagtccagttaccacctttgacagaacagttctgctaaaattttatcttatgttattgaaacgtttacaaagggatatatccagtaatgtttatccaaccagtagaaaaaaggaatgcctcaaatgckaaagtatttagacagattattttctatctaaaggatgaagcacacccagaatgggaaacagtgatgtacactgctgtttattgatgtccacattacataaaagggaaagtataagtttaaaaaaccatcattttaatatcccatgtgtgggtgaaaatcttacatgaatataaaagtagtgtgagcattgacttgcctaatggtgctggagattataaagtttgttttygattatcaaattttttaaagtttatgcaataaatgaaatttacttgtatattcaggaaataaaacatactt

SEQ ID NO: 3152 - DNA, 600 bp, Bovine  MMBT02261
tgaggtggagctgatgtaaaaataatggaaacaaagtgcacaataagtataatgcacttgaatcatcccaaaccattcctccccctccaactccagtccagagaaaaattgtcttcaatgaaaccagtccccggtgccaaaaaggttgagggctgctgcatagaacactgagtgtgaatcaatatttagcttattcattgactttcaaatttaccatgctcaaaaagataaatcctagtttggcttagagatatttttttaaccagttctgagaaataaggtatttgagggcaaattttyaatttttagcaaacgataagaaaaatgttataagaaaataatatatagctatactaatgactgcaagcttgaaatagtgttctaccctgtttaatgaggtaacctatgactgatcagttatgtagacaagcagaatttaattagacatgtagaacaaatgtgatttaaaatagcaactaaaatcactttagctctacagctatttcaaaagcacatttagatcctggagtggaaaagaaatagtattacaagaaagccatgaagctatcactgggggattttctttctttaatagtggaa

SEQ ID NO: 3153 - DNA, 600 bp, Bovine  MMBT02721
ccatcgagcacattttgtcacaggtaagatccataccatggaaatctcaggcaggttttgccctgaacatcctccgtaattagcttgaattgtctaaaggcagcttcatcattctgcagatcagcaagattcatttcaaaaacacaacccttgaggccatcagatgtgattttgtttccttgagttcttgtggtcagtgctttcctactgttccttgtattgaacgtagctggtgctttcacatcataccaatctttcttagaaaatgggtcaaccactttcttcttggctccctttctrcctcctttcgtaaggygcttattcttgccgaccgtcttggtgacgttcagaaagccaaaagggcagacgcatagcttacttgagaacttcrgtgagcggggcagaatgcactgtctgtatgaccccaagtttcttctcttaatcattcctatttcctacaggtcttcaaaagagtaagactcctgtttattcctgtagccataaattaaaatagaaataccagcatggaagcaaaatagataacatataagaaattatgaaatttacatgtggcagtgtttatcatactacagaaaagag

SEQ ID NO: 3154 - DNA, 598 bp, Bovine  MMBT02822
  misc_feature (1)..(84): n is a, c, g, or t
nnnnnnnnnnnnnnnnnnnnnnnnnnnnnnnnnnnnnnnnnnnnnnnnnnnnnnnnnnnnnnnnnnnnnnnnnnnnnnnnnnnnttaatactaggttggccaaaaagttcatttgggtaagactttatggaaaatccaaatgaaatttttggccaaacaatataaggttgcataagaaactcattgacattaattcaaatccatttctgtaaaaaatttaaaagagttaagagacaaatggagctaatctatttctttaatttgaggggaaatttccagaaactgcccaaaataaacacytcactcaaacctctaattagatcaatattattttactattgatgaactactgcttaaatgtacagatttatattatattctccatgtaagatttcttctttcttgggttttatatcagataaataacctcattcatcagttgaaaagatttaagtcctaaaatttaatgatgattattatgttaaagtacagaaaacattagggaaaactaaaaaaaagttttacacttccttgcctttaactatgtaacaacctcagtaataacttattgcatatttattttattataattataaat

SEQ ID NO: 3155 - DNA, 600 bp, Bovine  MMBT02970
gcaacccttggcagtgaaagtgtggaatcctaaccactgaacctccaggaaattcctcacacggtttattttggaagacaggataggaaaagggcttagagagctaatgaaatcaaatgcactcagaaggctttcagaggctgatacaagagttctcactttctggtgcactgtgttatttccacggtcaggaatttgacatttatctgtctgcattctctctggatggtgggttaaactgtagacaaaacacaagaatggttgggggaataggattaattatctactcgttacccattyaatcaatcaaacattgttaagatcatgaaaatatgtgatgtagtgaatactactgttagaactgagttctcaggataggagaaagaacaatactaccctctgaagtcatgacacttaatgaggttgcttgttttatggtttgtggttccttgaaacaagagagagcagttgtgtgcatgatgtttgttttattgccacagatacggcaaacaagcctctgcaaaccactttgaagagagcatgggacccatatggctggatggggtcagttgctcgggaaaggaagccagtttccttcag

SEQ ID NO: 3156 - DNA, 600 bp, Bovine  MMBT02990
ggaaagcaaacttcagtcccactctggtgggagattggttcccagagcccctgcagataccaaaatccacggataatagtcacttaaataagatggcacaagttagcttgctccatcggagaatggaaaatttgcagattcagagggcaatatgattaataggccctcagttccaaaccaggctatgctagttctctagtctgtgatctctctggctctcttccccttctatggaatctgtataattcctgctttaactacgtccaaagattttattgtgagatgtgaggtgatgtaaawtttccctatttgatcactaatcagccaatgacttttagtgtttatgtggcccgtgtcctctttgcccctcccccatcactttatccttaattwaaaaaaaaaaaaaaggcatcaattctaagacatttcactttatttaaaagaagccaatatacaggatataaagggcatgatatttacaacaatacagtaaacaggttggtttccggtagggtcagtagtctttcagtgagtataaacccccccttccccttgacgctaaacccagctggcagacaaagagcagcagtggggtgggat

SEQ ID NO: 3157 - DNA, 600 bp, Bovine  MMBT03008
cagagaggtcaagcaacttgtgaaaggtcacacagctagctggtcagtggctgagctaggacttgcctccatgtctaatgctatttccacaatgatatgtgggataataaatgatggagggccctcatgggtgagctgttctttcaaaaagaaaaaagtggaaaataagtcccactaactggggaaaaattagtgcctagtgagttttttcttcctgattatacaacatgagcaggattgggatctaggtgagctgagtggacactcaccttgatgcaaaatttaagaaaggccccaaastcagtcatcaagacaaataatgctttaaaaagtcaaaattaattttaaaaatctacgttgaacaagatatcagcatgttagttaaagatgggctctgttgacagggccaggattagggagaggtggatgagatgagctgtgcaggtgtgaggttggaccttgaaaggtgtggaaaacaccactatgaattcacctaaagccatttgtcttcttccttggcttagagacaactcatgtttcattttcctttgcagtttagcttggccctgtgactaagttctagtcaatagaatgtctgtg

SEQ ID NO: 3158 - DNA, 600 bp, Bovine  MMBT03106
aaattagaacctaggttcttagagaatctggttcccttcctctccaaccctcataatttgtttagctaaaagcatctgtttcacataagagcaaattgcccttctagtgatcatgtattttgaaaaccataaaatctgtttacttttgagaagaaaataacatttttttctaaaaggagatctttgtcccttattccttctgacatatcttccctgtgtatgattccctattaatcaatttttcctactcccatgtcaagttttccttctctactaaatcagtcctaagccattttcccyccattttaaaagcgatcagtgaaacaaactcttgactccaactccttgaacaggactatctctaagttctctttttcaattctccagtcaaacttccagtccctttattccactgaagcaactcatcaaagtcaccagcctccatattgcaaaaaaagcggtcatctctcagtcctcacacttgacccagcagtagctttcacatggttgaccattcttcctccttgaaataccttcttcacttggcttcctggacaccagtattcccactccctccacttccccagtcattttataaat

SEQ ID NO: 3159 - DNA, 600 bp, Bovine  MMBT03331
gcctatatagcttaaatctggtgtttatttttcttgtccccattcagtatgtaaacatattcataatttaatacaggttatgtgcattttataattaacattatggacttagttgggaaagcactcagaccacactgtatgaaaaatatgtatctttttctatattagactatatggttcagtgtgaatcctaaaggtggataatcccagattatcttactttgctgggactactttaacaaaatgccacagactaggctgcttaaacaacagaaatgtattgtctctcaattatgaatrctgtgagaatcattccatccrttatggaagtgtgggatcaargtgtcggcaggtttaccttcttcttaggtctctgtccttggacggcagaaggctgccttcttactgtgtccttacaggctcttttgtctatgtgtgcacatcccaactgtcttagtcccagtttcttcttcttgtaaagacatcaatcatattggatgaaggcccatcccaacagtctcattttaacttaattactcaaagccctatctccaaatatagtcacattatgaggtactgggagttaacatttcaacagat

SEQ ID NO: 3160 - DNA, 600 bp, Bovine  MMBT03377
caaagaaggatgtactagaaagtgactgggtgactattttagatgggattgtcagtgaagacttctttgaagaggtgtcatttaagctgaagtcttagtgggaggaagggtgccagccatgtgaagattatagaagagtgttctaggaagaaagaaggattagtatgaacactccaagaaggaatttgtttgtaaagtcaaggaaacaaactaaaatcagtgtgaatatcccctagtgcatgatgaagagatagacatgagacaggttcagaaaggtgaagcaaggaaagattacaaagsactgtgtaagtcaaggtaaggagtctgggttttagtcaatgcactcctggaagacattggaaaatttaaacatgggagtcagatgatcaaatttttstttaaccaacaaaaattctggctcctgccaggaattgaatggtgggagaaccagttctggaaggacagaggccagcaaggaaagtagggcgatgtatggctggccgtccatcacacccatcacccctctttccttggcacacaactggatagcccttctcagtctcctttaaagtgagatgtgactgatttctgtttggtgta

SEQ ID NO: 3161 - DNA, 598 bp, Bovine  MMBT03585
  misc_feature (1)..(3): n is a, c, g, or t
nnntgttcggaggtgcttgtaatgcaaacagattctgcctctgaagacatagcacttgtgtctaaaaacctctccatttttctctttgtatatttctgtttcaaatactcatggacgtgcccctgatgttggtaggggaaaacccactttgtttcccttcctgtaaaaactgagtgtttatcaccatctcattataaaagatttgggaggaatctacactatcagaataaagccctttgtaactaagaatctttataagtactagggacatctaagtccagcatagttaattattgagayatttctctgattgttagccattttagtcaagattatattagattcttactttgtttcagtttcataatcacttcaatattttccagatgtaatttttctttattaaatgaacaaatggatttgggttattacatgggagcttttgttttgcaagtatattttgtgacatttcctgtctaagaagtcttatgtttttaaaaggagaaagaatgttatttatagtgaaaaaataattcatatttatgaagattttccaatgcttttgagtaatccttcagcattgtttgtaaaaatcaca

SEQ ID NO: 3162 - DNA, 600 bp, Bovine  MMBT03624
tagaaaatcagtgtgcttcaaattccacaaatacctatatactgttaaaaaattaaaacaaaattaattatttcccattttaaataatgtttttgagttatcttgtctgtgacatatattctatgtattatatttcatataataccttagaattgcaccaaagtcttttaaacttcagtaccatttctttctcataacaaccttatgaataagctctaattttattccatttgacatataatgaaaatgagtctcagagtggtgaagtaacttgtaaaagatttagctggtagttatagytggactcaggctcttcatataacactagatgcctttctggtctcctcaggaagacctctcataactgcaccagaatctttggcaatgtctgcctcctggacaatacattattttccaaaggtcttctcagtgggatcttgtgactgtgtctgagagcagaacattcaatagcacagktgctttctcaagatcatcacctgcgttcacatcagagtcctacgtcacatcagtgcaatttcaccaacaccacgttctcagtcctcgagcctcttgttgctgtgaccatctcacttttccacc

SEQ ID NO: 3163 - DNA, 600 bp, Bovine  MMBT03967
gaggcctttgagggactgtggccctaggacaccctgattgtggacttcaggcttccagggctgtgggaagcatcartgtccgattcatgaagtctccaagtctgccgtgctctgttacagccgcctcaggacacccaaacatcagttagcagttcctgactttccaccccgcctgccctccaaaccagtaagaggaagactggagtctgcagctctcctgggactgagatcatgtgtctcctccatggctgtaccaattctctctcccctcaccacagtttctcctcttagaagcagggytgggacaaagcrccctccggctcactttttacggcaccaaaaaagtaacgctmgtgaatgaatgactactaatagcaaagcccacgactggacaggactcgtgagatgaacaggagtctttatgaatcaaaatttgtaaaactattttatttgcttaaacaaaggagaatctgcaacgagcacacggaaggtgcaaaaagtgatttgttgtgatcwccagtgtccgtracrggcaaccgaagaccacacgacagccaggcccgccaaaggcagctcaaaatccagatgtctgtggcggga

SEQ ID NO: 3164 - DNA, 600 bp, Bovine  MMBT04028
caaggcatgtcatagagtatagaataattccatatcaaaaggaatgctggtattttgtttttcatcatttttgagttcctgcaaagagctggaataggaaatttaattagcaatattctgcatggcagtctacatgttcttcttattttcctttcattatcatttgcttcactttgacttatttagctcacttacaagataacatattttatttgataattaacatttcattcttttgagaaaactgaatagcaacaaacaatatttctactccaaagacacaatttcatactctactakctggtttttatggcatggtttatgttttgatatatttttcttgcatgttgagaaaatcaggttttaataaccaacaaagcaggacagaccatctttctcaaacaagaaatctgatatatttgctaaatgacatgtatataaaggtcaaagtaaaaaatttaaagttacctcctatcagaaccaatttgcatttataacaaaccaagaaagatctcaatwtcattacatgtcaatgttggtgaaaaaacttcctgttataacaatgctttccttaacatgaaggaatatttcctgttccaa

SEQ ID NO: 3165 - DNA, 600 bp, Bovine  MMBT04101
aacttagtcgtcttcggaaaaatgcattccactaacatcaagctatgtctgtgtactaattctctgctgaaatgcacagtacaaccagatccacccgttggcctcaactggactctactgaacatcagtttgacrgagattcatgccgacatcctagtgaaatgggaaccaccacccaatacagatgttaagatgggatggataatcctggagtatgaactgcactataaagaactaaatgagacccagtggaaaatggtaagatattattacatctcacattgaaaaaccctttgactyttcttttttgtgttcaacaacccctctcatttctaattagactttcttttgacttaataccacatatcccagttctaatttcttatttgagaaaaatggatataatcactaaaatttcatgttggaattctttaagacagcagatgcttacatggagttttatatggaaacctatggaagaaaaggaaaatgatttctccagtcatcactggtgtctggtctaaccttataataatatcacatactctagtcactcagctatctgtgaggatgtggctaaacatgggaaaggttatgatc

SEQ ID NO: 3166 - DNA, 600 bp, Bovine  MMBT04382
ttaggaagaactatggctatagcagggccctggcccacagtctaaaaagaaaataaatccaaaactggttatgccttttttataaagtcagtgattatcattttattaaactcacatagccaatcttttaataatttgttctggaatgtttctcaagaccagtaaaaagtttgaagtatttactttcttgtgaatttcagaaaaaaagaacaatctaatcttcaaatatctataagtttcttataacacttcacaggttgtcaagcagaggctcaaaaatgccaatcacacaaattacaraattctagtttgtaattttttccaaactagcagactgagctgcacttagagaatttaatatttcagagcaaactgttctagggggaaaaaaagagaagtacttactgtatttaccaaatgaaagaaagggacctatgcttgattgtagctgaaatgaatttgcctaaggaaggtggaaaagtggaaacagtgttcattataaaactcagctaataccgtctatggggtcgcacagagtcggacacgactgaagcgacttggcagcagcagcaatgcatatttccttctattaagttcact

SEQ ID NO: 3167 - DNA, 600 bp, Bovine  MMBT04532
gctggtgtgaaagactttgttttgccacaagccacagctgtatgattttggagaaatccttcatytccctgggtcttcatttcacgatgatactaatgatggtgatggtggtggaggagaaytcttaccacacagtgagagaggcatgtgccaggctcttgacctctaatatcttacaggaaaacccaaatgtactttttggccaacccaatattatttaatactcacagcaaccmtatggtggtggtaatattagccccgttttacagatgagcaaactaaggtcctaagacaatagcycagcttgctgaagaccatacaaatatcaaagtaaatgtcaaagtcaagttcaaacccagggctatttagctaaaaaaatcagtgatcctcaccactccctccctatgtttttccttctgggaaaatgaagagatttggtgagatgacctcaaaggatgctttaaactctaaaatccactgtggagacgtgcccatcctcatccaaaggttgttgatgttattgaatataaggtgggatctttgttccaaacaggttattctagcccacctggcagagcagggcaggacagagtacgtgga

SEQ ID NO: 3168 - DNA, 600 bp, Bovine  MMBT04713
cctgcaaaggatgaaagatggggaagtatatttccattgttctctctggcttctggtagataagatcctgctttatttgtacttggcacatacaatgtatatatttagcaactttgcactatttgaagtaccttacacattgcactttactctcctaatggtacttttatgtgaaatgcactttattgacaattatgtcttatcattcagtagaaaaagacaaattttacacctatgtcccagaatacttgttattccttgttctaatggaatgaaatttctaataattcctgagtaatrtagaaatatatctccttacattgggagaatgggaagaaagtgaaaactgttgaaaatgaaatgtgatgacctttgaacgytggatttcagagagacgggttcccaaagcagggtgcatctgtgagyactccttgtcatatttctttccatacgacatgrgttttcatcttatttccccyrcaaaacagagatccagatgctgctggattcattctaggcatatcatttccatcgtgacattcattattgctrcttcctgatgtagtcattttactctgattttgataataaagacaccat

SEQ ID NO: 3169 - DNA, 598 bp, Bovine  MMBT05055
  misc_feature (1)..(13): n is a, c, g, or t
nnnnnnnnnnnnntgcagagctggtgggtgtctttggtgtccagacacaaatacacactttgacattgaatggatgcctttagatgatgaaatcaggcatttgtgtgaagttcgtgttttcactcatcattggcttacataatttggaaatacccctacatgtggttgccacagaaaaactttttcaatcccctttcattgcagttgatgggaaattcaaagcaccttgctaaactgaatccatttccaagtgaaggtaggtattctgactccaccagatggcgcacgcatgctaaatcmggacttcatatagataaggacaaagacaccaatgtaatcagatactatcttttctcyctccccgggcaacccccgaattttcctgtgtgttcgtaatttacgtttctagatcatgtaaatacagatgtgctagagttagtcacccgaatcaactgttsagtgtctaaggctaggctgtaaaaatgatcattctcctttgttttcagttcamgtattctgactattcctttgccacacatgccttgatttttcatccacttacatcagtggactgagtctcttttctttcttacacata

SEQ ID NO: 3170 - DNA, 600 bp, Bovine  MMBT05274
ctgctcaaatcccttgtataaaacggggcagtatttgcatctaacctacacacatcctcccatatacttaaaatcatttctgggattacttacagcaacggatacaatgctaatgctatgtaaatagttgccaaggcttggcaaattcaagttttgcttttttggaacgttccagaattttttttctgaatatttttgatccttggttgattgaatctgtggatgcagggcctgctgacaggaagggctgactggatacaatttcctgtaactgcatcacaactttctttgttatcattwcttggtcttttagttatcaccctggcttgctgtgtgataattcatcacgtgggtgggctgtgctttgcttcacttctcttcaattattgtcacttgaattgattcctagtgctgatgatgattagccatggagygtgggggcttttcatactttggtctaattttcttagaatgaattcccagcagttggaacatcaaagcaaaggggaattagtgtttcagtgctttgtgtttcttgctgtcatattctgattctgcttatccccttgtctgcaatgccctgcccattcacttcttggg

SEQ ID NO: 3171 - DNA, 600 bp, Bovine  MMBT05341
ctgggcgccaagcgagatggaagcagcacatgctttctttctcctgcctctttttcgtttctactcttccctccaacttttgacgagaaaatgaaaagaagccaggaaaagaggctaagaaatgcaccagagaggagttctgggggactctcactcttggaggctcgaggacagaatcaaggggcccatgaatttgggtgggaaagagtatacctttattgtcatcagtctctaaatggaatctagcatttccttccattgtgaacgcaagtctcatggctcagtggaattagctgtacygtggctttgcctaccaggttacagttgtcagaattatctccccgtgktgtttacacttatggccacagtatttcaaaattactgttgttattacacccactgccagatcttattwtttaacacatcaacaaggaagcacatgtattattatatcacccatttgttttgtttaatattgccacactatacttaaaaataattgatttcctttattggtcccttgaatattctatttcatgcatttaaaaacacaattcacaggcttcaccaaactgccaaagggatgcaagcatgaaaagt

SEQ ID NO: 3172 - DNA, 600 bp, Bovine  MMBT05665
taaacacgatcttctaatctgaagctcccaaagtcatataactattgtaaagttgcaaaaagttcattaaaatcactaatagtaatataacatagttaaaatatcaaagcagtctttcatgaaacactgttatagtaaaagtggatgaaacaaagagataaaacaagaattgccttgggcagagaatacaatgctggcctatagctagattcacaatactgtgggctataaacattttcatgaggatttgataaacctgtaattttctcctttctttatagtggctttttttatattcartcaaactttaggacccagtcattgcaaataatttttccagaattaatttctgaaaaagagatttttgaaatctctaaatattttcattgaccatgaattgtttgaaatgctttccccagcattctgcctgkagaaaattatgatataaagatatcagatcccagtaacacaccaagctattctatggctttgtagagcactagaatgtgagtcagggcttcccatgtggcgctagtggtaaagaacccaatgcaggagacacgtctcttgccagtgcaggggacataagagacatgggtt

SEQ ID NO: 3173 - DNA, 600 bp, Bovine  MMBT05670
attttcctaacttcaaatcacaagaaaaataatgctgggatctctttttctcatctcctccttgaaacatcgccaagagtcttgaggtgcacaagtctgatccaagtgcaatacaatctccttaaactctttcttcaatcaccttccaccccagaattcagatacattaattttaaaataacactcctttgttttttaatattttatcttactacataccataagatctttcaaaataaatatcatttgtaaatgtgtccagttctctagagaagtagtaagtccccaagtcatacctgygaattcgctccaatggtaacaatttcatataaaataattatttcctttttggaaatgttttcaccataaccaattwtaattccacacagggaccacagaattaacactaaagttaaacttgccactttctttccttctcccccaaatccaactaaatgaaaaatgagaaagctatgtttatgaaagttagagctcctcaactagaaactggtacagaggactaagtgttgctataaagcttaatagtatgcatttactatgaaactggtaatggggtcaagcttttgtttttcagggttg

SEQ ID NO: 3174 - DNA, 600 bp, Bovine  MMBT05692
ctctccttctcttccagctcccagcatctggcctaccagagaaaaagtgagcattcctgttacagaccacctggctcaccccacctggtgctttcttttgcacaccaaatgatgcccattattggatgctcttggcaaagacatcttttgccctttgttaaattctgctacatccttgaaatgtagaagatgctaaataatctttttttgaatggtaatcattaccttcctaaaagatttctaaagaagaaccacgtgctcaaattaacaaatggcatatgttccagtaagccttcttcytctgattttttgcaggggaaaggctaaggccaaaaaaaaaaaaaaaaaaaagccctaggagattcaactcctttgttgcttaacagaaaatacagagtggaaagagccacaagacacagcttttggtttcccagatcaacatattttaactcacaacactgactgagtccagggtagggaattagagaatgggttatacagtagagccaatcatcattagaagagttaaataaaaagagacaaacacgggaatgagaagccaactaaagccccagggagaagatgatgtgtgagctgggc

SEQ ID NO: 3175 - DNA, 600 bp, Bovine  MMBT05745
ctgttaatacttggccagaaagtacactttgtctttgttttcrgtgtattttccytcctggaagaaaaacacaaatgggctcaaaagaaataaatagaggaacgtatagaataccttaaaaatggcagctctatgactttaccaaaaaagaaagaatgaaggcataatgtacttatgttcactgacaagcttgccacacttaacagtcactttctatggcactcttgaycttctttgaaaacaatggaatataaatattcagtcagaaggattatcctatggatggagttaagttataayaaggactaaataaagaacatggttaagaattatgcagccttcttattttactttttctgagtttccaggtgccccctcccctcttttggcaataacagaaactcaaggcacaggagcaaaattcaactgaagtctatatgccaaacgaaatagaacttagcatttatactctgcttctgcttccacttggaaattgtcttttccccctaagaaacatatttaaaaggatataaaagtggctttctatttttggccagaagtagaaaatgaaagacaatggaggaaaaaaaaatattagct

SEQ ID NO: 3176 - DNA, 600 bp, Bovine  MMBT05785
gagtcagagagtctgagaaaggaagataaactttrctaagtattgtcatagcctgaatgagaagttgagtgctaagggggcccctgtaaggtggtcagggctccaagagtttgtccccagcttgacttctgtcaaactgtctttatgacaaggatgttttttcctacccattgtgagcgttttatcctcaagacactaaatgctttcatcastgtctgcttgtgaagaggaagttgttggagttttgcccagtttggctacaagtagggtaggaagagatgtcgraaagtgagccaaagygcacttgaccggaccgtgtttacctcacatgtgctgtgtcatgataaggatggggggattggtaaaaactgtcatgctccataggtgccttttctagtgaagggtaaactgtagaaaagggaaattgatcaataatgcagatgtaaaggcaggctatttgtatatcatcaggctgtcagcatgtagtttcacaattttgctcccaaccatattttgttggaaataggaaatagcttaaagaaccataaaattgaattgttggttagaaggaaatttaaaaactttaaaatgaaactctct

SEQ ID NO: 3177 - DNA, 600 bp, Bovine  MMBT05957
atttgtttgctgtttaacagccgcctattaaaattgcttagtttgcaccacattctttttcttctttttcttttccgaacgatttcagcagtaaatggatacatatatacatatctacatacataaatgccactcttggcttttgcttactgggttttgttgtttaattaaaagctcagccttcctcaggcaataatataacgtgaccgcagggtgttcatacactaataagaggatctacttcacgaccttcatttgataatctctaaacacgcttataacccaatgaaaacttgggckacaaataagatcaggaaatgtcttaacgttaattcaccgaagcagagtttccctgacagctctcctgcccttgttccccgagttgggaaatgggaaagagatttttgaaatagactagtagccaaggtcaagaaagggtgcccctctgtttcaggaagggggctctgaaaacgccccctgtctccttttcgggaactcgaggcttcctgtcaggctcctgccccaccaggcagcgcagctccactgaaatctcaagtcagaggcaatccaagcgcaaattacccttcctccgcctgccag

SEQ ID NO: 3178 - DNA, 600 bp, Bovine  MMBT06032
gcatcatcaccaatttatacacaattgactgcactctgactctgtccttattgtttcctcagccctaaacctcagcacattattgcttcagaggccaaatgcccttaaggcagtccacgggatgcctctttccagtgtcttctttgtagcctgaaaatctttacagtccattcactactcccagtttgacttcatttctgttctgtagtcttctgatcttccccagcagtttttccttcaacatgctggaagaacctttggctctcttattgcttagctctctctgttttgtgtccattwatgtgttcgaatcgcctttgtgcctttatttttagtgaaagaacttaaaatgacaacatggatactgccacaattaacctttatttctttatattcttccccaaataaaatacgtgcatttttcctctgaagtgtgagttactctctaataatttcaatttaatttgctttctgtttttgttgcaggtcaaattaattgatgttaggaaagcctaaaattaagtacagtggaattcaatggttatttgtcagagctgagttcaatttatagttatttaccagtggtaatttttttatctc

SEQ ID NO: 3179 - DNA, 600 bp, Bovine  MMBT06292
gcatataaacagtttaagacttttgaaattttgactttcaagagagctcacagcaatttatatttctaatcagttgagtatgagaaagcctaccccactgtaccctttatttcattcaatattgtgattttttgatgttaggggcaaaaaatgtgaactaattgcagggttttttttgttgttgttgctgttgttttcttggccactccacacatcatgagggaatcttagtttcctgatgagggactgaacccatgccttctgcagtggtagcttgaagtcaaccagtggaccaccagrgaagtctctaattgcaactttatttcacacatcttgggtatttttttttaattgtctttgttttatttatttattttttatttctgtcagtgagcagcatttcccagttttgcctccccccaaaaattcttggtaacttcatcacatgggattataggatgcctctgtgatggtgaacatttttttccccatattttaaaatgctgtttgcgtgtccttcagtttttggtaaaaacctttctgtttttacatatttatcttttagcacatctatctattctttggccccttcaatacacc

SEQ ID NO: 3180 - DNA, 600 bp, Bovine  MMBT06880
ctggagagccttcatccctctgatcctctctaggctgtccacaatctgcagtcacgactcattatcctgaatrcacatcagaattacttggrtcttttttttttaaagtaattctggggccccaccccaagtttctatcaagtattaggtgaggcccaggtgtcttctcttataaagctctccagccggttcccttatgcagtgaggggcatgacccctttggtctgcaaccttgattgtgaatacaagtgttggaattttttwaaaaggcgatgagaagaggtcacaccaaccagtcayrtgtacagcttcttaacagtcattgaaaagcatcctgaggacacggtcattgtgaaattggggggtttggaggtaaacttgggcttagggtgctgccttgtcctgcttcaggtaattatgattcgggtgtgttttgacaaccgagtgtaaaccttgacaacagattatatctgtgtaatttctccttctctttgtctttttgtgcaagtgctttaatcgactgtctgataaacccacttcaagagcagatggaagaatggaagaaagtggccaaccagctggataaagaccacgctaaag

SEQ ID NO: 3181 - DNA, 600 bp, Bovine  MMBT07037
gatgggcacaatacttggaccattacaggtgttcaggaaatgttagtcacactggattaaaagtcagacactcacaattatttctaaactacaagaaaacaatgatcaatgtcagaagaaaaacttctgtggatacaataatatttctaagcactgattaccaggtgtctttctactcctttcctaaaaatcagaagaggtcaattcccaataaatgggttgaatcatgtttaaccaaagaagctactgaattaagcaatgatgctcagcaggaagattttaagtggatttgcaaaaatrataaaaatcccagagacagaactgccaaattcagcaacttaytatattaagagaagaatgaacttgaagagagagtgcacgatggctgaaggcatatgtttaaacagccgtatattttgctgagcactgccattcacagtttaattggagcatcaagataaaaactctgcttacacctgagtgcttaaagtaaaacactaaaatggctagcatatgctcaagatgattgagacattcatcttcttgggcgtacatctctctctggcacagaaatacaatatggaatccagggcactgcac

SEQ ID NO: 3182 - DNA, 601 bp, Bovine  MMBT07184
  misc_feature (1)..(1): n is a, c, g, or t
nttaaaaaggttcttaacaatayataataagtagtagctaccattaatgaccctggtagctcagacagtacagaatctgcctgcaatgctggagacctgggttcaatccctgggtcagaaacatcccctggagaagggcatggcaacccactccaagattcttgcctggagaatcccattgacagaggaacctggagggctataatctatggggtcgcaaagagtcggacacgactgaataacttcaccctttcackttcaccatttatgaggtgtcaggcctttaatctaacttaatttktataatgttcctctgaggttggtatattattagttctattttctagaagaggaagcagctgagctctaagaacactgagaagcttgcccagagttatacggctgtaagaagcacagttttgatcatacaagctctgtctgatctaaatacccygatctgcttcacgtcttcttgcatgctggtctcaaagaggaagcttcctgccataaaaacacagaggcagtgagatacttaagggaaaatgacacatgtagaatactttcagtaatttcagtattttttttttagcttcctgaggca

SEQ ID NO: 3183 - DNA, 600 bp, Bovine  MMBT07348
ttgtgtaaaaagatacagtcgattccacctaagtgaatatctgatttggggaaggggaactacacaccagccacctcggatttatgtacaacagcctattttaaccactgcttccaagacttacgtctgtggtccacctacataactgcctgcagagtcagatttgccaagaccttgtccggtcttttgaccacactggtacattgcactttctctcttctcctctgctctctgctcctctcttcttctcttgatatgtgtacgcagttcttaacactcaataacaatggctgccacttygctgcataaccttaggaaacgtgagaagagaggcagcagcgctggggtttcttctatctaccatgagtccaaaggcctatcattaccatcaaactcttctcagaaacaagtcacttttttttttaaaggtgagctccttaagggaagaaactaaactttacttacctggtgaatagatatgaaagrtattaaacygaaatccatgcgttgccatcaatcaatagctatgtgtagaaaagtaaattattttmaagagctagctgaatccaggagcagctttaattattaaaactaatggaa

SEQ ID NO: 3184 - DNA, 600 bp, Bovine  MMBT07549
tgctggacccttgcaaaggaggctctccctgagtgccaggcactctgcggagcatttacccaaaaacgtcatttaagccacagatacccctgccttcattttagaagtgaggaaactttttcccaagctatgtacctggctcgctctgtcacctccgttccatcacatgtcactctgtgccgaggctgtccttgaccatgcagtttaagtgtgcactctcccactgccctgctttatttttctttattgcacttgccatgacatctaacatgccatccagttcttacggactgtcccctraccaagctccactagcgtatcagcttgctgagggtggggactgttgtctgttctgttcactgctgcatccccagcatctgaaacagcacctgtcgcatagtaggcctcagtaagtatattctgaatgaataaatgagtctcagatgggtttgggactcacagctctaggactccatctggggctgtctgactcaaaaccagtgggttaatagccagactccatgactgagggtcagaccaaggaccacggcacagcctggggttcaaagaagacttgtgcagaatgtggtactcagctcc

SEQ ID NO: 3185 - DNA, 600 bp, Bovine  MMBT07893
ccactcccaaatctatacatagtcaaattaaaacagttacattttagtcctttctgtttcaaatgcattacttaattaatgagttaatataattcaaaataagttaaatttttagacttttcaattgccaattrttttatattttcaagggaaattattttattaacaaaatgtatcacacaaatggctcagaagtgcattatgagtaattatatctcaagacaatttatactctggcttaaacagtctcttgctgcattaaagccccttaggaaatgatactattgtaatatcaattcyatttcataaagctctagtggatgtcattgagattatagccaaaactcttcttgttatacagtaagtcatattaatgtgtgtataaagcatgttttgacaaggcagtataatattattattatttattaggtccaaggcacctctcagccagtaggaaattagctttaatatcacattatagctcctctagcttctgctttaatgggcttcagacaacagcctgtttccactccttcaagatggcttagagtcttaactgctcctgctgagctggtctctgtgaactgtgaagtttttaat

SEQ ID NO: 3186 - DNA, 600 bp, Bovine  MMBT07910
gaaggatgtcgtctttagaaaaagctggtttcttaaaaaaaaaaaagagagagagactgactcaagtttagcttgccttaaaccacagtggaaaatcagacgggcttaactattaataaccctctttcctttcaggaattagaggagaaagggctcctccaggctgacctttgtggaatctttacagttttctcttctgggcagctaaattcatcctggggatgacctccctctatcctgggcaaatttctgtccccttcctttacattcctctctttagcaaagggctatccattcatraayaggaccygcgcaggtccgactagacaatccratcccatttagaggtgaatttgaatcaaagacacagcaccaaatgcctcgctgctcatgggcctctacacgtctccccaagcggcgtgtaaggccaggttccccacgcaaagtgcatagcygggcaccccccttccctctgtctggaccagcccatcggatccccgaaggcctactcaagagcaacagatgcttctaggtttactgcctctgaagcagcaatgggcaagggagatgctgccaacttacaaagtcgatcatgacgaa

SEQ ID NO: 3187 - DNA, 600 bp, Bovine  MMBT08979
cgctgtggcagagctgggataatacactgcacctgctaacaccaagtccatccccttcctcataccttccgcctgctcctccacatgtcaaacctgtcgccacctttgggccttctcctgagctgttccctttgcccggatgctctctataatcttcacatggctggatgcttcttgccacttgggtctcagccaaaatgtcaccctatgagtcctctgccactctaggtaaagcagtcaccttgtcatactccaccacaccaccctgttttaattctctacttagcacctaaccaccaygggctattcttgtaattacctctttgcctgcttattgtctgtctctccatgagagggtaaaagccctgtgagagccgagcttctgaatgttgtgttctctgccccaactataacacctagaacagagcaggcgctcaatatagatcratgaatgactgaatggctttcctactgcctcctccacacattaggatggtatcaggaaagaatcaagtccagagagctagattcaagcttcacctctaactggctaggggctgcactctgggcaatctccattcagctcaatttctaggagta

SEQ ID NO: 3188 - DNA, 600 bp, Bovine  MMBT08989
tctgcctttataggacagatacggaggccgagctggacctcgtcagccgcctcgccaaagaacatggtgcttttgacgccgtgaagtgcactcactgggcagaagggggcaagggcgccctggcgctggctgaggccgtccagagggcagctgcggcccccagcagcttccagcttctctatgacctcaaggtgggttaactgctgtatgcaaaaacaataaaccaaaaaagcacaacgaagtttctgtttaggcttctgttcagagccatgtttagcagcttcagcctgtgggtttgcrtctcatggaggtgagttacatgaccacagcctggacgcccaactccagacagctttcttaacaatgtgcattgctgctttctgaccgaggagggcatccagacaagaacaccccaggaggttggctcacgtcctaactttggaaaagrctcacagtacagccccttttctggcaggagaaaggcttacatagagaaccacagcctttaaagcagggcaccagccrtgttactgcaaactggcactgggctacatcaagctgagaagtgtcgtctgactgcttcccagcataggggaaagc

SEQ ID NO: 3189 - DNA, 600 bp, Bovine  MMBT08991
ctgcaacctgtcctcacatcccatctggttcctcagctgctcctgggcayttccccaacatctcctcttcccygagccttccccaaagtcctgtagccctcccttggcctccagaccctccccattcctaagatgtctctcattcaaacagcagcccagcccaagctcctggacatccaaggagctaggctaacarctcccctgaggaaggtgaatgcacctgaccctgagccccttgaagatagtgaagcaaagagagaatgagatcctaggagctccatgatgacgacaacagtagtratgaccagccttttccaggtcccaygtctgactgttctaagtgcttttacaaacatcacctcatctaatctttacaacacctggagaggcaggaatgtgttatcctccccattctacagatgagaagcttacgtggtattcaaggtcgccctgcccccaagtgaggttcccaggtctgtctgacaacaaaggctgcctctgaaccccagggctctgttcctcctggctttacctgcctcctctcctctcttggcaaggagcgggtgtggggagggagggtggaagtctcaagtggaagcc

SEQ ID NO: 3190 - DNA, 600 bp, Bovine  MMBT08995
aaaccattggcgtgcttaaggagaagggaatgacatgatctgattaatatttagtaaggattactggtctgctctgtttaaaacagaataaatcacacaatgtgaaagaaaggaagctctcataggagttcacaaattaaggcccgtgggccaaaaccagcctcccactgggtttgaatagcccatgagcttagcatggtttttacattttttaatgaccagggggaaaaaatcagaagaataatatttgaagaagaataatacttcatgaaatgtgaaaattatataaaattcaaattrcattgtctaagttttattgaagcacagccatgcttatgcttcttcgtttacatattgtctgtggctgcatctgagctccagtggtgagttgagtaactgccacagagaccatatgcccagaaaagccatttactgtctggtatctacagaaaaagtttgccagttccaggactcttgaattaattcagatgagaggtgatgatgggttgggtcagtgtagccacagaagtgagtcatggtctcatttctaagcatatttttaaagtgaaactggcaggatttgctaatggatcatctatg

SEQ ID NO: 3191 - DNA, 600 bp, Bovine  MMBT09001
ggtattttttcataactttagaaattggaaagagaattaatctcagaattatcattatctattctttcttccactcatatccatcacaaacatttacacaacaagattcgttgaacaaatagtcaatcacatcattcagggaggggaacattgaatctaagaggaaaagccatcacaagccactagaattataagtttcaaagaacatattatgtaaaaaggaaatgatgtcaagtgaattgagttggtatcatagtacagtactattttaatttctttatatcagtaaatagctgtgaratttttggttttgtttgttttatttgtgcttcacagggaagccaagtgatttttgccaaaaaaagaagcagaaaaaaataagaaaatgctagagaaatgtaggttatctcttacatgttcttatagcccctataatgtcagcttagtcaataaatgtttgcaaaaatccaactagaatgtgataaggtagttgctgtagctgctttctcttttcctacttttgtaaaagtaggaaagttcatggataaatggtagtaattagcatgcaattgtgaatctaggttgcaatttgcaagtgtg

SEQ ID NO: 3192 - DNA, 598 bp, Bovine  MMBT09008
  misc_feature (1)..(145): n is a, c, g, or t
nnnnnnnnnnnnnnnnnnnnnnnnnnnnnnnnnnnnnnnnnnnnnnnnnnnnnnnnnnnnnnnnnnnnnnnnnnnnnnnnnnnnnnnnnnnnnnnnnnnnnnnnnnnnnnnnnnnnnnnnnnnnnnnnnnnnnnnnnnnnnnnnntgatgagtccagatttctgagctgagcattaaggagtctatttggcccttgccaaattccctgggcccagttgcccctgaattaaaggacagccaactcttgctgttaaggaagagatgtcctcttaactctttctayatgagaataaagtctgmtgctttcaacttcctgaccttattctggtgctaaaatatgtaacgtagttgaaagaatatgtgatttataagcagaagatctaggtttggacactgacccttaaacrctttgtgtcctaaggtaaattaacatttcttaaattcagttaactcatccgaagacattgataatattaaaagtgcaatttttatttctatataaatattagaartcttattatgtaaaaacataacagccacaacagtaatctttcccaaaggtctaaacaatgcggaagcctagaaaatcaacactgtg

SEQ ID NO: 3193 - DNA, 601 bp, Bovine  MMBT09044
  misc_feature (1)..(1): n is a, c, g, or t
nattttgcaaatttycccartaaagcatttccttttgarcaactcaagagcaraacccattcaaactctggaaaaaatgatgatatagagaaggactatgttttctatccaatatcccatagtaggagcttagtaatagttagtgatgacacagctaaagtatgaatgcaaagcattaaaagcccttattaggagcactgttttctacttcagggaccttgggacagtcacttaaatttgctttaatccaattcttcctctgttcaattgagataatggatacaggatattgttttataasgtctgcaggccaaatgtggcccactgcctgcttttgtcaataaaatgtcgttggaacatagctgctgtgctcattaatctgtgtattgtggatggctgcttttgccttacaatggcagagttgaacagctgccaccaaggccatgtggtctggaaaacctgaatggccattcacagatagagtgtgcggaccacttctgtaagagactaccctttgtcttgctgcctaaaccactgtgtcagctgcagagctccgcaccataaggtgccactcttatttaactgtatgtaacccttggca

SEQ ID NO: 3194 - DNA, 600 bp, Bovine  MMBT09333
aaccacataggaacaagaaaccatgtagggacaaggaaactccccgctcagtctggaggaggagttgatgatggaagcatgacatcctctcaagaaagacaaagaaggtcttctccagtccccactttttgattataaaactgtaagccagtaagttccaggagcacagcatcctcttgcccacctgcttataaaccttacaagcatcctattctaacacatcacatcttctatcactttgcctctcactgaattctttctgtgctatcactgtggtactggagctcctccgagcccacygaagtgacgccaaacgtttcacctgctcaccaaaattcatatggtgaaacytaaccccaagatgatggttttgggaggtggggtctttggaagccaatgaggccacgaggttggagctctcgtgaatgcgattagtgcccttgtaaaagagactccagagagctccctcaccccttccgccatgtgaggacaaagtgaaaagacagctgtctgctcaccagggagtgggttctcaccagacacagaatctactcacagcttgatcttgggcttaacaggcttcccagctacggagaagga

SEQ ID NO: 3195 - DNA, 600 bp, Bovine  MMBT09550
ccagcactttgcatgcatgcatgctgtcacttcagtcatgtcctgactctttgcagacctatggactctcgcccacctggctcctctgtccatgggattctccaggcaagaatactggagtgatctgccatgccctcctccaggggatccccccacccagggatggacccacatctcttacatctcctgcattggyaggtgggttctttatcactagtgtcrcctgggaagccctcaccagcacagacttacgttcaaacttagcattacagttaggctctttccgttattttactaacrgaaagtaagaaaactatgtatgaagtgaaatcattactcaagtggtaatgcttaaaartcaagattttgaaygctgtgtgtgctgtgtgtgtgtgtgygcgcgtgtgtgtgtgtgacttacaaccactgctgatccagcatttgttctgccatttgactactcagagacccaagattgatactacatgaagcacttgacaattcaagtaaaaaataatgtgatattttyccaaaactggtcaataataaatgagttttagaatttaaatcaaaacaatggatttctcacagtacattatt

SEQ ID NO: 3196 - DNA, 600 bp, Bovine  MMBT09556
acttctaaaccatccctttgatcttcaccccacagttaatccctgttacccaggtttccagctcttaagggcaacaccatccaccttgtgttcaggccaaaccccagggtttattgtttatccttctttttctctcatccttccagtctatcatctcctttaacatgcagttttgtaatcagttaagtgaggataatatctcccttcctcagatgatgtgaggattagatataatctatataaagcaccaggcacataggaaatgctcaartgatatccattttcaataccaggctctaytcactgaacaaaagcccccattctcctgaatagacacataggctctgattctgtgcattaaaaaartgaattggaaaaasatatatcctagagtctaggtttggagagakaaatgctaaaggcctcagggtgagcatctaagagcctgtgggtaaggcagtggtgcattaaatgagagtgctctcattttagcgtgctccaaagtagcccactaataagctatgatcatcacaggtaaatggagatttcccaaaaagaagagagaaaaaaaaaaaaaaagacaaggaaaataaatgtgca

SEQ ID NO: 3197 - DNA, 598 bp, Bovine  MMBT09646
  misc_feature (1)..(137): n is a, c, g, or t
nnnnnnnnnnnnnnnnnnnnnnnnnnnnnnnnnnnnnnnnnnnnnnnnnnnnnnnnnnnnnnnnnnnnnnnnnnnnnnnnnnnnnnnnnnnnnnnnnnnnnnnnnnnnnnnnnnnnnnnnnnnnnnnnnnnnnnnnngtatgtgaggcctgcgccctgtgcatgcacggcctgctcagcagccctccctgcctcacctgccctggttgatgttgatgttgttcactcggtcagcgctgagggctgtcttggtcagggtctcgatcacgtggtcactctgcagcaccacgtccccctgggrgcccacatagggacargggtcaggccctgcccagcgcttagaggacccgtcccctccccgcctccccaggccccaaggggcaccttctgcttattgtcctcacgctgcacgtggagcacaaagaggctgtcgctcaggctgctgacggagattcctggggggaaagggcagaggtcagggatcaaggggcagagcagggccccctctatggacccaacctggactcaggctcaccggtcaggttggtgtactcaatcctctgcttgaccttggcgtcctccacaatgaccacggcgtt

SEQ ID NO: 3198 - DNA, 602 bp, Bovine  MMBT10035
  misc_feature (1)..(2): n is a, c, g, or t
nntaggaggaactgtgggaggctcaataaaataagtatgtgcaattgtgaagacagaaaaggaaaaaaaaattacttccatcacagtccacaaagatcgtttccagtcccaaacatgggtccccagagatagcctggaaacaaattattgtcaaagagatgcttaccttttacaacagctcacagtgaaataaaacatatagcttaacatctctcccacactcacctttctcttgctctcttttttccttttattgtctctctctctcgcttccctttctttctgcctgatgctaaacttcrcrttctgagcccttctaccaattattggataagtcgcttgtccttcctaaacctcagtattctcataagcaaaatgaagtgtttatactatattagtactcttttacttctaagtgtgactacaggcacaagtttgctcaatctgctctcatacaattggtcgtattagtgctctaacttatttagttccaakatgatgactgtggtttcagcctgcacaatgaasaagtgaatttgttggtataattatgaggtctcatcttttggaaaagtgagatcaaatggttaagtgaagtcact

SEQ ID NO: 3199 - DNA, 600 bp, Bovine  MMBT10082
gaggaggaaatggcaacccactccaatattcttgcctgaaaaatcccacggacagaggagtctggcaggctacagtccaaagggtcgcagagttggacacaactgagcatgagcatggcttggcgtgttggggaacataytcaaattgcacaaagtaacaattatttaaagagtattctaaattcttggcatgtgttgatttaatccctgggtcaaccctttaaagccgatactatctttacccctattttataagtgaggaaatggtgacccagacagcttaagcaacttgcccaaaaygatatggcttgaaagaggcagatctgggatttaaatccatattcagttttggattcaaatccttgctttcaatggtggatacaatctcctgtcctttgcaagtgaagtkgatggtaacccttctacctttggcaggatgtgttccttgaggtgttccttccaaaaataaagatattctcattttttaattaaatactttgctacttttgactgcctcgagtcttagttttcagcaggcagggtctttccttgcggagcatgggctcctctctagctgcggtgcagactctggggcgtgta

SEQ ID NO: 3200 - DNA, 600 bp, Bovine  MMBT10151
acaacaatgatggactttaaacattaaacatttttctaatatcgagaaaattactgtaaacgatagttctttaccaatctcatatagtacagaagacagactgggatgatgggaaagaaattatctctaaataactttctctctgggtttccttcctcttaatgttatatagtttgaaaagataaaatttgccttgagggggagagtgcaaaatgttacaatttcaagctgttttctcaatagtgcaccctatttaacaaacaatagggatatgctttttaaaaggagagtattttgatwgaaaaagacatgaacaatggtaagtgtgctatggtttacaaaggaaattacagtagaaaatgcagcataaaaagattaagtgggaatgtgatgttaaaggaccacagatgctgttaatatttcaaaactggctacagttttaaactccaaagtacagagagaatagctatgtctttaacaataagcaaaattagtgatatcaataataataacatgaatcacttatataacacaaaatgccatatagcacataatttatgtaaccctgacattgtttcaagggaatggatagtaatcaca

SEQ ID NO: 3201 - DNA, 600 bp, Bovine  MMBT10245
cagttcacctgaaaaggtaagcacagccagtttcactggctccttttctcatggaaatatctctgagtagaatgggttagtctcgtagacacaaatgtgaaatcaagtttggatcaaagttcctcactgcagcaacaaagaagcattactcccacaagtccacctcactggactccatccyggctgggaccatggactcaacctcgtacagcgtcagctgagtcctctgtaaaatgggtgtgctgcctacttcacagaggaggtcaaggaattaaatgacataacaaaggtaaagcactyagcacagtggccagagcaagaaaggcactagatcattctccctcttctgcctccagtctgactctgctcttactgacaaatgatcatttccaatcttagagacctgaggtcttgattcctttaccttctaatacttttactgaatttttctcatcttaatcttcaacagaatatacatataaactgaaaaatgcttcaatcataagtattaggttgaccaaagtttgttcgagttttttcgtgagatcttatggaaaaacctgaatgagcttcttgaccaacttaataattttaacagta

SEQ ID NO: 3202 - DNA, 529 bp, Bovine  MMBT10760
gaaactccttgataagagattctagacctgccactgactaagacacttatgaaaatatatgcccccaagttcagtggagttccttgatctgattccctccacctacttaatagagctagcaatagtggggccaggggagcagatactgacaagcttttctcccgggtccaggtgggtgatgcaatgctgaacaccaggatctgtgatctcctgctctccaagtatggcatctatgtgcaggccatcaactacccaactgtcccccggggtgaggagctgctgcgcttggcaccctccccycaccacagccctcagatgatggaagactttgtgggtaagtcctcaacatggggacacctattccctggtggctcagaggttaaagcgtctgcctccaatgtgggagacctgggttcgatccctgggtcaggaagatcccctggagaaggaaatggcaacccattccagtattcttgcttggagaatctcatggatggagaagcctggtaggctacagtccacggggtcg

SEQ ID NO: 3203 - DNA, 600 bp, Bovine  MMBT11313
atgtgaacttgtatgttttacagaagttcactgaaactatgaagcctcctttattcgaagaagaaatacctacctgagtccatggagactgctgtaggtcaccttgaacagtaaattggccttttgaggaaaggcctctatgcaaatgcatagagctatacacttgtggctagaattaatgatagctaatgagttacttacattaagatctcttctcagaatcatacaagggtatctgtttttaggcacaaaattggaatgagctgtgaagactaaagaaagttcagatttgtctacacyatatactgtgttctaggagggaaaaattaggatcaggttgagttaaattagcttaattctattatccagactatgttcattggtagactcttccttccaattgtagactaattgaatataaatcccattaaaaggcattggattcatttttcatttgaatgaaaggagctcaatttcctacaaatctgactgcagagaatatctaatacrccactcaaaatgctcagaatttgcaattgaaatcccaggggataccaagtctcaggtaacaggtacaggcatccatgtgcatacgcgcgt

SEQ ID NO: 3204 - DNA, 600 bp, Bovine  MMBT11498
taagcccctcctccttcagtttcacctcctaccggggctgctcagagctgccccacaggtctggtctgggcagggaggagggcagggaagagtagcctgaactctccagcccacagcagtagctcagttcaatgttcgcccacccactcctctgagccccatgaggctccacctcttgccagcagggcagccatccccgacccagttcctgccttaagtcccagcctgcttgtttattacagcagcaacagaagcgtggagagactccgaagccacacaacttgaccgttccaaaagstmggtgctggcaagaggccaacagcccctgcagcagtgcaggcaggctgccaggcggtgagtccctgcccctggagcagcagggcatcctccaagctgggtcacagtgagggtcacaggcccagcccagcaggggtgggagcagcatgcaagattccccacgaccctagtcccccagggtatccaagccaggcagctgctgacaaccccacagccaagacagaacccttcctcttggctctatagggatagggaccctgagttctcaaggaacttctgtaagaaccaggtggggaaaggaat

SEQ ID NO: 3205 - DNA, 598 bp, Bovine  MMBT11705
  misc_feature (1)..(23): n is a, c, g, or t
nnnnnnnnnnnnnnnnnnnnnnnttcttggttggcccctttttttctctcgtgatttcatccgtatggagcttacgatctgccccgctgcacccatatggaggatgtgaggtagttccagcatgacctacacagagccatttgttctcatattcagagtgttttaaaagtccatcagtgactcacaggagataacagaattggaaagcctaacctytcttaaaaggagtctcgcacctaattgaaaaggattggccagaggtgatggcaacacgtcagtgtctgccctttccaaggagcygggaagccagttctgtattcacagctgctgtatttacagcaccggtctgtgccaacttcacttccaccccaggagccacccctttgcggcccttttatgtacccagaaaccagtgtgagatcagcttttgttcctccaggaggagggggcccagtgtctgcagggcgggtgcccgcaggagcaggaggggagagagggggcaggaggggagggagggggcaggagggggtggccaggggaagggacaggtgggcctgggctggcacactgcttgactggatgcgggggacacgcttgt

SEQ ID NO: 3206 - DNA, 598 bp, Bovine  MMBT11983
  misc_feature (1)..(14): n is a, c, g, or t
nnnnnnnnnnnnnnccacacacactgcaggcggggaagcggagcggctgacttgcccacgcatgtcacccgtccagaaggggcagagccaggactggagcccggggcagccagggactccacaacagaagctacagggcaggaagggctctagaaaaagacagaaagaaagcccctggtctggatactagcaggcctctctctgcaaagctccgggcttggggagagaggttcacgctggctgggggttgaggagggaattgggggcttgggggctcacagggtggagaggcccggggayccacgtgttcaagagcagaagctccaaaacacagggaggaggccacgtcctggaggacccgccatctccttattcctcaaccccacagcggcaaaacacgcactcgcatggtataatcacttgattacagccataatctggtacgatttgactacactgccagcttattacagtgcaagaaaatacaggaaacgtttcaattacgcctcgtgtaacccatgtataaaggaattgctgtccatcatggtgaaccttaaacgcctatttcttttaagataagcttgcaaagtctttgact

SEQ ID NO: 3207 - DNA, 600 bp, Bovine  MMBT12005
ataatgactgaatgaccacagcaaaggagcaacagaattcgcttattcagaacaacagaagtttgtgccctaagaaggagctctcttgtacaccagtctcagcgccacccatctctggctcccggaacagagagcctccagggacgctacctggcagccacgccgcctcctacctgtatggtggtgttgcctccttccagcagggcgatggctagaagaatgctttcatggaacactcggtcactggatgcgttcatgatgaggtcgatgaccaggttggaggccccctccttgtcaagrtggcactgaacctcggccaggctcatttcacccctgctcatggggctggatccggaacctccccctggaaagacgcaacattgcccttattaacytcactcagagcagctaacatttattgcatacttactgcataccaacattttatgcactcaacagtttaatgatactatctctctggacctttttaacaagcccacaaggcaggtaactcattattaacatcaagatgaagtcacttgtccaacaacacccagcacagctgggaagtaatagagatggaacttgaatgcagataga

SEQ ID NO: 3208 - DNA, 600 bp, Bovine  MMBT12144
agatacttagtgcttaaggaaaaggatctggctcagcataaaaaatttggtgaattaacattctggtaataagtagaaaccatgaatcacctaaataaaggaaaagggcttagaacataatcccactcaacatataaaggatgagtagataaaaaaagatttaggaaaataatatacattaaggtagaaaaaagataactgtgtaaccaaaattaaaggggagatagtcttaagacagaggaagtatttgtgccaaatgctaaggataacttacttcaatcagagtaatgaaggaaaaastaatattttatacatgttctatttatttatttttctactaatcagatgtctttatattgtacacacctcagtctcagcttgagttctttgacagcgatactgagcaatcagtctatcagcctgtgcaagggctagagcttttgcttctaagagatcctgtagcctgctttctttggactgtaagaaaacatatcrtaaatcttcatttgctggaaaatatctcttagggtttaattgatatacataattaaaatacggttgtactcacagctaatgtggatagtttcatctcatacacat

SEQ ID NO: 3209 - DNA, 600 bp, Bovine  MMBT12181
gataacagtcttcattttccatttctactattcatttctaatttttttagaaattaaaaaccttcagtgtaaatagcattctttatttacaacatgctttttccccgtttaatgcctttcaatttgaattcaaacttgtctgataataaaattgtacccctctcttttcacatatctttgcccatctttactttttccccaaatgttctgaatcactttggtttaggtgtggctcttgttttaaagtattttaagtgctgtttcatgatataatctaaaagaacttttcctttaatgtgraagttagtccatttacaattatttatgtaacagttttctactttttttttaaacagccaccattaaagttcacttaggggttgggctaatttaaagaacttttaaattcattttctttctcctaaagtattcattatttctgcttaacactgcattgcagagaaacaatgtatactaaaaaagaatatggcacacagaaggaaataacactgagacaagcagtatctttaaatattccttttcttggtagtaagcattaatgcctgtagtcttaatacttgctaagtacttgtctaacat

SEQ ID NO: 3210 - DNA, 600 bp, Bovine  MMBT12219
gccaataccttgatttataaaagattacctcaatttataaattgccttgatttataaaaaaataagtcaattatatggaagcactctctgcagtatcatagacaaccaaaagtagagaaaaacttcctgacaatggaattttttattagtctttaagtgacttggtgtcattttaccactaattgattcggttcttgtgactgagcaaaccttcttttatttgcaaagaacagagttatatttatggtggcacattcatgtggcagatttggaagaatgyattattattccattttactygggaaggcactaaaattcaggtgtttagttggtatcagtacctgcagcctctaagtaataaaatcagtgattgggacaagatactttgatgctaaatccatgtactttccacatcatgagtgcagataaattactcagctatgtttatactctaaaggctgataaagcacaggagaaatttcaagcagggaacccagaaaggtccaggagataaatattagagcagaatctacacatgacaagtataaatgaaccacatgcagcattgtagactggtaaattatatygatggagctaaaa

SEQ ID NO: 3211 - DNA, 600 bp, Bovine  MMBT12223
aatatagaactgttggatggggcagagagtatattcagggaactcaggaatgacttctttggctaaagagcaaatggcttcaattcaagaactacattctatagttacatgggaagaagtatgtttttcaataggagatatttgaatagaacaataatggtatgaaactgtgatttctgaaagttattctggccaaagtatatatgatgaaatggaaagacaagtgtacatggaaatggtagggtgatcactgaaatggagtaccatactctttgtaaataaggtggtaagtaatayggmataaattaytgatagcagaaatgccacttgcaatgtaatagaaaaaatactgaacagagatatcacatgtaaaccacatttattagcatatctgtataaaaatgtatactatagcaagcaaatttcagtcctttyccccccctcatttcttatttgaaaatcagtgcttgatttctgtgtttgacctgccatgggttttgatattgccatctggcagagcctgcttatcatcttcattatggacctagtatttctctatgctgattcctaattttcttcattaaatcctaagttaagcca

SEQ ID NO: 3212 - DNA, 598 bp, Bovine  MMBT12224
  misc_feature (1)..(120): n is a, c, g, or t
nnnnnnnnnnnnnnnnnnnnnnnnnnnnnnnnnnnnnnnnnnnnnnnnnnnnnnnnnnnnnnnnnnnnnnnnnnnnnnnnnnnnnnnnnnnnnnnnnnnnnnnnnnnnnnnnnnnnnnnntttatgtttatcagttaagaaaatgtactcaaaatttgccttctgtttgaggaagttaactctcaaaaataaaaataaaaaagagagagagattcctgttttaaaaaaatctgtgtcttaatcactcaggcttgatgtaaattaatatagaacccctgctatcttgtttttattttactktgtgttcacttttgatgaccatcaaatcataaacacatgccttccctaaaagagatgtttgctgctattctcttttggatggtgcaaataagtctgtaaaacaaatagatgtcttctagctccttcttccttcttttatacttattaaaatgaaaatccaaagcagaatgcctagaagtatattgcaatttgacaggatttcctttgtgtgcctatgagaaaatatgactagtgaaaaaggaagtagatatagtatgtgcatgtgatgctattttattggtatctgttgcacccattg

SEQ ID NO: 3213 - DNA, 600 bp, Bovine  MMBT12385
tacatagagagaaacataatatagatcttttcacctagtgccctttttacaccatttgagagtagatctttggccagaacttttctgtctggaggtgattttaaattacccaacaaatcatttcaaatcccacagtttgcaaagtcagggtttgagcgcataaaagatcgccagagctgacttctgaaactactaaaccttttcccaaaacatttactcctggcaatgcctgggcttttgtgttctggaacgtgagatgcaaaggcagcagaaagacaaacagtatcaaacaataagacrcctcaaaatttgctctgatgatcctcagatggcaattttgatgataattaagatgaggcattcactggcaagtgacttgcctgaggttatacagatgcttctaagccaaggtagattctatgactcctgattcctccgcttctactataaacaccccatcagtttcattattaaaatacaattgctaccacatggaggaagtgcctagaggactcagagatcttcagtctgaatatcttgagatcttgtgaaatctgaataatttttcctgttgatcaggcccycaacaaaagacaaaac

SEQ ID NO: 3214 - DNA, 600 bp, Bovine  MMBT12408
cgtggccgaccgtctgtatcaccaaggcacccctctcatctccctgcagtttcagggtcgctagttcctgctattgaaaacccagcttttttttttcccccatgggtttataaataggttgttttaagtgaccctgagctgaaaccaggcttacaaggtgtcaggcctgatgcaagtttcctgctcactgaagctttaaatttgccaggcctgatttctaaacctgagtgtaagggcacagtaacggaagcaaattttagttttaaaggcacttctttgaaagtctccttctccacttaygccggtgtaaaatacaagattttactttgagaagaggtgacagaggatgaagaggtttcaagtacaaaacctgagtcggctcagtagaattctaccaaccagaacccctggttaaatggattctgatgatgaagggcatgttatactccccagggacaaagacaaagggtagaaaacaagttatattatggttggtttttttttttttaactttccaagttatttcctaatgtcagtagaggctctgtctaatcacactccttttatatctacagtctaaacaatgattcctgatctatt

SEQ ID NO: 3215 - DNA, 600 bp, Bovine  MMBT12743
ctgagcataattctatgtgagacgtctcagttactggcccataagagaagctgcagtgattcactaggacagtatttataaaattgccacacacatgtgcacccatgggtgattcatgtcaatgtatggcaaaaaccaccacaatattgtaaagtaattagactccaattaaaataaataaataaactttaaaataaaataaaatttccacatatgaattgttgrtattaaaaaaccaattacagatgcaccagtctgttggtaaaagagcaatattcaaggaatattctaaacrattaygagtcaattatatcacttttagggacaagtgacarcacagtttgtattcaagtcaacagaaatgcttcattccaggctccctctgtagtagtgggattagtagggcaggtatgtcaaagatacaatgctgtyaagccctaagacttgcctaatttctaaaatggaatgctgatcctaagggacaagcaacgtggcaccacaaagtgaagccccacccccactctwcagactgacttccatgatttcagccactctaatcttagaagaaggtaacatctcccaatattgaccttcaggtaa

SEQ ID NO: 3216 - DNA, 598 bp, Bovine  MMBT13061
  misc_feature (1)..(113): n is a, c, g, or t
nnnnnnnnnnnnnnnnnnnnnnnnnnnnnnnnnnnnnnnnnnnnnnnnnnnnnnnnnnnnnnnnnnnnnnnnnnnnnnnnnnnnnnnnnnnnnnnnnnnnnnnnnnnnnnnnnacctggggtgaaagttctccaggagaaaataattcatggcctcatattcctcaggggcccttccgctttcaaattccagttacacattcaaatagctgttacccgagatcaggggccagacatgctgagggcctgcccacgtgggcatagccagcctgtcctaaccagggccccgcggtgtggggcrarcacacaggggctcagcagagatctcgtcaccacgtcccaggaattttctcagcccccagayrcaggaggtgaggtcaagaatccagaattggacatcgagctagtcatcttatcattcaataaggaaaattccccataaacaaagaagacatagaataagtggctcatgttaaggacaattatttatatgttatgaaatgtctgaactccgtcccctgagaacaaactatcttgatgtatttcttcagcttcgctgagaaaaattccacaataataaacatgagatgtcggccctt

SEQ ID NO: 3217 - DNA, 600 bp, Bovine  MMBT13192
aaaataaggcaacaaaagtagtgtactatcactacctctattattaacattactaataattacaacataagcttagagttaatattcactaagtttttggtctggattatgaaagaccttgtgctaaacaatttacctacattatttcttcaatgtgcacaatttattaaatttacagttatactcattttgcagagtagagaaaaagtgagacttgtcaaagtaattatcacagatcactaagctaataattaaacattgaaaccaagatccaaaatctacatgccaagattttattcmctcagctgatagcagtgagtagggctgatatttttgaagtgattgygtctaaccaaaagatagatgccttttgaaatttgtctgaccagaggatgtgcttattacaaatgttcaaaaggtaagtgtgtgccaactatgaatcttcttaatacaggaaaaatccatgccagtcttggcttaagcctccattctttgaaaaatttccatgaagttaggataatttttatttctattaactctcagttccaagtgcatctgccagttcttatatgccaagtaccaactaaaaggttattatgt

SEQ ID NO: 3218 - DNA, 600 bp, Bovine  MMBT13237
agaaattccttagaaactcactggagtcttaaaagctatagtaatgagtattcacaagctaaaatatttctaatattttattttattagaaataaaataatattttattagaaatctaatattaaaagaagcctcttttggtttgacaagacagtaaagggggcttttctttgtttgggctgcaataatgcagaaatcttcacaactcaatatgaagtacgtacatcattatcattcacgtacagatgtggaaacggaggcacagagagttaagaaatttgctcaaggttgctcagctartgaatggtggaacgaagattcaaacccaagtaatttgggctccagaatcaatagccacctgccataattccaactgcctcacactaattgcaagttatgattagcagtaacatctttaatgaaagtgagaaaaatraaatattggtaattaataatgaaatacagtttggcaggcaaaaattttccagaccttgagtcttcagaaaagaagcaytttcaaatattatgaaaagaatgaaaatgtttaaccagcattagattagatgatactcacatttcctcctagttctaatgttctgt

SEQ ID NO: 3219 - DNA, 600 bp, Bovine  MMBT13266
aatattattattagcatcattactctgttcctgagctgatcccagtccttggttctccagcctctgaaatgagcatcctggggactgaggcatcagccaccggaaacagaacaggttcttgctggagagacaaaggaggctgcccgccgccctgggggagcctgcgcccctcactggagagagaggcctgggagaagcttggagaaggcacacagccccattgaacagggctgccagaaggccatacataattcattgccaaatggggcggcgggcggctgtgcgctgggggctcactcygcgcctggcactttgctgactgctcctcacacgttgcctcgttgcatcttcttggatttgtggggtgcgaaccttcccccgcctctcccttttccccgggggggagcctgaggtttagaggatggggmcaccgtgcaagtcaccagcttctcagtggccaagcgggatccacagtccctgcctctctctggaggaaagagacagcactggggaccgagtggggactgagacctacccgagacggggcagcagaggacgggccgggtcacagcagggccaaaggaaaagggcaggggaccc

SEQ ID NO: 3220 - DNA, 600 bp, Bovine  MMBT13378
ccatctctagtttgagcatggctatctcagtccttgcatgcaatatttaagatgttgctttattacatctagaagttttgaggtgtctgggcccatgtggtaccctaacattaactgaaggcctgaatatcacataatacccaaggcagcttcacaaggtcctcgtggtgcaagaaggtttaaggcccattttgctgatggggaaatggaggctcaaagagatgacacaaacagcccccgatcacaggatgtgtgagatgggtctgaaccttcagttttgcaatgtccatcagcatctcmaagaccctggagcgttcctaactcttagcaatggtgctctcaagggctttgttcagccttgtgggatacacttcaaactccagctcaagctaacagaagaccagcgtccgtggcatccgtcaccgtgctcctgtaactccaaggtggtcatgtgggttctgacagtcaaccaagaaaaacaaggtgtagccacaacatgtgctcatcttgtctgcccaggagaacacgcatttcttaaagagaaaaagctggctagtctttcctacagctttaataaacaagaagcaatattcaaacccc

SEQ ID NO: 3221 - DNA, 600 bp, Bovine  MMBT13772
ggacattaatgtctttgtacttcaaacaatattgtgaaaacacagccagtagtgaaacatctctcttaagatatattgtatcatacaatacaaggttccacagatcaaacttattttttattcttctcttatctattattagattaacactgatatgaatgatactatcaggattcatactgtacaaactagagcttttgcctcatttgaaagccagattagcttggtaaataacaacatgcacataaaaagtgatttatgcatctgaagaaaataaaaacttagatattttaatatctyaacagaatttataaatatggcaatttttactgttcattatcagtcaataggaacaacagcagattctggaagtgaattctacagagtggtatgacaattactgttatatatctcagcaatcttctaataaataatatgaggcttgtttgcatttatcagagtgatccttaagcaaaaacccatgtgagaaagaaagcttgcatatttataagagtaaatttacatataactacacataaaatattccattcctttgtaaaatacttctttataatttccattaaaatcatcatgtaatta

SEQ ID NO: 3222 - DNA, 600 bp, Bovine  MMBT13800
gtgacttgtaaactgagcaggtgcagaaaggacttgtaaggcttcagggcaggaacttttctgaacctgattcttttctttacaggaggcagctgggaaaataagcacatgtgatagttccatggcacaggttcttgaaccagacctgctgaacactgagcgaggcccagaattttccctgagccccaaccaaacaccagaggtaggtccctgctgctgatgagccatctgcccaaacccctggactagcacccagaggyggcgggctctctgtgttttgcgatattttttttaccaagyaagaggtctttgtgaaccttaacacctccatgtgtgctgccacgctggagaagtggaagattttccatcagatatttacatggagactaagcgtggcacagggcaagtaaagactttttcctcactcaccacgtgccaggatgaaccagcctttccagtagtatccccttcttttytctgtaatacaacttatgggggtgacagaagtggaggagagcgaatgttaattatctacctattacattagaggcatttgtgtttgctctctaatcctcagattaaataaggtaggttaacatg

SEQ ID NO: 3223 - DNA, 600 bp, Bovine  MMBT13823
taaatctgtctcctctggttgaggaaggatttagtctccagagcccagaggaaatcctgttgaattttagaacctgaagggttctgtaaattccaaacagaaatttacacccctcagccagccaatggtccatccggtagagcatcctgcttcctactgtgtctagtgatggatggtttaggagatggccaaaaatgcaccatgatgcacctaattgagaattattgcatcgccaaaaaaatttcttctttaactctggtggttggttagtttatttcacgatgcctgaggcctgataaytatttatctctatactccagttatagagaaactcttattttcccttagaacaaacacactattaaatttctcaaaagcatctaatctttaattgaatcttattaaccctctttctgattaataactcactgtagagtgagcaagtaatcacattccaccttttagcttgacttaaaaacttccaagccaaattgtatacataaaatagctgtctctgtatattataggtttcttaatataatacttcttaaaaaaatagagcccgttggaagtcaacattaaaaatgtactcttgtaatt

SEQ ID NO: 3224 - DNA, 600 bp, Bovine  MMBT14006
agaaccaaaactaggtatttccacttctcttcccccatcactgttagcaacccagctccactgggaacaataggaaggcctggagtccctgcggggtcactggtgatgaaaaggatgtccttgcayctctccccactctgaggtctgcagggagcaccagggtgtgcaggtgggatrtacaggtggtcggggtggggtgggggtggtctccgcattcgaattaaaaaccaaaaaactgaccwgatagacaaaatctcttttgtatctttcctggcagatcagctctttaaaagctgggaygagggacttccctgatagtctagtggttggaactctgggcttccaatgcagggggcaagggtttgatccctggtcagggaactaggatcacccatggctgtgcagcacagcaaaaaaaaccccaaaacctggractgtgttttttcactgcaccttgcccagtggatgaatgaggctcaggtagacctctaaggcagtcgtaactacaccatgcccctggatcagttttctgccaaaagcccaatagacaggcattcaataatacatgctgaataaataaaactaacgacagctaacttt

SEQ ID NO: 3225 - DNA, 385 bp, Bovine  MMBT14168
agaaccaaaactaggtatttccacttctcttcccccatcactgttagcaacccagctccactgggaacaataggaaggcctggagtccctgcggggtcactggtgatgaaaaggatgtccttgcayctctccccactctgaggtctgcagggagcaccagggtgtgcaggtgggatrtacaggtggtcggggtggggtgggggtggtctccgcattcgaattaaaaaccaaaaaactgaccwgatagacaaaatctcttttgtatctttcctggcagatcagctctttaaaagctgggayggtcagtgctaggtgtaaatttgtgctggtcctaggggttagcctgggtgagacctgtgatggattccatgaccctgggtggggg

SEQ ID NO: 3226 - DNA, 600 bp, Bovine  MMBT14229
acttgaggagggaggatttcaagccccaaacgcattctcactgccagacattctgaagtttggtttagtagactgtgtggattcataggctaagtatgctgtccttacactgaatcaaaaaatacagaagtatttaatctacagagaatcatatatcttcataaacagtgaagaccttgtgcagcccccatatgattgaaatatgatattcttaccttgaacttggctttagacatttccattttcttgttagacaatgcttctgtgtccctctgagtgtcatttgattgggtctgtgcrtcttggaacagttcctccaaggaagctctctcccccttcccttctgatacagcagggaaccatttctgaacagctgttgaatatctataaacagtgttttaaggtcagatcaggcttctcggttttttaaaatttatgtttgagagcactttasagacttgatttcgtgaatgtttccttgcctctatttccttcctttatttattatttaaaaataaatgttttatggtttgctcggttctcatgcacccactctgtccacatgttcatctactgccaccctgaccaagggcatcccca

SEQ ID NO: 3227 - DNA, 600 bp, Bovine  MMBT14562
cctgtgccaagcagctgaggtccctctaacagatgggtcaggcccctacccccaccccctgccgctgctgctgaagagagagaacctttccagacagcccctgtctgtgtttcattacaaagacgcagccatattccattaattcctcatttgctatgggctgagcgctgatacgtacatttttacctggggtggttttaatcagttaatttaaccagaagcattaataatgtatttctttgccactcgactgcccatctgttgaacaacttacctgttggagagcaatgtcacctcctrtgactcggagccctcaagcttcccaggaacaagatgagatcctgcatatttaatggctttgcagaccaagggtgagagctgggagtgcctctccctgctcggcatgggccccaggctgcagctagcagcatggcctgctttaccccaaggtccggataaacaccaccttcccgcctttaatcatgcttcgtggatagattcaagattgcaggagaggttaaggagtggagggtgctatgtgagccaggagataccagcagacagatccagcactctgagtgcctcctggcctctgcttgg

SEQ ID NO: 3228 - DNA, 600 bp, Bovine  MMBT15147
ccatttagacagaattacatggactgggcactatgaggtgcctgtgcccaggggttctctcctcccatctggctcatgacacgggctttcactaatttcagttatgtctacaaaaaagaatgatgtctgactgagctttcttatttcccagacaacctagaaaaaaaaaamaaaacatgtaagtatatttttaaagagcctaaaagtgcagatttttctcttattwgttttttctaggttaatttattctatattggaagttaatgaaagtcaatatattttgcttctaggcaagcatcygaatattttaagaatatttcatttgattatctgcttgctatttattgatcctactgcagtggtctctggacaaaattgtgtgcagtgaggagcacaaaatgggtctgcccttgtttggcagctggtgataaygaaatcaccccacttcttagcctgttttgaaatgtaagtaacagaagagagttacttctgttacttkcaacctagacagcatattaaaaagcagagactttactgtgccaacaaaggtccgtctagtcaaagctatggtttttccagtagtcatrtatgaatgtgaga

SEQ ID NO: 3229 - DNA, 600 bp, Bovine  MMBT15279
tggagagccttcatccctctgatcctctctaggctgtccacaatctgcagtcacgactcattatcctgaatrcacatcagaattacttggrtcttttttttttaaagtaattctggggccccaccccaagtttctatcaagtattaggtgaggcccaggtgtcttctcttataaagctctccagccggttcccttatgcagtgaggggcatgacccctttggtctgcaaccttgattgtgaatacaagtgttggaattttttwaaaaggcgatgagaagaggtcacaccaaccagtcayrtgtacagcttcttaacagtcattgaaaagcatcctgaggacacggtcattgtgaaattggggggtttggaggtaaacttgggcttagggtgctgccttgtcctgcttcaggtaattatgattcgggtgtgttttgacaaccgagtgtaaaccttgacaacagattatatctgtgtaatttctccttctctttgtctttttgtgcaagtgctttaatcgactgtctgataaacccacttcaagagcagatggaagaatggaagaaagtggccaaccagctggataaagaccacgctaaagg

SEQ ID NO: 3230 - DNA, 600 bp, Bovine  MMBT15349
ttcaatatgtctcttgacattttttagaaatgccacccaatttattaatgctaagtatattgttgctgaaagaaaagttaaggacatgttgaatatcaagattctgatcactgaaataatatgacatagtctattctttgtaattgctgttgaaaccaaattgatcaaagaattaattcagagactgtcataatgttgttttccgtttctggccatattccatgattatattaaccactagcatagctattttatcagagataaatgtgccaaattaaggatgactgaagatccaaggayaagaagggcccattgagattcacagaacacatactgctgtaaaaatagtcttagtagcaaagaggagggraaagtataatatgagaggtatgtgagtagaggtccaaggtagagaatcagtggacagtgtcagagtttaataacatggtgattgataattcactatccttgtgtttcacaggtaaaaccaaccagagttgttagcaacaggtggtagagatccagctcatatttcagactttgaaaagactaasggaaaaggcaagaagtggtgccattacttctaggtcatggttactc

SEQ ID NO: 3231 - DNA, 600 bp, Bovine  MMBT15745
ctgctgaaaatttaaaacacgggttgtacattggaaattcatctagaaatgatctcaacatttactgaaatagagtgaaaataaattagagtccaaattcagcccagcaaccctcacatatggttttaagctaattaaatatttttttgacaactgaactgaaactaaggagctaattaatgattatactcatagatcatcctactatgggtttaatcagcatttggtttgccttagctctgagatggactaaaataagtcactctcttttgaccaagtgttataacaaagtgaggctcrtttcatttaatgctgtcactcattgtcataaacttatcatcacttaaaacatctgtcaaagttgtcttgtaaaattgtcttcagggctgaaaatatacgcctttttttttttttttttaccattctcagtacactttgagggaggatgtaatttttggcaatcgtccaaagaaatttggattaaagtttggggaatacatttgttggatctgatggattaatttaacaacaaaaaaaaagactattgtgttgtatcactcataatagtatatttagccttgaggaatacaaaaagtaggt

SEQ ID NO: 3232 - DNA, 600 bp, Bovine  MMBT15796
agcaactcttgtgtaaattaatctttatatggaggaatgggtgatttacatcagatacagcagttaaccttaaacaccagaacattgaccacagcaccttcaaatagtccttgtaggtgtgtggttggggtattcagtgactctctaataaaggtttgctgttgttaatatcctaggaaccattgggatgtttttagtggagaaattgagggttcagaagcaaatcccaaytactgtggcccattttcacagaccctgacctcccaccagctcttgggtctccccagtggctagcctggmgatgccctcaacatgcaaagcccagcaagcatatttggtcttcctcaagcttacagaatgctgttcctccctggaaacccatattatgttaataacttgtgatgaaatatcccagcagggagttctgggattcacacgccttggctgtatagtaaaacgctcatttatggtttatgctgctaaatgctcctttgctagaatgcaaggtggtaggacccaggagaactgtaacagctaaattctggtcctttttaacaaagttcatctgctgtcttagttatgccggcatttgcgtggaat

SEQ ID NO: 3233 - DNA, 493 bp, Bovine  MMBT16350
gagacaatgtaaaggaaagtcagttttcagaaactatatttagtcagaaataagcaagtactagtttggttttaaaatatgaactctccaggagtcaaccttgatgctatatctttgaacatccaaatacagcagaccttgaaaaaaaaaacaaaaacctctcatcacttcaaaaactaggaccaacaatccatttacagcagtaatctaaaaacaatcgacaccaagacatartaaaactggaccaggaggctatcattatatttgccagaagctgagcaaagttgctagccagaatcratgttagaagtaaattttctttgagtacttcaatttttcctgggcagataaatgcaaaatctgtaagcaataaaactggtcacctctttcatttctttcaagcaactggagaactggtcacccgctctctctataattattcttgtcttacatttctacatccattctgagatggattctcctggaaagagtg

SEQ ID NO: 3234 - DNA, 598 bp, Bovine  MMBT16842
  misc_feature (1)..(199): n is a, c, g, or t
nnnnnnnnnnnnnnnnnnnnnnnnnnnnnnnnnnnnnnnnnnnnnnnnnnnnnnnnnnnnnnnnnnnnnnnnnnnnnnnnnnnnnnnnnnnnnnnnnnnnnnnnnnnnnnnnnnnnnnnnnnnnnnnnnnnnnnnnnnnnnnnnnnnnnnnnnnnnnnnnnnnnnnnnnnnnnnnnnnnnnnnnnnnnnnnnnnnnnnnacattcagcttggaggaaatcaataagatcacttaaaaacacttttgggttatgatttcttaatttgcttaatcgtctcctaaaatgtgaacattatttcrttttcaaagtgtgcttattatttgctgaacttgaatttgcattcccaaagaattattggatgaacccttttttttacagcagtgattttaattaatcccctaaccagcaaattcattgcaatgtaaattatgaatcgagtgaattaggaggagaattataattaggttttcctgtaattcaattattttcatttgttagataatctagttttttagaccctaaagatagcatccagttctacattatgagaaaaaaattaatttctttgaataatttaatagcaattaagtacagttt

SEQ ID NO: 3235 - DNA, 598 bp, Bovine  MMBT16910
  misc_feature (1)..(86): n is a, c, g, or t
nnnnnnnnnnnnnnnnnnnnnnnnnnnnnnnnnnnnnnnnnnnnnnnnnnnnnnnnnnnnnnnnnnnnnnnnnnnnnnnnnnnnnntcactcagagtggagcctgtcacaggatctccttcttcctcacaggttaccacagattcgaggaatcacaattagggaagtaaaattcactatgttcatgatagatcttgccacaatatcctatatttaaaaatttttactgttacacgataaatagaactcagatttatgaatcacaaattatatacctcatatttcacatttggttatagcrtttttcttctttctctgattcatatagatgttacatgacrgtgtgggtgggatgtgtgtgtaatgtcatccgaggaaagtgcactctcgtgtgctatctgaaaccactgactgcagccgaccccaatgagatgcttctcactcacaaagcttggagtttgcagggtatgtcacttacaaaaaaggcatgcttccgcagttatctgtagcttggctgataacagcaaagagctttctgcaattgtcattcaacgtgggatccagagaattctcacagttccattagggactgttgagag

SEQ ID NO: 3236 - DNA, 600 bp, Bovine  MMBT16999
caatcaggaaaaatgcaaatatgaactagggatgaccacagcactgattatgcaggaaaagtcattgtattagggatacatacagaaatatctagcagtaaaatgccacattttttataatttaaatattttccaaaaattggacaaagcaaatattgcaagatgttagaattgttaagacctaagtgatggattatttgggtatttatcaggtttctatttttcagtacatttgaaatttttcataataaaaagtcaagacaaaattactttgtgaacacctgtgcatgaagcagtgcrttggatctccatgattacaattaaatggggacaggatgaagaggagaaaaccaggaatattctatggttatcttaccatatcctgccatagaagcgccattctcgacatccattgtgttcttattttcctctgctagggctttaacatattttttgcttaaatctagtatctgctcacgtaacttgacactgctttgatgtcttggtcgttgaaaaatatagtgcagtaacatcaatccccaaaggagtccaaatacaagcaagagtaaactcaatttctgggacatagattttcttgag

SEQ ID NO: 3237 - DNA, 598 bp, Bovine  MMBT17042
  misc_feature (1)..(67): n is a, c, g, or t
nnnnnnnnnnnnnnnnnnnnnnnnnnnnnnnnnnnnnnnnnnnnnnnnnnnnnnnnnnnnnnnnnnnctggttactgtttcacaatgcagctgtttaataaccttacaaatcatactgattgaatggttacaagactgagaactaaggaaagataattttaataatccttcctttgtctagacacactggtgctttttatttcctaaatgaaatttttccttgattaacattgtaaaaagttaaatgccttgcagaagctaacatttgtcaacttcagttaaacttcagcatgacttctstgttaaggacattcctagaaaagatttatacacatacacaaacacatatacacacatatttattttttgccaacttcrtaattcttgtattgctctcattaatttttatgtgataaaaaatttagtaaatttctgtgctttttggcattttcacttttaaactggctatgaatctatgagttttaatgttatttaaaaatcattaattatagtgtttattagatataaacttaaaaatagataaatgtttttagattataccaaattactgatggattctttaattttgtgtaaagtg

SEQ ID NO: 3238 - DNA, 423 bp, Bovine  MMBT17340
agccaggagtccagctcacaaatggagtgtggaaggagataccaagtttcttggtatgtgtggtgacttctcttttttatgtatttactttcacataccctaataatatgtttttttcacctgatagaacagttaattaccagccattactggtacagagttccatgaaggatattttaggaacctgtagtctcaaaaaagagcctttatattcataactataatgttcttaataacgttgttgggattgtggctttcttttgtttcttatttttagatccttgagtggaagctatttastgattactcataattgtgaaaataatctagcaatgataggaacttgttaggaaaatctgtgttttcctttcttttatgtagataacaatattaatcccaaataaatgttggcaggaatgacca

SEQ ID NO: 3239 - DNA, 600 bp, Bovine  MMBT19051
gtttgtttaaagaagttttcattttgataatacttggcagaagagaaattttacttttggaagaaaatatgaagaagttacctgcttctggctacaagatccattttcctatattgtgaagagatttgtttcattcaacttggaataccatccccttcataaaaccttcccaggccatgatagtcagaaggtacctttaattccacacctcactttgtactatcaataaaaatcacagtgtaaaacgttgaactctacaaatctcccatggcacctaaaaatgtcccttasatgtaacaracacctagtaagtctccttaaatgaaagaatagcggggttgttatggaggggaaatgaaaatcaattgcaattctctcccacaacagatttgggctaataatgtaagaattcttctgttaccaagtactaatttccaagtttatggacaaagttatttgacttacacacgatgaacagcacattcccatggcaggatctgctgtgttatcaggctttcagaagtaccagctgcaggtaggttttattttgggattttaaatacacacacagaagggataagtacaacaacagagaagcca

SEQ ID NO: 3240 - DNA, 600 bp, Bovine  MMBT19072
gaaacaaaactttaagagtttcatgtcaaataaaatgctaacttgatcctcttgtggtgtcctctttttcttcttcttcttcttcccccagcagcttggctccgaatctttgctgggagactcttttccgagtaagtcatctaattcgttcagccccagcagccgggcctgaggcacctccagctccagccgatacgacaggttcctcagggtgcacacgcagttctccacggtctgaaacccaacacggcgcagggttaaaaycatcgtagcgtgttagtgcaaaatgcttctgtaccmagcaccagtggcactaaataaatgtagaatatgaaagaactgtttttcactgatgggaacctrcaaactgaaagttagaactctgattccagactcaagttggtgggaccccaagctcacagagtgtgcagagccacccaaagtagagctgaggatctgatttcacactgagtgaaatgtgtggggctctgggaggggagaatgcccaaggtttctgcttcagggctgctgcagtggcagagcccccatattaccagaaccccaccccttctcccagctgggaactctcatcatgacagc

SEQ ID NO: 3241 - DNA, 396 bp, Bovine  MMBT19171
aatgctccagtggttgtcgagggtgagagccaggaaacggcatctgcgggggtggttatcatcacatactccccagaaccacaaaattgcccacatcctgggctcatggaccagggtttccactttagtggcctgataacccaraggtcttattgacaaatcccagaaaggaagaggacttcatggatttgtgtgtcttggaaagctgagtcctatctcccctgactcactctggaaaagtggaagtgtctcttcgcctgacccaagggaagctgatgtttggtgtttcctgggagatcrcgattcttccttagatctttttcttgatctgatgttcatctttccaatggaggacgagggtcctcagctgtgttcaagtcatcaggggccaaaaag

SEQ ID NO: 3242 - DNA, 600 bp, Bovine  MMBT19239
gataaagataacatcttttcaaggttctgttttttctattggattcagtgtttccatggtcttcctggcctcaccaaacagtagataaactgtctccaaatttatcttttcttggaaatacaataaaagaaactcaatattccaatataaagcacaattttttcccaatgtattgcataatgcactgagaccaaaatctaacttttacttagtttattcttaattatatctagaagggttctgcaaaacagcttatggccctttggcatgagtcaaaggtatgcactgtcccagacttamtgcaaaaggcttgttgatgagaagtggatttaattagaaagacagctgctaatagggtaaattaacaggttatctggaacagatataagataatatttagactttataatttatttttcctaaatttccatattttccattataatttccatctcaaaaccaaagactgccatcaaatcctaatttcctaactactcctaattttactatcccaggacacaatactctctgtcacatgcctgtcttgtctgaagcactatgctgtgaataccagcatttagtcacattcaggtctaggtt

SEQ ID NO: 3243 - DNA, 600 bp, Bovine  MMBT19439
tccagaaaacttgagggggagatcctgagcatcctggaataaaccaagcagctgaaagaagaccaggggctatggtaaggtgagtgcagctggaccctggtgccactcaagatgagagctgagtcctacacttttagcgctaagaacacagtctccttacagttggtgtgagtggtagagagtattgtgggactcctgtgaaaacaatcaagtcacctgggctgacaaggacctgagacaaccacagtcatgaagaagaggaaacacagacaagccctggagaccagctgcagcaaggaytctcccctcttcctggsaactttcttcccagcctcctttgcaactcagttctagtcaattccaggcctgtccccttagaaacatcccttcagctcattccttcccagttgcaatattttggggaccacattttcccratggtgcagctacaaaaggaggaggatttgtgagtaacattatgttaagccactggattgcagcattaatttgttacaggagcataacctaatccactctgattatattccctctgcaacagagacttgtcttgaytggtataaggtgaattacctacaaatg

SEQ ID NO: 3244 - DNA, 600 bp, Bovine  MMBT19442
gccctggagaccagctgcagcaaggaytctcccctcttcctggsaactttcttcccagcctcctttgcaactcagttctagtcaattccaggcctgtccccttagaaacatcccttcagctcattccttcccagttgcaatattttggggaccacattttcccratggtgcagctacaaaaggaggaggatttgtgagtaacattatgttaagccactggattgcagcattaatttgttacaggagcataacctaatccactctgattatattccctctgcaacagagacttgtcttgaytggtataaggtgaattacctacaaatgtactagaaatacagattcctaggatccataccaagtttctgacagatttcctagagttcagataacctggggtgtagtatgtctggtacaaaagggaatgaaaaatgtcaagaaaaatacctaatgaggaagctgcaggatttctgtgacagtttggttgaagcattggagggaaaaaatgtcaaaggcttctagcttgagaggctaaaaaaaataataataaaataaagtgacagtctgaagggttcattttagagaaaaaggcaggtttga

SEQ ID NO: 3245 - DNA, 600 bp, Bovine  MMBT19716
gaaggcattttcagggtttccttaaaacatattttgggtttattcagggttctttctcctcgctgacattcagctattcctctggcaagattctccattcttccatttttttttttctttcaacattgattgttgtaccaacatccacatcatcggtgtcatcttccgggggtgggtcagctcctctcggtcctccccggcgctgggcagtgagggaggaagaactggaatctgtgttccatgagtgggtgtttggtggcatcacacaggaagttccgtgatgccacacacaggagaacrttttttaaactctcaattcaagtaggaggtgatgctcttccctgtgagaatttacatctcctctctctctccctccatcctgcccactcctggctgggatctatcaagggcacagctgatgaaatataccctgttcagagggaccacaccacaggagcgtgggacagactcggagtgctatgtgggtccctgttgggctccctaagtgaaggctgagagcagacatggccaactgtcatgggtccgccawgtaatagcaccactcaagcagcccagaccacatgtgggaagagtaacacr

SEQ ID NO: 3246 - DNA, 600 bp, Bovine  MMBT19739
acccccccaggtcccatctacagtagaaaactgtttccttgttctttcattccataagctctacatctttaataaaaactatcatttatgtgttcatgtttatcattatctgatgtcctactatgtctagaatataagcagatatctttgtttgcttcactagagtatctttgaaaagtgcaataaaacctgactcrtagtatgccactaatgtataattttttttaagttgtattaaatgaaacagaaataagtcatgttttgccctaaatgtatatgattgcattaaattgtcaattrtccttagaaacagttaaacaaaagatagaaactctcctccccatccccrcctttaaagaccagaaaattgtgtagarttgagaatttacgttggagcaatttagaactcatgtgttgcttggactctgatttagcaatatctttttagtggtkcatgcacactcagttgggtctgcctctttgtgaccccatgtgctcctctgtccctggaatttcccaggcaagaatactagagcaggttgctgtttccttctccaggggatcttctccactcagggactggacccttatctcttggat

SEQ ID NO: 3247 - DNA, 600 bp, Bovine  MMBT19851
agtatgatgtagtcatagaaaatgaaaaacacatcttgcccagagataacgtagatcctcgctgccttctacataaaccaatgataactgataagagatttagcatttcctcagactsaggtacatatagaggtacatctcctcacagaartgctatcaagcccagggttcggatcagcttggaaccacctcaatcataccatgttcctgtacgtgctcctggcttgtgygtcatgggtcttggaaagccattctgccccgatgaagataatcagtgggtctacccaggacaatcacacrgcagtctgtgctgagattgagaaagaactcatggctgacaacgttacatacaaggtaagtctgggtcttcatcaaatatcactttactctcagtggccctctgtgtttctaaccaacttttcctgcttccagggctccttcgaaaggcctcagaacaccagtgaggtaaggagcagtcaacccatggtcatttctgaccccacttgaaagggaaatcccagggcagagacaagaacaaaagttgttgggtcaasaaatctggggagaaagttgggagtttgaagatgaagtctctggctc

SEQ ID NO: 3248 - DNA, 600 bp, Bovine  MMBT19962
aaaaaaaaccccagaaaaaaccaaaattaatgtgattctggagtatctgaatactttcaaatgtgcttttaaaaatgcttgtgttttagcctttatctttaatttgatgactaagttttgtattcatagtactatgctgagaattgctgtatttctccagtggtcctggggtacaagtttattctgtttagttatcactcttcttgttgctgctgtttattcactaagttgtgtctgactctttgcaaccccattgacttgcagcacgccatgctcccctgaccttttctttacagcatyggattttacttttgcccccagacacatccacaactgaacatcatttccactttgacccagctgcttcattctttctgaaactattagtaattgcccttcattcttccccagtagcatattggataccttctgacctgggaggctgatctcccggtgtcakatctttttgccttttcatactgttcatggggttctcttggcaagaatactgccaagagatgggttggctgttccctcctccagtgracygcrttttgtcagaattctccacyatgacctctacatcttgtatggccctac

SEQ ID NO: 3249 - DNA, 561 bp, Bovine  MMBT20210
gagctttcttatttcccagacaacctagaaaaaaaaaamaaaacatgtaagtatatttttaaagagcctaaaagtgcagatttttctcttattwgttttttctaggttaatttattctatattggaagttaatgaaagtcaatatattttgcttctaggcaagcatcygaatattttaagaatatttcatttgattatctgcttgctatttattgatcctactgcagtggtctctggacaaaattgtgtgcagtgaggagcacaaaatgggtctgcccttgtttggcagctggtgataaygaaatcaccccacttcttagcctgttttgaaatgtaagtaacagaagagagttacttctgttacttkcaacctagacagcatattaaaaagcagagactttactgtgccaacaaaggtccgtctagtcaaagctatggtttttccagtagtcatrtatgaatgtgagagttggactataaagaaagctgagcgccaaagaattgatgctttgaattgtggtgtggagaagactcttagagtccctggactgcaaggagatc

SEQ ID NO: 3250 - DNA, 600 bp, Bovine  MMBT20411
cacgagaggcttttcccagagctgcaatcgtcagcaaataaggtgagcaagagcgactgtcttacttcttccagggcctcaagttcttcctccagctgctgagtctcctccttcacggccatgaggtaatctgtgactgattgtcgaggctgcagtcccttctcaaagcgattatacattccattccaaaacctgcagaggacagcagagcttcgtgaaaccgtgtcacagtctgtacattcactttcttgagtcttccaaggtatctttgaaaccatagtcctaataataaccaaatgygaagtacagggtcaaaaaagccactcactaagctaatggggtcgcaaagagtcagacacaactgagcgactgaactgaactgaaggtaataatttcatgttaatgttttcattttcttgaatcagtcaacttcttttggggagagtaaattcatgaagaatctacttgagtagatggtactgaattaaaaagcacataatatatttttctgaaatagattgtagtagtacatgttaccattttctttatttttttggcttaagatgacttagttaggaagtcaacttggaaaattagtgt

SEQ ID NO: 3251 - DNA, 598 bp, Bovine  MMBT20422
  misc_feature (1)..(38): n is a, c, g, or t
nnnnnnnnnnnnnnnnnnnnnnnnnnnnnnnnnnnnnnttcatatttatgtgaggggcttaccctgacagtaaccataaaatggtacaagcctaagggctcaatctcagtttttcagttcttattaagtctctgttgtaggatggtgttttgtatttctgaagttgtgtactgacattacraagggtggctttagtcctacctggacatgtttgctccagttgaattctgttttaagtctctgcttgctcctgcatggttcctgccatccagcacaatgagtctgttgattgcaaagtayttttcttcttcaggagccaatcttcctatcgatattgtttctctaaattacactttatggattttaggcaccactttcatctatttggaatctgaagtgtgttatcccagtactttaatatacagtagtttattcaccgaaaatatattctgacaatatttatttcatgtttgaataaccttgcctctccttcttgatgtttgtttccaaaatgtggagccattatagtagcctgcacgtctttctgtgaccattgttgtctcttcaaattgaagtacacagtcctagcaaactcagt

SEQ ID NO: 3252 - DNA, 600 bp, Bovine  MMBT20625
caaccgtatccccaaataccaggagtttgaagggctttaacagctcctcctccactaataaaactgcttgcctaataagaaggacatatactgactgaccatttgaaaatgtgggggtcttccagaaacagagttaaaacaataaatacatattgaaacaataacaacaaaagactttaaraatgttggttcagtactttcatttgatagaggaggagtctgaggcacagagagtgattctaacatgagaactaagggtaggagacagttgaccttcagtatccgtggctctcatgtccrgatttaaccactccacgtagttatcagttttcatataagaaacttgaacatctgtgaattttgatatccagaggagycctggaactaatcctccatggatactgaaggtcaactgactatatcttctaaattgcaacccaaagttttctccagaatattgctccttcacttcattacaaggaaaaactatggcgaagattatctgtatcttttattaggattgcagacatttctgttcatctactgtttggtggaaaattttgtggttgggagcaagcctggactgagagccatattacg

SEQ ID NO: 3253 - DNA, 600 bp, Bovine  MMBT20827
aagtacgtacatcattatcattcacgtacagatgtggaaacggaggcacagagagttaagaaatttgctcaaggttgctcagctartgaatggtggaacgaagattcaaacccaagtaatttgggctccagaatcaatagccacctgccataattccaactgcctcacactaattgcaagttatgattagcagtaacatctttaatgaaagtgagaaaaatraaatattggtaattaataatgaaatacagtttggcaggcaaaaattttccagaccttgagtcttcagaaaagaagcaytttcaaatattatgaaaagaatgaaaatgtttaaccagcattagattagatgatactcacatttcctcctagttctaatgttctgtgagattgaggaggaaatatggatattaaagaaaaacaactctacaaaacattactcagaatggagcatttatattccaagaggaatcaaaacactatttctctgttaaatggtgcaaacaagtttaattttaaaaaccgataatcaaatgaaaatcagtggacttgactattaagaaatattaaagtcaaaagcaaaaggaccttagaaacgta

SEQ ID NO: 3254 - DNA, 598 bp, Bovine  MMBT21432
  misc_feature (1)..(2): n is a, c, g, or t
nngagcctaatgggcctggggtcacaaagattcatacttgacagagcaacaaagcacgcgggcgcacacacacacacacacacacaatttgccattattgctaaaaaatcacctacttttgaagttagctgaagagttgcttgtagcaatttccttccagttggcaatgtacctaagcacattatataggcattcattaaattaagtcaacttattagtaaataataaagtggttcattagtacatacttrgactacttctaaaattctactttctctatgaaaccatagattaatgatkataaattcactagtccaaatgcttaatttcttgacttctcatctcaaagtagctctcatgcacctgaggcaacccctaggacaaggarttgtaagaggtatgaaaatggtgcccaccatctaccatattggtgccctttggcctccctccagcacacatctcctcatgttatactgttccattctgctagatcatgtcctcaaytgagtgacagctaagatgttggttaacttctaaattcaaagtatgaagggraaatttttgaaagtcatgggaaaacttcaacaacaaaacttta

SEQ ID NO: 3255 - DNA, 600 bp, Bovine  MMBT21775
tgccaaaggtgaagtgtttgatcagagcccagcaagtttagttgtagccccaggacaccacctattgcgtttatttttggcacctctgaaagtgtattacatttattctgaacaagtcagtagtgcctgacggaagaatgaagacaataacttgcttgtgtaatgaaccagctcaaccccacaaccaagagaaaatgtttcaagacagtactgaacattcaccaagtcggtccaagggaaaccgaagcacgcccgcaggaaaaaggaagtgagcatggaacgaccaccttccggtcgatkaagtgagagcccctctccaccaatccacactgcccrgcacccactccaaaaactgctcctcgtcaattccgagctaacttcttatcttttctcctgaattaataaaggggaattgaaaatatgcagttttatttataaatgactagtggataaaacagaatctgcaacaatattagtgtggagactgttcatctcattgtttaaacgatgatatgccaaaatgtagaagcaccaaaaagtacaatacagatgactaaataatgctctttagaagcatgagctcatttaacrcttttgaag

SEQ ID NO: 3256 - DNA, 600 bp, Bovine  MMBT21963
tgttgatgtagcaacatattctttggtgagggtcattatttaatagcttttctggtacatgcaaaatattttaaacagcatttaaaaaatcatttacctgctcgaattttgacagcctggggggtcaaacgcctattaatattgttaatgagtacttcacgttcatcttcattcaaatctaagctatccaaaatagatgggtctctgaaagaaaacacacacaacaaaatgtcaaggttactttactgataattaggacaccaaacataatataacagaataatgtttaagagcacagcrtttagtgtcagaattaagagttcaaatcttagcttsacaatttaatagctttgtgcttgggggcctttctagatctgtttccaaatttgtaaaacaggaataaaaactgtgtatctcactggactgcagaattaaatgagctaatgcaactgaagtgcttaggcttgtatgacaaaaagaaaacacccaaatgatcattattaaaaggaaaattttagagatctgactaaagcaagcaatttaatgtttcctatacaggcataacttgaagatattgtgggttcggttctagactacaat

SEQ ID NO: 3257 - DNA, 600 bp, Bovine  MMBT22003
atttggttccctcacacttatcccacctaatgggcgcaaacagagcctttctgaccctcacgatggggggagaggaatttctatggctgtttgggcataaattaccaccaaaagggtgggctacactggatggagttaccacatgagggacccttgtcttcctgtggggtggcccgtccccacccaacgcctgctgctgttccatcctaggatccccctgacccagggccagccagaccgaggaaacctggctgcagacttggcaaccatccagcacttgaggatgatcacggaactccyggaggaggattccagcaagatttaggatcttaattaacaactgtaacaacctaagtctgctcagcctggttagatgacatttaaatgccagtactctcctaaactgcctgctgagagccctgctaatttgttcaggcctcaattgattgtaaaatgcattctcagtaagatacagttatctagactcgggtcctcaaaagatagcatgttgttaatttcatgtacactgagttaaaaatgtcactccatggggtctaaattacgataaacttacttacgcagttgaatctcacctcaact

SEQ ID NO: 3258 - DNA, 600 bp, Bovine  MMBT22567
gggatgtttgcttctttagaatttaaactgctctacagataaagacagttaaatgtaaactgttctgtggcacatagaggacacctgtgtgtttctccttaggaaaaacattaggragaggcagggagaagagtggaaactgtgagcaccattacaggaattgcctgwggctgtcatcttacttcccttgctggtgcgtgtgcagagaagctttatttttggcacaatattaataatccaatatcaaaagaaccttgtagttacatttctggtaaggtgaaacatttcctgttttgctastgtcatttctcaagccttgggactcatggtcaggaattacacttatatattatggcaatagtgaaagcagaatgtgaaatgaatagccaggctcctgtttaaatcttcatcccagaagtctgacactggttttgtggtttcagttgaagttgtgtgctctgtgctgtttctctgtcattgtctgactctttgggaccccacggattatagcccatgaggctcctcygcrcatggaattctcccggcaagaatactggagtgggttgccatttcctcctccaggggatcagctgaagctaa

SEQ ID NO: 3259 - DNA, 600 bp, Bovine  MMBT22682
gcagttgacaatttattgttaatttcaaaattatgtaacaattaacttccaattaatgtagcaattaattgttggcctcaccatagaaaaactccacaaggatgataacatggtaggctcattgaaagaaaatcctgcagagatcacataattacctgagagagatccttgggggaaatgatgaagactgaaagtacttgcttgcagacgtgatgattgttaagattatgcagcaaaaacaaccatgaagagaaggacgcagatgacgaaactgaggcycagagattcagataactcayscaaagtctagtgtaggatgcagctaagatgagttgaaggcattatcctcctcgttccataacytataacaggatttgcctagagcctccaaaggttttatcatctgcaaaatggggataataacagtccagtccttccaaggaggctgtgagttttaaccgagataatgtgtgtccacgctcagcacaaggtcaagcccaggagagacagatgagtgytgtgactcttactatttacagcatcacgatttgacatgaagwrgctgcataaatgattcaggcttaccaaacataaatacat

SEQ ID NO: 3260 - DNA, 600 bp, Bovine  MMBT22693
ttatgaaggcagaatatggtttgaactaggaggcactgaggggtcctctcctgcctttccaataatatcaattttctcctggctgatgatggcaatgctaacagtctaacgttttaactttattttaaagctctgattcatgatcaaatgcaaataccgctgggwgaggtaaatgaaatggtaactttatcaacyactttcattttaaatgactgggtgtgagatcttccctgatctgatttcacgargatggagaaagatggtgcgtgtggaggcaggaggcaggcttctggtgcctcrttctcccgaccttcccgtcacagagatgtgactgcaagtgtttttaaaaatatgaaagaaaaagtatttcagtataattcatatgatgttaaagtgataacagttcaaagaataactacaggatgagaaatttctgggaatcaaggggcagggtatggagtgggggggacgggggaatgtcgtggaataaagacaggtaggtgaagacaggaaggtcattaaaatttaggattctgaggttcacactccagaggataaccactggctactgaaaagttacaagtgaggaagtatgagttc

SEQ ID NO: 3261 - DNA, 600 bp, Bovine  MMBT22791
aaattctagagcacaaagtctttattccaactgccatttgaaattctgaaacagttggatgtgtcatcaatgacccaacccatatggccacaaggtatgctgagatcttctaaatggagcaaattatgcaggtgtgagtamagaggagtgaagaagyaaagatggtttgagtcggaaaagacatctattccctacaaaatgttctggaagatggcacttyctaacaagttgggatgcaggttgtaaaaccctttggttacaaagaacagaatcacaactgtgtcgaaagatggaagttastatcaagctactatagcaacaagttcagcataaactggtgtctcctttcaactaggacagtagttttcaattaggaaagatcttgcctagtgggagacccttgscaattttgtctggagagatttttgattgttacaactagggaggatagtggtggtattcagtgtgtaggggctagagatgatgctagacatcctacaatgcacaggacagctcctaacaacaaggaattgtctgtctacaaaggccaatagtgctgaagttgagaaattctgatctcaggaaagatgtaccctctcc

SEQ ID NO: 3262 - DNA, 600 bp, Bovine  MMBT22794
aggcaaatagaggttagcaagtttcataagggcacaaaatcacccagtgaaaggcatgggatatgaccccaaatagcttcatacttaaggttcacctgttccagggaactgtccaattttcctgtggaattagaagtgtctggaggtccctggatgaggggaaaatttgatgagtgcagattctctttgtgagtagatgataaaagtaaagataagaactttggaactataaaccctggaaaatttatcaaagaaaccctcccactagctattaagccctcagataggtttatcaccaartttcttgtgggcatctattgtttctctaccagcatctacttcctgagttctggaaaagcatatgcagaattcctctgggataccattgctcctccaaaattttgctaaagtcttttgttagggtctgagtccctaggatgcatcacgattgcatttgggccaatcagaaacaatgaaataagatgcatgttttttattgtggaaagttgtagaataaacatagttgtcatttccctccatccttgagtcaaggacaggctggagttatccttgacatccctctactgaaaagggacatct

SEQ ID NO: 3263 - DNA, 600 bp, Bovine  MMBT22843
agatcaagcaccacatcagtgagcttcagtgttgcccagaagacacctgtctccagtagttgatgggctgagatggaggaaaggcaaacccagaaacctcatcctgggagaggtggacccacaacacaagtgaagcttctagtcccacagagtgtctaccattcaagtgggggggcattgattgggaaggaatggtatcctgagaatcaaaatggggatgygtgggaagatcatatcctaaagatgaagctgggcaccctgagcccctaaatcccaatagaagcaacccctccatacccrgtagaagcagagccttcatctccacctgaggatatcagctccctgtgaggcrgatgctttaccagaccccgttgatgccccccaggatgctcaccccatcccagcctccttcccatcacccttctgtgcttctagatccgtaactggactccagtcccagcagcccccagctggttgtgacctggcagctgccctgcttgctttctcatgtgcgcagacagaaggcaaggaatgcttgcgggcgagtgcacagggtaaggtggaagggacgaggtcagatctctcacagcagggcgtgga

SEQ ID NO: 3264 - DNA, 600 bp, Bovine  MMBT22924
acaaagatggggagggacacctccaaaagagtactaaagaycatggttgtggaatgggtgtttctgtactaaaaaatatttaattaagatcatttctgattttgaatctccctctgtgctgatgaaraggagagttataaggaagaagcagggctcctgccagctataaacagggtagaaaaaatacaccccaactccaamacaaggaaacgtggacccstctactgactagcaatgggaggaagttatctcccacaggcttcagagatgactcccagaaagtaatatggtatgagaacyataggcacttagggaaggtagaggaaatggagctaaaccactcactatggtttagttccactgttgtatcatgacacagtcagatttttgaaaacaaatggctcagactttatatttcagaaatcatggctgtaatatttctaaaggggtgcggaggatgttccctaatactctattttagcagcagaatgatgtatcaatagactgcttttgtgcatcagatgaatattgggcttggtactacttcacatcaatggaaaagtttttttctactgaatctccagcaatatttaaatatat

SEQ ID NO: 3265 - DNA, 600 bp, Bovine  MMBT23385
aacctgcccccccagataactgccgcgctgagccgtttccaggatgccctagaggaagctaaggagcggatagacaagttcagcaataagtccaatatccagaagtttctaacagcagggcatgacagcataatctttggtggggtgaaccagaggctgagcgatgtctgggargagctctctctgctgctccaggtggatcagtggaggcatacttcaagcctcagcctaggagtgtcctggcaacaggaagatcaacaggatgcagaggaggacaggaaagctatccaaggactgagkggtgaggacttttttcaggtggggggatgcacatacaggtgtattcgtctcattttggaaaatcaggaaggttgaagtggttttgrcaggtatctgttgacragactcagaattycagacgtctgagtggagaggggtgcccaccatgaggctgcagccrgagtgtggatgtatgataygactacatgggagtgaagacttggggccaataactcagyagagccaggggcaagaggggamgtgtgagtgctgtcaggagaccacgtcagaggctgtgcagacatggcagtggcttgggtc

SEQ ID NO: 3266 - DNA, 481 bp, Bovine  MMBT23392
tggcaacaggaagatcaacaggatgcagaggaggacaggaaagctatccaaggactgagkggtgaggacttttttcaggtggggggatgcacatacaggtgtattcgtctcattttggaaaatcaggaaggttgaagtggttttgrcaggtatctgttgacragactcagaattycagacgtctgagtggagaggggtgcccaccatgaggctgcagccrgagtgtggatgtatgataygactacatgggagtgaagacttggggccaataactcagyagagccaggggcaagaggggamgtgtgagtgctgtcaggagaccacgtcagaggctgtgcagacatggcagtggcttgggtccaagtggccggggctggactgagtggagggcagggctccaagggaatgagatacgcgctggactagagaggaaacaagggaaacagatatgactttacacttttgcagatcatggtgatgg

SEQ ID NO: 3267 - DNA, 538 bp, Bovine  MMBT23503
cccaggcaggcacccctggggcacgtgggggacagtgcgggcagaggcaggtcacaggccctcctccagagccacagcctcccytccagcaaggacccaagtctgggaayggggcrtcatctggaaatgggtgcccagccatgctttcaccgtggtgacggagctggctttctggatrcggactgttagcactcgtcaaggaaatgtcctcagagaggtttagttcccacagggccctggcacccaagcaggtctagaaggcgaagcttctgttccagaggagacaccttatgcccctargaagcgacccccagtgccctcattaagaacatgtctttctcatgagcttgggaccgccttcggacgccatgagacagctgaggcccaggatcccacccaggccccggcgggactcacccactctgcccactgcacgcccccttcaagagtccacacggcatccggtcccagctctcgacacgatgctgaagtcttatttccagaaatgatgcactctcaaatgtttgttccaaaaaaa

SEQ ID NO: 3268 - DNA, 600 bp, Bovine  MMBT00554
ctactagaggccatgaaacttaggcttcgagcggcgcctaagataccgaagtctaaatgtcataggcgcactcttttggaaaggcgattctctttttcttctgcgatagaaaccgtattgccaaaawtttaagactcgaagaagccacggggatcttgaagagttcagccccttccacactacctgtttcagattttttgctgtcctccggagtctaaatttatgtctcatgagtcagtcgtaggataagggcttgacactcctaagccatgagagaaccgttagttttcatttcattgratctttgaaagccggtctcttaaaatgagaagaattttcacgagatgttcaggaaaaaaaaaaaagtcagggaggggctagtgccagatttcccaaatctcccagcaaccctgattttaaatttctccgttttgcaaaaaaagtttagatcaaataacatcaatcacattagtatatttgctgcatccagaaatatggtttggctgtgtggcattgaattgacacgagttttaaatggtctcatatgacatgaaagtctttttttaaaatgagcacattatatttggtttgaagagagct

SEQ ID NO: 3269 - DNA, 600 bp, Bovine  MMBT01291
tgttttacagttcatttacattccaatatgtacagtctatttaaatttgagaatacatatacacagtgggtttgtacctgccctggaagagttccctgctggccaggatgggcacaggggtggcattcatgacgtcagctcgtgccrcccagatagccaaaccgggcagcagggagatgaacggcccaagcaccagcccccaagcctcaggcygaaccagagctagaagacaggtgacaaaggaaatttmagcttgtgttaaatgagtctraaaacctccccggcttccccatctcactsccaagccaagccgagaaacagtgtcactgcaaaacaaaaggggcgtctatccgtgcccccacatcgttaactgtgtctgtagcagctgactgaacggcatgtcattcagytgtgatggcattgccatcatttcgagtttcgcccatttcctttaaaatcactgtatcggcactggagggcatgtttggcaaagggcagggtgcccatcacatcagacgcactgcccgcccagcgcctgtgcaaatgcaccacaggtaagctggtgccggacttctgcagaagccttcacagtgagaaaag

SEQ ID NO: 3270 - DNA, 600 bp, Bovine  MMBT01427
agagcagagaagctgcccatgtcatctggattaagtgtgaaatagagcattttagaaaatgttttcaaaagaagataacttcgaaaccaaatttgttatttctgagtgctttgcgaataaccatggactttgtaataaagagggaaataaaatgcaatgaacacagamtctcacatacacacaaaaattgatggaaaatatacttcaaaataagagaaaatattatgataattataattcaaattagtatcagattgattttattttttgtgttatatttttcctctctgtttctacaarttgagtctgtgaaaatarggactgccttcctttgatatctgtaccaaattggcatacgggatagtacaaaggttaacaagtagctctgctgtgaagaaaatacatttacgttattgtcgaaatccatgcatcatcttccagctgccttcatctcccatgaacccaaacagctcaggaaatcttcctggggtgtcactgactgtggatctccagtaagttgagcctgcccccaaaaggggaccagcaagtcataccctgtgggcttccttggaagctggaaaacaatctgcctgcaatgta

SEQ ID NO: 3271 - DNA, 602 bp, Bovine  MMBT01880
  misc_feature (1)..(2): n is a, c, g, or t
nnttctcattagtaaataaatctgaaagaggacataatgatgctaccacagataaccactggcagataaactgcaaaaggtaatataaagccccattttggtgcaaagcttggttttcactttgcatgtgtctgtaccctggtgggctacagtacctggggtcgcaaagagttggacatgactgagcgactaatacacacaacacacacacacacacacacacacacacacacacaccttgccaatgaattctgggactcctgccgtgttcccatctgttggaaccaatcacgatatttggsggcaaaatattggggcaaaatatttaagcatccagttaaagaattttatcatctgacataaaagaacacagcatttgctgttcaaatatcacatatttcacgtgctttctctttttcttcagaggaaggggaaatttcatagcaaagtgatcttgaatgagaagactcttggtctcagggggaatgtagaacaaggtggcaggtgatgggtatgctgaagtgtggcgtaactgactgccaaagaatacttgaacaagcagctgatccatctgccatcagtggagctggcttaatcctttc

SEQ ID NO: 3272 - DNA, 600 bp, Bovine  MMBT01987
gccccagaacctggcccagagcctgacaccataattgacacttagtactggctsaatgaatgaatgaatgaatgaaaagcagttgatcaaaaccacaagtaccataaaacagagtgagagggccgatactttggatactagagaaagttttcaaagttatcttttcagattaatataacaggtctaaaagtaacaggacaaaatttaagatggagaatatgacaaagaagtgaggaggtactgtggagcagatggaaaaggagtgagttttaattaactgtaggtttaatgtggtctcaraatagtgtggcagaaaagctgattcagcctccaactgcagtaattggaatgtatattcttcacacgagagataattatttccctctcctcgacatccccccaattactcacggaagattgtgcccaaatctgaagaaaaaaatatatttataaaaaagaagcatgtttagaggatggccagaatgatttttggagactcaaaatgatgttgtgagaggaagcttcaagggttagcagtgcttatctaggaggaaaaaagtgtgtcagaggtcacattagttgtctgaaaatctatgattg

SEQ ID NO: 3273 - DNA, 598 bp, Bovine  MMBT01993
  misc_feature (1)..(165): n is a, c, g, or t
nnnnnnnnnnnnnnnnnnnnnnnnnnnnnnnnnnnnnnnnnnnnnnnnnnnnnnnnnnnnnnnnnnnnnnnnnnnnnnnnnnnnnnnnnnnnnnnnnnnnnnnnnnnnnnnnnnnnnnnnnnnnnnnnnnnnnnnnnnnnnnnnnnnnnnnnnnnnnnnnnnnnntggctacatttgtgagtggaatagccccatctcagccctgataaggggccagatttcaagctcagccctatttatgtccttcacatacaaagaaatcaccttgacccaaacatgatcagctaacaaggcaccgtyttctaaaagcgttcagaaaacgtgttttcctaaaatgctatctccatcagacactaaaaagtaaccattccccatggtcaaataagtgtttacagttttcagataatcaaaggtagggacaggacttctcaagtctgtaatacagtcaagtgccaagctcactaaaatggaagacagcatgcataatatgtctcaaactcatttaactgtggggttttgttagcttgtttgtttggaatgcctaagacatgtctacaagtatcccatggaagacctgtaagaaatgtaagggctcact

SEQ ID NO: 3274 - DNA, 600 bp, Bovine  MMBT02237
taccaccatctgtatggttgctggctccaagacatggatctaaattaggcacagaaagtaaaccaggattattttaaacaatgacaaactgatcttaatttgaaataagcctttgttggctccctggtttagaccttttaccctctctatgtggttcctaattttctgggtaataaaaaacaatggactttacagtaattcttaccacaagcccacttacagaagtataaagagaatgagcccctacccattttctactcccaaattccttctggacagaggtgcttaccaggagaatargacacaagatatatgataggtagctacatgattaatcatttactcakaattctagccaagttattagggaaaacaatgggcctcttaggtacctgggaatactttcaagcatgcaagatcaaaagagcccttttgcatataacaaactcttgcctacagcacaaaggtcttcttaaatcctcttaggcattcaacaaaagtaaaactagctagacaatatatggctcaactggtggcactagtgataaagaatctgcctgccaattcaaaagatacaagagactccagttcaatccctgg

SEQ ID NO: 3275 - DNA, 600 bp, Bovine  MMBT02254
tgctgcaatgaacattggggtacatgggtcttttatagttatggttttctcaagatttcttatatgtcaagtagtgggacattgggtcatatagtagttttatttctatttttttaaggaatctccatactgtcctccgtagtggctgtatcaayttgcattccaccaacggtataagaggattcccttggaaagcagctatgctcaccaccataccatcaacatgttaactgacctttgtagatgaatttggaatggtcctaggatgagtgtcaaagcaaactytaaattaacctgaayattttattttacaggtataaagaaaatagaagacagcacatataaattttaaataataagtataaatcataaatmatgaataaacatcattttggttattatctttttatttttctgtattttaaaagtttatctttgtaagaaaaaaacattcaaaaaattttctcaaaatatttacttgttaatttagggaagtatttttatgcaatacatgttgataccaaaggaaccctggctaaaattctccatgtaattatcaggcaaaaaaaataatgaccttggttaaagtgaaaagtatta

SEQ ID NO: 3276 - DNA, 600 bp, Bovine  MMBT02260
ttaaaataaatatagtcttgcaagcaacaaagtctagataacataaacattaagttataatcatggttattttgatattataatattttaaataagagctattaaaaatgctactccaactcttatttccaatatttgaataatgattataaattatttcatgtaattgttttaatatgtttcttggattttaatacatcaatataggtccttcctgtgtagtgtattctttccttgcattaacacaaatatttagtttgacgaaatacagtctacccatcatattcacagattattccyccatgaatatggagggttgacagcactaggccattttatgaaaggatattgagcaagcacctaaagtcctttatccctccagtctgatagcaatctgaaattcagaatagatattcttaccatggaattatattaaactttggctagcaaaagcaacaacattttaatgacttgcatttatgaaactggtaaaactaactccattcattctgtcaagtacctaattgtagagtctataaaatatgaagataaccttgtttgactatataagaaattattccatttggacttcttcaaaac

SEQ ID NO: 3277 - DNA, 600 bp, Bovine  MMBT02292
cgtctttgccaggccacataggttctgtgtgccttaccccagagagtgggtacctggtgcccaaagacaggtgtaagtaatggaagtcactcaagggaattcattccaaataaaatctgttctgagctgactttctctctccacctcttgaagtagagaaaacatgactgaagtgacttagcagcagcagcagcagcamcaccaccaatgtaatgcggccgygacaggtcaagacaaaaaagagcactccataatcctgtgtgaaaccagacaaaagcacgaatgttgtccacaccctaraatgagtaaacacccctgtattctggctaatgaatgctgccactccaccgacagcttcagcctccatccgtccctcccaccttctacagaagaataattaagataaacatagacttgtcttgcttcctgacagcatccagtccagatcaaagccctgcttccttcaactctcaccaaaaccacctaaaaacagcccaaatcccacaataagccctctccaggaccccctttctgaggcacttcctggttccccaggaggatggagctttctcacagccacgagactagttcaacttctac

SEQ ID NO: 3278 - DNA, 600 bp, Bovine  MMBT02324
ttttcttttataatggtttgtaattagctttgttttagatttctgttaagaatgtattatctgctcaatatttagcattcaatttttaaaaagatatgctctgtatatcccagcttaattgaggattgatgtaacttgtcatgatcagctaggtcaggaactttttcatttcaaatgctgacttggtgaggtggtgtcaggaagtacttaatgaccgaaagaaactagagaaagagattagcaattatattcacattgtaagatctatgtagctctttatttattcaactgacctctaaytcaagtcagaaaattatttaagtcctctgtgatagcctacagatgataaatcttcctgttggygtttctttacctgagttagcattctagagttgtctgttttcagttttgtgactgtggcattwgaagctttgtrtaatttaattgtcaaaacttgaccatttctttaatttgttattgggcagttcatcaagcagtcttataaagtattatcatggaaggagttatagctctgtaggaattcttctgaagctggactccattcaggagtagaaatgttgtacatttaaccaaataatg

SEQ ID NO: 3279 - DNA, 600 bp, Bovine  MMBT02331
tccctatcttttccttctccttctctctccattccaaaaagctgatgattaatatttccattttactgtaaggatgcataaagtttcagaaaacacagtagcagacagtgacgtgaggacagactcagagacaagaatacttctgagattcttagcatcaactgtgccaaaagtaaatgcagatctgacaaatgacacaaaattattacctcgccatttctttttctgctgattggatttttaaatacaagggcccaattttccatagaaacagatcagatttacagcaaatacaaaaaytgcatcttttatttataaggttaaaaatctacccaaatacttttcattaaaatcgtgtgtctataatattgactttcagagggttagtcaagcattacataactttgcttcttcctgtgggaattagtaagcagagacctgaaggtcaatctcctcaacacaattcctgagactaccaattctgaccttgattacttgattcagtttgatactgaagtagttgtgagatatgtgaggaaatacacatgctcactctcctttctccactctctgctttctttctagaggaacatcttttgt

SEQ ID NO: 3280 - DNA, 598 bp, Bovine  MMBT02394
  misc_feature (1)..(60): n is a, c, g, or t
nnnnnnnnnnnnnnnnnnnnnnnnnnnnnnnnnnnnnnnnnnnnnnnnnnnnnnnnnnnnaccaagcagccaggtcagggtgtgggcgtgggagcgtaggcctcaggggcctcagcgcggaagaggctgagcgccggctgacagcgctgggaggggccgcccagcgggaggcctgcagggtcccggaggcgtgggactgaagcgacagactcccagaaggtgggcggcgggcgggggtagggagggccactgaggatgcccaggtgggagggacccagcgtgttctgaagagcaccaggytttggaggctaccaagtaaaccccaagtggcactcgacctggggaggagcccagcgagacagcaggactcgcaagtcgggactagccccggggagggctccaggggaggacggagaagggaaacactaagcgcctcacctcccaaacaagccgcaccccctccggcgcggccgcggtgacggcgatggcagcgcccaggctctccgacaaccggagcctgactccggccccagacgttcccagcaccggtccgtggctcatcagagtagccccgtcgggggtcccaggcccgccccca

SEQ ID NO: 3281 - DNA, 600 bp, Bovine  MMBT02412
gcccagaagggctaactgacttgtccaaggtctgtttctctgatatgactgattgacttgatatgacaggatacacatacacagagagacagagaaaggaaaaatgatataccagtttgcacattaaaatctgagatgtctggaagcagtatgatgatatttaaagtactatatcctcaaagcatgcatcatccagcaaaattattcttaacatcttgaaacctaggattacaaaagctgttgccaaccttcttgccacggttttatcaaaaggaaatttggattgggaagacttatttmtttacatgctgtttccagggataactgcaccaatcaatggatgacacatttcycagagatttgtcacaatatcttgactgacacttctatttctactcacaaacaggacagactaagttttcaactgggttttgattcctaagccttttcagagtatgaaaaattgaccccagcattgcagttgatgcttttaaaactcattttattcaacatggctttgcaggcatgtaggacagtaagaagtaaattatgaactgtgttaatagcagaaacaggacagtaatatcaactcaaacagtt

SEQ ID NO: 3282 - DNA, 600 bp, Bovine  MMBT02589
tcctatattttaaattaatgacaaaaattatgttatttattcttgatattttaaaagatactgatttttaggccagtgttaggttcacagcttaattaagaggaagatagagagacttcctatgtattccttgccattccacatgtgtggcttcccccatttactaacagctgtccccagaggagtatgttcgttaccaccgattacccatgaacctctactgacgtatcataatcaaccaaagcacagagtttgcattagagttttactgacctaaaaaccttctgcgttcatcccttyccccactccctggtaaccactgacctctttattgtctcccaagttttgcctttccagaatgtcatacagttgaaatcatatatagtatgtagccttttcagactgacttctttcctacgcttttcattagagctgcttacattaaactttattttatgctcacccccattatattaatacattaactttcttaaacacaaaacctatatyacctggtccctggctctcgttgcaagagggtacatgtaggaaggtgacatgtaggaagagaccagtcatctckgcattgtctattaagca

SEQ ID NO: 3283 - DNA, 600 bp, Bovine  MMBT02640
tgaggaaagaaatggagtctggttggggccaatggcttgagcgctgagacatcccccttccatagctccaggcatgggtcacctaacaaagaggccaattcagcactgcagttcagcaaagatgaacatggggtgacccctggatcactctgcaatgagccatttccttcttttcaggatagcgagcatgtcttttcaagtcatctcaccatcctggacctcagtttcctcatctgttcaatggatataataattgtgcctgcttcataggattgttgcagaggttggacaataatacayagrtctgtatagtcaaagctatggtttttccagtagtcatgtatgggtgtgagaattggactacaaacaaggctgagtactgaagaattgatgcttttgaactgtggtcctggagaagtctcttgagagatccttggacagcaaggagatcaaaccatccattcctaagggaaatcaactctaaaaattcattagaaggactgatactgaagctgaagcttcaatactttggccacctgatgcaaaagagccaactcattggaaaagaccctgatgctgggaaagattgaakacargagg

SEQ ID NO: 3284 - DNA, 600 bp, Bovine  MMBT02717
cctcaacttacaatggagttatatccagataaacccatcataaatgtcagaagtttattacattgaaaatgcatttaatacacctaagctactgaacatcgtaacttaggcaagaccgtcatacacgtgctcataatactgacattagctgaaaattgggcaaaatcatctaacacaaattctattttataatgaagtgctgaatgtctcgtaatttattgaatactgtactgaaagtaaaaacaaacaaaccagggcggcttgtcttgggtacaaaacgactttaagtgtattggttgkttacccctgtgaatgggcagctgtctgggagctgcgggtctgggtcactggcaagcatgtcctgggagtgcctaccgcacaaggctggccccgaaagatcaacgttcaacattacaagtatggtttccattgaatgtgtatgcttttcacaccatcataaagtgaaaaaaaatctcaagttaaaccattgtaagtgacagctatgttcagagacattaaatcacacatacacaatatcgaagtttctactaaagcattcagcaaagttaagatacagtaggttctacatacactactggg

SEQ ID NO: 3285 - DNA, 600 bp, Bovine  MMBT02880
gagtgtcacgccacttctctcagtctctcccaaacagaaggttacctctagaattgaaagttaagaaaagatttatttatgtatttttattaaagcagagttgatatacaatattatatgttaacaggtatacagtatagtgattcacagtttgtaatagtatactccatttctagttactataaaatgttgggtatattccctgtgttgtacaatatacccttgtagcttatttctgtataatggtttggaccttttaatcccctaagtctaagagatttcaactgaattgagaagctrtgaaatttatttttgtggttcctgatacactgcctttctttgtaggttgttccaaaaccgatcaatccaacttctcagatagtcaccaccagccagccacagcagcggctcatcatgcctgccaccccactgccacaaatccagccaaacctcacgaacctgccaccaggcactgtgctggcaccagctccaggaacagggaatgtgggctacgcagtgcttcctgctcagtacgtgactcaggtatgggcagaaaatccagtcactgcatttcaaaaagcttatgtgtgcatgtgtgct

SEQ ID NO: 3286 - DNA, 598 bp, Bovine  MMBT02895
  misc_feature (1)..(56): n is a, c, g, or t
nnnnnnnnnnnnnnnnnnnnnnnnnnnnnnnnnnnnnnnnnnnnnnnnnnnnnnnncttgatcctaaatttccagatactctgatggaccccacttgagtcagatgcctacaatcgggtaggccagtggtaagagctaggttgcataaacatgattcttggggtgcatcccgataaatttagggtggagggaggacagttcctagtgaagaaggaaaccttatgcattgacactcaaaaagctgcatcttaccgataaacagtgtatttcttttgtagcttttcatgaacgtactatgtrtttgccatcctcggtaaccttgtgaaagaaaaaagcccttggtgatctgaagagtccacttttcatacatcaattactcagttaactggctgccatttgtctcgtcgcagggtcctgacccactctgagctcgcrcctttgcgagcatctctcgtgcccatggaacactgcataacgcgcttctttgaagagtgtgaccccaacaaggataagcacatcaccctgcaggagtggggccactgctttgaaattaaagaaggtaaattgatcatcagcccagggagaggggtgctctctt

SEQ ID NO: 3287 - DNA, 600 bp, Bovine  MMBT02926
tattctgaggccttactggaagcatcagagaggggttggatacatgggcggagggagtaggactctggggtggtggtgcctcatgttgaccctctattttcacttcccttaaaagagttgggtcactttggttggggtagtgatggagttcttccaaaaccccatcattcagagtgccgtttccttgagaaggaagctgaggaacctgcggaagaggaggagggggagaaagaagcaattgcgatggtggtggtgtggtagtggcagaaaaggaatccttagtgaacactgagctttgcwtgaagcaagcaccattcatttcattttgctttaaataccgttcagagctgccgctgggagactgcaaattgccgctgggacccaagcagaattcttcgccagagcctagctttgcagttgcttggatgttactgttttctgccagagatgggcgtatctcaaaagcggaattctgctgctctggtttctgaaaggggcaggcccctagcgttgcagctggtttactggcaccatccgcctcacagctctcagtcgccgctgcggctggctctggaggcagctcagagttcgaggtctgtg

SEQ ID NO: 3288 - DNA, 600 bp, Bovine  MMBT02934
aaaaaatatgtgtacccatgacatttctgacaaggagatttttcacagctgtgtactaatacagctgttttcatgcagaggatttttaaatatagcccccaaaacagactgttagactttcagctgtttctatgaacaagtaatgtgtgaaacagacatattcatcccattctattataaaatctctccacagccttgatcctcattctgttgtacatacccacccctggggtaacaaacagggatcacatggggtcacgtggggtcagaaacgggatgaagacgagggatggagtgacrttaggcatggtctggcagacaacctctaggtgaccagaagttacacgcttactacacttactcatctcagagtsggccagacatcattcttagcaaagtgctcgcttattctctgagaattcatttatatcttaaacgtctactaaattgacagtgggcacactgttctttggaaggactgatgctaaagctgaaactccaatactttggccacctcacgtgaagagttgactcattggaaaagmctctgatgctgggagggattgggggcaggaggagaaggggacgacagaggatgag

SEQ ID NO: 3289 - DNA, 600 bp, Bovine  MMBT03286
catagggctgcaaagaatcagacatgactgaagcaactgagcaagcaaaattaactaatcatcaaaagaaaaataatagtttctcatatctacaaaatttaattttattttagtagtaatgtgtgctaacttagtattaactatctacaggtcacatttttatctgttttacaatgtcttaatagatgttgtgtgtaccttccattagctctatctcagcttaaagtcagtctaaaagttgattgttatgattaatataaacactgcaatgtgtaatgttgataagaatactaaataggrcctagaataaaatctagcagaatacttcagaaagtgcctcagactgaagcttccttgcttagaaaaagaacgtgtgtgcttttaaaagatggctgatgtacatatttttttggatttcacttgatatataatttcagctataagttataaaactagagttagtattagatttaggcmtgcaaaaggacctattattataaagcaggaaattatttactctatcctatctttgcaaagcagaagcagtgctctacaaaaaacaacaagaacttttatcatttrcataaagtgttccagaat

SEQ ID NO: 3290 - DNA, 600 bp, Bovine  MMBT03296
atgttcttcaaagtgatttttcggtaaagcaactaagaaataccagaaatgcaccagaagggaaatgaaaaatgtggctcagactccagacaggaggcgggggtggccgcgagtggtgggggaggggcgcagcctcagcctggcggggaaggagggctgctctgtcacgggkaaggtctgcggctccaggaagccagagaccctggccgcccaaagggccactgccagtagcgccagcagctctggctcccctcccccactcccttctggtttgctttgcaccatgatcaggccaaggcrgagacagccagggatggggccatgccttggagaggaccccggagccaataggaaaagagctttcacttcctggacaatttacagcggcttctgaagcacagtggcttctgtgatgcaaggtacagttggtacagctctgaggaaggcattttatgtcctagagatgttctgtgcctgtcagagatgctgccttttagacagacaaattgctgatctaactcagatgtccgctgaggcctcgctaaccctggagttgagggaaccttggcttctcaagccctcaggggccttctgatgact

SEQ ID NO: 3291 - DNA, 600 bp, Bovine  MMBT03824
ttcttttcctgtaytctatctattgcattttcctgactttaaagttatgtctttgtttttagtttttgggagactcctcttaagctataaaagctcacacctaaatttctgttccttattcattttgaagtttctttatcctatcttcctcctgaaccacatgaatacttctgcgcccctacagccactctcattcttcaytagcaacgctctgtactcttccttaatactgtatgttggtatttctccgggtttaagttcaggtgaaagagccatcaaccatgctacttgccactgtawtaagtgctgaaaaatcgttgctctaacatttcatgggtcaaagtcccaactgctactccatgtttcacttggtaggggcagtaaggatgtactttgtcttatgaaatgagaatcatacaatttgtgtccataaattgaccttacagatcatttagtataattgtctttttgagcatataaaaagtcattttcttgtggctttctaagcaggttgctcccattgtcytcatgttgtgcaaaggaatacagttaattacaaaacttagctactctacacagtatatttagtatcactctctc

SEQ ID NO: 3292 - DNA, 600 bp, Bovine  MMBT04009
aaagctgaacaaatgctagttatcatttgtagtaattttaaataataaaaccagaacccaggctgacaccctacctcatccactagtcctgcaagctcagcaagtmactgaacttttctgcatctcaatttcttcactacaaactggggtcataatgctttatctgctgactttatggtgataacagggataaagatgaaaggagaaataagtgtaaagatcctgaaagtgagaattgctttttatgaatccttttgtccatgtcctctctgtattattctttcctcaaatgcattatcygaacacatcttaaatctcaacgtttgcatggttattactatattagttgaaagaattaagagacagcagcttgttttgatattggagggaagcagaaaagatactgttaaagaagaaattaaagtctaaagaatctggcctaataaattattttatatcaaatgagatctccctaaaattattagcaaaaaagtacccaggtggcactagtggtaaaaacaaacaaacaaacaaaaaaccacctgccagtgcaggagacctaagagccacaagttcagtctctgggttgggaagatcccc

SEQ ID NO: 3293 - DNA, 600 bp, Bovine  MMBT04084
ttagaaaggagactaacaatcaataagtgttggcygataataatggtattgtgaacctgctgtgttccaagtactgtgctaggtgtattacatagactatttttattcatcatgtaaatccttgcaaagtaggtacatttttcatttcatagataagggaatagattcagagaggatgaataatcattctaggcttaaggtcagtagcaggactcatgccaccttggttgactctcaaaatcatatttctttaccttgaaattgcttgataaagaaaaactgtgaaaatatgttgtatcrtctttaaaacagagtttaaaagcaatamtgtatttaataccactgaactgtacattaaaaataattaagatggtaaaaaaaaaaaccccraggaaaagactgggaaagattgagggcaggaggtgaaggggatgacagaggataagayggtttgatggcatcactgactgtatcatggactcagtggacatgagtttgggcaagctccaggagttggtgatggagagggaagcctggcgtgctgcagtccacggggtcgcaaagagtcagacacaactgagtgactgaactgataatcaa

SEQ ID NO: 3294 - DNA, 600 bp, Bovine  MMBT04197
cccctcctttttggattcctgagattyatttatttaataaaatgartggaggtaactyttaacttagtcgyatattgttggaaaagcataaagactcttagtagaaattgtaatgttaaaaagcacatatgtctaaagcaaagtcaggtagtgaaggataaagttataagtattttatatttctaactgaatttataaagcttgacatattacagagataaagtagaagatgtttagatagtaatgtcctctcagtgtgtttaaaatttaaatcaatttgtagaattaaacataaacttkaagaagtgacacaaatgatgtgactgttcaaagcctcacttagaaaaccaattagagtgcctttaggtccaacaagccctaagttcacctgattttggatataaggatagaattagttgtttagaaaaaataatgtatttttacttacagttgatttacaaattcctaaaaaataactaaattctttttttgtataattactagaaaacaagtaagaaaataactttttgactgagtaaaaaatctctttatctggcttgatttctgcagctcctcaattatttttcttttttcatcttc

SEQ ID NO: 3295 - DNA, 598 bp, Bovine  MMBT04273
  misc_feature (1)..(43): n is a, c, g, or t
nnnnnnnnnnnnnnnnnnnnnnnnnnnnnnnnnnnnnnnnnnngtcctcccatggcattttttattgcactgaatctctagtttgtgttaggcaaggtgttcatctgacaaaagttgtaatttgtttattttctttcctgaaaggaaatgaatttcatgacattttccccctttcctctatttcgagtttcaaatgaaaaacaatggaaagaaattttaaatgaggtgggctctcgatttgtaatttgttcgtctaagctggcacgggactgttctccactgcctgaatgtctccacttygtaacaggtatctccaggagtctgtaccgcccagcagaatctctgtgcagaggaagtaaggcatatgtccatgttgccttccattcttggctttatgcaacatccaatttcttttcttgtgtcatgcgtcacaacctaagatgagctatcctgaaagcagccttggtcagctgtcttgagtctgtgtgtaagcttactatctgttggccatagtttaacagattctcacatgcttgcccaaaggaagtcaccaccccctgatttcaagatgtcttcacgttcagatcctatcctgtta

SEQ ID NO: 3296 - DNA, 600 bp, Bovine  MMBT04880
gtcacctgagcataattctatgtgagacgtctcagttactggcccataagagaagctgcagtgattcactaggacagtatttataaaattgccacacacatgtgcacccatgggtgattcatgtcaatgtatggcaaaaaccaccacaatattgtaaagtaattagactccaattaaaataaataaataaactttaaaataaaataaaatttccacatatgaattgttgrtattaaaaaaccaattacagatgcaccagtctgttggtaaaagagcaatattcaaggaatattctaaacrattaygagtcaattatatcacttttagggacaagtgacarcacagtttgtattcaagtcaacagaaatgcttcattccaggctccctctgtagtagtgggattagtagggcaggtatgtcaaagatacaatgctgtyaagccctaagacttgcctaatttctaaaatggaatgctgatcctaagggacaagcaacgtggcaccacaaagtgaagccccacccccactctwcagactgacttccatgatttcagccactctaatcttagaagaaggtaacatctcccaatattgaccttca

SEQ ID NO: 3297 - DNA, 600 bp, Bovine  MMBT04921
gtgaggatagtgtttgaatttttaatatttaaatctgtgttttgaataggtaatgcattccccttgttctgaattcagatagtacagaggagcgtgcagtgagaagacctcttctttcccatccatcccctccccgctgtagcagtcagcctttccagcttagtgtctgctcttccaaaactaatttatacagcagatatatctacttatttatccagttatttccctctttttacatagatgatagtctaatcagatttactctttggcatctctcacaaaggaccccaagttctaaaraattagttgttatttctgttgagagatttgttgcagttgaaaaacatatacacatctcagagttgaagagatagttttctttctttccctttcccaaaactcagtttgccattttgtaataaactttcgatcagaattgaaaactgagcacagttcatggagtgtatgttcttagtcctggctgtgtgtgttttgcttttagtgtgtttttattgaggtatagttggtatattagtatcaggtgtacaacataatgattcaacattcgtatacactatgacatgatcatcataataagtc

SEQ ID NO: 3298 - DNA, 600 bp, Bovine  MMBT05145
ataaaattgctggggatgagaacaggtggctcagtgtaccattcaaaatttaaaacctcatcaactcctgctacagtcatgaggcttgaccccagcagggcacctcacagtgggagcccttttctggatggggaagtaagaccttagcgtccattttagtaaacttctctttctcatgtgtaagtgcagatgaaaagtgctgactgcttcttttttggcattgctttttaattatgaccatcaataaatcattctatccctgaacaggacttgagaatggcccgaaggcagagacacgaytcctcaggaactaggccagcagagaacagctttctcactccccacctcttcctttaatcctctgtcagaaacagaaacattctctcttcaagaagctggcarcggacagccacacttgcgttccgtctgggaaccctgttagcacccagttctacccttggcctgccttactggccactgtcacagaaatgggatctgtcctctsttctgcattttttcccaattcattttcccttcttaccggtgcaatggcctgaacggtccccccacccctcctcaaggatacgtccatattcttat

SEQ ID NO: 3299 - DNA, 598 bp, Bovine  MMBT05706
  misc_feature (1)..(110): n is a, c, g, or t
nnnnnnnnnnnnnnnnnnnnnnnnnnnnnnnnnnnnnnnnnnnnnnnnnnnnnnnnnnnnnnnnnnnnnnnnnnnnnnnnnnnnnnnnnnnnnnnnnnnnnnnnnnnnnnaaataatttaaatgacttagtagaattacctaaacaactattctctaaaactggcatgtaaattaacattaaagataccacagaaaacattaacaggctgaccagaatattatgagccaacagactgccctcccttttctgttttctttctaattattgctaggctaacaaatgacattttcattggtaytaaacctgccagaggttctttgtgagctggcttgaagaggaaaaacttcataattatacaatctatgtagcaataagcagatctaatatttttcctttaaagagaactttggggaacagatggaccacacactatcagaatattttcaaattcaagtattgggttggccaaaaacttcatyccagtgtttccataatatcatactgaaaaacctcaacaaactttttttagccaacctagaattaacagaagtttgggggtcattcatgtcagttttttcccctgtgttttaatattt

SEQ ID NO: 3300 - DNA, 600 bp, Bovine  MMBT05854
atagtctatgcaacagctgacagcatcttctgttcccttttttggtgcacactagttgccacaattggctttggcatcccctagtttggaaacaagtttttgtgcaggtcgatgggccacatttcataagaggaagaatagaacaaaacatgtttcttcataatgccattcaatgatttcctttgcaaatctgcttcctgaagttttgcagatgcagaagtcatagaacaagtcagtgggctgggaactgcattgcattttaagtgtttctagaagcaacatctccagccttttaaatgmgactgaagtgatagatttgcaggtgtttgaagaaacagatgcgctggaagggcaaaggttatttttttgattaatttatagttgatttacaatattgtgattctttttttaaaagcaaaaattggggtcctactgcataacgttcttcaaaagaaaacaagagagagaaaataaaattttaaaaaaagagaacaagagaagaaaagacccattgtgtacttccaaccgaaaattctcgttttccttgatgtacacaacatcaagcatatgtcagcaaagagaaccttacagaataggaca

SEQ ID NO: 3301 - DNA, 598 bp, Bovine  MMBT06098
  misc_feature (1)..(186): n is a, c, g, or t
nnnnnnnnnnnnnnnnnnnnnnnnnnnnnnnnnnnnnnnnnnnnnnnnnnnnnnnnnnnnnnnnnnnnnnnnnnnnnnnnnnnnnnnnnnnnnnnnnnnnnnnnnnnnnnnnnnnnnnnnnnnnnnnnnnnnnnnnnnnnnnnnnnnnnnnnnnnnnnnnnnnnnnnnnnnnnnnnnnnnnnnnnnagacatgtgggtgttgggcaagtcgaaagacggggcagtgacaaaggaagagacacagatacggaggcttgggcagagcaacaggcgggcaggagggtcatatgggaactgctrtcccagaatgccacagggattaactcactttccggatggagggagggctgtaattttaggacggttgggttgcaacsagtccaagtcccttccgatcccttctgcttgacacaggaggtcccagatcccaccaagtactttgtcacccgctggagcacggacccctggatccagatggcctacagcttcgtgaagacgggrggcagcggggaggcctacgacatccttgctgaggaaatacaaggaaccgtcttttttgctggcgaggtgggtttcgtcactctgaccctgactgctt

SEQ ID NO: 3302 - DNA, 600 bp, Bovine  MMBT06151
tgagaatagcacataagtctgtaccattcctcaaaaggcatttgagctatatgtgttgggtggatggctaaatggaagatgaataaaaaaggaatgacttaattcctttgctgaaaaatagattgcaaatgacaaatccagtcttaaacaatacttcaaaaattattaagcaagcacagtcttttttagcatatgattaaatccaaaaatgctgtgtgtttcctgaatgtagagataccctctagagatcagaaaagtccagaattttagcccagactctcctcttaactttcctatatragtctccttgtactacccaatgcctataaaatagggttaccagtgaacagagaaaaacgacaatgatgatacttaacaacatatctgacaaggccattgtcatcactgaaagtagatttttaaaagtaaagcattttgacacttaaactaccataaacatcagaactatgattacttttagcaagagctggcaacacctgacttaagggaaacagaaaaggactcaagtgccagtcatgacttcacttgcacttattagaaactttcagacttttttcccctttgagacttaaatagagg

SEQ ID NO: 3303 - DNA, 600 bp, Bovine  MMBT06187
aaaaatgctgataatgaagactggctactttacccacttcagataatttataatacagttaaatgccacaaaataacaagacactgtgaaatgctcttcagatcttcacaattcataagtgttaagtgaaacagtagcatacacagtggtatatattctttatctttttatttcaagtttactaaataggtgaaaccattattccgggtttagcccatatagtctattctgatggcaaatctatgtacttctgatgaaatgtctaagctcttaacctaaattataacattttgattttgytttaaggatcaagtgttatatttatgaaggtatgcagtcaggtcttttcagctcctgatcttacctgctgaatcttccaaatcaatcagtttgggcattaagctctcagggagtttttccggtaagtcatagccattcttcctagcaactaccagatgaaaagcagcacaaaactcatccagtgtcaaggctccatctttatcaaagtctgagagttccctagaataaaaacttattattaatatgatcatattctgctttggctccttttaggtttcaaaaagaagcaagagaaattat

SEQ ID NO: 3304 - DNA, 600 bp, Bovine  MMBT06327
tattcgcaagaagcaattatattgtgacagatctttctgaatgcaaaatactctgttgttccgatagtgctctaattctctttctctgaatctgtctctggttctctcttgtttcaatagtgctatgtcaacaaatacattttaaattaactagtttacctggtctgccacctaagaaaccatgccaggattttattaagaaatgaagcattttataataattaacaagaaccttttttgtttttcccatgaatattttcatgcattgtaaaaagtttggaacccttttctcctcacccrgtaaaagagttttgtgtgtccactgagtttgctaacttttcttgcacacttacatcttagccaatatcttgttcaacacttagcaaagaacatacttttataatactagtcaaaatgtaccctagtcctattaaaaagttaaacagaagtttaaatttgatttctaactatttcccaaatagcaataatgtgtattcaattgagagaaggaattcttaacaactgagaatcgatgcatgtactataatcctgcttgcaatgaaattacatgagtattttactgtgcagtatgtcagggtg

SEQ ID NO: 3305 - DNA, 600 bp, Bovine  MMBT06526
gttttacatttaggcctttaatccatttagcatttgtttttgtgtatggtgctggagcatgttctaatttcattcttatttcctctttcatatatgtgtcaggaccaggataactccctgatcgtattagggcaggcccctttgaagatcaggtgggttgggcgggacaccccgtgctaccatctcattaaaaggcccttcatctctggacaagtcatcagcacatctgactccaggattcccttgtggctcctccaaacgaccttggttcccacgtggtgtcagcttccgcatgccttyctctcctggttttttggtgctgttggggcctctgctcccctgctcatacctgtccgctctccagcacctctccatgaccactgtccctgagctgggatgcctccatggattgacttgcagactgctytctcctacccttctcagagccaggccaggatcactctgccactcactcatctagtgtctcccgaatccattggctcccaggagaaatttcatggtaacagattatatgtgagttctttaccctcaaacatatcagtctcagccagagatagtgatgccataaaggaatccatt

SEQ ID NO: 3306 - DNA, 600 bp, Bovine  MMBT06528
tatacagtagtttattcaccgaaaatatattctgacaatatttatttcatgtttgaataaccttgcctctccttcttgatgtttgtttccaaaatgtggagccattatagtagcctgcacgtctttctgtgaccattgttgtctcttcaaattgaagtacacagtcctagcaaactcagtaagaggtccagccagggaacaattttctaattttagactgtcactgcatatcgtttagtttcccctcrgatttctgattgagattgttacaagggtattgtaaaaggaaaaggaagaggraagctttctctgaatatgatatcatgaagtatataaacttgacttacagtgggaaaattttgtgtattttctccaatatgaaatgctatttggcacagtatatgtttcccagtgtcatgttgctatagaatagttgcctatttgtcagaagctatttgtcagttttctcagtatctgcaggtggtaagtatgcttcagaattcagagaaggaaaattgtgtgctcccagggattcatgcaagtgcttgacaaaaatatgaccttatttctgaatatttgcacaacgtgaatgtgtgtagt

SEQ ID NO: 3307 - DNA, 600 bp, Bovine  MMBT06889
cagatagacaaaccatggtccaaagaaaaatactaagatgttggcaacatgcttgaaggaattagaatttgagtacaagttttttgttttttctttttttaaagcaaggccagaaaattaggatgagtagttactacttaaaaatcaaaaaagattttattgagggaaatcacaataatatagaacacaaaacaacacaaacaagctatcaatgattatagcaccatcacacaggtaatatgtgtttcatatagttcataaaaagcactgatagttattgctctatggatagttggtcayccatcagaaaaacagatttgtgtagatctgactgtgcatcttataaactcgccagagaaatttctggtatgttctagtaaaaatacacttttcctttgggagctggctttatataatgccattcatcttacgtttactattgtggaaagcttcacaccatgtaaactcaactttcttctgaaggactacactattgcagatgatacctttaagagaaactaaaagaaattcatcatacagatcaaagtttggtagcacaataggaaagtcatgtggtagacgattgtgactagtaaaagg

SEQ ID NO: 3308 - DNA, 598 bp, Bovine  MMBT06990
  misc_feature (1)..(39): n is a, c, g, or t
nnnnnnnnnnnnnnnnnnnnnnnnnnnnnnnnnnnnnnnccttgattaatgaactggcagggtaagcctcactcagatggaagtggtggaagcacctgcaatatagatttcagaatgtgttcatttgaagtattggggaaaaaaatccaaggaccatgaaattactgttgactgaaatatgaagtctccagaataaccaaatttataccacataataccttgaggatttatttcaaaatgtactgagatgcaaaaaatttaacttttcctctaagaaacattcatttatcaatcttcctsgaactattgtttttctttactagatagaatccttcaaacacttkgatagaagaaatgtayytcatcagtcrtgacactctgttttctattgagtactatgcacaaatcctggaaataaatagataaaaacatcccaaktggatacttgtagggccagttagagtttcctggagcacacataactgtgagattttcccttcstacagtcctttgtgtgccattttcctggcctttgaaccaaaacacagtccttgccatgccttgaacgttgcgggggccctctcctccagttggtgaa

SEQ ID NO: 3309 - DNA, 600 bp, Bovine  MMBT07359
cccataactgtgtgtggcagagtcgattgtcgacctaacagccactgctgtccccccttcactgctggaatgccgtgtccctattttcccagggccctttgttgctatggtgatcacaggacacagctctggccaatgagagggctctgggagtggcctccctcccagaaaaatggatgctggatgggggggtgccttcccagtctgcctttcctcctggagatgccagggctgctgagcagaacagagcagtgagaagatcccagtgcccccatgacaccactgagctccgaggcagcyttgcacagcctaacaccacatccttgtgagrtgaaaacaagcccttgtggtgccgctccttttgggcaggttttgagtgtggtccagggcatcctcactgatggagtcacatgggagaaccttcctccttttggagttgggaggaggtacagtcttgggaagaccttatccctgacactggcctggtcttcccacattcaaggtgtacatatcacagtattgattgtgagcctgtctcctccacgccttgagctctggacatcagggaccacatctcactcctccaagatctttagaggc

SEQ ID NO: 3310 - DNA, 600 bp, Bovine  MMBT07395
gaaaggctatggaaaaatagaactcttttgaagacttctttttggaatacttctcaaacactattaagaactgtgtttaactcatccccctctttttaaaatttgaaagatatttttccttctgtcttttttcttgatgtaatctctctcaagaaatgttcaacatctgtagccttttttctcaacaaatcttctttataaactgtgtccaatcctgtagtcatttttatcttaacatggaaataaaccactttgtcccctgaaaagtttacaagattgtacttgagggcttattatgamrgtatcgttatgtaagacagttctaattccctcataaatctaaatgtatagctatgctttttaaagactacattttctttcttttttataatcaataattttaaattatgccactcttgatctctggctcagctcagctcagctcagygcattcgctcggtcgtgtccaattctttgcgaccccatgaatcgcaggcctccctgtccatcatcaactccyggagttcactcaaactcatgtccattgagtcagtgatgccatccagccatctcatcctctgtcgtccccttcttctcctg

SEQ ID NO: 3311 - DNA, 598 bp, Bovine  MMBT07450
  misc_feature (1)..(42): n is a, c, g, or t
nnnnnnnnnnnnnnnnnnnnnnnnnnnnnnnnnnnnnnnnnncctagaaaacccccatggacagaggagcctggaggctgcagtccatggggtctcaaagagttggacacgactgagcgacctcacttttgcttttttaaaattacctgtcttcacgtcaagaaagaactctgagaagaatcagcctttatataaaaccagaaaggaaaaagggattcacttctaatttctaaaatatgcctcccagttgtgtgtgtgtkttttttaaatctaaagtaagtggaatttacattaattttwaattattgattgttgaaaccaatatttgaacrtatagggagtgaaagatatgaagtgaaagtagttatagataattacrtcatagaatcagtgaatgtacactccagtggcccaggaaagcctcatgcatttggttaaaccctgtctttgtacataacaacatatttcttttctctcrtattaatacagcatagtaaatgttgtactaactataaaaagaccaaaaacttatttgaagaatataatatatatgtattgtatgcacaggattgttgttcaaatttgacatgttatatcc

SEQ ID NO: 3312 - DNA, 600 bp, Bovine  MMBT07634
ttttgaggagctcttaaccatcataccctttctttcatcaagatgtgaacctggatctctaaaagataaaggcttgtcttattaaatgcatacccacagtgtcattatctcacttaaaaattaatagtaattccttattaccatgaaacgttcatttactgttcaaatttccccaattgacttataaaagatttttacagttcattttgtttgaataaggtccaaataaagtccatacgttgcatttggctgatatgtctcaaaagtgtcttttaatttaaaagttcccctgcgtatacrtatgccccctgcctttttccttgcagtttatatgttaatttttttctatagagtttcccacagtctgaaattatgtccctgtggtatccttataacatattcctttctcctctttatttcttgtaaattgctagttagctctagaactttgctgggttctggcttgaagttttggcaagataacctcgtgtggcatagcaaatatccatcagatggtatgtaatgtctgattgtccttaattttgtggtgttggcagtcactaatgattattgcctaagtaattatttcagtagggcctg

SEQ ID NO: 3313 - DNA, 598 bp, Bovine  MMBT07649
  misc_feature (1)..(70): n is a, c, g, or t
nnnnnnnnnnnnnnnnnnnnnnnnnnnnnnnnnnnnnnnnnnnnnnnnnnnnnnnnnnnnnnnnnnnnnntgaatttaaactgatggttatctttgcaagaggccgggtggatccccccaacattcccccagcctgggacctctggctcagccaagcctcttccccatctgaacctccagagcgccgtcatcccaccccacccccggccttgctcttgttaacccaagatgctgctacacagatgccaaatggaaatcttccacagggccctcaagtaaactcgaggtgtgtcgtccacrctcctgcccttcctgctgggtcggtatgtggttgttagaaaagcagtcagaccttccagctgtgctctgtgccccgccgagaaggcgcgtccagacccatgtgtctcacggagggaactctggggactgccagcccctgcccccccgtccagggagccaactgtccctcttcccctcagccctgggcccayggggcccagcagggttgggctctgtgcctctgcctcggactyggcccatgccagagaggctgcctgtaacagccagggtcagtttggccccaaacagggattcagaa

SEQ ID NO: 3314 - DNA, 601 bp, Bovine  MMBT07766
  misc_feature (1)..(1): n is a, c, g, or t
naaaatttgtgttctccagtgttctagcctggggaatcccagggacggtggagcctggtgggctaccgtctgtggggtcgcacagagtctgacacaactgaagagacttagcagcaacagcagcagcttcctccccctgattacaggtcacacccatgctgggtttctgcttcctcatccatttcaaggtggtcagaggcatttttcaggcctttgtccagaggcttggggcagagcagtgttctgtagacctcagggtgacatcgctttacccacatgactgaagtctcagttgtaaacyagtgtctccagaacttactgtctgtttcttgtctcctcaggaggtgaaaagtgtcctggaaaggtaaggaaaggttttcttcattagaggagggggcagtatatatcttaaaaaagagttttagttagaaaacatgcattgaagtcttccctatcctccttcctattctcaaagatccagtcctccttaaaatatgttctggtctcggaaggctaattaatggacatctcagttggtgaatgtcaacccactccagtattcttgcctggaaagtcccacagacagaggaggctggcgggc

SEQ ID NO: 3315 - DNA, 600 bp, Bovine  MMBT08408
ctaccccataccacactgccccagtgctgcacaccatgggaacccagcagcctggttcttcaggacttgctcagggccacaggggaggcaagtgcctgcgtggtggggtcctgaaatggactagggcatatacaccaaggcatcacaaacacagcgaaacagatgaaaacacacacagataccacgaaaaccgtctgttgatttgcttcatcttggttctttcttgcccttctttctcagctcacaccagtgtgcagtatagcacggagatagagaacatggaccgggtcaaactccagytgcaccttggcccagccacttgactgcaggcaattcatttgtctgtctgtcacttgggttctccatctttaaaatgatgacgaataacgataakggccacctagggccactgtggttgtttaaaaaaaggtaatactagtttgggcatcattatggcccaccatttggattctaagattcaaaagarcaaaattttagaagatctcaaagatgatctaactcagatccattttaggaaacaggagcttagagaatttatgtgatgtatccatggttacacagctagttagccatgggatg

SEQ ID NO: 3316 - DNA, 600 bp, Bovine  MMBT08507
tgattacagctgattgtacgtcttgtggtagtggatggctatgggaggagagcaaagctcccgaacagcagagcaggaacagggcaagcccggaggatcctggaaaaagacagtgatgctgtgaggtacgcggaccgcacacccccaccgccccagcttcctccacyggagctgtgccgcgttgggcccctccagtcttcttctccgtctggggagacccgaccgtgccccccagcatccgtggccgcaggacccagtgatacctgagagggagaccatggcaggagagagcaaggctgyttcggcaacagctgctggagtgagatgtgctcgccatagtcttagggaggtatatatataaagggccagttgcaaggaagagggacactgaaagtcccacccatggcaaagtcattactcagcttttctacagaaggcactttcaaacttctgccatccgagcctgggtgaaagcagggctggaaggaaatgctgaggttaccctcaaggtgggcagatgcctgactcagtccagatgcacacacggagcccacaggaaggcatacacgtctttgccatttcttcttggaaagagcttgg

SEQ ID NO: 3317 - DNA, 600 bp, Bovine  MMBT08634
gtaaatgttgtttcctctttccattttaatgaatcaagttggatgctggaaggaaaatcaacaggatggaatggttgtagggagcaggtttasagggtaatgtgaacaggctccgtggttccaaatgttcatatttcattttttggctgcatgcacagcatgtaggattttagttcccygaccagggatcgaaccctcactccctgtagcagaagggtgggatcttaaccactggactgtcaggaagtccccaaatattcatatttcaacagtaaaagtttcctctggacaacctagctmtgtcctggaggtccctttaccactttgtctggctttacgtaagttgcaattaaaaggtttatttgtgtgacatatgacaagttcctctctgaaatttgatttcatgtttactcatgaatagcagctgctctcaaaagtgattcacttttaagtaaattaaaagtttgtctctgaggatatrcatatcctaaaggtttattttgttttgtgtctcaggagaagtaagtggggaagaatgagctggatattcataaggctgcaggtaacttgttttgaacactttcagtagactgagagaac

SEQ ID NO: 3318 - DNA, 600 bp, Bovine  MMBT08861
ggtttatcatgattactccagcagtgcaccaaagacaagagctttagaagtataaaatatatttagtgttttctgatgactaacaacactttcagtttgccacttactttcgatttgtgattttcttcaaaatggaattcgtgctgaatatgctcagaaggcggaagctggtgaggcaaagtatctcgacattattttggtgatttttttttcataaaatttcacattgtttaaccataggtccacaagaagcttttatataatatcagtagatacactttcagtatggttcttcttagratgttgtcacatcccctctattctctcttctcatctgcctgttcctgagtgagttctaatctacattcctggcttcagcggagctcaggtaagaatatgcaccatgatcttccactgctgccaatcaaagagtaaacactttttatttccaaagtaaaatttgtgtttcttctttctaactttgggattttgcagtttcacttaaacctttctttcacatccccaaggtccatttaattaccacgttgtgatactccatctactcatcaccgcagctatccattttgtcctctctatcca

SEQ ID NO: 3319 - DNA, 601 bp, Bovine  MMBT08871
  misc_feature (1)..(1): n is a, c, g, or t
ngtggggagaggagcacttcactgcgttctcattcgatgttatccctcaaacttctgcttagtgcctttgccttgtggggaaagcccaggtggagactgagaacagacttgtcatggcacctccctcccttattttgttaccctgagaatgccattcctcccaccaaggagaagtgtgattgcttgcatatgccatctgcttacaaaccccagtgagctgaaattctcccccaaaaggtttatgtaagccccctgtgaactcaaaccactatgctttgctcagctcaaataaacatcgaaraagtatctaagcatttgaacttataataacatatttatcccaacacatgaggctactcatcattggtgtgtgtgtaatatataattgcagcatgcagaaaacaaacagctctcgatcagagaagtctctggatcccayggggcactaatcatctaccaaaaatagagatggttggggaaaataacttataattgcattggcaatccactattaaagtataatttcatgttgttttcatttctagcaaataaataataaaaaactgatttgaaaaaattgcttattgcacttaccagcaga

SEQ ID NO: 3320 - DNA, 600 bp, Bovine  MMBT08967
ctgattcccgtggttcaagacatctctgatttttttcctttctaaatcttggctcatctgtttcagaaaagatggcacaatgatgctggttagagaaccaaaggccacatctgatattattaattccattctcagtctcttgtgtagtttttaatgaagctgtcttcaatgyccttactacacatctagatctctgttacattctgattatatttgggtatgtagaattttactcctccagaaaggaagcagaaaggagatggggaacatgctctgggactttggacttggggacccttsccaactcaaatttggttacttgataagagatggaaaacagagattaaatgtccaacatacttgcatgtagagatctatcttctttaaagttttacactctatgaaaagctcatgcatgtaaaactgctagcacatataatatctagcacatgagaacttattagggaagaaaaccaggaatggaaatctcagcctaagccacaacttaagaaagagcttgttattttaaagaaaattatactgaaatatgtactgagtacagtcttggtgagactgtaactagtgcaaggcagaactgtg

SEQ ID NO: 3321 - DNA, 600 bp, Bovine  MMBT08971
tgaaatgatgagacaagatgccatgatcttagtttttgaatgttgagctttaagccagatttttcactttcttctttcacttttcatcaagaggctctttagttcctctttgcttctttctaccataagggtggtttcatctgcatatatgaggttattgatatttctcccggcaatcttgattctctgcactttagcatccttgttctcatcttcaatatcgaaagaactgagcccctcaatgactcatccagattcatggctccgttttgaccccagatcaccatgttatcctctgcyagactctgtctccctttcggcattggttctcccatgtgtggctgaacactcccttcctcttggactgggagggtacattctcagtaatggtgcattcagttaagtggtcctttgtttaaaaattatattcttaattcttgcctatactatggcccttcatcagccagatgagcaggctgggcatttctgttagcaaagcttggcttgttcactgagcattttataagcatttctaggtatactcattctagggaaccccttttcctatgtttttgtctctcctcactatccttttcgtgg

SEQ ID NO: 3322 - DNA, 599 bp, Bovine  MMBT09000
  misc_feature (1)..(22): n is a, c, g, or t
nnnnnnnnnnnnnnnnnnnnnncctgcgtctccacaccctgtaagggtggggttaccaggactctgtactgctgactcacttggagatattcgagaaggtatgtctatttgtaaacttgcaytggctaccattttggatgagggcagcagactaaaattaaagtaaaactcaagtttctttaattttatatgaaatttgctacgaatcagtttttccctcagaaaaacttcatgggacattcagataaaaraagagaaggtcaaagagtcatggtgaaatggagttttgacttggcttaasaatcgctccaaggaaatcacacacttcacctttgcctcctgtgagaggagagcagaagacrtcagaggaagaaaggagagcatactctctcctcccgtaagatgcttggggccaaacttaggatctgtgtcttagggtgcctcctgggctttgtgatgacaactcagagtggatgcgcagttgggttagcagcaggacatagtccagggcaggtgggaagtgtgtggaaacagagagaagttaagcaatttgcccaaggtcacaccacgcataccaaacatcttgttccagagcccac

SEQ ID NO: 3323 - DNA, 598 bp, Bovine  MMBT09050
  misc_feature (1)..(147): n is a, c, g, or t
nnnnnnnnnnnnnnnnnnnnnnnnnnnnnnnnnnnnnnnnnnnnnnnnnnnnnnnnnnnnnnnnnnnnnnnnnnnnnnnnnnnnnnnnnnnnnnnnnnnnnnnnnnnnnnnnnnnnnnnnnnnnnnnnnnnnnnnnnnnnnnnnnnnctaaaatgtaacatgcaaactttcttttgcaagaaaagcactgatgttattttattctcgttcatcgatgttgcctttcattttggatcagtttcattgcctctctcattttgtgtacaggaaatatattctagattactgaattcagtaaakgyactttgttcaccctgcttctctttgtttcacatctattagttatcttcctgcgccaattttaaccccctgaggttagtattctgactgttcaagtgaagagaatatctaatctaaacagtcaagtctcatcatactttgttctattttgacaagtgtggtttagcttttatttattaaaaaaatgcctcccagtaacctgtaaatgtacagtaatacattgtgtgaaaataacagcatctgaataatatgagccaatgcaatttcctgaaaataatctggtgtacatgttggtcag

SEQ ID NO: 3324 - DNA, 600 bp, Bovine  MMBT09080
ccaaatgctgagtatcaactatgaccaccatcaccatcatcattttgtaccaagtgatcaccaagtccactaatgaccagagcctctcawgggggcctatctcattartgccctgggtctgccctaaaagcctagtgaggagtggagatatttgtcctcagcaaacttggcaggcacttgagtcctccgtgtgtttgtgggcgggcctttctcaggctgctgcagatctgatcctgctggggatcagactggttgacctctaagactacttccaaatagaagaggcagtgatgctctcayactctggagacattttcaaggacagcccaaaggaacaactgggargtttccagctgttccactccctgtccctggctctgcaactctcccgcccacagcttgcccacagcttgcccaagcctgtccacagstcagggtcctcaayccctggcctttgtttgtgcaaatagtgaaagctggtgagatatttagatctgtaagtgccctgggcatttccatgtatggctgtaccctctgaagtcctagcccagagctcmaagggttttcaagagttgacaaggaagtcggaacaatcctctg

SEQ ID NO: 3325 - DNA, 600 bp, Bovine  MMBT09116
ttggttttcactatttataaaattgcttttctgcataaattactatataatatggtcctatttgttacctaaaggcatgagctgacgctgaatctgtcttcattaaactctgtgaccagatgaactcaattacagattgcatttgttcgctgaacattctagtgcctgacacaggcattttatgtgtactgggaaatgaaatgttatgagtgtcttaaatatctgctaaacgatgcaacttttttctaaaaactaggcttgtcttaagtcataatatttcatattcggtctctgtaactragctcagcagctaaacatttaactgaagaagtctctcagtctaagagacgcaaaccgaaaccacaaggaggcaccactcgcagcagtcagaatggctgtcactaacaagtctgcaaaaattaaacactggggacggcgtggacaaaggggccctcctgccctgtcgggggaaacgtcagctggtgcagccactgtggagaacagcatggaggttccttaaacactacaaatagaggtaacatgatctagcgatcccactcctggggatctatctggacaaaactataattccacaagata

SEQ ID NO: 3326 - DNA, 600 bp, Bovine  MMBT09331
gctccaccctcggcccagtgctcactctttctggctcaagataatgccctccgccctgctgattactgctgataggctaatccacacagtcagcagtaagtcacacactggtattctccccctttattccatgcctgccttttcccctyggcttgtttatgctggcctgccacacagcagagtcctctggagcactcctcctccataccaccacrgctccygacagcatctggcacrgtactgagcacccagtaaatactaaagagacgcctgactgacatgaccatcacagacagacgratgagcttccccataccatttgatggccaagggtccacagcatgtaagaacaaaaatcaatcttccccaaaatatctgaaagtcccagaaggcttacctagtagctcattatgaaatccagcctggttcaacttgctcagttggccggagaggtaacagagaccagagaaggggggagtgagcatcagctaactaaataagaacctcaaagccaaggggagggcagaaggcagcgctccacggtgattggtaccttcgggaagaggaacactcacacatgttatttcaatgctcccttgg

SEQ ID NO: 3327 - DNA, 600 bp, Bovine  MMBT09365
agtttctccaaytgaagtgggcagggagctaattttctttcagctggaatcaattttttctactcaagtccattcactagaattaatcgtttcggaagaagctcaattttgctggaaaatccagaaaagattttagttacagctccacataataaagcaattgtgtaattaataatacatttgtcactcctttagagagtgggaaaaaaagtaacacatgtatggctttagtgtaaatcctgacagtggagatttttttttccagggaattatactattataccataaaaatgtcaaggygcaagtttactgttcctactaatattctaaaatattctcttcagctgacatctctgtcaattaaaattaaacaaaattgcattytgccatccacacttcaaggaggaagctttcagttttatggctgttctttgaattgatttttaagatggcatctgtaaaacttgtctgaaacaagatgaggtgggatgaatctaaggaccagtcaatgtaaaaaatgtttttaaagatcgtgaattgacagccagaatagactgcacatgtctccaggtttctcaactattaaaatacatccagcaa

SEQ ID NO: 3328 - DNA, 600 bp, Bovine  MMBT09368
cataaataatcaaaacactctacagcattcttaagagaggcttaagatcaatgtttaataaatacgatgtgtgacttccataatgagatagcagcctgctcagtttcctatgctacagaattctccgtggaacatctttttatttaccccatacacaaaacaccaaagttagaagctgacatggcctcacataaaattagctctgctacacatcccaaattatgtacgtggagtgactaattacttcccctgcttgtttggctggtatcattagagtacatctcattttactgtttttgyatgtgcttttacatgtttctccaatttgatattatctgttacaaacagtcagctacttacaggctgcttccaaagwattttataacaagcccaggcgggtgcttaatgagcctattacaagggcttcaggaagaagaggcttttgtgagttcctttctgccccctttcgagtttagaaggtgggagaaagtggttgagagggtttcaatgagcctttgcgggtcgatccacctgtgaatagaactggtatgttgcaattagaaagggcgagtggctgtggaactgagagctctccaggga

SEQ ID NO: 3329 - DNA, 600 bp, Bovine  MMBT09403
caaattctagtccgggtctcgatggtaggtccacatttatttcccctaagtgatgcaccctctcttttattccttctaattccctgacttatttcctttaacatttttgccactgccccagatcttttcaagcagtgggaaaatctccatttggcagaaatgttttgttttcctggagccttgaattccactgtggattaaaacaaggatcaggccgttttcttttttggycgtaccatgcagcttgcaggatcttagttccccaatcagggattgaacctgaggcctcagcagtgaaaktgtggagtcctaaccactggaccgctaggacatttccccaggctattcttgactgagggttgacaaggagcaggagacgtgtaatgaattctttaagtcttcagaaatccagaaaatccctgacgttctcagtcccttcaaagccacagaatggtctggttccagaaggaggggcagggggcctgggggtggatgaggtcttcccagcctgacttctcgtaccctctccccaaggctaccccttcaacgatgtgtgccagtggttcattgacagagcggacctcatcttcgtcgtcttcg

SEQ ID NO: 3330 - DNA, 600 bp, Bovine  MMBT09604
ccttttctcctgcagactctccccatgttggccccggtttctcgccagagtggattctcaggcagggcgtctgccgggcttacagcgagctgccactgggagatgcactgtgtccgtgacagctccaatcagctcggaacaaaagaacgcctggcagtcctgccgaccgccttttctcaggggcgtggggttctctcgaaggtcgtgggtgctatgcttttgtttgttgttacttatggaacgaccggctttgtgcttaggtatgcacgtgcacacacagacacaccccgtggtcactgycctgcatgggcccaggtctgctgtttgctcctctgcacccacagggtcaccctgaagaacacaggtgtgacctaaaggaagacgtctccctccacactcgagaggggagagaccttgttagcttcctgatagaagaactggtagtaaaacctattgaaataaccatgagacccttactaagcgctcgctattcactccaccacccattcaggattcatggattmttttagcaaatctttaatgaatcacttttccctgcaaagasaggaagggtcatcccatgggactctgtggggaatg

SEQ ID NO: 3331 - DNA, 600 bp, Bovine  MMBT09645
atccagctcttgcctctaccaaccacttggccagggtggaaaaaacgggaccatgcttagaaccaaaactaggtatttccacttctcttcccccatcactgttagcaacccagctccactgggaacaataggaaggcctggagtccctgcggggtcactggtgatgaaaaggatgtccttgcayctctccccactctgaggtctgcagggagcaccagggtgtgcaggtgggatrtacaggtggtcggggtggggtgggggtggtctccgcattcgaattaaaaaccaaaaaactgaccwgatagacaaaatctcttttgtatctttcctggcagatcagctctttaaaagctgggaygagggacttccctgatagtctagtggttggaactctgggcttccaatgcagggggcaagggtttgatccctggtcagggaactaggatcacccatggctgtgcagcacagcaaaaaaaaccccaaaacctggractgtgttttttcactgcaccttgcccagtggatgaatgaggctcaggtagacctctaaggcagtcgtaactacaccatgcccctggatcagttttctgccaaaagccc

SEQ ID NO: 3332 - DNA, 598 bp, Bovine  MMBT09682
  misc_feature (1)..(74): n is a, c, g, or t
nnnnnnnnnnnnnnnnnnnnnnnnnnnnnnnnnnnnnnnnnnnnnnnnnnnnnnnnnnnnnnnnnnnnnnnnnnacaggtccttgtcgtgtgctttgcagaactgcatcccaagcgttagtgaccaccacaggacatcatcagggggtcctcagtccctggtccagagagaggctccacgcgccgcccctgcccccgccaataacaagctattatctcaaatgtccttttttatcttgacatatagaaggtgaagaaaggtttaaactatttacaaaatgtcactggtaatatctgaagygcacaaatgaggacatggaaattatttccagccttttcatcttgcagccaaatttattttttaaacattccaacatataaaacttggaagtcggttaacgtcttggagccgtgaaatctgtaggactgtgcaggccctccatgtaaacatgtgtccagcagatcccagagcccaattttccaagccttccgtccaagaagaggcttaaggcagtttggggcctgcggctccctgcagggtgctgggctttgcgaagagaagcctggccaaggcggctccccaaacaatgcccagtgcc

SEQ ID NO: 3333 - DNA, 600 bp, Bovine  MMBT09792
ggataaccaacaaggaccccttacttaacacagggaactctgctcaatgttwtgtggcagyctggatgggaggggagtttggaggagaatggatacatgcgtatgtatggctgagttcctttgccatccacctgaaattataacaacattgttaatctgctataccaatacaaaattaaacgtttaaaaacaaataaacaaccacgatcattcctaacaagaaagataggccctgctcacaggcactgctgggcttattatgtgctaaatccatgtgggaaattgtccgtcctccaaaargccctcttgactttacacttttttcagcaaaagaaccccaaaatccctagtgctgagctctccttactatatctgatgggacacagtgcctccttcctgtcctctgctccccagcctgtgatctttccagtgagaggaagggggagagggctgggctccggggtgccctcctggccagcctacagcaatggtgccccagccaggaggcgggaggyggtgccccaggcttaaggcatgaatggagcgggaggcagatgaaagacagccagtgctcctggcctaacgtacaaagaggccaga

SEQ ID NO: 3334 - DNA, 449 bp, Bovine  MMBT09946
atttagatacaaatttgattcatttaactaacattttctcccatcaacattttggattatcagtcctattttggattgccatttgtagtcactgttttctttgaatacaaatgtttataggttaaccgttgcagttctaaaagtgacatcaagttattgtcatgcaccagccggtgtctgagcagaacacattatgaggtttcagccagtgtcaattttatcattttcatcaatattacttactgtgaacttgaaaaaattacttataagatttttttgaatcagtgagaaatttgggargcattttatcagccaaaatgtgggaactaattgtagaataatgcgggaggggagagaagtgtgaggggtggcgttctctggaaaggaagggagggcgttccagaacggggaaatggaggggctggggggaggtggaagggtgagctggg

SEQ ID NO: 3335 - DNA, 600 bp, Bovine  MMBT09965
tgtgtcaaaacttagctttcccaggactcccctagtggtccactggttaagactccaagcgcccaatgcagcaggcctgggttccatccctggttgcaagtaagacctggcacagccaaatattttaaaaagcaaaacaacaacaaaaaacttagctttcccataatgaaagtttgctccttctgatttcccmaaaactgctttattttattagctctgactgccagctcattctccaatgacacaggcctgaagcttgccctctggtttgggcacatacagatggtgaagcgcaccctrctaattcccttgtgtccagccacaccctgcggaacttggatctaatgactgggacaaaagatcttcataaggaaaaatgaactcaaacaggatgaatggcacagctaaagacagaggcacatacattataagagcataactgggggcagtggaagggactctacaagatatgtgcagaattgtacctttatttctgatctgagtgcacaagtctgcaaagatgcatagaataagcattcactcagccatcatttactgcatccacaatgaaccatggaaacatcaatttattcccacagt

SEQ ID NO: 3336 - DNA, 600 bp, Bovine  MMBT10037
aagacagagtttttgatggaggttgttcatttgttgtctgtgattcctgctttccaggcaggtgattgaagcaactcttgtgtaaattaatctttatatggaggaatgggtgatttacatcagatacagcagttaaccttaaacaccagaacattgaccacagcaccttcaaatagtccttgtaggtgtgtggttggggtattcagtgactctctaataaaggtttgctgttgttaatatcctaggaaccattgggatgtttttagtggagaaattgagggttcagaagcaaatcccaaytactgtggcccattttcacagaccctgacctcccaccagctcttgggtctccccagtggctagcctggmgatgccctcaacatgcaaagcccagcaagcatatttggtcttcctcaagcttacagaatgctgttcctccctggaaacccatattatgttaataacttgtgatgaaatatcccagcagggagttctgggattcacacgccttggctgtatagtaaaacgctcatttatggtttatgctgctaaatgctcctttgctagaatgcaaggtggtaggacccaggagaactgtaa

SEQ ID NO: 3337 - DNA, 600 bp, Bovine  MMBT10038
cccatccatkggagcacacccctcacctgagtcttctactgcagtctttgaagttgccagtttcacaaaaagctgtgaggaccagaaaaaaaacaagaagaggaagtcaggaatgctgggccaggcttctaaaggcaaaacaggtttaaaagcaaagtctgtgaagagacaagttctaagtcatacttatgtttctcttgtaagttaatcactcaacttgctctttaatcttcctaaaacatatccctaccttctgattgctaacaatctttatccagatttcataaaattcaatttatwaaagacccaagcaggagggagcctcgctctaaggaacacatgagatggagttttgaagaaagatgaaaacatcagaacccctcccccatgaccaggtttctctagctcttcctcaaaataggacatgggtttttccrgctcagaggactctaatagcctgaaggagggtattgccaggagcttagagtgcaagtccattttttgtttgtttgttaagaktattaattggctctagtttgacatacgtgaatcttggatttttcaggctattggctctcccaggtaccttttcttgttgct

SEQ ID NO: 3338 - DNA, 600 bp, Bovine  MMBT10053
caggctccccagaccccagtaggtggagagctgagtatgctccaccctggactccttccagcccatttcagacatcccaggagatggaaaacagagatcaacagtatgtcactataaacctacagatgggatctccgcagactacagctgccaatcagagcgattagaaatgtgctttaaatcattcggacaggtgaacaccactggcagcgtctgttgtagcatttttaaagctcrtagttcactgagcctctatcattttctttaaattttttttcacagcrgtcccacagagtttakgtttctaggatacacttaaagcagagagaaaaataaaagacctggaaagatacaagcctatggtatccagttaatgcccacctttttactggttttcttctcactaagcataactcttacatctggtaggcaaattcatggttttacttaaagtatttttatttggagagagacctattagctttttccttttgtgtggcatccctggtaagaaatgaacaaatcagtgtgaaaaactagtcaggatgggatggaagataaccacgaaccctgccagccaaaaggctgttgaagagctcc

SEQ ID NO: 3339 - DNA, 600 bp, Bovine  MMBT10234
ccttctccaggggatcttcccagctcagggatcgaacccatctctcctgcattggcaggtgggttctttaccgctgagctaccagggagcatcactgagtcctaaaagcaaccctgggatataggctctattattatgcaatcattccacaggtgaggacaccagagcatggggaggttgagctgtcaaccccaaatcacatggcttgtaagtcaggcactgtgcttgagcacctttccaataataataccttgaaaagctcaaatattacaacagtggctaccattcattgaggcagcrttccaagtacctcacaagggtcagatcacttaaccccggaaataagtctgcaaggtagggtctattacttttttttttttttaatttggttgcactctctggcatgtgggatcttagctccctgaccaggaattgaacccacgcccactaccttggaagggggagtcaaccactggacagcccaggaagtcccaaggtaggtcctactactaaccccctttacagatgggaaaactaagggtcagggatggctggtaacaggtccaagagcgtggggggtggggctcactgtcatcatgt

SEQ ID NO: 3340 - DNA, 600 bp, Bovine  MMBT10304
taatggctttgctcacactctgcagagctcccctgagatttccaggtggtgctagtggtaaagggcccacgtgccaaggcagagacaaaagagactcgagttcgatccctgggtcgggaaggtctcttggaggagggtgtggcaacccactccgttattcttgcctggagaatgccatgggcagaggagcctggcggactgcagtccatagggtcgaattgcaaagggtcacaaacaccactgaagcgacttagcactcatgcagagctcccctcctttcaactaggtcctctacccatmggcaagcactgacctactcaaagggatctaaccagaagcctcacctgggactttcttaaaaatgcaaattcttgggtcttwtgccagcctaataaatctgaaattctcagaatggagctcagctatctgttttgtttctctttttgttaatcaaagtrtaactgattaatataacagttatattaatatacaatgttataaacaattaagataaacaatggtatgttaatttgagggcacatcatcgtgattcagtatttttacagtaatattttaactagcctcccaggtgattctgat

SEQ ID NO: 3341 - DNA, 568 bp, Bovine  MMBT10370
tcagggctgcagtccagtcatttgccagttgatggagacagtctaatcttagcttctgttgctgaagcaagcttggcattttcttgtctgagtaatccactgccctacaggagctttgagaaccttgaatagacttggacaatgggattgggcccagggttgtcttttccaattggaatgacatctgtagaccttgaaagtcagatgtccagatgtttaataggtgaactcctctgcttgaagtcctgtcacttgggactccatggagtgggcatctccaagcacctatgtgcatgacarttggtttacacttcaaatcacttttttttttttttaaagaatctttatccttggctgtataaagtaaaaagtttagcttctatttttttgcacctctattttatcatatacttacattgtatacagtagtggtagattctctaaatatgttatatgaagagtagaacatgtctttggtatcatttcattgcatgctaagtcacttcggttgtgtccaactctgcaactctatggattgtagcctgctagactcctctgtccatgggat

SEQ ID NO: 3342 - DNA, 600 bp, Bovine  MMBT10381
atctcatttgcatggcttgaaaataaattgagaagagggtaaattaagagacagaatgacttcccagaaatgtacccagaggtgaaggggctgaggcttcttcttacagtcatcaaactgggtaccacaagaagcttaagagtttctacagtggagagactgttaggaaggaaactgacaaagtcttaatagctaactatgggctctctcagggagtaccagagaagagagagggatatggcagaactctgtaaatttccccccgaatctattgccatgttaaagcagcataaaaccagsgaaaaaaggaggctcggaaaatgaacaaagtttatttacaaccacctagccttgtctctgctttagaagctgagatgtatgaaagaacaaaggtccttgcattcccacctaccaaatagcaggtcaatgatctttctggttctttgcttaagaggttgtttacttttaccctaattgtgtcccctagattattagttatttgcccctcccagattcatgcaatcattcatgcatttgttcagacatgcattcttatatttcatcactcagcaaatacttatatctatcatgtaccagaca

SEQ ID NO: 3343 - DNA, 600 bp, Bovine  MMBT10446
tgccattttctatattttacaggaaggcactctccggattgcgtcaatattcaagataaattactccgaaaatatcaaaacatggttcagctgctaggtggccaaaaaatgatagatatttcccatattgtgtcatgacatcataatgaaacatatcaatatgtaacaccactagggaaagaaaaattatgtgaatagaaaatcttgaaacttttacttcacatgtgatacacagttaatgytaactataaaagtttaaaatttttctaaaataggttatacattctttcatacttacasgtgacataaaacgaaatttaaatttgygttactgaaatcatttggaacagcaattgttaacttagggtataaaaccatagttactaaggtcctgatagccttctatgatcccattaaaaggtcccaaatgctagagttgtagggtcctgtactttagactttttcttctccttggcttccaggttcttctattgtgtstcttttaagtagtccaaatgttttttttttttaatttttcctttctaatctgtaggctgggaaaacaagtaactctgagaattggcctataataaattagag

SEQ ID NO: 3344 - DNA, 600 bp, Bovine  MMBT10488
ctgtgatttgccacacctactattaaggaagtatagaagatgatgtgaagatggtgatgttaaaactcaggaaaccatctaccttttctacaayggcactgtctattcccgccaccatgatctactatggcaacaactacggggctatgaatatgataggcttagctgtggctatcaaggatatggtgactatggatatgactgctgttgcccctattactatggaaaatattggtcataaacattctactgaaaaactctagagccactgaacccattatatttgtcctcttgtgaaayagagattctgctgttgggcttactcatctcatcctgtctcttcaaaaagcaacaatcaaaattgaaatctaaaccatcatgaaaataattcagatctcatctttccctggttccattgtgcaagatcataaagatttttttttcttaaatgcaatgaaaagtttccttttgttctctaagtatttcttttaataaatttaatgtctttgcaaatatgatacactttcacatcattgcatatggatgattgtaacaaaaaaacttgtatttactatcccaagggattgactgaccccaaag

SEQ ID NO: 3345 - DNA, 598 bp, Bovine  MMBT10494
  misc_feature (1)..(38): n is a, c, g, or t
nnnnnnnnnnnnnnnnnnnnnnnnnnnnnnnnnnnnnnaaattacttgcacttggggtgggaaaagaaagaaaggagtaaaagatggggctaacatctgggtggaaacatgatgccctgtggttttgccaagagcaaccacacaggtaatcaaaagtagaatatatctgaagaagaacccatgggatgaatttgcttacggacccttagtggtgaatcagttatgattcactccaccctggaatttcctcctgattggcacagacctctaaagcagccctctgtttcactctgtaccatyatccggtactacggggctaaagcgaagacatgaaaaggaggaggtaagctgcattccctattatttcagtgcccctacattcactgaaaagtggaataaagcatggccaagctaagagcagcatttttgaaccaaactatgttccccttttcttaagaagctttcaggtgaattcaagtaaaaagaacccctccacttaagttcagctccatctgaattaacagagaagcaaaagttagaagaatcctaagaacatgttttatgtttaaattattcaaaaccatgcttagatgttgca

SEQ ID NO: 3346 - DNA, 600 bp, Bovine  MMBT10503
cctctccctgctggggagacaccccacctcctgagtctgggaccccaaggcaacgagggggtagggatgagaccacaacatggctcccttctgccctccagaaggcagcctgccacctcctgggaccgccagtcagctacgaggatgggtcctggcctttaaaatgcagcatcctcaggtgggtctctgccccaacttggggccgtgtgcgtcccttcggagtaattgctggaaccaaggatgctgcgctgtacatgactaaccaaggagtctgtggccagaggaggcaaataaattgcsggcagatcctcggagctgttccatagcttcttattccagcacccagagctggcggggaccgattcacgttaccaggggctttcactgccggcagcgccaggccggtgtctctgcctgggcgcacgtgaaggggccgccatgcctgcttgctgtgttactgtgccacctgcaccgcagaggccagattaaacagggcttcagacggacggctggacgtttcaggaaatgcctctttcgtagcagagcctgacccggctctgagggtggcactggagcctctgggagtgccctgttttgttc

SEQ ID NO: 3347 - DNA, 600 bp, Bovine  MMBT10512
attggtcaatttaaaatgggaacacaaatttagcaactgccagactgtgttacattaaggcagcataatctcaaaactaggcacctgttaaaacaccagcctgctcatctcaggtcacgcgtgcgagttctgctttactcgtgctcatgttttggacctgttggtgcaatcgaggtcttgctttcaagtttacaagtaggttaatcaggaatacaagaatcaactgctagttccatagcttctggatccagtgtccctttaccttcagaagcctgaacacattgaggatgtaacagctgytgtaatcttgagttaggtgtcaatctatcatgttcagtacacagattgctgtaaatgtattggctatggattcagcaacagttccagttttgtttaagcaatagtacagccataattttcaactgacatttaaaaatggtctagttacaccttgtgtcaaagtgcagaactgctacattattggttacagacatctatgtgctataaaaacagctttggtacaataaattatcaaaaaagaaaataaatttttgtaaaattcacagcataattgtgaggcaaaaaagcagtcacataaaa

SEQ ID NO: 3348 - DNA, 600 bp, Bovine  MMBT10521
aatgtatattttactatcactgttggcaaaaagtctacttaatatttttttctacttaattattaggaagttttctttttgggcagtgtagagtccatatacatgaccagacaggcttaaaaaaaaaaaaaaaaaaaaaaggagagggggaaatgactgcctatctgtatgtgaatttgagggaaatactgtttttcatcttttggttaatatttatacttgtcttgcaaaataactcaacttcagggactttgctggtggtccaatgcttaggaacctgccttacagtgcaggggatgygggttcaatccctggtcagggaactaagatcccacttgcctagaggtaactaagcccgggtgctggacctactaagcttgtgtgccctggagcccacacaccacaacaaagatcctgcgtgctgcaaccaagacccgtcaaagctaaataaatatttttaaactaaaatttaaaaaatcaatattctttcaataaggtaacttgaaaacaygtacagagtgaatgtaatacaaaccctaaatgtcctctgtctttaccctgacacatttaatcaagtcatggggccctggcaaagctgcc

SEQ ID NO: 3349 - DNA, 600 bp, Bovine  MMBT11200
tactttagcattaggtagacataagccgtgtgagtgatggttaaatctaaacatgctagttttagcattgtgtacaaggtagtgtgctgtttggaaaaaatgcctggacatttcccctcatagttactattcttgatacaaagccattaaaaaaatctaaaaaaagaaaagctagaaaatgaaaagaagtaataagaagaagaaactttgggagagaattccctttccaagaaaatggctaaattaatctaaaaaatgttgagcacgttcagccaactgtttaatgaaatggggagatgkaggctcttcaggaaaggatttcttacagtgacactgtggaattggcctggcagaaacagggagacaaccccctccagtcaatttttattgtgttttgtaaaaatcagtccattataaatacactcttctctgatctggggctctgctgcgcatctctaccttctctatttttagctttgctcatattaaaagactctatactaaggtaatggagaaggaaatggcaacccactccagtaatcttgcctagagaattctgtggacggaggagcctagtgcgctgccttctctggggtctca

SEQ ID NO: 3350 - DNA, 598 bp, Bovine  MMBT11318
  misc_feature (1)..(25): n is a, c, g, or t
nnnnnnnnnnnnnnnnnnnnnnnnntgaaagtgaagtcgctcagtcgtgtccgactcctagcaaccccatggactgcagcctaccaggctcctctgtccatgggattttccatgcaagagtactggagtgggttgccaatgccttctcctcatgtctctctaagtaacctcaaattttttataatttttttctaaaatttgggcatgaattaataatctacacattcccttgttaaggataaagtagtgtcacttataatgccttgtgtttgagggagttgtgagaataggtccatttaytggagaatgatactctttgcacactcaagaaccccaagacatgggaaacagaagtagaaagcacctccttttccctctgggaagagctgagtctgcctataagtgggtggactgtccagcagtggaatcttgttttgggtctggaaacatttgcctaagttgatgctttgacctctttctcagagttaaacctaagactggcgaagattttatttgttcctacagtccactagaaaccttgacagctttccaaggagcacatctgtctaccacgtagaaagagcacttacaggtaaaa

SEQ ID NO: 3351 - DNA, 600 bp, Bovine  MMBT11320
cagatactgagttataatctcattgaattctctgaacagtagtaatgaacacttatggaacatttatttttctacatgctttctgtatattaacttaaataattcaatatggttattaccctttatggcagatgaggaaactgaggctttagagagatttaagttagctggccttgttcacaaaagttaagtggtcaagttgggatttaaacaygggaggcttggctccaacattggttttcttaacacacagcacaacacagccactttctttgagaaaagtatcaggaaaaaaaracrtttgagaaatcatggagaaattgtataaagtgaattaagagtatagggttaaaaagccaggctttggcatccaagtcttataatttcatcaccttaggaaagttaccacctccctgattcttrgtttattgtctataaaaatgawataaaagctaccttgcaaattagtagcaagaaaaacagatgattaaggaaaaccttggtagcagctcaataaatgatagtcattattattactcttttgaagttttgcagacaggtcaaagactccagtcatacaacttccctgttttacttgtt

SEQ ID NO: 3352 - DNA, 590 bp, Bovine  MMBT11408
tggttcaccttttgctcttccaacctatttaccttaaatactttcaatatcaaaagttctgctttcaaataattctaaattctcttttaaagggcttatgtaacagggagaggaggttttcttttatttttgttaagtgctattcacaaatatgattttgctttaagcctctcttacaaaagaagtcagtgttcttgagtcaaaagaatgaacctattagttttctgatgggcacactgtatgtaataaaaacacgagagctttatggtataaggaagcctattaattgaagcctctctytatgcattgctatcacttcttcatcttgctatgattagatgacaagatgtgattttaatacagaatagtggggctataaagatgatttactttcatctttgtaacactaagcagtatgatcactgtgtatttttcctgaataaatattcttttaacctgcgttgatatttttaacagacaggacactctatgattggagaggatctgtgtcaaaaaaggttctcccgtttgactcacgattccagttggccctagtttctctggatcatcattagcatttcaggattatt

SEQ ID NO: 3353 - DNA, 600 bp, Bovine  MMBT11474
caagggtttgaatgccagcagttgagaaatgatcccggggaaaacctcaaggagggggtcggggtgattgagacagagaaagtgctgtggattgcattgtgtccccgccaaaagcaatgttgaagtcttaagtccaggtacctgtgagcgtgaccatctttaggaatagggtctttgcagctgtaatgaagtgtagacgaagttgtactagattagtgatctaatgcaacctctgattcagtgattggtgtccttatgaggtgagagaaatgtgggcacgtgracacacaccgagggaaratagctctgtgaagacacagacacacacagggagagccaggcgctgacagaggcaggratcagttaggcygccacactccaaggatcggcagcagccaccagaagctaggagaggggcctggagccgactccccctctgagcccccaaggaggaaccagccctgctgacatcctgattttgatctctggcctcctgagctgtgagacgatataccgctgttgctttcagacacccagtttgtggtattttgctatgacggccttagaaactattaataatacaaataggaaggggaggaa

SEQ ID NO: 3354 - DNA, 600 bp, Bovine  MMBT11492
aggacacactttcacatcaatgtcttatgagacctcgtgtgttagaragatgaaacgcttgcactgggctgctgattgtcatattgagttaaatttgatcacactagtaaaaggatttgtatttttgtascagaaaatggatacctccagaattagaaaacaaaaagatgactggaaataaattcaaccaacgcagtctgtcgagttctaagcaggaaggagtctgggatgactccctcgtgtcatgaggatatgacatgaggtaagtgttggcacaggccgggatgggaggggctgctsacgcctgctaaccccacagggtcacactggaatcatcagcaggcgggtcygctgccttcctgtctggcccctcctgctcgmcaccttatctttgacwcataatcctgcaggcttckcccattcaggccctcagcagagcccaccctgacccaactcagcctgggtaaaaaccccacaagcatggatccatggccagtcactctgccatcagcccaaggaccctcagtgcctagggtggattttgaatcccagaacccccttcggaactcggggaaggtcatggagactggaatttgttcc

SEQ ID NO: 3355 - DNA, 600 bp, Bovine  MMBT11640
gaaggtaagaagtggggggcggggcacaatctgttcaaatcttatacatatcctaaatcctaataatttaaaatgctgaccgcttttttcctgaagaacctagtaaatttcatatgaataaatacttttcctattcattactgacatggacttttgtggttacttaaaaaataaataataagtgcttctcatttttatgacagcattaagtttcaaaatgaggctaggtaatgtcagcttaacccagaaaggagctaaatgtcgggggagggggaggacsggaatggcataagatgaatratcagcaacaattctagtggtaaaaactctttaggggagtaaagggtccaagttgctttttaaggaataaaagatggatcaagactcaagaaaaatgctcattcattgtaccttggaggcaacactctgtctaaagtacagaagtagtaaaatattttactaagttaaaatataggttttatattttatacgatattgaatacacacataaaaataccagtgttttcatcttgtttctgttcagacacttaattaagcaaatatgttctttggtgtctgggagagttatcaatattaaag

SEQ ID NO: 3356 - DNA, 598 bp, Bovine  MMBT11704
  misc_feature (1)..(104): n is a, c, g, or t
nnnnnnnnnnnnnnnnnnnnnnnnnnnnnnnnnnnnnnnnnnnnnnnnnnnnnnnnnnnnnnnnnnnnnnnnnnnnnnnnnnnnnnnnnnnnnnnnnnnnnnnngtagatgccctggtccgtctcccgcgtgttctggatctgagggtcccgtcatccagcaagttcaaacgggaatccgtcttcatgctcagctcgttgctataacgacagacctggctggctcaggcccccaaagcacaggaaacatccagtcctctgtggatgtctggtcccagcccagggaccctggcctccaggyacagagcacttgaggtgccagagaaacgtcttctcctctttgcattccctccacggaggagcagaaagggttgtgtgrgaggaggaggaaaggtcagggtgggcaggcaccctggagcttctggggtacagggatggctggcacccggtggccagcacccctctgacggctgggacccggcacccggcacccctctgacggctgggacccagcgcctggcaccctgtccgggagcactcacttgttctgcagccagatgatctcgggcttggggttgccctcagccctggtgcccagc

SEQ ID NO: 3357 - DNA, 600 bp, Bovine  MMBT11829
cacctacaattacattccttcttacgtttaaactcggctccattttgctctaatgtacagtatgtacaataacccttaactcactaaactggcaagtttatatttctgtttgtttttaattgtcattacatttccacttaacaatttgtttcactctctttgtgttttctttttttttttgtcttaagctacattattaaccaaaacactcctcttcctraaagagcaaaaaatatgcctttgcacctttcactaatgagccccgctgtttgatacggagttgatgatayacctcaaacratggtggccgaagcttctgtagtttctggcaagaggctcactttaaaacaagcgatataagacttaagatttgcctgtattccaacatacagtcattggacttttggggggcaggagarcaaactcgaaaacggatgaattgagatcaagacatwtcaaactttctttrggagtyttcattatgattatttattaaaaacccgaggagctcatgaagtatagatgttgctggtagcttgcgcgttctgtcttactggaacgatgtttctggaaagaggggttgctctctttggctcctgg

SEQ ID NO: 3358 - DNA, 600 bp, Bovine  MMBT11893
tgccaagcagaagaaccctgaaaaattcaagattagtgagtaagaaagatgacgtgcatgtctgtatcatgtgtttacgtgccatcatgaattatcaggtatgtttctgtttataatccttaaaaaaaatctgaaatcatcagactcaatcttgttctctttggtatctttgtatttctatttgaagtaaatatcaggatttaatgaaatattttagagaagaaaggtctggttccttctactgctcataattcattacccttttagttagcatttctgatgtgtaatgcatttaaaggsaagacattttcctcttccagtggtaagcttatctagattacttggtaagtgtttttgactattagagacagagtaagccactggtctggggcaataatggaacaactttggaacctgggaatgagtaatctcacacactgcgtaggtcattgctcctcaaagagttatgtgaggacaggcaagggattatgattactgtgttggaccctgtggttcctcatcttcatgagaagcacttagaggatgcttggtagaagagcagagtccctctttagatgactgatacagactgtcttcact

SEQ ID NO: 3359 - DNA, 600 bp, Bovine  MMBT11943
agccacttacacaaataacctgatgcttggtttatggccgttgagggattataacacaagacaggrgagctcactaaaacagtcattattgtacaaaatgacatttcttttagactgatagcagttatgaagaagttgcattttatgtttgttgtcaaagactacaaaatgggctactgggattagattgtcaaaaaatctgtagaatctagccccttgcttgagtagcttgtattgaagagttgacataaattatagcaagggtccacatttttaaaatgtcttgtyaggtatgggaaygggaagttactagaaaatttacactctagtgtttatgtcattcttctgaaaaaataattatattctaggtgcctgctttgatcatgaaatagaaagattaaatgcattttgccaaattaggatttctaccaataaccaaaggatttgagaatatagttgagaacttggaattttttcctctgtttttgctttttgaggtttttctatattttcttccttgcctatagaataactcaaccaattatagaaacatcgtgcttaaagaatctcaaaaataatttggtaaagttagaaaaatac

SEQ ID NO: 3360 - DNA, 552 bp, Bovine  MMBT12013
ctgccaagtgtctggcttgtgtaaaacttgagaccttgaggaaggagtgaagaaccgaactgggacgcaagttggaagtctttgaggtcatggaagtttgcaggcggcaaatatgacctagagagcttagcttcggaaagtgccatcagcactcrgaatgctccagtggttgtcgagggtgagagccaggaaacggcatctgcgggggtggttatcatcacatactccccagaaccacaaaattgcccacatcctgggctcatggaccagggtttccactttagtggcctgataacccaraggtcttattgacaaatcccagaaaggaagaggacttcatggatttgtgtgtcttggaaagctgagtcctatctcccctgactcactctggaaaagtggaagtgtctcttcgcctgacccaagggaagctgatgtttggtgtttcctgggagatcrcgattcttccttagatctttttcttgatctgatgttcatctttccaatggaggacgagggtcctcagctgtgttcaagtcatcaggggccaaaaag

SEQ ID NO: 3361 - DNA, 600 bp, Bovine  MMBT12032
ctttcattttgaactaaacacttgttaccaaatcatgaaaatttgtccttcatccaacctacatccaagatcaataatgaaaggtcatgtcttgggaccaaggtgacttgaaggcttccactaaatctccagccttctgtgaacttgagcttcgaccttcagagacaacagggcacagagtttggcagcaaatgatccaattactttaatgccgatgtgaaaattgtgactctgttaatttaaaacatagtttcactgtgaatagttcaagttttattttgattctggcttttaatactyactgataagtatgcagaaagagatactttgggactttttattaccatattgcctaatactgcttctgtgtttaaaaaatctgcttattgtaagcagggtacagtcaattgtgcatattggatttaattttctactatgcaaataaaaatgcctaaattgcaatttacagatcttcttttttttttttttcaaatactgtatatgtgtatgttggtttctagtgccatctgaatgacccatgctgaaaaggttttcattttgcatttccaaaatatatacagaacccattaaaagaaaaaa

SEQ ID NO: 3362 - DNA, 600 bp, Bovine  MMBT12053
gcccactgctccgtgggaaggtataacaggatgtttgtttgggaggtctggagctctgcagccctgagattcattgaatcactttccaatcaaattcctgagacaggaaggtcaatgggatgaaagaaggacactttgcctagggtctaggagttgtctggggagaaatggattgataccaagactttccccctggggttccaagttgattggatggactaagtacagtgaacacaccactgagattcttgaactctgcatgagccagtggcactagagaagaaagacacyctccccgaraacagaacagagcttggagttatatgaatttgaatcctaaaggaggtgtgattttattttgtacccaagctcctcgctacaataagattggatgggggcggtgctggcaggagaggtatgctcttgttcacattatctctgaaatagaggcacattcattaaaatgacaattgtcttagagtcataattgatacctgctttcataattttaaagtaagagaaaaaaaataggcggaagaaaagatgcctataacagcgagggcagtgaaatcagaagaaacacacttcacgaaacactat

SEQ ID NO: 3363 - DNA, 600 bp, Bovine  MMBT12193
aaaaaacagcagctttgacctcagtttttatgccgagaactttggggctggtgtttcctgtgccaaaaacagaggaggataagctgcctgaccagccaccgccagcagcatcaccagcacagggacctcatgcctgtaccttcagagagcctccagagagcggggccaggcaggggaggactgagttcacagcttttcaggcgagttctgccagacccaagggccataaatcccaggaatggaaaacaggagtaagaaataaaacccttggcttctagtgaacagccagccacttgcttmgggccataaataaccacagttaaaccaagcaccccttgcacttctcggcagggaagtgcatgaaaacatctgatgtaaagattttaaatgcttaactgctctctgccaacatctacttgaccatccagagatgcctggtccagatctttgaagtgagcctggcatatctctccctccatggccctgaccactgcctcagggaactctgactggtggagtgctgggtagcatcatgggtgaggaggaggggtcaattagggcctggcagaaggaagtgggtaaccctcagctgtgggtcca

SEQ ID NO: 3364 - DNA, 600 bp, Bovine  MMBT12413
aagaggagggcagcaaaatctcaaatacagattttgagtagaaggaatgtgtgtgcaaagctctgttgtaagagaaacatggtactttccagggactgaaagaaggtctgagagggtgcagcagtgaattaagtgtggcttgatgaggctggaggctatgcatatgcctgagcaggaggtatcttagaggccrtgttatactttggatttacttttcaagcaatgggaagacatgagaggaacaggcagagccaagtatattgaaaagacaggcttgcattttgtaaagcccacactttygcagatgatgaacagattrgagggggccagagtggatgcaaggggacyagtgaggaggtgaccgcagtcctcctgggaagagaggatgaagtgcagatggagagacagagaccaagctaaagggcaagggagaaatagaaacaaagatgactcccccagctacatgtgggtgcactggtcttaaagatggaaccacggaggatgccagccaatctttatatgaataaacatataccactctgtgttcagtagaatactgtatttctcacaagttccatctctaagagttcagatagatcg

SEQ ID NO: 3365 - DNA, 600 bp, Bovine  MMBT12623
tttaccagctgaaccatcagggatagtagtttgctgttggggttttcctaatggctcagatggtaaagaatctgcttgcaatgcaagagacttgggttcaatccctgggtcggaaagatcccctgaggaagggaatggctattgttgactggagarttcaatggacagagaagcttggtggactacacaccatggagttgctaagagttggatacaactgaataacattttcactttacaacagctacagttctagagcctattagtatgtgtgcaaaacttgtgttactcaaaattatmgttttgtaaagtatcaatgtgtatttccatgtatattctatttctgttaacatactttcctgtttatacataaacacacacacttttaacttacctattgtgcacattatgaacattatgtactttgctatttcaaatyatattaaaataaactgagaagtacatcttccttttktgaayttgcataaatgttcwttagagtgtaacatagaagaggaatttctggttatgttcattttcacttttactgataataccaaattgttctccaaagttgttattacaatttgtcttcctaca

SEQ ID NO: 3366 - DNA, 600 bp, Bovine  MMBT12634
gagcccggcctgctgatcacgccgcatacatcttctaaatgagtgttattcttttgaatctgtgttttctttccagacccctccagacctatatgatacgttaagatttcacagcttcggaagtgagattaattaactcaacactggaagatcttcaggaaaagctgtgtccttcggacacttttgaaaaccaattttcttcctgagaaagctggagtgttgctgagggagaatctaaaagagatattaattgatgcttgggaattgacacccattcctctttcatctctcctaaaaaayattctttaagggaagaggaaagatcagttcttcccattgcctaagcctctcaatagaacgcagtgttctttatgtgacagttctgagcttcggtttcttacacgaaaagttcagtcccaaaygcacttccgtacatcgaccatttacttgtttcccctaattcctcgtcctccaaatcccagaacacgtctgccaaaggataggaacttgtggtcagaaggtacaaattaatctccaaattctagtcaacctccacggcttaagagcccgtatcttttatgaagtctgtttctatcatat

SEQ ID NO: 3367 - DNA, 600 bp, Bovine  MMBT12636
tctaggagtaaattttaaattccacatgtggctggcgcttgtagctcctgttttatttctattagatagcacctttctagatcacactctaagcacacatacttagggaccatggaaaccttgcccaaagggctaagagcccaagtctagaacctgcatagactttcccctgtttgtcctyccaaaggctgagcgagctgcccttgtgcacacctgaaggcccagtggaggccraagtgcagctattggaggggagagggagtagatggtggggcttagacatgaggctggggtgccctygtgcaggtacaaggtctatctcagaacaggacagggcccaggatgggggcaggaaccagtcctggggctggggactagctctcctatgtcacagaattctgaggcatctgagatttctcaattccatcttagccttccagattgttaggcagatatatttgtaaggtgtgcggacgggccytattttatttaacagtttgttagcttaatttataattttcaatatttagacctatgatatgtgtcgctatttgtgctctcgccctgggcaagtaaggtaattactacagaactttgtaa

SEQ ID NO: 3368 - DNA, 600 bp, Bovine  MMBT12767
atacttgccaagtgctatgttgccatcacttcagaaatgaataagacacaggccstgccctcaaggtattcatagccaagacagctaagtacccaagcagttggagttcacaagagaggtgctgaggaagcaattcaggcctgagatggagggctgcaaaaacttcactgaaaagtgcactcacataacttggtaaaatatagcctgttcctaaggccttggatttaagttgcatgatccaggagagctgaaaaggataaagataactggacatggggaaacataaccctaaattggacrtgaaacaaaagtcacaggtaatctaatttttctaatggcaggggagacagaatatgaggtacacartggaaaaaggacttccttgttgtgatagaatcaaaagagtctatgattaaatggtagccaraaacattgtattgttctatgcctggtacagagtacactcttgaaaggtatttgttgacccaacraagatgggaagagaatgtaaaaatgtttagctcagtggtgatcattttggaatgtacagaatatcgaatctatgttgtatattagaaagtaagatgatgttgtgagtca

SEQ ID NO: 3369 - DNA, 600 bp, Bovine  MMBT12798
cagacatatctttcacggtatatcattaaatgtgcacataattcagggccctgaggcaacttccagataaatgctcatcatttccactggcattaccacctatcagtaatactttggggagaaaagctctaagaaaagataaccttggttttgcattactgaatcagcactctgaaataaaatgtttggtctatttcagtattgagaaatgtttatattctgagatcttttcttttttctacactactgatttcttaattatgccagtgtttaacaggctacaccatgggacacttcttycagagaacagaacaaccttgcggagctgccaattagcactactccgggcatttttacagcactctaccttttttgtgccttcgctttttctgaaactacttttcatgttagggtaattcaactagacctatttaaacaagcataatgagggctaatcacaattggaagaaagtggacacatgtagtagaggggaaaggaagaaaagggaaaaggtaatcaaggagatccaaccagtccattctaaaggagatcagccctgggtgttctttggaaggaatgatgctaaagctgaaactcca

SEQ ID NO: 3370 - DNA, 532 bp, Bovine  MMBT12822
agctgttgttacaagttagtcatcaggcagagaaatatattgactttcctaaaatgtcttatgcacacacattgttatacaatgtacttaatctgcttacatacttgatacgtgtgtgacacgtgtatcgttctcattcagctgaactgcgtcatttctgtttatttggttaaaatggtgccctgtgacctgtaccgtaaaatgctatcaagaccagagtcgaccctcccacccagagtttcttttaaatgaagcttagtaagtaatcctacaaaaggttagctagaagcaaackgttasggagatagcctgtggatccttgggcaggaagtatgttttgctctttgattcctgagtattcatttttgcttacaaaattatggctcactaatgatgggcgtggtccctgtggtgcagggtgtcctctgggtggtgtggtgttgatacaggtaaaatggctgctgttttgactgactgtagtttatagtctgtggccctgtgctgcaggcagtaacttctatgtctgaagttt

SEQ ID NO: 3371 - DNA, 502 bp, Bovine  MMBT12886
cagaaagaaaacaagtgtaagatatgtgggaaagtctttaataactcatccaatctaagtagacataggaaaattcatacaggaaggaaacctttcaagtgtacagaatgtagcaaagcayttayctgtyrctcacatcttactcaacatcagcgaattcatactggagagaaaccttataaatgtacagcatgtggcaaagcctttaatcasaactcaactcttactcaacatcagcaaatgcatactggagagaaaccttataaatgtaaagaatgtgacaaagcctttatccgttgmtcacatcttactcaatatcagcgaattcatactggcaagagaccttatcattgtacagaaagtggtcaarcctttattcgaagttcaacactaactgcacatattcgaatccatactggggggaaaccatacaaatgtaaagaaagtggcaaacctttattacaagttcaaatcttactcaacatcacccaattcatatggg

SEQ ID NO: 3372 - DNA, 600 bp, Bovine  MMBT13360
aaaattaactgatttatatcaatttaaaccatattattgatcgagcaaatactcattaaatgctcagtatgatacttgctcttgaaaagtgtaagtatagagagatctaaaataaataactttttatagtgtgataaatgttttaatataaagatattcaaaatccctgctaaaaatgttcaaatttctctaagctgggtaaagaaaatacattaagaaaatgaaatgatataaatgtctgataatgattttaaacagcaaaagaaatgtactgytacttttttttttccttctaactasaacacagattgttttagatacttgatatttgtttaatcaatgaattagtggatggacaggtcttcatgcaattgcatgctctatttcaaatatattaatagttcaaaattgaaggtcagatataaaagacaattgactgaagagcaccctaagtgcttatataatagttttttcaagttggtttttttgtttttaaatctaacttatttagctgagttcttttgccattttgaaacattttcctctagactacttaattatagcactctccattaatccttcaaactctctcacacacac

SEQ ID NO: 3373 - DNA, 456 bp, Bovine  MMBT13535
gactaacgagggcagagatttcagaaaaaaaggtcaccaatccctttcagtttgtgaaaatcacacactttcaattatttttaccactactggggtaatttgtccttcacatgtggctcaagtgacctaaatgaattagattctgttaccaggtataatgcttagatcacttctagtgttaagagcaatgtgaggtcactatttaagaaaatacagagtggagctaataagctatttgacacatagaggctaaaagaacaaaaccaattggggctgaggcactaactagatagattctcyaagtaaagaagttacttccagagaattaaacattttaaaggcatgttaactctgagtttgtaaagaacttttgaaagttactgtagtagtgcaatcaattggctttgaaaagaaaacctacttaccatcttctcaaattgctagaatattttatca

SEQ ID NO: 3374 - DNA, 600 bp, Bovine  MMBT14095
atgtgcttactggccattttcattttctttaaaggattgtctattcagatcctttgcttattctcagtcrgagtaattgtcttattattgagttgtgagagttctttatgtatcctcagtgcaagtcctttattagacacatgatttggaaatatttttctcattctgtgagtcctataatgttttaaagtgatgagaattttaaaaatctgtttttaattgtgtttttttctccttatctaagatgtatcctttgaaaatatccagtggagtatagatccaggagcagacctttctcartataaaatgggtgtcactgtagatgatacaaaggtgagttagaaagtagaaccagagcccgtgtggttattcccgtgtgttgttagtcaccctgccccccgattcattctgtgaccttgagacagtcacacacctcctataatcttcatatatttattcagaaacgtacaaaataataacatttattttccaatttatggtatttttraatgggtaataatactttctgactttttagagacgtttgctgaaaaatatagttttaaaataatgtcaaatgctaattacatattaaataac

SEQ ID NO: 3375 - DNA, 600 bp, Bovine  MMBT14116
gctgacaatttaaaacaaggaagaatatagtcagaaaaaggctgtgtttatgaggctgcagacggtccaagaatgagcttcagtccttcacatgatgccagagcagggccggatattcaaaaggggatatcccagggacttccctagtgctgcagtggctgaactgcattggaagaatccaccttccaacgcaggggatacaggttcaatgcctacgtggggaagtaggattccacatgccatgggccaactaagtctgagcgccacaactactaagcccacatgctctggagcacccaygtcacagctagagagaagctcatgagccacaaggaaagatccagcatgacgcaagtgagattctgtgtgccgcaactaagacccaacacagccaaaaatgaaacaaayaaaatataaaggaaagaaagattgatgtcaagcttctgacttctgggcatctctctgccatctttttggggcacctgtgccatttggtttttgatttctgggcatctctttgcagtttgctctatttaaaatgtgactgccagctggtgaggttttggtttggcttggttactttagtttgagcatgcagac

SEQ ID NO: 3376 - DNA, 600 bp, Bovine  MMBT14315
cccgctgaaccttgaaagctggttccaggcttacagggcgtggagttgaacctgaggagttgggtgggtggtcggatgggcactttgggaagctggtcctaggcccgcaggacccggcctggtgggcgaggctggggcagagccagctgggggccggcaaggagcggcactccccacggacacttttgagttccaagccccgtttccaagccctcagatgcgtcacttcgttcaatcatcccaaggactctgtgaattagctactatttttatcctcctcttagggccaaggagacttgycccaggacacacagggagtggttacaaaaggtggagccaggcagtgtggcccaagttcaaggcctgcccttcgagccccactggccttgacctggtccaggcaagamctgatgctcttggccacacctaggggagctcgtggtagggtgagcaggggtctgggagaagctgggagaagaggagagtctaggtgttgtgccagtggtcaccaggcrtgcagrgtcctggggggcgggggtctgggacagcggccccctgcccagcgcccaaggcccagcgcccctccccaccgctgccccy

SEQ ID NO: 3377 - DNA, 600 bp, Bovine  MMBT14354
gtgtggatcataacaaactgtggaaaattcttaaagacatgggaataccagaccaccttacctgccttctgagaaacctgtatgcaggtcaagaagcaacagttaggagctttcaagatggaggtggttgggtggttgaccgaaaagcagaggtgaaggcccctacgaagtcaaacgggccgagaatcatcccctccccacttctcccagccccaggagcccagcaggagcccagcagaagcstgagtgttttaggctttattttttaaacaagcaagtaaatcaaacaacttgtcaacktggggcggagatccacrtcatccaccaaaagtggaaaatttatgaaccctacagaccaagccagaaaagaagctcrgaaaagagaattaaagaagaacaaaaaacagcgcatgayggtacgagctgcagttttaaagatgaaggatcccaaaccaattatcccgggtgccgggagccrgcgagagacactccactcgtgacaaaggtcatgaggaaggaggctcggcatacacaaagggcgggatcgagcctcaggagtccccctggatattctcgagcatctacccccaaaaaaccaga

SEQ ID NO: 3378 - DNA, 598 bp, Bovine  MMBT14452
  misc_feature (1)..(72): n is a, c, g, or t
nnnnnnnnnnnnnnnnnnnnnnnnnnnnnnnnnnnnnnnnnnnnnnnnnnnnnnnnnnnnnnnnnnnnnnnntggagagggttgcctttcctcttccgaggaccttccccactcagggattgaactcaggtctctggcactgtgggcatattctttaccatctgagctactgtggctaatccagagagaagacctggaggtaagacagaaccaggagtggcggttggtctctgagctgcttttggcagctgtgcagcartggagaaaacagtcacaacatcagatccaacacagttatcrggaatgtggatcctgttattaagccaaataccccsagggtgaggcttccaagtcctgggctgrgacctggctgccagcctgcccagcacaagtaaggccccactcaccaccagcccctcttcatctttggggatttagtggccctatggaggatgcacaggggcctgagaagggcacaggatcctctacaygcatgtctgagaagccccaaacatgtgactacgcaaagatttatagtgcaaatgatcatgagtgagacagaggctgtctgtctcacaaagaaccaaggtctgtttca

SEQ ID NO: 3379 - DNA, 600 bp, Bovine  MMBT14894
cgccatgtgattgttcaagggattacataaaatcatatgtataaggtgtctgaagtagtgcctaattccagaatttgcatataatgtatttaatggtaattattttatatgatggagttttcccaggcagctcagagggtaaagaatccaaatccaatccaatgcaggagactgaggttcagtccctgggtcgggaagatcccttgggaagacactggctactcactccagtatccttgcctggagaattctgatgacagaggatcctggtgggttaaagtccatggggtcacaaaagakttggatataactaagcgacttcctgctctgcctctaktttatattatgaactatttataataatcctatgaacacagataatattattttctttcaattttcaaagaacaaaatttgaacttacagagtaagtaacttgcctagarctaagcagcttgcaygtggtggagctgagattcagagtacagtggctcaaagtgactgtaacatgtaatcctgaaaagtttgcaagtgccttggggtgtgaagctgagatactttctaataatgcgttgcttggcaattactctggcacccaaa

SEQ ID NO: 3380 - DNA, 563 bp, Bovine  MMBT14906
gtaaactgtggactctggatggttaactgttgtctttgggtgatgatgatgtatcagtttagattcatccttgatgaaaaatgtaccgttcaggtgaatgatgctgatgatggggggaggccatgcatgtgtgggagtggaggggatgtgggaattctctccgtacrtttctttccattttattgtaaacctaaaactgctctaaaaaaatgaagttaaaaaaagtccaggagtaaaatgaaatggttttccctcactgagtttagggttctttgttggatttgttccagtgaatcaatmactgaaacaatatcttttgtcgatgtatgtatatactctctacctagtctgaaagtgattattgatttttttttttttttcgctttgagctgacttgaagactagagaaattgcctcaggcttttctcctttaggaatatattcccttcacagtctgagattgtgccaaccaatcaaagaattaagtgagttttaggtttaaatgttgcaagaatgcaggggggagctggggcatatctccggcagagtgcttaattttgtaa

SEQ ID NO: 3381 - DNA, 600 bp, Bovine  MMBT15060
acttggcacatacaatgtatatatttagcaactttgcactatttgaagtaccttacacattgcactttactctcctaatggtacttttatgtgaaatgcactttattgacaattatgtcttatcattcagtagaaaaagacaaattttacacctatgtcccagaatacttgttattccttgttctaatggaatgaaatttctaataattcctgagtaatrtagaaatatatctccttacattgggagaatgggaagaaagtgaaaactgttgaaaatgaaatgtgatgacctttgaacgytggatttcagagagacgggttcccaaagcagggtgcatctgtgagyactccttgtcatatttctttccatacgacatgrgttttcatcttatttccccyrcaaaacagagatccagatgctgctggattcattctaggcatatcatttccatcgtgacattcattattgctrcttcctgatgtagtcattttactctgattttgataataaagacaccatgaatatacattcgcttcctctcaagtctagccctgccctagaagggtagaagggaccaggcatcatctcagcagtgtttt

SEQ ID NO: 3382 - DNA, 600 bp, Bovine  MMBT15460
caaagttattaaatttcattctacgaacaaataaatccatttttattgcagcgggaggagcgggcagcggtttgctgtttgacattttttatttttcaaagtcctgttaaatctgccccgatcaggtgggcggccccgcggccccagcatgccaagttagttttggtgtttccttcctcactgcggcagcacagaccttcccccgagcagtcggcgggtcggatcctgcccagacctgccactggccctcaggtgaccctccattcacctgcatgcaggatggggaagcttccggaagcytcttatgtgtctggcattttatagtttttcagacacttcccacgcatttcctccccacgcctagcccagccatttcacaggagaggaaaccccagctcagaaaggctctggggcttgcccaaggccaggagaatcctagccctccgatgcagctctgtgggtctcagtcacctcacagtacagcaggaattcagttcccatctctgtcacccaccagctgtatgaccctgaccacacgaactggcgggcgtctcagttgccacgtgtgtagaagggatattataataatagcatcttctc

SEQ ID NO: 3383 - DNA, 598 bp, Bovine  MMBT15777
  misc_feature (1)..(7): n is a, c, g, or t
nnnnnnnttcttagggtcaggaaggcaggtgttggagcatgatgctccacccaacaaccgtgaagcatgatgcttcattttgcaaatgaagaaacacgggtggtgaaagcagtttacccagaacaaacagctagaagtagccagtctgggacttgaacccagatcatgtctttttaaattctgtgtttttcccataatgtcaagagcctggaagtggtttcaggagcctggaagtgaaatattgtgctattgaatgttcaggttcttagttgttaaagaagaaaaacacatagaagtgcrtttgaaggattcttccagagcaactcttagagagaaaccagagaattttcgctgtgacttccccgatgacgtgatgcagaacgaggagaaggaacgtgcccagtgcttttaggtttttcaggggagggctttttgacagggaaattaaaatggcctgtcgcctttgtcacctccatccacttggacagagtttgttatcttggccctgggcagctctttttataacagggaatggaaaagtttctaggctatctcatttgtgccacatctgatccagatggctttgcacactccaatt

SEQ ID NO: 3384 - DNA, 600 bp, Bovine  MMBT15779
aacagttttaaagacagcttttattttcctaagcagcataaattgagatttaatctgattatttaggtcagtttttatagatgagatttttataaagccttagcaaaacccatccatcttgctagtcattcacctgaagaatgtagaaatgaaaatttacttcattttatggatgtttctttaggttgctgctcctgctgctaagtcacttcagttgtgtccgactctttgtgaccycatggactgcagcctaccaggctcctccgtccatgagattttccaggcaagagtactggagtsgggtgccatcgccttctccattctttaggttagcttcctttttactgcagatcttgttttttttcaacagcatccaaggaccaactctcccacctgttaaaacaatgctacgtcatcctcatattttatgtaaaactcatctttaaaataaccactagatggcaatgaatcagcataaaaatgtaggtcttgcaggaagacactcattgttagttcaaaggggcaagaagagaaaggagatattacttaacacccttctctcctttggtatctatacagcctgggaaggatcctagaatc

SEQ ID NO: 3385 - DNA, 602 bp, Bovine  MMBT15795
  misc_feature (1)..(2): n is a, c, g, or t
nnggaggaactgtgggaggctcaataaaataagtatgtgcaattgtgaagacagaaaaggaaaaaaaaattacttccatcacagtccacaaagatcgtttccagtcccaaacatgggtccccagagatagcctggaaacaaattattgtcaaagagatgcttaccttttacaacagctcacagtgaaataaaacatatagcttaacatctctcccacactcacctttctcttgctctcttttttccttttattgtctctctctctcgcttccctttctttctgcctgatgctaaacttcrcrttctgagcccttctaccaattattggataagtcgcttgtccttcctaaacctcagtattctcataagcaaaatgaagtgtttatactatattagtactcttttacttctaagtgtgactacaggcacaagtttgctcaatctgctctcatacaattggtcgtattagtgctctaacttatttagttccaakatgatgactgtggtttcagcctgcacaatgaasaagtgaatttgttggtataattatgaggtctcatcttttggaaaagtgagatcaaatggttaagtgaagtcacttg

SEQ ID NO: 3386 - DNA, 600 bp, Bovine  MMBT15861
tctttgtagaagacgctcttacttctttccctctctctccttcccctcttcctttgcttccaccccgtacccccaccggcgcccagcttttgcgtgtcagctttcaggagcatcttccagaaacaacagcaaagagagtcatcaaatgacatggaggaagcactcctttcccccagttacggcctctgcaaagtcccagattcttccaggaggaggagcagaccttgggggcatagctggaggtgcaggtcacacctgagccctggggcccttgtttgaagcccctgtaacttagaactrccagagggtctacagggaggctgtggtcttaggtttatcactttttccagctttattgaggtataactgacaaaaatttaaggtgtataatatatcacttacactgcaaaagtggaaaagtgtgtgtttagagcaggcatctgaattgttggaacccttagctgaacttgaccattcctggtggctgggaaggacctggactggccgggcctctctgagctggcaccccgggccccccggggcccacggtcccttgtcagggttcaggctatcctctcggtgcagctgtcgttaagtgaa

SEQ ID NO: 3387 - DNA, 600 bp, Bovine  MMBT15863
tgtgtctcaggctgactctggtcacatcccatcccccgatgatcccctgcttctgtcctgcacccgatccctggtgggtctgggcctgcagccccctccgccagcaacatggggacccaagctggctggtttggattctgttgtttctcttacctttagatgttcaacagcatgaatattcttattttttatttaaaactaatttggagttctcactctccaaggggcttctaatcaccaaaaagtgcctacggcaagagctgattgacaggccagcgtggccacttctgaagaacaaaytggccattggcagagccacatacaaaggaggacgcccagggctggttatttatgagctattagggaggcgcagtcagcatctgcttcccacatgggcaaaaacacctgtcagacatcaggaggccataaaacacacacatttaacagttactttgtttaaaaagtcattaaaattgaatgtcagctaaaacttgggaaaacatttattcttcaaacccctttgaatcttgctggtgagccagagacaggactgtctctaactcaacaaagacatgagtgtgtaaacaggcaggcgaggcc

SEQ ID NO: 3388 - DNA, 600 bp, Bovine  MMBT15866
aatatacaatgagagagtaaagagacaatgtgttaaaaagagagraagacaaaaagtaagcctgagaatgattaggatgggaacaaagcyatctctgccttggttttgggcagcctggctaagggtactggaaaaatgtgtaatgatttgttggttacagttagagaaaagattggccccattgccacaccggattacatccagaatgcacctggattgcctaaaactcgctcaggtatgttcagaggcctctagggattgggattggatgggccaaggcccactaggggcgagtatgcrtggatggaagcttttggcagggccggagtgggtcagtgtgttgtcaccaggtaaccakaagcgtgtggacccccagggaaaatcatgaggcgggtgcttcggaagatcgctcagaatgaccacgacctgggggacacgtccactgtagtcgacccatccatcatcacccagctcttcagccaccgctgcttgaccatccaatgaataagatcctgcctggaacccaggattaccccctgcttggctttccaaagttttgcccaccctccctgcccccatccaggagtgctgagggccagt

SEQ ID NO: 3389 - DNA, 600 bp, Bovine  MMBT16074
ttttatattatccttcaaatagtgttaccacctactctttactgaaacccaacagacccaactcacagagtaaaactgcaagagtttaaatgcgaaggtcccacccaaacctaaaatagcaatttaattcagggcttgctggttaacactgcattaacacgccactctctgttgggttccctgctccatttgctgggctggatcccatcttctggtgacttacgcagtacgcttactggagagagtgaaagtaaaagtaaaacttgacactgctgaccttcctatatactctgcttggtrtattactgcctctgtgaattttcctgtttatgagcccaaacatcatcatgtgtctttacctgtgcaaaaaatctacctgcttcaaagcattcaacattctgcttatagtatgcaacattattttgaaaacttttagaggaaaccccaaatcatttgcaaacaaattctaaaattactaccaactagaataagcctatcatttgcttagaatgaaggaatgcaaatattttcaagcttaaaacaccaaaacratgaaatacactctacagacacttgtgcaattttattaaaaaaattaaa

SEQ ID NO: 3390 - DNA, 600 bp, Bovine  MMBT16085
gtcttttaatttctccactacccatagaaccttgtaaagtggttctatgtgtagaaaaaatactcagtaaatgtattgatcatgaaaaaaattcaataagtgccttttggaagcttgatttaaattaaacagtgggtgtaaagtaatagtggctagaaaatagaaggtgtttaacagatggagtctgtcacaggcatttataagaaggaagcataaaggaaggaagttagtttcctaggcaattgttaaccccagatcaaataggaggtcgttggatcaccactctaggttatctccacrgtcactgcagtgcagaatcttgcttgagtccaggacactaaagggaaaattaggagaaaacagagttgttctcctagatgtcaacttaacatcaccctcttcttccctggtggctcggacggtaaagcgtctatcaagaatgtgggagacctgggtttgatccctaggttgggaagttccctggagaaggaaatggcaacccactccagtactcttgcctagaaaaccccatggacggaggagcctgrtgtccatggggtcacaaagagttggacacgactgagcgacttcacttcactc

SEQ ID NO: 3391 - DNA, 600 bp, Bovine  MMBT16181
tttagtacatttacttggaattttgaaacaggtaattgctctaatgcaaatcatatgttctgttggcaagtaaagggagacatgaaaatagttaaagaatacaactgaatgttaaacataccaagaggaaatttactctacatcactgaacataatgatcgccacatacaaattaatatgcataaaattttacacagagaataactctttacaatgttcaggtatctttttcctataaggaaatggcatggttggcaaatgatagttgatgctctatttcagtgaatatggtagtctaakttttagagattgacaaaattttaaccttgaagactatgtttcgcaagtttcacagaacatctgcatatatacaattcctcacagaattttagcatacaactgatgaaatgcatataaagagatcatttatcagttttctatgttaaggaaagaaaaaaacaatgttcctaaatgatcttataaattacataaataaaagctgaaatcctttgagagtattgaatcatgattaacaaaatccagggtttttaattttttctcacagcaccaatttgtaaagggtgttatttaacaaagtga

SEQ ID NO: 3392 - DNA, 600 bp, Bovine  MMBT16297
gttaaataggaaaagccagtaaagacaacatgggggagagagagtgaggtacagaagaaactgagagtgtgtagtgttacaaaggctaagggaaagagtagctcaagaaggacagagtggccacctgtgtaaagcactccaagaagtcaaggggataatgaaaaaaattgtcagttgaattccacttcctgtctattagggcaggtgggaagggatgagacccagaggacatggaaaaggattagctttggtcaggagaaaagattcctcctcctttgcaacagaagaatgggtacagayataggtaggtttgtaaattmattgcaaatacattgtgaatttcycacatyagaggcaaaataatctgctaaaactgagaagagaagccaargagtctagaagctttgaagtggtaaccatggagagcaggtggatcagtcaagggaaacttggcaggatgtatgagcagtgttgagctcccagttgaggctggcgatcatgaaactgtagtgataatcatcagcatgttatgtgatatttcccctgcacttctcagctgcctgatgcaatcacagaaaagacagatcgctagatgagcca

SEQ ID NO: 3393 - DNA, 600 bp, Bovine  MMBT16310
catacatcaattctctcaataacgcatccaataatcatgaatattccacctttaatattcaagaacaggctacaggatttgatcaggattcctgacttttcacatgtggctcgtaataacaacatttattcaagggcttaccaagaagaatcaggaatgttctcctttatcccattatttattagacgtgggaaaaggatgtgggagagagtaggctggtaagaaagggatttctttctgcttctaatatcaaagtatctttcctgtcacccaggttgcccacaactgcctctgacctcrgctctcacatgcttatacccttgctcaatgaaggagatacattaccatgtactaacccgaacccaaatgcaacgagagatgcagagttccaaatgcggctgttctcacctcccagtccaggtaatcactggcatcctcaaagttagtaaggagggagacagagcagaaaagtttaggcagctcctctcgggtcagggggggaaatcggctgtccttaagtgcactggaggggacagaaaacatgagtgaggctgctccggaattgggagccaatatcataagcctgaaagtttacggctc

SEQ ID NO: 3394 - DNA, 600 bp, Bovine  MMBT16328
tggtttttgtctcacacatattaaattttacaaaacagaaagaaacaatagagcttattaggaaaaacttgttttgaatagtaaattaagcataatggaaataggcacatgttttagcacggttttccccccttttttaccaattgaacatttacatctttttcaaagtgctgtgattttccccttaagctggcaccacacactttcaataaatgagacttayatcacttgtatttactgagagaaatcattgtaatactgtaggttccaaatgcacagctttctgtaaaaaagtagttktaagtagtcacccctaattgtattaatcaagtcattgtggcattctaagaatccaaagaactacctaatttcaaagacagtgtaaaatcaactgtcagttctgactaatttcaaatgatgccctgttcttgagactggacacctgtacatttaaaggtgcacctgactgcatggtttgtttttgagagatgttccccaggtggaggcatctacaaagtcaatatattttctttataactggtgtcaagttgatgtatatattaaaaaatcttggaaaatgatctcaaaaaggaagtaaca

SEQ ID NO: 3395 - DNA, 598 bp, Bovine  MMBT16394
  misc_feature (1)..(60): n is a, c, g, or t
nnnnnnnnnnnnnnnnnnnnnnnnnnnnnnnnnnnnnnnnnnnnnnnnnnnnnnnnnnnnattagcctacgttcctgtgaaatggaaactacctttatttagcgattagctctttctttacgtagcagttagctttggttattttaatttacagaaacgtcaatgatgataatctgccatttctcccttgtatgtacattatgtaccatctggtctttaacctgaaaatgtctacactatgaatcatctttgttaggtcaagcaatggggataaaaatgcacagtaacttactgcagaaycgaagaaaggcgttcaaagagaggtaccttcagcatcacactttgagaagtagtgagagtgcaaatacttttggtgacctaatccccattccatcccctttaacttayaccaacaatgttaaaaataatttttaaacaagaacgcatataaacctctgaagaaaccagaagaaawagttcaattcttcccctatcgcatgttttcatgtagttttatttcacatttggaggtgatattattccattaaacttagtagcatttggtcttatactamgayaagatataaaagtagaaggg

SEQ ID NO: 3396 - DNA, 598 bp, Bovine  MMBT16403
  misc_feature (1)..(85): n is a, c, g, or t
nnnnnnnnnnnnnnnnnnnnnnnnnnnnnnnnnnnnnnnnnnnnnnnnnnnnnnnnnnnnnnnnnnnnnnnnnnnnnnnnnnnnnccttgacgtgccccttttcctatttggaaccagtctattgttccatgtccagttctaactgttgcttcctgacctgcatacatgtttctcaaagaggcaggtcaggtggtcttttatctttttaatatcctttaatattagaggagcaaaaactacaagtatatttttggcgatttggtgttatatggggctatttcatttgaatatgtttttcsttgccaccaaaaaaggatcaaatatttaatttaggagaactgcaaatcttagtgttgatgcagattaaatcatgaaacttttcctgcagttaacgaaaagttttttttgttgttgttygttttttaagaaatagcttttgattgcatttcctyttcttttccatttgaggaaactctcggattaaaaaggatgaaagtcagaaaggacctacttagctatctttagtattatgtttttattagtgtaaattaattagggtaaaatcagataattcaaacagcttttaaagattttata

SEQ ID NO: 3397 - DNA, 598 bp, Bovine  MMBT16514
  misc_feature (1)..(104): n is a, c, g, or t
nnnnnnnnnnnnnnnnnnnnnnnnnnnnnnnnnnnnnnnnnnnnnnnnnnnnnnnnnnnnnnnnnnnnnnnnnnnnnnnnnnnnnnnnnnnnnnnnnnnnnnnntgaagcttgtatgtgagcatacagtaaacacatgctgctctataaatgttggggctataagttgcctacttggctgggtttctttttgttcccattttaagagtcgagctgaaatgatttcttgtccattgtctcatggctggagcagagttttttgtctaggcatgagcasttttcagttagaatcattcatctrctttctttgaagagtctagacaccctgcacctctcacctagaacctatcattgactcttttataacattcatttcccatcaggaaactagaaagctttcaccaaattccatcaaggatgcaggatgcctttattctcttcaccctcctgttttccaggttccaagctgcagtagagactattctgctcaataatacatgttctcccctgagccactaattcccagaaccctgttgcagctaagagtggccatgggctaggttctggccataggaacatgaacaggagtraagtctatg

SEQ ID NO: 3398 - DNA, 600 bp, Bovine  MMBT16583
tgagctgcccagcaatattttcagaggtatggatcaaactttataaccattgagtagcaggcagaaataaaatcactgtcatgtaaatattcagtaaatacttactgttaaatgagtggtgtgacagattatatataataaacaatttcacaagattctatatctagccatagaataaatttctcattacattagaaaaaattaaaagtgggaacaatatttgaacacaaaaatcctaatgaacatttaactgcattttatcttgtccaggtacttttgtaagcagtggactaaaatatrgcacatttggagtaaatatsaataagtaggactatgctgaattatttataataataaagttaatatcttataatttttctattctcataatactttcaaggttattcatttttataccagcaacctaaagcttctgttcttgcatataataaacattatgtctgagctatcagagtttagtcatggcctttaacagtaatttctacttatatggctcagaggtttaagtgtctgcctgcaatgcgggagacccagggttcgatccctgggttaggaagatcccctggagaaggaaatggc

SEQ ID NO: 3399 - DNA, 600 bp, Bovine  MMBT16671
tttaaaatatatttgtttatttggccgcactggtcttagttgagatgctcaggatccccgaccttcattgcagcgtgcagggttctttagttgtggcctgtgggatttagctccctgaccagagattgagcctaggccccttgcattgagagcgtgaaggtttagccactggaccactgtggaagtcccaaaaagaactactgtaacacctgggtgggaaatacaccyggaatacgaagcgtgttccactgtgagcctgaggatggaggtggcgtcttttgttggaaggcgtttaatagygccccgtagcccggagryggcaccgtaccrtgcggctctgtgtgcttgtactctgttacctcccaagcgctgacactcaccttcaccaccttcagtctcagcattttattcttagagtctagaatgtcaggcacatttctctcattgcgtgcaaacctccaaattatgctggatcctgggagcagtggggaaaagattgtctggcgccttcatttcagaacccctgtgtggacacacagaggtgcacctccgttcacagtgcacctcgggtgggcgtcttgtggcagaagtaagggggag

SEQ ID NO: 3400 - DNA, 600 bp, Bovine  MMBT16702
aggactctggaaactaatgagagccaggacttctattacagtcagctccttttagcactgggagcctagtctaactccaagcacatcagcccagcaacccccgccatctgggctccttcaggcccctcccccattcctactcctttttttctctaaacaaaagacttcctacatccaacaccttttgcaccttattctgtctcctcttctactttgctggcaaactggacttactaacaaatttacattgcctgttggaacagcttcttctgcctccaaagttttctccgcatagacgtrgagcatcctccattgctcaaggcatcaccagagagtctgttgcgccaggctaaacaaatctacaagcacactccctgtcagattcttgtcagaaggacagagtgaaatcttgtttttgagtgagcgtcaaaacaaatctggaaaaagatgccactagcgtcttgtggccacagttcaaagccccagaagggccgcacagggctcaaagcagcaccccgagctcttgagcaccaagcacaggcagttgtgtctttgctcacttcatgctaaccgcagggagacagcaacactgagctctgt

SEQ ID NO: 3401 - DNA, 600 bp, Bovine  MMBT16715
ggaaatggcaatccagtccagtattcttgcctggaaaatttcatggacagagaagcctggcaggctacagtcccatggggtcacgaaagagtcaggcatgactgagcgactgagcacaagcataacatctaccccagaggctgcattgggtccattggattctctctcagagaacactacaattggtacaatcagatcaatcaaattcagttactagacttgtaaaatgaatgatctcaaatatagaggtcactttgaggggtaagtcaagatgagtctgtctctgcaaataagcagagyatattctctaaagacaaagcagaaaacatgcagggagagagaaggtgtatacacacacagccccagagaaaaacagatggagagggtgattgcctttattatagatgacttctcaggtcctgtttccaattccacataaggcatggctacagtttctgytcttggctttcgacagatggccattcttatttgcttagattagttgtagtggatttcagtttcttgcaaccaaacaattgctggaaaagacagccacctagggataaacttcagtcatagaggatggttagcatagtgcag

SEQ ID NO: 3402 - DNA, 598 bp, Bovine  MMBT17324
  misc_feature (1)..(40): n is a, c, g, or t
nnnnnnnnnnnnnnnnnnnnnnnnnnnnnnnnnnnnnnnngtggtacgtcctcagtgtttgtttagtcttcatattatgattcctgtccaagagctatttggataaaaatgaaaaggtcccaaacaaggtccttgaactcagatcactcccagggagcatatgatgcattgaaggtatgattatatcagtacttaaaggcatatgccaaaggaatggccygacaagaacccaaaacatggcaattcagccacatctgttcttgaaagcgcctgcagaatgaactttttaagaggtatcayctgtcaagattcctcgactgtccctctggaagctgtctctctggaaacktattccaaaggcaagcccaaggacctcagcattccagtctttgataaataagcccctctctctgatagcctcagcaacagataaatctgtccacccaaggacattttccaagcgggacgggctgtttmaactccttaccagattgcagctggcacccgccacgttgatttttccctctccttataatcataatgggatctcagcaataaagatggatttgttaatttccatccccttctcactttctct

SEQ ID NO: 3403 - DNA, 561 bp, Bovine  MMBT17356
  misc_feature (1)..(1): n is a, c, g, or t
nttgaccacactggtacattgcactttctctcttctcctctgctctctgctcctctcttcttctcttgatatgtgtacgcagttcttaacactcaataacaatggctgccacttygctgcataaccttaggaaacgtgagaagagaggcagcagcgctggggtttcttctatctaccatgagtccaaaggcctatcattaccatcaaactcttctcagaaacaagtcacttttttttttaaaggtgagctccttaagggaagaaactaaactttacttacctggtgaatagatatgaaagrtattaaacygaaatccatgcgttgccatcaatcaatagctatgtgtagaaaagtaaattattttmaagagctagctgaatccaggagcagctttaattattaaaactaatggaagagaaaatacttgcaaaggctcaaatggaagctctactcagtctggttgggtgggaggggggaaggtaaagcttctcatgcccaagtcttcataacacatcatccatttccacatgaaaaccaagactgccagatacatccacaca

SEQ ID NO: 3404 - DNA, 600 bp, Bovine  MMBT17368
gggacacagagagatggagacttggtagcaattgtcagtgtgagatggtggacacatatgacctcactgcttacctgacatcattcagttcgtaatagacatttctgctttcgtctttgatgtaaatggcgacactgggcgactccagcattttcatggtgagctgctgtggaaaggcacttacgaagagagcacggattgtgtctgcacttgtaatctcgttcggcatcctgagctgcttggtttcatctccgtactggagataaagaacccctgcacacaagatggacacagttatcrgccacagctcaagactcacaagacacacagcacaagctaagccacttccatccraccgcaggcaggaatgtgccagatgcgcttgcaaaaaagcatgtcacaagagacgtgaccttggaattttcaagaaacacactctctggttatgatgtaaataccttattctttagagtcaaggcaggtgttacagaggctcctttttaactatattaaaaaccaaaggacaagaagctaacccttggtagcctaaagcaaaacacaatatttaattcccttgaaaggtgtatttaggaatctgac

SEQ ID NO: 3405 - DNA, 600 bp, Bovine  MMBT17370
ttactgaccttaaattataacttgtagatatctttctgttctgtcattgaggcaggccagttctagttaaatatgtgctgaggtcaaagctgaatcacatctatacccaaatatagctcatctttctgaaaactgtggcctcttttcctggctgttgtgtgtacaacattggagttatttaggcttgtgaagagaagcagcctcctcttagagtaggtcagtgaaaaacactggcttttaaaataaggaagaaagtaggagtgtgcaaattaaataaagataagttgttaaaggttaacyagtttctcctggtggtgttataagcaaatggcacagtcattctctagttctacaatatttagatgttttatttcagttacatagtgggagctgagaacaaatgtgggtaaaccagatacaaaataccttcacagaacataagctaaaacctattcccttaatccttcagtgttgaatcatatgttctgtctggaccataaatgtgaagaatgccaaagtatctgggctattgccatggtcttgtacacgcacacacgcacgcgcacgcacacacacacaaggaaaagcacatccatgatg

SEQ ID NO: 3406 - DNA, 598 bp, Bovine  MMBT17491
  misc_feature (1)..(69): n is a, c, g, or t
nnnnnnnnnnnnnnnnnnnnnnnnnnnnnnnnnnnnnnnnnnnnnnnnnnnnnnnnnnnnnnnnnnnnnagccccaggaacccaggtatctcatcaattaatcatgcctcatttccttttttaaaaaatatatggtcattaagctgatgattcaaggaatctatgagtgctttatgagcacctaccacgtgcaacatattgggcaagtgccagactgccaggggtcagaatgccagaggcggtgtaacttgatttcagtgaggccttagacaaagcatcccacgattcactgataggtcrggaaggtgagtggtataaaagtataatgacatgattttgcagctgactaaagagccatatccacagaggattgataaataactggtttccgttagcaggaagttttccatcagactcatccttcttataccttgctttagtcagcatttttatatatgacttraaggaagaagataagcacaaagtttagagtcatagctaggagatgaaagaggcaagatgaaaaacaatctgaasagcatgaaattcagcaaggatcattattcagttgtgtattttgtttttttaaaatcggyag

SEQ ID NO: 3407 - DNA, 515 bp, Bovine  MMBT17563
acacgaagtaggaaagtaaagaactttgggttttttgtttgttttattttaaatggtcatagagagtttacatttgctggccttacatcaacaaagattatccaaatttactcatggagatcaaccattatctattaatatttttaatactgtcctggtcattggattataaagaagaattacctgaaattctctcaattcttttgtacatatacacataaatttcaatactaagatcatgcaagtcttgtggagactcctatgctctcatgtaaagaacaggccttggaggagaagctraagatttctttttgtggcctccagcctatcacttacacagctagtgattgctccctgatgtagcagattcagctgaaagcctgagatatggagaaagtgatgtctaaccctttctccatatcttctgataagacagaagttttatcagaagtgattttgtgctgctctgctatttatcatacacataaaaaatataaagttaacctaaatctcat

SEQ ID NO: 3408 - DNA, 600 bp, Bovine  MMBT17593
acagcagccaggagggcacgggccccctcccggggcccctgggtcaggaaggaggagatgggtgcacgcctgccaccaaatgaggctgggggccaaaggaaggaaccagcagagaacaggaggaggagaaaggacccctaatccccctacaaggccacaggaaaacggaaacaggtggtcagccatgaaggatgaaaccaaagctcttccatccacccgaagacacatgaggctggcccacagggcccaaagtgctcagccagggcactctggtccagaccaaccccaagrgatggtggracagatccctgctgcgtcatcagtgacggtcatagaaggcacttagcaaggtgcctgcatagagcgggcaagaaacgtctgctccatcccagctcctccaggagtgcccgggcccggcctcacctaaagtgttcacagtgaccacctcactgaaggcgctggtgcccagtttgttctgggccaggacactgaactggtacgctgtctcgggctccagggcttccaccagcagccagctgggtccyggaggcacgggcagggacagccagtcatggggcccaaactgtgcccgcttcatcc

SEQ ID NO: 3409 - DNA, 600 bp, Bovine  MMBT18004
aacaatagttgtggtgtgaatccatcaaattcctgcatccagattaaagtatccacacagtctacctttgggaactgtgtgccttttaaatccttttttaaaattacacagagaaagtcttttctatcaagttttaaacgtaaggctcttacaataatacaatccaatatatgtggtcacatttcactccctcaaatagattagcagtacagtggtttacatactttttggtctggaagcataaggataggtgaaagaacttcaagtctctgacagctttgtaattctcttttatctacrtagtttcttctcaaatttcctctcaattcctctacctattcctaagtatcattcagataggtcagaaactgtttatggatccactcagctcccaaaatcagtttcatgattatatccagtaaacaaaatagactgactcaatctcaagcagttcctcatcacaggaagttcatcctagaactgcagctacaaaagcattcttctaagcgatccccaactactaaacagcaacacaaagttaaactaaatcctactgacaaaaggctccgggtggattcattctgatcagccccaggagtc

SEQ ID NO: 3410 - DNA, 600 bp, Bovine  MMBT18014
cgagaagttcacccgtaagtgtttcctgtcatttcactgcaactttcttgataggattttaaaagtctaatgtttttcttcccttctctctgggactgaaaaggaatatggcagagcagatctcagaaagactattgtctctgaaacatggcaggaattccaatagcttaggaaaaagcagtggaagggggaaagtctttggacaagactcccaggtggtcagatgcctctgacctctgtcctcaaggccttagtaataatgacctgtcacatgcgcatctgcgtctctgctgcccagarcctggggcaggagccactgagtcacagtgatgccaactcaatccaagtgccccttttcacaatgccttagcttctctgctgccccatttctgcctcccacaaatggaacaagagtatctttaagtcagctgggacattccaggagacaggatgtatttcctaacctccattcatgtcccactccctgggtatgcctactgtttgggaggattgccttctaattggattttttttttccttcagttatccaggcatctgatgttggtaaggaaatttgtgtttctccctacatgttggcag

SEQ ID NO: 3411 - DNA, 465 bp, Bovine  MMBT18054
tcagactctggtgcgcacctctgtgaaatggggacacagggtctccctggggcagcatgtgccaaagtgtttaaaatggtcagtgttcttaacaaaggcggcagttctgtggccaaatgacttgggagattgttgcccaagacaacaccccaagtccgatcctttggaaattccaaggccacacctgggcagagcccagcaagaacaggaagccctgcagtccctttaggggagrccgggtgggggttaagttacacatgggcctgggcctctttcccctcctgagtgtccagactggcrtcctcaggcttcaccccacgcagggaggacagcatggagcttggcaaaggcctcccaagacaaggagtgagctcaccgtctccgatggcagctgggccatgatctacaaagacagcgtgctccgtgcttccagcagagccagagctctgtgccccaatgtcgggg

SEQ ID NO: 3412 - DNA, 600 bp, Bovine  MMBT18071
gtaatataaaattacatatgccagcttctttgaaatgtttggcaaatgtctagccaaaggctttaattacagttcactctcaattataaaaattaaaaggaagtatacttttaaaaaaatgtatatgttactttgaaattctctgatttaatattccaggaatttacaaatcctgacaacaaaaattataaaaactttgaatataagagttaagatttttcctattagaaattaaaactctttatcaaactgattaaaataccagcctaaaatcataattttacctctaactacgccttyggagaagcctaacaacatataatttaaaggggtaagattcactttagtagacacgttaccctcacaatctgggtgtgctgccgctccacggcaaggtggagggccgtctgctggttcacgttctggatgtccaggtttgcgtttccctgaaagamgaacaaggcttacagttaaatgtgacaagagggaagcacataatctagctctctatgaggaagccataacactggatgctgctgagcacgccccctccaagggctagaccttgtaatatatggtaacagatgtgaatagcaggaa

SEQ ID NO: 3413 - DNA, 600 bp, Bovine  MMBT18089
ctgggaagtgctggtcagcactgatctctgtggtaaattttctcctctttgccttccatgcacctgttgctgtactcccttctgagggacataccttaaactttaaacaaaattaaggataataggataaaatataaaataaaaacatcatgagatccttcccaggaaacaatattcttgacaccaaatcataacattatggacttcagttgtttatttctttccagggcagccccttgttttatatcccaaatagcatttccctaaatgcatgaaacaaaatgccattatgatttctarcattcatttccagtgaagtttctgttaggttcaactataactatgatggaaggggtggatgtagagcactgtgtcttcatacatcaaacaaaggattataggagttatatctacatagaacaggaaactaactggaggggtaatgtcaggttgactttaaaatgtcacagaaaatgatccgaattttcaccttttttttcacaactcattttattacaaatctgcagagttaggaagtttctacctttgaccaactttatttttcttactgtcttttggtcagaactaaagagacaagac

SEQ ID NO: 3414 - DNA, 600 bp, Bovine  MMBT18168
tagatggcatcactgactcaatggacataagtttgagtaaactccgggagttggtgaaggacagggaggcctagcatggggtcgcagagttgaacacaactgagcgcctgaaatgaacttaactgaagtataatcagtaaatattagctcataggagatcataattttagacttaattagaggtggtttgttgttatacagaggctatttagagtcagtaaatgaattcagtttaattttttattgtcagtctagaaagttgggctctggcctttatcacctgccagaattagggaagarattttaagattagttacatgagactgagtttactctttaaaaggtgatgttggagaagctgaaagggcagtgaagctgaaaggaaaagaagtggctaattagctgagattgagggatagcagagcctggtgggcttgccatctatggggttgcagagtcggacacgactgaagcgacttagcagcagcagcaggatcacttggagtgggtgggcaggaaccaggcaggactcctcacctgatagcccaaactctcacctgcttactcaattttctgaacattggaagcagcacaagtgcc

SEQ ID NO: 3415 - DNA, 600 bp, Bovine  MMBT18348
gaggacactccctctctgggcatgcaaatcgcggggggaacttcagccaatagtccccggcttgtcaatcaagggcagcagttcctggaggccagaaaggcgtgggggcgctggggcacggtcstgatttcctgctccgcacgtgggcacgtccagacccggcctgaggagccggagctgggacttgcctcggaagaccgcggctaggctctacctggtccggctccaggagcatggccccggcctctctcctcacagcaccagtcaggacccaagtccacaggttgaaaatgtgagagrgaaaattagattaaataaataactctgcatttatatccgaatagagcatagcgagtaaataagtatgcattcatatccgaatggagaataagtatgcatttatatccgaatagcaagtccgcgctacaaagcaaccataggcgcgatccccaaatgccagctttgccaccagttcatcggagacttggattcagcaatatttgcaaggaggaagaaaccccactttctctgcggagggaagggatttcaagctctttgtaaggcggtctcaagctaagaagcaaatgtgggaactcggtg

SEQ ID NO: 3416 - DNA, 598 bp, Bovine  MMBT18693
  misc_feature (1)..(9): n is a, c, g, or t
nnnnnnnnntatcaaattaggtcaagttgaatccttatccagtaaattaaagggctctccttaaaatggctatcaaaggagtcaatgcagtaaaattacactaaatggtataaaaaaatgatcctaatattaagagctttttcagtccttttaaagcaaaatcttaatatagagcaggttttagtaacaaaatcttccctcctccgtccatctccctaaataaaagtaacgaacacaacctctgaagaccatcaacaaattttaagtaccactgaactgtaagatactaaaaggaaagcrtttgtacaggatcacagaaggcagtgtgtgtttatgcacagcacactaccacaggagatttacatgtccacgaatacaacttcaaacaaagaaatataaatatttgctactattacccctattgctaaaagcaagacttgactttaggcaacagactgattctaaatgatcaaaatataagattggtttgggtgatcatttttaaagtgaaactcaaaaacacaatatgaaaatactctgatataaaaatatccatgtaacagcaatacaaggtcaaaaaattcaacttaaatgtagc

SEQ ID NO: 3417 - DNA, 600 bp, Bovine  MMBT18695
acatttaaactgctgcctgcctgtgcagcagctgaggaaccgtggatttcatattacagactaaaaccccagtgaaacggctcagtccttcctgcagctgccaggcaacgacgagagagttaaatcctgctcytttccaataccatcgaagcactccattctagctctggctgctttacattgcagctcagggttcttactagaaatatggatactgaaaagagaatagagcactgcattgtccggccaggaagacagcagatgtaaaaagcttcaatgcatcaactgtcagaagagtcracagtgctccaaacagaacgaaaccaccacagctcttttgttaaagagaaaatgaaaggaaagacctcagaagattagcacccatatgaacaaggaagggtactcgaagacaagcagacagatggacactttggacatgtgataagcaatcgcaggaggcagactgttgggggaggtgtgtgtgttcgatagcgtctttttgctggagcgatggcgtgccaaaagtatcttcagtgggcataatcctcgccacataaatggcctgaccaaggaaggtatgtcgatatcttgtgtgtgata

SEQ ID NO: 3418 - DNA, 602 bp, Bovine  MMBT18779
  misc_feature (1)..(2): n is a, c, g, or t
nnagtgatgcggstttgatccctgggttggaaagatcccctggaagaagaaatggcaacccacttcagtattcttgcctggagaatccccacagacagagaagcctggtgggctatagtccatagggctgcmaagagtgggatggacatgactgagcacgaacacacacacactgcacaatccttcatctcagargtcacagtgtacacacagacctcacctggagtctcagatgtgcctggaccatgctatcctcatcctctatcctccatactctctayaccayacataggctcccaccygcctgtgaagtcttatgcctcagtttcttccactgcacccgacaaacatcccacccataggtcctcacaggacaacacacacggcccctttggagcatcaacagccagggactgtgtcattaagctgctgacaggtggtccctaccagcagctaccctccccccacccagttctgcatgcccagccttctgccagagccagacagtaaagcctgcctcctggcaggcctggccaaaattgtcaggaggttgatgatgtgtctgaaaaggggggaaaaaaaaagacatgatttggaaaata

SEQ ID NO: 3419 - DNA, 600 bp, Bovine  MMBT19076
ccatggagctattattccgtggagaaatcatctcagttgacatggtcagagaaattagaaattgtcaaataggagttctcctatgatcaagactgtaaaacctgctagaaaaattaataggctcttccaagataacttactaaaatgtattcttaactgcactactgtctttttctaccatgattcattgggtatagactatagttttcttcatttgtcccttgtagagattacaatcagcatttggtttagaagatagttttacaaatgtttgccttaaaaattgctcagtgcttaggragctttctagatggtgttgctagcctttttctagccgagtcatctttttttcttactaactcatatcagtraatttgttcacaaaagtagaaacattgcccatctgtaataaacatccctgagtgcagtagccatcaccagagaagagcacttttatagatattgtgctattttcaggcttgctgaccttttgcctctttattggttgctatagtgatgatctgagctctgcttaatagagctttactaaaatgaaagcaatcaataagctttttaactataatgtttatattgatagtt

SEQ ID NO: 3420 - DNA, 600 bp, Bovine  MMBT19160
tccgtgcgctttgcaggagacctacaaactgccgcaccggctcatcgagaaaaagagacgtgaccggattaacgagtgcatcgcccagctgaaggatctcctccccgaacatctcaaacttacagtaagtgagaagctggcccctctccaaaccagctcctctgcccaaagggcgggcgagggtcacccgccgcctgcaggctctgccaggaactgcagaccagatggctggatcctagctagtggctggctctgtttgggggtacccttctccagtctcagaattttctggcaacctcstgcaaatgagataagaatcatttgtacttgtccagcttggcaccaacaccagccggccttcctttgctagagtttaaggtgattctcagggttctccttttcccacattgagcaaatccagcaacccactttttttttttaacccccttccccgaatccctttttaaaataagagracttgttttgatgtgtcccttttttttttttacgtcctgtcctttcttggcgatcctcaatagattaytagcgtggcagcctttsgttggggaaagaagaaaaaagtagaatttaggagaaaaa

SEQ ID NO: 3421 - DNA, 600 bp, Bovine  MMBT19161
tggggatggcaagaaggcctgcttccagggcagatcaaccccctgcctttggctttcctgatcccccatcatgacagtcctgcgtctaaggacaaatccagtttctgtgttgtctgagaactcttcagaaacctcaaccgygagcacagaaaacaggactttgcctccattccacacacagcgctgggaagaactgcctggggacaagatttctgaagcatctgcaggagcctccacactctctgtcctctaatcacccccaggacgcagacccggggctgctgcctcttctgtcacagrctcatagatggttttgtgagggaaagaaaaattctctgggaggactagactttcctcccaaaacaagtttaaaagttggggataatctacaatccattcccagtgccaagcccgcaggagcagcagaagcaaacaaccacaaagtcactgtctctggattaggagagtgcagggagaggcctcagagggcaaggcggtaaagccgaagatttctttggcttctaagaaaataggcaatgtgaagaagaagctgcaagaggaaagaaacagtgacagaagccaagagcctaaacccaaggg

SEQ ID NO: 3422 - DNA, 600 bp, Bovine  MMBT19164
acagggaagcctggtgtgctgcatgcagttcgtggggttgcaagagtcagaaatgagttcgcaactgaacaaaaataatacaggcgtgtgtgtgtgtgtgtgtgtgtgtgtgtgtgcgtgtgtatgtaaagtcccctaaggcttggggaagcacaaagcacgacactaggattagacacacctgccttaagttaccacccaggcactagcaagctccccttcctccgttcaatgccggagagtgggtaacgtacaggagaaaacgagatgaaggaggtaaagtgcttgggaaagccctckccttggtatgcgtgttataaaagatagcttttgccctcctcactgccaacagcatcgtcatcttatgcgcaaacatgagtctgaatgaccacgagaaactgtgcgatcaagttaagctcacggagtccttcaagtatccccaagaggtttgctgcatgggaaagagagggaaagccttagccagtatcacactgcaggtggacatttttagataccaatttgatggtagaccaaagacaaaacaagttgctaaaataacacactagcaacccaaatgcatctgttagagtctcaacctgc

SEQ ID NO: 3423 - DNA, 600 bp, Bovine  MMBT19354
tatggcagatgaggaaactgaggctttagagagatttaagttagctggccttgttcacaaaagttaagtggtcaagttgggatttaaacaygggaggcttggctccaacattggttttcttaacacacagcacaacacagccactttctttgagaaaagtatcaggaaaaaaaracrtttgagaaatcatggagaaattgtataaagtgaattaagagtatagggttaaaaagccaggctttggcatccaagtcttataatttcatcaccttaggaaagttaccacctccctgattcttrgtttattgtctataaaaatgawataaaagctaccttgcaaattagtagcaagaaaaacagatgattaaggaaaaccttggtagcagctcaataaatgatagtcattattattactcttttgaagttttgcagacaggtcaaagactccagtcatacaacttccctgttttacttgtttttaacctaacagtcctaattaatgaagaaaataaaatgttgataaaggaaaattgaaacaaaagaattgatagtaatgagggctatcaggtgcatttttatatcaacatagccagaagaggg

SEQ ID NO: 3424 - DNA, 600 bp, Bovine  MMBT19528
gcagaggatttttaaatatagcccccaaaacagactgttagactttcagctgtttctatgaacaagtaatgtgtgaaacagacatattcatcccattctattataaaatctctccacagccttgatcctcattctgttgtacatacccacccctggggtaacaaacagggatcacatggggtcacgtggggtcagaaacgggatgaagacgagggatggagtgacrttaggcatggtctggcagacaacctctaggtgaccagaagttacacgcttactacacttactcatctcagagtsggccagacatcattcttagcaaagtgctcgcttattctctgagaattcatttatatcttaaacgtctactaaattgacagtgggcacactgttctttggaaggactgatgctaaagctgaaactccaatactttggccacctcacgtgaagagttgactcattggaaaagmctctgatgctgggagggattgggggcaggaggagaaggggacgacagaggatgagatgaatggatggcatcactgactcgatgggtttgggtgaactccgggagttggtgatggacaaggaggcctgga

SEQ ID NO: 3425 - DNA, 600 bp, Bovine  MMBT19674
atatgtagtcaatcgttcaagaagttcttttttaaaaatatattttttaatttaataaaatagtacattttaagtatataaaatttccactttaaaaagttaaaaaatatatgactttggagtaactgagttttccagcagtctatcatgaaaattttcaatatacaacaaaggataaagaattgaacaatatatattcatataccctactaactagattttaccatcagaatttatttctactttgccctagcacctattcattaatctattttaatttttcatcacgttatcactctyttcagacatcaaactatgcacttttagaagccttttttcattcaatgtaactctgagattcatgcatattattctgcatcatttttattggcacaaagtttattgaaaaatgggaggaaaataaagcattttctctccagttttttaaaagataagttttgtttttctaattataaaaatgtttattttagaaaatttcaaagatatagaaaggatgataacatcacctacaattccatcaccccaaagtaactgccatgttttttggtctgtactcttcagtccttttactgagctttt

SEQ ID NO: 3426 - DNA, 598 bp, Bovine  MMBT19706
  misc_feature (1)..(38): n is a, c, g, or t
nnnnnnnnnnnnnnnnnnnnnnnnnnnnnnnnnnnnnnaggagcctggagggctacagtccacggctgaacaagcacgcacgttactcctggagcacgactgttctagtaagtttcctctttcttcaaatattttggagacttttgccattttctgttcacgtactctgagtagacctcatgactactatccactctgtaggatgctcacctggtacatttcacctgcactctatctgatttattgttatcatatttcagaatgtggagtaggtggatgaacacaggaagcggctgatcrtttgtgtggtctccagtccgctgagcaaagccagagaacgttggtcagaaagaaacaacaggggcagatggagggcattggctaaggaatgtctaaytctttgatattaaatgagcaacttgaaatatacatcgattacaaattaacgtgcatttcgatgataatttccgacccactggctgatatcgctaccatccacctgrgatattgctaccccwgtggtgtacatgtttgtttaaaactagtttcttctccttcctgtcaaaagtcagtaaaagggatgggaggagtgggtggg

SEQ ID NO: 3427 - DNA, 600 bp, Bovine  MMBT19887
aatcccataagagcacaaaagaggttttttcatgaaagtagaatttcagaagtaaattggaattgatctgctcttagaaatgaaaagtgtttgatccagaggtttactattatatttaaatcaaacagtgcttgaagaagcagtagaaartctatcaaaagcagaggaagattcccttccctttgagggttatgactcctttctggcaggaaaacagcaatcagccrgggagccactatgtacctgctcctttttgtgaatgaagagaggctgcaaagccaggaaccagagcagagagayggctagttgctttcttcttccttcctgttatctagaagcctcttccttgtagtatcagggcaagaagatggacaggcaggtggtaggccagaaaggctgtggctggcatgagatacccacagagcagcagttccctgccagtacttggggaaacctgagagttracgtcaaacttcctgcaatcctaggaagggtctgattccaagaaaacaggctgtgatgagtaagaaaccagtgttctgatcaaatatgcctgcagattaaatagtgaattgtgccaagatttgtgagaaaggtgac

SEQ ID NO: 3428 - DNA, 600 bp, Bovine  MMBT19913
acctgcccctcccctgaccatgattgttccatgttctcagcctcagggtccctcaatggttggacttagagactcatcagggctaactaggtgaatggattaaagaatcacacacacatacacacggatacacacacatgcacacaygctcataactggtctctctgtaatcttrtaggttaaaaaaaaaacaaacacactttcaatccatcttttcatttgggcttttttggtttcttgtcctctgagatgttttgagaggacacggtgatgctcagcatctcttgagctttttgaggygggaggataggcttggagggccaaaaagtcatctctctgggatggattgtgtatttctgggtctgaaactgtaaagtcggtaagaagtgagccactgagatgaagaagccccacccggtaggaggcaagacgtcacagggccctctcctatagcacgtggtctgtctgcagtggctgaggtggggggcatctttggctaatctggtgacccatgaagatccctcgaaggagagggtgggttgtggagaatacaaagggcagaggggcaccaggaaagctttgggagctgaggtggctctg

SEQ ID NO: 3429 - DNA, 600 bp, Bovine  MMBT19955
acccagctgcttcattctttctgaaactattagtaattgcccttcattcttccccagtagcatattggataccttctgacctgggaggctgatctcccggtgtcakatctttttgccttttcatactgttcatggggttctcttggcaagaatactgccaagagatgggttggctgttccctcctccagtgracygcrttttgtcagaattctccacyatgacctctacatcttgtatggccctacatggcatggcttcttggagttacacaagccctttcactacgacaaggctgtgayccatgaaggggatttagttatcatagtagtttttaatcattaaaatgaatgtatgtgtaaggtttcttctttacttatttcatatttttaatagaaaaaacttagaagactgctaaaatacatgtttttccgagactacaaatcaaagattgtcaaaggcattgacgaggatgatcttctggaaggtaacttaaagcactaaactaaaacttatgtgactcctgtatgctgatgacacatttatatagaatcaaagtagataactcccatcagagttcaatatatgtccttctattaaat

SEQ ID NO: 3430 - DNA, 600 bp, Bovine  MMBT19957
cagaaaaaatactatataaaatactacataaatagaaaaatactatataaatactgtaaatactgcataaaatatatataaatactatacaaaaaaggaaaatacctcacaaataactttgaagtctagaaaagaaaaaaagcagtattttatatatttaaaactagagacttttcaataaatatttgctatcaaggaaagaagctaagatttttaaggctcatgtgtgggtaatacaatatctagctaatacctaaactcaatttacatccaagagcttagaaataagagttatactaygttaaactatagtgaacaaatatcatgttttttaatgaattttatctcactgatttatgtatgactgttatggaatgatgttccgatttttttttttaaatgtgtttcctcctttctcaagttacaaatctaaggttctgcaattgtatttaaaatcttttagaggtagatacacacaaaagaaatacctcaacacaaatcaccatgacacacaacgaacccaaaaggaataggcatatatcactaacggcaagatgttcagtttgataaaacaaaatctgacctttaatattttttaaa

SEQ ID NO: 3431 - DNA, 600 bp, Bovine  MMBT19959
agtaccttacacattgcactttactctcctaatggtacttttatgtgaaatgcactttattgacaattatgtcttatcattcagtagaaaaagacaaattttacacctatgtcccagaatacttgttattccttgttctaatggaatgaaatttctaataattcctgagtaatrtagaaatatatctccttacattgggagaatgggaagaaagtgaaaactgttgaaaatgaaatgtgatgacctttgaacgytggatttcagagagacgggttcccaaagcagggtgcatctgtgagyactccttgtcatatttctttccatacgacatgrgttttcatcttatttccccyrcaaaacagagatccagatgctgctggattcattctaggcatatcatttccatcgtgacattcattattgctrcttcctgatgtagtcattttactctgattttgataataaagacaccatgaatatacattcgcttcctctcaagtctagccctgccctagaagggtagaagggaccaggcatcatctcagcagtgttttctcttgctctgtaattatttgcttccttgaaaaataaatcactagt

SEQ ID NO: 3432 - DNA, 600 bp, Bovine  MMBT19960
ggtacttttatgtgaaatgcactttattgacaattatgtcttatcattcagtagaaaaagacaaattttacacctatgtcccagaatacttgttattccttgttctaatggaatgaaatttctaataattcctgagtaatrtagaaatatatctccttacattgggagaatgggaagaaagtgaaaactgttgaaaatgaaatgtgatgacctttgaacgytggatttcagagagacgggttcccaaagcagggtgcatctgtgagyactccttgtcatatttctttccatacgacatgrgttttcatcttatttccccyrcaaaacagagatccagatgctgctggattcattctaggcatatcatttccatcgtgacattcattattgctrcttcctgatgtagtcattttactctgattttgataataaagacaccatgaatatacattcgcttcctctcaagtctagccctgccctagaagggtagaagggaccaggcatcatctcagcagtgttttctcttgctctgtaattatttgcttccttgaaaaataaatcactagtaattgcattaaaaatcagattagatcaaagagt

SEQ ID NO: 3433 - DNA, 600 bp, Bovine  MMBT19963
actttattgacaattatgtcttatcattcagtagaaaaagacaaattttacacctatgtcccagaatacttgttattccttgttctaatggaatgaaatttctaataattcctgagtaatrtagaaatatatctccttacattgggagaatgggaagaaagtgaaaactgttgaaaatgaaatgtgatgacctttgaacgytggatttcagagagacgggttcccaaagcagggtgcatctgtgagyactccttgtcatatttctttccatacgacatgrgttttcatcttatttccccyrcaaaacagagatccagatgctgctggattcattctaggcatatcatttccatcgtgacattcattattgctrcttcctgatgtagtcattttactctgattttgataataaagacaccatgaatatacattcgcttcctctcaagtctagccctgccctagaagggtagaagggaccaggcatcatctcagcagtgttttctcttgctctgtaattatttgcttccttgaaaaataaatcactagtaattgcattaaaaatcagattagatcaaagagtgttttgtttctggtaacctg

SEQ ID NO: 3434 - DNA, 600 bp, Bovine  MMBT20404
ggcaccactttcatctatttggaatctgaagtgtgttatcccagtactttaatatacagtagtttattcaccgaaaatatattctgacaatatttatttcatgtttgaataaccttgcctctccttcttgatgtttgtttccaaaatgtggagccattatagtagcctgcacgtctttctgtgaccattgttgtctcttcaaattgaagtacacagtcctagcaaactcagtaagaggtccagccagggaacaattttctaattttagactgtcactgcatatcgtttagtttcccctcrgatttctgattgagattgttacaagggtattgtaaaaggaaaaggaagaggraagctttctctgaatatgatatcatgaagtatataaacttgacttacagtgggaaaattttgtgtattttctccaatatgaaatgctatttggcacagtatatgtttcccagtgtcatgttgctatagaatagttgcctatttgtcagaagctatttgtcagttttctcagtatctgcaggtggtaagtatgcttcagaattcagagaaggaaaattgtgtgctcccagggattcatgcaagtgcttg

SEQ ID NO: 3435 - DNA, 600 bp, Bovine  MMBT20635
tgtacccttaatgcctggtggcctgaagggggccctcagtaagtgttagctaattaaatgcagaataactagtcaaatattcacagattaaccatcctaagagtcagtaaattcagcattgaaagcacaagaaagtacagattgggcttccctggtggctcagatggtaaagcatctgcttgcaatgcaggagacccaggttcaatccctgggttaggaagagcccctggagaaaggaaagaattctttatatattttggatataagttcctcatcagatatatgatttataaacttttycccccattatttgagttgtcttttcacttcctcgggttgtctttcaaagaacttttttttttttaaattttggtcaagttcaattcatgtatttgttttcttttttgttgagtttctgctgttatatctaaaaggctattgcctaatccttggtaacaaacctttattcctatttttttttctgaatgttttatagtttaagtgttacatttaggtctgttacacatggtccactttaatttttttacaagtggtgaggtaagaggccaggtttatttctttgtatgtgggtatttagtt

SEQ ID NO: 3436 - DNA, 600 bp, Bovine  MMBT20740
tgcggagcgcgggctctagggctctcgggcttcagtagctgtggctcacaggctccagagcacaggtttaacagttgtggtgtacagacttagctgctatgaggcatgtgagatcttcccggaccagggatcaaacctgtgcctcctgcactggcaggcagattctctaccactgagccaccagagaagaccctccttttgacatctgacattggaccttccttatgaccaggggcatagcaactaagagccaagagtttggcagacccagtggagaaaggctgacrctaaattcatttsctataaataaaagacgccawgaagaagatctgtatgagctactctactagggacttctttaaaaataagtgttttactatgaaaagagaagtttagactcttgagcatcctgcaaatagaaaactaatttgccttatcaatttttgtccactgtgcttgatccttgggataatctgtgaggcactgtatcagtctcacttatattgtagtcttttatcatatggatgcaagatatatttcttgctgtcaaaactaatcatcaaagcatacaagaaaaccaaagcaaccttatttacttcc

SEQ ID NO: 3437 - DNA, 448 bp, Bovine  MMBT20868
tggggggcagggatggataagttaagagtttgagattggcatatgcacrctaccatatatggaatatatggtcattagggacctatcatatagcacagggaactctgctcaatgttctgtaataatctccatgggaaaagaatctagaaaagagtagacagatgtgtatrtgtaactgaatcacaactaacacaacactgtaaatcaactataccctgatgtaaaatttaaaattttttaaatgaaagataygtcatgaaataatcacaaataaaataatgtctggaacatgcctaaacmtaatcacataatcaggagaggggatgaaaaggtgggagaagagatgaaacaactggccaggtgtgtatgtgtactgttgcatctgggtgacgggtaatggtgctcagtgtactgttctctcctgtattgtttaaaggtccatatttaa

SEQ ID NO: 3438 - DNA, 600 bp, Bovine  MMBT21319
gcggggctgttccaaatacaggttggaaatggttcaaagggatctgcagatggaaacaaggcttgtgtacttgccaagggatggatatcctccactctcattgccaacaaaattacttaatagtttttgaaatgcatcttgctttttctcaccttcctatctttgcccatgctaatcccagtgctttaaacaggcaccctctaccctgccagctctcagttctcctatggacttaaataattttgttggccatgaaagtggaggaaatataggcagcactttgtaattactgaattttcrtgtccatcttactagtttttgagtttaggcatcatgctttgtgtatctttataacctggtgtctggaaccccaggggcttcagtaagtttttgttgaatgaatgagagttggctgagactgagtcaatgacatctgctggcctcagctctcagagctactgctctgatgttcagccctgtaggttttcaagacaggatgggcatagtttcctccagctatgagacagctggaagcttctttgcaaatgacatagaggagmactgaatatttaatgcttaaaagttaaatattattataaa

SEQ ID NO: 3439 - DNA, 600 bp, Bovine  MMBT21735
cttatttttattatggacattatcgtgttttttattgcatataaacattgatttgtttcactgttcccagcttcaataataacaatagcagcatttatgttacaaaacattttttcttatgtgtcaggcattatacttgtaaagacttcatgttgtttcatgacattgccacagaaaaggtaaacgttagttccattttacagattgggaagtggaagctgagggagattaakaagtatcgaaacacacgctactactcactcaagtctcaaacccaatgcctgcttaaccactgtgctytcaacactttccattccaagcagattgcaggctgaaatctcacacacacatttttataactcattaactcaaatctctagtgttttccaggttgtaytaaggaaaattgggctatcagtttaggataatttctaggaagaaagtttttattggcgcttaagtgccttagacttatttcctattttaacaccttccatctcaataatcaaaaaatggaatttgtattcatttctccaagttgctgaaattactttttaaaatagtgatgtgtgtttcacagcagataatttctgcacctgt

SEQ ID NO: 3440 - DNA, 600 bp, Bovine  MMBT21905
catctccctctggacacagggctgcccaggtgtcaaggcccagcctggagctctggcccctgccacaccaggtgatagaggccttgaccaacgtggtcaggtccacaggtccaccccaccgggccctccaaagatccgtggctgatctagcccaggagactcagacctcaacccagtgccatgragaggggacccagacctccaaccagaggcccactggtcctacccttcccctaaccctccatactgtctttacaaggctgggcctgcacttttggggggaggggggtaagaaaagcrttctgggagtttcttggacctgcccattccctatctccccctatttatctcccttttcttccatcccctatctcctcgttcttatctcccttttgcaggtggcagattttggcctgtccacatttcagggaggctcacagtcaggggcaggatctggggagtcagggtgcaccccagcctacttggccccagaactgttggctaatataaaccagaaagcctccagggccagtgatgtctacaggtaaggcacccactccaaacatatatccaaacatatatccccaatttctacacctg

SEQ ID NO: 3441 - DNA, 598 bp, Bovine  MMBT22045
  misc_feature (1)..(109): n is a, c, g, or t
nnnnnnnnnnnnnnnnnnnnnnnnnnnnnnnnnnnnnnnnnnnnnnnnnnnnnnnnnnnnnnnnnnnnnnnnnnnnnnnnnnnnnnnnnnnnnnnnnnnnnnnnnnnnnaatttgtgcacagaagcaaagaaattgttcctgaaaaaaaaaagtgcaaattgctggttcgctgcatgtaaatgaaccgttaattgctttttgcaaacaatatttatgcaaatagtctcccactctgcaaggctgtgcagataatgccctcacatccccatttgtcaccactccagccggacccccaccgyacactctcctgtcttcttcctccgcagtccgtgggcccctctctgctgcctccttccccttcctcctcagcactctgcccccggatcctcctccctgaatcctgcctccttcctccatacaygcaggtcctgctctcaaacctcctatccccaagtgaaagtcaaggcctaacagctcgccctgcactcagcgctgccaacatctctccatcagcaaaatcaacaggaaacctaagaacctgggggaagtcatgcagacatgtcacactgctccgaatacataaagaccttctgaaag

SEQ ID NO: 3442 - DNA, 600 bp, Bovine  MMBT22132
aatggcaacccactccagtattcttgcctggagaatcccagggatgggggagcctggtgggctgccgtctacggggtcacacagagtcggacacgactgaagcgacttagcagcagcagcagcatattaaaaaaaaaaaaagccaacccctggtctaaatcaaaaggcagacacgatgccatctttcaatatggtgtgtaaatgttcagagggaagcatgcagagccctgcacaaagacggaagctgaacttgatggctccagtctgcccctgatggccctcatcctgtatcacacrccrctcacttgatttgtctcaatgtrtctcaactstaagatrcaaggtcaagagttaccttccacctcagtcattttctttttcccccttaagcagaaaacgcatacttttcaaacaaaacctcatgcagaaatagagaaatttcaatacataaactgagaaaagcagaattgttctgttgaagaggggctggaagggtttggaagccccatgtcttggcatcctgccagctcttcctccttgtagccagggtttttcaacagcagctctagtgccattttggcccaaatagttcttggttgt

SEQ ID NO: 3443 - DNA, 600 bp, Bovine  MMBT22195
cacagtgacccatcctggatgcccctgcggtcagtggcatgcattggcaggatggctggctgggcacagggcacagagtggtggctcagaatggccacagccgattggcctctggggcgatcgcgttcacaacctggggctgaagagtatcatcatcactggattgatacttacrtttaggatctcatttcagactcttgaaatcggagcttctagttgttgaggtttttgaggcacgttttatttggttaatcagttgtttgtgcattcaacaaatattagttgagcacttactgtgcrccagtgccaaacaccacaagcaagcccttcattcactgcaggcccccatcacagtggcaggtagagggacggtcacacaccgggccttgcgaggtttctaaaaaggaaagcactccctgttgaattgatccttgctttgaattaatcataggaaaaacattcctattctgtttcatacaaggcctgtttctcccacttgaatttattttgcagtgtcagcaagtttttcatttggatacgatttaaatcagaaggccagtgataatgtggttctagaaagatagacacagatagattacc

SEQ ID NO: 3444 - DNA, 600 bp, Bovine  MMBT22325
ttgccagcttctttttaatcagaagcaccttgccacgtctaaatagttctactgtggtccatggcagttgatgtaagcctgttctaagaaaatccatcattaatgaaatttttttggttaggcccgaatttatgacttccacttactcctgcaaacccaacagaaaaccatcacccaggtgggagctgttggaacaacacagatgtatttcaaaaacacaatgtagaaagacaagtgcacactgcatgattccaagaagaaacgagacaaatmtaggtaacagaaatcagaacagcggcygccccaggtttggggggcagagactggaaaagggatactaggcacctttctgaagagaaggaaacattatatcttaatttgggtggtggtttacatgagtgtttgcagttgtcaaaactcactgacccacattataatgtagatatttgatttttgtaaaacatgcctcaattttaaaaacttgaaaaaaaaaattgaaagaactggaggttgagggtataacatgttactccctgcagatcccagtcatgctggccttttttccattccccacgtgcactgtgctttttctcacctgtc

SEQ ID NO: 3445 - DNA, 562 bp, Bovine  MMBT22359
tcttgcagtgmcctgggggtgacaaaaatcaccctgatccccacgcaggactttcccaaagcgacaattcaggctgaccgcgaggaggactggcccctcctttgtgataaccctactcgagcagagaggaaayggtctcgaattctggtgtatcccatcattgggggatcgagctccacccatacagaacaagggggaagagaagcagctgggtgatggacacagaagctgtaggcagagaggtccatgggggctctggagcgatgcctccagtaggaaacgaagctgacagataaagcratacagcagagccttcagagcagagaaaacgtctactctggcagagggctagccatgaattaatcataggtacctagaaaaccagagaaaacaaaaagttgtacaagaaggtaaatgaaattataaaactctacatggctcagctgtgattaatatttatagagttagaataatgaaaatactgaatattaatatgcccccaaattattatttaatcataacggaagacagattggagggtaagacagaatgtgttgagggg

SEQ ID NO: 3446 - DNA, 600 bp, Bovine  MMBT22457
attagaactattatccctcacatggtgaggctacttgttttcactccacaggaaaatgcagccatttttccaagaagccctttgagaggacagcatgttgggagtcagaagactgagtcctgccctgcctccattgttgactgggctgggtgatttagkctgagccagtagacacaccttggcttgaattgccttcattgggaataatacctgttctgtttgcatcatggggttgttggaaaatctgataatggatataacctgtctgcaaaaaccgtaaagcactcttcaagtggaagrtgatactactactattccaaagactaggagcccttcagaggtttggcccatgggtagaaactcctagagacttggttcttcagccctcactctgcatacccctcttccaagaggcagagtgggagaagggatggaacaaatgtccaagaaggcaaagttagacatctcagtgagatattctaggctcactagcctccatggatgccaaggtttttctcacatcgaatctaggtttttccttttactacttatgcttgtttcctcctgtttttcttgaagattttctctcacctgcttcaa

SEQ ID NO: 3447 - DNA, 432 bp, Bovine  MMBT22578
gtggaaggccatagtgtccaaaaggtgagttctgacatcttttcacagctgtctsgtgggaacatagtgtcaactggccaggagtgcctcatttccacccagaagagttcactccacctggatggtgctgctcatagccaggctcctgcgaaagtggcagcagcacactgtgctcctgcagcaggacgtcttgctaggtaacaacaccatggttggtgtgtgattggtgctcactcattctggtgtgagcttgtcacctggctagcctgtgctgggaacatacttccaggggactgatcsagacagtrgttttgtcaaccagccagtcaaaaagctctaccagtgctgatcttgcactctaaaataactttttttaaaggatttgtactattttaacattgtatttctatttcttttatttggattatgata

SEQ ID NO: 3448 - DNA, 564 bp, Bovine  MMBT22580
tgggaatgggctcgacttttattttcttttcaaagtacctttattcatttgtagaaattgcttattgtattttatatcacagatacagagaagaatgtaaaagtaacttcatactctactgtctagttataatgactgtttagaatattcttctagacatctcttcctatatgtacatggtagaggtgatttaccattgagcatcytttatgtgctgctcttaggagtacgtgcatctttacataaatgacaaacttggctttaaggagtcagccaggctgatggaaagggtttagacaygaagtggaactttccaggcaaaaggacatcattgtgaagtgtcagagagcaagctgtttttgaaactaacagaacagcaggatgccagcatggtgtgtgtgaggggaaaggtgtaggaattggaggggaacaagtgatgccagttctcttttttaatgttagatcaatgattttttttttttttaatttgagtctgctggctcttagttgccaagtgtggggtcttcattgcaacatgtggaatctttagttgcagcatttggg

SEQ ID NO: 3449 - DNA, 600 bp, Bovine  MMBT22590
tccagggaccaggtcaatctgctttaatgaatagcttgaattttaaatgtttttaagatgaaacaattttttttttattttgataggatcaaagtgggaatgggctcgacttttattttcttttcaaagtacctttattcatttgtagaaattgcttattgtattttatatcacagatacagagaagaatgtaaaagtaacttcatactctactgtctagttataatgactgtttagaatattcttctagacatctcttcctatatgtacatggtagaggtgatttaccattgagcatcytttatgtgctgctcttaggagtacgtgcatctttacataaatgacaaacttggctttaaggagtcagccaggctgatggaaagggtttagacaygaagtggaactttccaggcaaaaggacatcattgtgaagtgtcagagagcaagctgtttttgaaactaacagaacagcaggatgccagcatggtgtgtgtgaggggaaaggtgtaggaattggaggggaacaagtgatgccagttctcttttttaatgttagatcaatgattttttttttttttaatttgagtctgctggctctta

SEQ ID NO: 3450 - DNA, 600 bp, Bovine  MMBT22598
aatgtcaacaaggcaacatggacactgcatgcacacacttcactgcagaactactcttcaacccggcaaaatgacatggcagccttgagtcggccaagtagaccaggtgttctgcatagayggggcagtggggacaagaccagaaatgggcagacaatatgtacaaccaagacaggcagcaaacaggtggggacagaccccagcagtcatgagacgtgcgtgagatcactctgcatgaggggaggcaaggaggagccagagcctgtgacagacggaagccatgaccttgggcacccagyrgctcctcctgcatcacctgggctgctccaggaacttgggaggggtgcctgcactttccctgcgtccctggggcctggctgggctgtagagacccccacagtaaccatacagaaccccaactaagaagaaacgtctggaagtaaaatccaaactgactaaaaaagaggaggcacaggtaagagaggggagcagcacagctcagaaagcaggaagcacatttttcaaaagttcatgaaaacaacagaaaaagatactctaaaaccatgaaactagaaacactgtcttaatccaccttcttcc

SEQ ID NO: 3451 - DNA, 600 bp, Bovine  MMBT22606
atgtgatttcctctggagggatttctccttgcccctgcagtcataagaagcagaaggatggtctctgctgaaagacgtatctcttgacttcatttctcagaggtgtgagcattacttgtgagacagagtcaagtggcaatgytttcatttactgtttcatttactctgttttcatttactggagccatgtactatgtttctgtcccacggagaagtctttgagcccctttcacacttgatggcttttaaatattatttccctccaaaaggcatttctctgtaaataaaaagctatragtyattctgctttattattctttcctctgaggggaaactctgggagataaacaatacccagataaataaggcttagagattgtgggccaaggyttctattgattcacaatatatttatctctctctctctctctctcaaataaagaaataatgatagtaattactttaaaaatgattctcttttttaatcattttaaattgctatttcccactctactcagatagtaattgtttttatggcactattgtaactcatgggaaaaaggaagayggaaaaagcagctgagatcactcctgggcagc

SEQ ID NO: 3452 - DNA, 567 bp, Bovine  MMBT22614
  misc_feature (1)..(2): n is a, c, g, or t
nntctcttgctctcttttttccttttattgtctctctctctcgcttccctttctttctgcctgatgctaaacttcrcrttctgagcccttctaccaattattggataagtcgcttgtccttcctaaacctcagtattctcataagcaaaatgaagtgtttatactatattagtactcttttacttctaagtgtgactacaggcacaagtttgctcaatctgctctcatacaattggtcgtattagtgctctaacttatttagttccaakatgatgactgtggtttcagcctgcacaatgaasaagtgaatttgttggtataattatgaggtctcatcttttggaaaagtgagatcaaatggttaagtgaagtcacttgagccaaagatgaaagggatgtcacataggttaagacatgggccagaagwatctgctttgaaacttcactgaacagctaattaattggtcaacttggctataatgtgggcattttctctttaactgcacaatctggtgcgtgtatgtgctccaattccattgtataaattcgagactcctagactatcgt

SEQ ID NO: 3453 - DNA, 497 bp, Bovine  MMBT22620
ggcatttctctgtaaataaaaagctatragtyattctgctttattattctttcctctgaggggaaactctgggagataaacaatacccagataaataaggcttagagattgtgggccaaggyttctattgattcacaatatatttatctctctctctctctctctcaaataaagaaataatgatagtaattactttaaaaatgattctcttttttaatcattttaaattgctatttcccactctactcagatagtaattgtttttatggcactattgtaactcatgggaaaaaggaagayggaaaaagcagctgagatcactcctgggcagcatctctaaggcacaaagtagatttgtagtagctcatctatcaaaccttcttcaactctcagtctgaattttacatggagatctgtggtggaagacagagaatttgaatctgctgagtgtgctatatgcagggaggaagaatatttgggggagatatgtcctcata

SEQ ID NO: 3454 - DNA, 598 bp, Bovine  MMBT22680
  misc_feature (1)..(97): n is a, c, g, or t
nnnnnnnnnnnnnnnnnnnnnnnnnnnnnnnnnnnnnnnnnnnnnnnnnnnnnnnnnnnnnnnnnnnnnnnnnnnnnnnnnnnnnnnnnnnnnnnnntgccgcggcctgtgcctgccacacagggtgcacctcagcctcctccatccccactgagccaccccatcacgaacgtctcaggtggatgccttacgtctgggcgcaggtgaccagcttctctgggctgtgttgtgttaattacaggtttagggggagtgtttcactgtcttctctctgtatcttcttcatgggatgttctccayaaaggagtgaactttgaaattgttctgagcagtaaacaggagagggttacagtccactattcttactagagattaggaacttgaagatgttagtttgtgtcaacataaagatacttttgtartaagtatctgattagtgaactccctggatatctgcactgacagtccccgccttcctcyggggatcatgtgaagatggcttctcctctaatgggagggaggcggatggcccagcagggaccatcctttttacagggaccggcttttacaggctgggmggctctttaaaccccctggt

SEQ ID NO: 3455 - DNA, 600 bp, Bovine  MMBT22681
agcagttgacaatttattgttaatttcaaaattatgtaacaattaacttccaattaatgtagcaattaattgttggcctcaccatagaaaaactccacaaggatgataacatggtaggctcattgaaagaaaatcctgcagagatcacataattacctgagagagatccttgggggaaatgatgaagactgaaagtacttgcttgcagacgtgatgattgttaagattatgcagcaaaaacaaccatgaagagaaggacgcagatgacgaaactgaggcycagagattcagataactcayscaaagtctagtgtaggatgcagctaagatgagttgaaggcattatcctcctcgttccataacytataacaggatttgcctagagcctccaaaggttttatcatctgcaaaatggggataataacagtccagtccttccaaggaggctgtgagttttaaccgagataatgtgtgtccacgctcagcacaaggtcaagcccaggagagacagatgagtgytgtgactcttactatttacagcatcacgatttgacatgaagwrgctgcataaatgattcaggcttaccaaacataaataca

SEQ ID NO: 3456 - DNA, 598 bp, Bovine  MMBT22783
  misc_feature (1)..(65): n is a, c, g, or t
nnnnnnnnnnnnnnnnnnnnnnnnnnnnnnnnnnnnnnnnnnnnnnnnnnnnnnnnnnnnnnnnntgcttggtacccgcactgctgttgctactgcttctaggtgagtggctgcctccctccagacctctgaaccttagcttctctgtccctgatcctcctcgatcctcaagaaaaaggtgggagcacaagaaggtgattctaggaaaagccaaaatgcaggaagaggcaccagtgagacacctgtgcccgaggtttgaggacacacacagcaccctgcctccagcttttgggccccgcrgagccatggcytcccaaatctcaccttggtaactttgccccagggactttctttttcctattgcctgccctcccacctgttacccttctccyaggcccagccctccaccttcagtattgcaacttcacactgattccttgccctgcatcctcaatgtctccatgccatgcatctgctrttccaaccacctggactatccctccccaacttggggcatcatggagggagggggtcactttagcaggtggtgtagggtagggagaatggagaaggtgaaggagatcttggagctgagatg

SEQ ID NO: 3457 - DNA, 600 bp, Bovine  MMBT22789
attttcccatccttgtaagggcttgacattgtttcagaaaacagtgttgaattggggaatgtcatttccagttgctctcccactgacccatgccatcctctgtcttcattctcctcaaaaccttttttggaatgaggcagggtataaacaataaataaaattgcctccaaagtaaaaggaagttgagaagtttgagaatttcttccccattcaacacttgaaggaggataaagactggaaagagtagagctgtatattctagatataaayaagatcactgaataaacaagggtcattggrtaaaatatggtacattagarggatcagtatttaatgacttatgactgggtcaaggcataaacaaatatttttcctcccctctgttgatcgaattgtatgcagcatagaaattctagagcacaaagtctttattccaactgccatttgaaattctgaaacagttggatgtgtcatcaatgacccaacccatatggccacaaggtatgctgagatcttctaaatggagcaaattatgcaggtgtgagtamagaggagtgaagaagyaaagatggtttgagtcggaaaagacatctattccct

SEQ ID NO: 3458 - DNA, 600 bp, Bovine  MMBT22790
gcttgacattgtttcagaaaacagtgttgaattggggaatgtcatttccagttgctctcccactgacccatgccatcctctgtcttcattctcctcaaaaccttttttggaatgaggcagggtataaacaataaataaaattgcctccaaagtaaaaggaagttgagaagtttgagaatttcttccccattcaacacttgaaggaggataaagactggaaagagtagagctgtatattctagatataaayaagatcactgaataaacaagggtcattggrtaaaatatggtacattagarggatcagtatttaatgacttatgactgggtcaaggcataaacaaatatttttcctcccctctgttgatcgaattgtatgcagcatagaaattctagagcacaaagtctttattccaactgccatttgaaattctgaaacagttggatgtgtcatcaatgacccaacccatatggccacaaggtatgctgagatcttctaaatggagcaaattatgcaggtgtgagtamagaggagtgaagaagyaaagatggtttgagtcggaaaagacatctattccctacaaaatgttctggaagatg

SEQ ID NO: 3459 - DNA, 600 bp, Bovine  MMBT22853
ccagtagttgatgggctgagatggaggaaaggcaaacccagaaacctcatcctgggagaggtggacccacaacacaagtgaagcttctagtcccacagagtgtctaccattcaagtgggggggcattgattgggaaggaatggtatcctgagaatcaaaatggggatgygtgggaagatcatatcctaaagatgaagctgggcaccctgagcccctaaatcccaatagaagcaacccctccatacccrgtagaagcagagccttcatctccacctgaggatatcagctccctgtgaggcrgatgctttaccagaccccgttgatgccccccaggatgctcaccccatcccagcctccttcccatcacccttctgtgcttctagatccgtaactggactccagtcccagcagcccccagctggttgtgacctggcagctgccctgcttgctttctcatgtgcgcagacagaaggcaaggaatgcttgcgggcgagtgcacagggtaaggtggaagggacgaggtcagatctctcacagcagggcgtggagaactttctgctatttgttgatttaatagttcaccatcattgaacctttctc

SEQ ID NO: 3460 - DNA, 600 bp, Bovine  MMBT22867
agtaagattacctggttgctcttaatgtcactggacaagatggggagcaataaaatgggctccagaatctgaaattcccagatcaagcaccacatcagtgagcttcagtgttgcccagaagacacctgtctccagtagttgatgggctgagatggaggaaaggcaaacccagaaacctcatcctgggagaggtggacccacaacacaagtgaagcttctagtcccacagagtgtctaccattcaagtgggggggcattgattgggaaggaatggtatcctgagaatcaaaatggggatgygtgggaagatcatatcctaaagatgaagctgggcaccctgagcccctaaatcccaatagaagcaacccctccatacccrgtagaagcagagccttcatctccacctgaggatatcagctccctgtgaggcrgatgctttaccagaccccgttgatgccccccaggatgctcaccccatcccagcctccttcccatcacccttctgtgcttctagatccgtaactggactccagtcccagcagcccccagctggttgtgacctggcagctgccctgcttgctttctcatgtgcgcagacag

SEQ ID NO: 3461 - DNA, 598 bp, Bovine  MMBT22876
  misc_feature (1)..(45): n is a, c, g, or t
nnnnnnnnnnnnnnnnnnnnnnnnnnnnnnnnnnnnnnnnnnnnnatgttttccaattgttgggacattgggttgtttcacaaatttttatattataaataacactattaaaagtgcttttgtatgtatacacacacagatacacatattcacaygtatagagatagttttgcttcttcaaaattttttttctagagtaaatgtctaggcattgaattggtaaatcgaggagcctgtatacctcacgacttctcagatttttgtagtcctttaaaatttgttattcccttctgtctctcrctgacataagtttggtgttttctctttttagacaaagaaagggagccaaggaaygtttagaaaatttcctgattgtttattttttwaaaaattactgctattttctattggttttcatgtgattgtccttcagctcttagctccatttagaatttatttgggtttgtggattaagtgtgttggtgggatagggattgatagagggatttagtttgaaagggtttgcttgggtgtgaaattgatgttcttaaaactttgtgcagatgtgttttatgtcatgttagccatacttactttc

SEQ ID NO: 3462 - DNA, 598 bp, Bovine  MMBT22883
  misc_feature (1)..(66): n is a, c, g, or t
nnnnnnnnnnnnnnnnnnnnnnnnnnnnnnnnnnnnnnnnnnnnnnnnnnnnnnnnnnnnnnnnnnaacagttagaaatgcaaactcgagcttaaggagaatggtgcagttttaagcccgcttgttggcgtaacgagaggcaggcaggccgagagaagagagactctgaagttgtctcaggttcatttagactctgagagaacaggattaacccagaagcagagtcattttcccttctcacctcaaaatgacagtttttctaggtcaaacccacaaagttaaagagcagacwgactgccycagaattttgaagaaaatggcaatgccaaatttgtctttttttttcctccccaaatgcctgtttttcagctcatctgctccactctgacgactgcttatgatcagagtagttttagagaggctgggctyagaaatcatgtagttcagcaacctcattgtacaggcgagggccctaaccctctcctaccccaagaaacttggtccctccttaactaagcagtccaaaggcacttgtcctaaatggattgatttctccaagagcccagccactctccagtggctgcccrtgcatggcgga

SEQ ID NO: 3463 - DNA, 600 bp, Bovine  MMBT22919
aatgtaagtaaatgtagattctctaaatatcttttgcaccttgatgaatatttattcttgtcttttgtgataagctttactgccttcaattttactaagacaaagatggggagggacacctccaaaagagtactaaagaycatggttgtggaatgggtgtttctgtactaaaaaatatttaattaagatcatttctgattttgaatctccctctgtgctgatgaaraggagagttataaggaagaagcagggctcctgccagctataaacagggtagaaaaaatacaccccaactccaamacaaggaaacgtggacccstctactgactagcaatgggaggaagttatctcccacaggcttcagagatgactcccagaaagtaatatggtatgagaacyataggcacttagggaaggtagaggaaatggagctaaaccactcactatggtttagttccactgttgtatcatgacacagtcagatttttgaaaacaaatggctcagactttatatttcagaaatcatggctgtaatatttctaaaggggtgcggaggatgttccctaatactctattttagcagcagaatgatgtatcaat

SEQ ID NO: 3464 - DNA, 600 bp, Bovine  MMBT22937
ttaagcctatggcatggctatatctcttgttgctgagaagactgggggaggaaatatctgccattttctatattttacaggaaggcactctccggattgcgtcaatattcaagataaattactccgaaaatatcaaaacatggttcagctgctaggtggccaaaaaatgatagatatttcccatattgtgtcatgacatcataatgaaacatatcaatatgtaacaccactagggaaagaaaaattatgtgaatagaaaatcttgaaacttttacttcacatgtgatacacagttaatgytaactataaaagtttaaaatttttctaaaataggttatacattctttcatacttacasgtgacataaaacgaaatttaaatttgygttactgaaatcatttggaacagcaattgttaacttagggtataaaaccatagttactaaggtcctgatagccttctatgatcccattaaaaggtcccaaatgctagagttgtagggtcctgtactttagactttttcttctccttggcttccaggttcttctattgtgtstcttttaagtagtccaaatgttttttttttttaatttttccttt

SEQ ID NO: 3465 - DNA, 600 bp, Bovine  MMBT23004
gttcactcaaactcatgtccatcgagttggttatgccatccagccatctcatcctctgtcgtccccttctcctcctgyccccaatccctccacttacctggcagattggagcattctgtgtcttggtgtaatgaagcatcatgttggcatagcaaaaaggaaaccgccctcctgacaggaattcggtctcagcggaagcccatggtccggtgcggggcgtcgcctgggagtggacgtgtgtgtctgtrtgggtgtgcagccttgtttctgatgggaagtcaagaccaaactgcccattwyatcgcttaattccacctgatggtttcctgaaacgactgttggagagcaaatccttccctgtttgcaggatcttttattttttaacttgtggtttttctccccccaacttttgctttggaaacatggaaatgatttgtgcagaattattttgatgaagagtaaagaactgaaagggtggagtaaatcagtcaccagatcattactgcagccaaaacccactggagccaaaagctgctggctcatccggaactttgctctgggcctggtgggcataaactggaaccttggcaataaacttct

SEQ ID NO: 3466 - DNA, 600 bp, Bovine  MMBT00592
cctgggcattaccatctagcctctagcatatgtctggcccgtattcctgtggctcacttggctgagattcctgttcaccactcagattttgaatctcttctttgtttctgatacttgaagttgtctctttcctattttcaagcttggcattgtagcaaaaccaccttttgggctttgcttgatccagcatttctatgtgaatgggggtggtgggtgggaacttcttaagttggttcagtccactacatcgatcagtcgtctggactaggccatgaacagcagacagagaagtggactgaktttggaagcatttggagtgaagtcaggaagggtggggacaggtagagactgaggtcttccttgtcctcatgtaggtgctcagagaggtttggaggggtgagttggggaggggagatggtgttggatcaatgtctaaggaactgaattgcttgggacaggtgatcacattgggagtccggagggggtgacaggtggggagagaagaaatctggcgcatctttctggccaggttcgcttgtatgtctgctggaggcatccttagttatgcgcctgcgctgtcctttctgtcccttatgtccc

SEQ ID NO: 3467 - DNA, 600 bp, Bovine  MMBT01031
tcaagaagaaaggatgcagagaaggtaagaagtggggggcggggcacaatctgttcaaatcttatacatatcctaaatcctaataatttaaaatgctgaccgcttttttcctgaagaacctagtaaatttcatatgaataaatacttttcctattcattactgacatggacttttgtggttacttaaaaaataaataataagtgcttctcatttttatgacagcattaagtttcaaaatgaggctaggtaatgtcagcttaacccagaaaggagctaaatgtcgggggagggggaggacsggaatggcataagatgaatratcagcaacaattctagtggtaaaaactctttaggggagtaaagggtccaagttgctttttaaggaataaaagatggatcaagactcaagaaaaatgctcattcattgtaccttggaggcaacactctgtctaaagtacagaagtagtaaaatattttactaagttaaaatataggttttatattttatacgatattgaatacacacataaaaataccagtgttttcatcttgtttctgttcagacacttaattaagcaaatatgttctttggtgtctgg

SEQ ID NO: 3468 - DNA, 598 bp, Bovine  MMBT01034
  misc_feature (1)..(125): n is a, c, g, or t
nnnnnnnnnnnnnnnnnnnnnnnnnnnnnnnnnnnnnnnnnnnnnnnnnnnnnnnnnnnnnnnnnnnnnnnnnnnnnnnnnnnnnnnnnnnnnnnnnnnnnnnnnnnnnnnnnnnnnnnnnnnnnaatactggggctacatgcattttcacataaatttctctatcacatttgacagcttaattacattgttgttatttgcatttctcatgttacttcatactttagagtcctagctaatggctttccataaagtaatacttcatagtattctttgctgaatcaactcctatcttagttkcttgttctgcaagataaattcaatcaacagcaaccatatgttaagaactttgaagttaagtttgtgagaatgaatgatttctgaaagcctctattcttggctttgcataatacatgtctgaaaatcaaagagcattccatgacagaaagggaatttagagaaatggccatggatatgctgaagaaaaaaagaaattgtgttcatatttcaacacaatttggaatgtttgtatatacttcccctctagcaacatttacctgaggtttagaaaaatttctgtcatctatcatctttcctc

SEQ ID NO: 3469 - DNA, 600 bp, Bovine  MMBT01126
ccactgtctcccggagcttgctcaaactcatattcattgagtcagtgacattacccaaccatctcatctgtcgcccttctccttttgccttcaatctttcccagcatcagggtcttttcccaaaatacatacatatatatgtatttgtttttacttgtgtaagcaaatgaaaatctcttgatggatagagaagaacagtaacagtggtgaccagttcattacggtggtaggaggaactgggaaaatgggaaacaagcataggagtgagacctcgctgaactttttatattctaagattcktgaaccaagcaaatgaatgtgttaccatttaggtaacatgttcttaggcccttgagacagtggaggacagaaaatgaacagaagcgatctgctgacattatacatttagcattctccaatttaatgtgatagtcaaactaaccaaaaagaagttttttttcaataattaaaagttgaattcatctaaaactttgtttcacttcaactgaagtttccgttttattacctggtctgcttcttaggcccttgtccttcccctgctccatttggtgacagcccacttccttgggttttaaagga

SEQ ID NO: 3470 - DNA, 544 bp, Bovine  MMBT01539
  misc_feature (1)..(3): n is a, c, g, or t
nnntcaggagaataagacactacagggtggtcggccctggcctgctcagcccacttcacagagcgatgagagtggctcgtgctacagaggcaagaaacccagggccagacgcaaaggacactgtggagggttcgggagcaggacccgatgagtcggcctctggacgtcaggtcggggggctgaggagctgatggggatgggcccgagagccccaccaggggctgtgctgcagcacgcgcaacacccacagcagggcccccaccacagaaggaaaagccaaggagaacaggcgcccctaaagcyctgctcgatgggcactgcattcctgtccygactacagtctcttccccagtgcgtgaaatgactctagctcactgcagtggggccaaacagacccygcccaccatttcctgggcgtgggcgctgcgggcagatgccaggaggaatttaaaagaagctggctattttgggtgttagaacttgccagaatgccaaggcagcaatatgtctgcctgagtgcaattcctgctctccagacatggag

SEQ ID NO: 3471 - DNA, 598 bp, Bovine  MMBT01551
  misc_feature (1)..(82): n is a, c, g, or t
nnnnnnnnnnnnnnnnnnnnnnnnnnnnnnnnnnnnnnnnnnnnnnnnnnnnnnnnnnnnnnnnnnnnnnnnnnnnnnnnnnacaaagacatcctggtaaggtagacatagtatagtattaaagtgctttgatttcttataagtgactccagtgtagtcgatttaaacgaacaattggcagctgaaagagtctgaggtaaatataaaccyaggaaaaccrygggaatctcgaaaattgtttcactgctttcacaataaatgagatagcacatattttaaaagtcaagatgacgggacgtkaaaggaacattttgtagcaccggtgattttcaagagaagttaagtttgtagtggcaactaaccagggctgctcgtctcttgaatgggataggtgagctgttgcggaaataatatgcatcttttccaatggaatgaactaaatgagtcattatggagacactcattactggctgtttcacttaatggctccatgaaaagatgtatcaagggctacaaactttgtgaccaataagagagtgaagaaataatgaggtaaactggtccaatctgtacgcagataaaatcccaataagccaca

SEQ ID NO: 3472 - DNA, 496 bp, Bovine  MMBT01610
ctggacctttcaagtttcttccaacgtcacttgcattacaaagcccttctatacctttcctggctctggaagattctgcaattatgccccagagacttaactccatgtgtttctctgtggcttctgtttgtgcagaacccaggtttgatttgattttgtgcgttcagagacagagaacctagcacactctgtgacacatagaaggtacttcaaggtggacaaacttagagactattacatagaatgaagtaagtcagaaagagaaaaataaatatttgtatacaatatttttacacatayatatggaatctgatattcataatattagagtccaagctaatgaaaggtgtctgaaatgtattgtataccccttgagtccaaatggacttgagtccaggtttacggaattcaaaaggtttctgtcatttttttttaatttatttttttattgaaggataattgctttacaaaattttgtgttttctgttaatctcaa

SEQ ID NO: 3473 - DNA, 600 bp, Bovine  MMBT01648
tgtattaaaagaaaataaggtaaaggtatctttacagcatccgggcagtaatgtatttttctttctaaaccaaaatgtaagctttattaccattaaagatgatgttggagaacatggcttagatgtgtgccaaactggttttcaaatctgagctccataattattcagacaagaaaagcacaggtcctcagcaaagcatccatctgcaatgcaggagatgcgagttcaatcccaggtcagaaagatcccctggagaaggaaatggcaacccactccaatattcttgcctgggaaatcccwcgggcagaggagcttgatgggccatagtccatcgggtggctaagagttggacacggtgagcacacgkgcatcccagtggaggaagagcctctgcatcaaatgagcaaaggttaagagaacttgtgctgtctgcagaactgcagatctcaaatagagatagagagaggcccgtctccctaatacacggatcagacaagaaagccacttcttccctggggtagagacaggccaagattattttaaaagaagattctttcatataaatggaaagagcaggaatgagaaataactgtttaccct

SEQ ID NO: 3474 - DNA, 485 bp, Bovine  MMBT01668
agaaaaaatgccttttctcttgtatttttcattcagtttaatttgtgtttcactgaccaaaacataacagagttcagtaaaagttgtttttgtcctcaacacctgccacagactatcttctgtgagaaactccaatatcttgaaaatttgaattcatggaagccatagtgaaactaatttacagcctacaacttagtgagggggagatctcacattctcttttcctttgcactaatcatgactcactccaggttttgttcttcataattaatgattatgttgccctctcttcctttggaycataaaaattattccctgctttaccacttgctgactccttatgcacagatttcaccctttaattttatccttttcttatcttggtaatttcaatatctaataaaacaacgttccattataattttcagtagctgcaattatctaaataggtaatctgaaaattgcttttgttaataaatgtaaca

SEQ ID NO: 3475 - DNA, 600 bp, Bovine  MMBT01737
acttttcattcaggcttccagcagtatcaacttcatgggtcacaaacttcccactcatatcctttcattgcattttagctgcctacctcttatgtttttaagaaactccagagagttcatcattatttcattccttttctgttataccatcttaccctttctgtaaaactaaagcaagcactgcagaaacctaaagatgcaagacgacttttgtccagacattgtatcagacgagctagataccctagttctcatttattttagtcagttatagtaaagggttagaaactagaaagaaarttttaagtattcttccatgtctgttctgtcaccyctttatagtcagctccacttcattgtctacctactttaatacacatttttcttttctgatcctaaaggatagatataatatgagaaccataatggttactgaaaacaaaggtcttgctttgaactcttatgattttttggcagaacagggagccttctccaaatctctatatagtaagggtgttctgttttgattctgtatagcaatgcttaatgtttatcttagaaattttacgggaacctttctcatatggtaaaaaatgtgtt

SEQ ID NO: 3476 - DNA, 600 bp, Bovine  MMBT01916
taccatcataatggagctgatacaaagtcttcccaaaggatgcgttccatcccagtcctctactcatacccacaagcacatgattggattgtctcaggtggaactcacctgtgactttcctggcacttggtatggaatttgcctggtatatgcccacttctgaatggcacattgcccttttgctcctttgctctcaaaatatcttattcttggaaaacagaaaaacacacctagacaaacaacaaaggatgctgccataaaaggctttcagcaagcattagccaagccaagatctgtatktgtttgattacagccgatacagtcatccagaaaacagatgtaaagggagcttggagggacgcagagcaataaagttctccactgtgctgttactacacagcattgcaattacaggcatctgcactaattcatattttctgggaatctaatagaaagtctttgatttcattcttctacctgcactgaaagccaaaaattgctatttcatacatttcagtatcctggttttacgttgattaaatctggtgacaaggtgacttgctattttcactgacccccactatgtcactgctccatcac

SEQ ID NO: 3477 - DNA, 600 bp, Bovine  MMBT01970
cggcaggttcttgcctgggaaatcccatggacagaaaagcctggtgggcagagtccacagggttgtagagagtcagacatgatataagaggctaaacaccaccaaccaggaggtgcgtgtgcaaaaagcatcaaatgcacagcagactgggtgtttagatgaacaaagaagggctttagatacatgttacggaagaagcgtaactaagacattcatgtatggagacgtttcaaaacagaactaaaatctgtaaaacaaaaaaaaggagtcaaatgatgttctagaacaaaaatcacaatmtgtgaaattaacagctgatccttgagcaacatgggtctgaactgggtgattccacctatgtgtagatttttttcagtaaatacgtgctacagtattatgtgacccttggatgtggaacctcggattcagaaggatatcagatcagcacacctaacacaggtgaggggggaggggccacggcacacctgctcaggtgagcacgtctgcggcctcagcagtaactggtggtgtcatcctgagcaaacaccaacgttctctggggagaaagaaaaaaagcacctctcaccctcctttatgctt

SEQ ID NO: 3478 - DNA, 600 bp, Bovine  MMBT01985
tcaaatagaatgcacgctaaacattgaaatgttgagggagggaagcatggcgcattgaaggaattaatgattcaaggaaacagcccaatcagaaatcatttactatcagctgaagactacaactaacttaaccccttttcagggtcttacggaaacatgatctctttcacactctaagtaattctcttcacagactttaaagctactttccttgttaaatatttgacaagactcattttacacttggattgagttgtccattgttcaaaacagtgactcacaggttttcgtataaaatamaataaccagaggcatttttataatgcagatatcaacagagttatttaatgtttactttgcacagaaaggaaatatctcaaagtttaggtatttycccaaaagtgctattagcaaaattgcatgcattatctgtctcccctatgctatagacatgtatacatacatatacagtaatatacacgacccactttactttgggctgggaaaaacatcctgtaaaccaggatttctcaatcttttttcattctttcccattcccccatagagtctttttagacatattttcctagtcaacacact

SEQ ID NO: 3479 - DNA, 600 bp, Bovine  MMBT02107
acctggaatgcccactgctccgtgggaaggtataacaggatgtttgtttgggaggtctggagctctgcagccctgagattcattgaatcactttccaatcaaattcctgagacaggaaggtcaatgggatgaaagaaggacactttgcctagggtctaggagttgtctggggagaaatggattgataccaagactttccccctggggttccaagttgattggatggactaagtacagtgaacacaccactgagattcttgaactctgcatgagccagtggcactagagaagaaagacacyctccccgaraacagaacagagcttggagttatatgaatttgaatcctaaaggaggtgtgattttattttgtacccaagctcctcgctacaataagattggatgggggcggtgctggcaggagaggtatgctcttgttcacattatctctgaaatagaggcacattcattaaaatgacaattgtcttagagtcataattgatacctgctttcataattttaaagtaagagaaaaaaaataggcggaagaaaagatgcctataacagcgagggcagtgaaatcagaagaaacacacttcacg

SEQ ID NO: 3480 - DNA, 600 bp, Bovine  MMBT02117
ttaacctcattctaaattcaaaacccagatccaactttctgtttcccaatattcatagcagggacatatagctctgttccattttatcatccactggccatttggtatcagtaaacatcacaggaaattaaaacattttaatgctacagacccttaaagatataaaactgtctgaactgcctccagcataacagaaactgctttgaaactgagtgcmttatagacagacaaacatcatatgacctatgctagaaaagtcacagcagcccaacatctcacttgcaaaacttaaccttggayaccattttacaatgcacaacaaataagtttccctgcgatattactgtatagattttcaactcattccgtaaaaatttcaagaaacattaatattaaaaaggaaaactataagaataaacacataaatgactaacatcaagcaggaaaaataactttattgatgtaagcatgacactaaaataygccaatactaaacagaacaaaaaccgtaaacaagattgtttagttcttccaactcagaaatccaagtaataggtggatattgttcttaggcatgtttctcctatagtgtataaaaat

SEQ ID NO: 3481 - DNA, 600 bp, Bovine  MMBT02289
aaagcaggaaaattattgttttcatctgcactcagggaatgccagctaaagtctcacacctggagttagcattcttggggagggctccaaactgctgtgttatggatccagagaccacagaactagtcccctggccattagaatcaggtgggggtaatgtcttgttaatgtggccaccaggcctaaatcaataaatctcaagcctgggtcaaggaaagaaaccgcagtgccttttcaaaagtttaagagaatagcaatgctgtgagggctaaaaaaagatgtcttctaaagtggtaggawatcccatacctgcacccagataggcttttgcgatataatcatagccgtaggatgtaagcctgcttgccttttgatcttgaatgagtctcattttgtaacccattcacaaaaccaaagcacagtaggatatgtgactctgaagcagtttctcagtcttctacaaagatgaagtacatcaagagcctttacttatgtccttattacaactgaaatgaatactctaaaacaatctgaaagcatttataagtgggtctgaaattcagtgaaagaggctgtgtgtggcgaggtggtgtttcgcct

SEQ ID NO: 3482 - DNA, 600 bp, Bovine  MMBT02523
tagtattttctttgttttttttttttttaatcttaccctgcttaatacaaaatctaatcacgatcaacaaaggcacttgcacaaagcttctgacctactcgcatgtgctcttttaaatcagtcttatgtcatatttgtcctcaactgtagctgatttccctcctgtttggttggacagatagttgtgattaaccagtgtggcttctttttctgatactgtttcatttttaaaaatgatgaattgaaggagaaaataacctcttaggccaaaaagaataaacrtgaatggaggaaatccasattcatccagcagttattcagtgctactgtccatcagattctgtactaaatgttcccttgagagaatcccagcctatcaaaactgaacaagccattcctatctctagtactacccttgctcttttctccctataaaattcccctccctatgcatttcctgtttaataaattggactactgtctgtccayctgctcaagccaaaaaatggatcgtctttgactctactgtctcccacaccaaccttatctgatttatagttcctctgttctttcaaagcctccattctttgcacacactgg

SEQ ID NO: 3483 - DNA, 600 bp, Bovine  MMBT02546
ctacttccatcatttctgtgatttaaaagcctattgatctggtgtttatctccatcaaattccagttgtttcagagatctgattttgttattgaacttactcacttggtaaatgtctaaagggcagctctactaatgcaagtctcttaacgaacgattcttgttctatctgtttggctgtgctgtatttggaatctgttgaaatgggaggaaaaatgcaaatacacagggccatatggtgttgaatataggtaatacctatgtgcatattggattgagcttcttttggtcaatctttttmttttcgttgacagtctgcaatagctgattcaattggtagaactgatagtctatcagttggaagaaaccaggataaaacagcaagtgtgtttactttacttgctagttttagttccattaaaaataaagaaaaggctagttacctagtttttttgcatattgtgaatgaatgaaattgaaacaaaatataatagacaatgttatggataacacattgagattgaacaggtaaatacatttgtgttccttgcagagatatgataggacctgttaacatgaaaattgagtttacctctcttat

SEQ ID NO: 3484 - DNA, 600 bp, Bovine  MMBT02549
aagttaggacaagtaagcattgagatatgacatttgaagagaagaaacatgcagaaaaattagcagagggttaacatttcattgttgacagagagctctggtacagcagagaaaagcaccataaaactactgtccatagtgtcttttcctccactgtattttcaaatgaatattgctagggaaacagtcaactttaattttaactgctatgtattataataggtaagaaatctgatctatagtaaagtgtaagaactaggaagtttcaaataaccccttctgtaactattcaaactgatktgttttaccacaagctgatacagattataatccttagttgtccaacacttttgaaaaaagtgtaaaatgcagaacattaacaatctatgccatgcaataaaagttaaccctttgaaaatgaaaggctgtcagaaagttctagtaactgtagtaggttatcatttaataaaacatgacaaggctatgcctgtaagtatgcttcaggcatgcttcatatgcctgtaagtttatgcttcaggaaatcgaagggaaaggtagaatacctggagaatacaaggtttaawaaaaaaaaaagacaaa

SEQ ID NO: 3485 - DNA, 602 bp, Bovine  MMBT02641
  misc_feature (1)..(2): n is a, c, g, or t
nnttttctgaggacagacctataatttcagagctgggcaaaatgacactttgatggaaagtgtgcttgcaaaggctataaaacccggttttgcttttgaattatcccccagccccccaataaaacaaaccataaaatgtcagccggkctattttaaaaaaaaacagcacagaagtggctctgattcagactgcaaaaaagggccatggggacatatctgcacgtgtccctttgcagggggtctctgagtgtctgcaatcttatgcagcaataaagacaaatgaaaacctgctggaaaaggarccacgtctgtgaaatgaacatctgtggatattttacccctagggaaagaacatgctgttgacatcacggaggagtaaagggagatggacaggagaggccatgtttctatcccaaatctgctggtcctgargtcttggcacaaygcccagggtagagcctcagtttccccatctataaactggataataacatgcactccaggtagttatggcgaggatgttttcatcctgctcactgttaaagcacccaaaagcgtcccaggtgactcagtggtagaggatcctcctgcaatgcaggaga

SEQ ID NO: 3486 - DNA, 600 bp, Bovine  MMBT03006
ttggtctgttttgatttcataaatactgaaacaccactgacagtaagatgcataatttgatgtacttccctaagaaagaaaaaaatgccaccaattaaactatgacacagtgctttcttatcatctattgcaagactcatctccatttcagggatgttaaaatgcggaggaaaaaaaaaagtgtgattttgaatcagtgaaatatggtcatagaaacaacactcactgcagtttatcaagttctctgctgagggctatccgtgtagcatctctttcaatcctcccaaaccctgtgagtcragatattgttcagagaggttaagcaacgttacaaggtcacacagacaatcctaataatacttagtgtatgactaaactcaaataccagcacgatcgctctgcaaatctgtagttaaggagtttgagacacccagagcttgacaagcttatctgagtgcctgtagcctgtaggtggcggaggagttggggctggctgacctctctaccatcctgtgagcagctagcaggggtggaactgggcctcaaatccctcccccctggaactccaggctgtgctcctagccactgggcatcaccacc

SEQ ID NO: 3487 - DNA, 600 bp, Bovine  MMBT03386
gatagtgcaacgttcttatgagtgatggggactcatcctatgctgaatgaaaatttctcttgtcatagttgaggaatgtcatgatgctgaaccatcagggccttgaataacagtgttgcaacacctggggatttcttcatcrttattagttcccccaaaacatcttccataaaagaatggcctgcacttagttgaggatacatatgtattagttcatgatgctaatgttgggtttactctgatgaaagcctataacaccagcattattttgagataaatttatttagaacaatgtttctscaactgtaacgtacatgcaagtcacctggagtcctgttgaagtgcagtctctgactcaggagtctgctgtgggcctgagaatcttagttgccactagattcctaatgacactgaagctcctggtgcacggaccatacctttagtgagacttgagaagagtgtcttgtcttgacttcagtgtagtttgatatacagatttcaaatacaaagggttttatttgtttacttctacttttatgagcgtgaatgaaccaaaaaccatgtgatttattttcttccgcacacagtatagcacctttt

SEQ ID NO: 3488 - DNA, 600 bp, Bovine  MMBT03820
ccagatgaataggcagagcccagagggtttttagggcagtgaaaatattctatattatatgataatgatgaatatatgtcattataattttgtccaaacccagaatgtacaaaacccaagagtgaaccctaaggtaaactgtggactctggatggttaactgttgtctttgggtgatgatgatgtatcagtttagattcatccttgatgaaaaatgtaccgttcaggtgaatgatgctgatgatggggggaggccatgcatgtgtgggagtggaggggatgtgggaattctctccgtacrtttctttccattttattgtaaacctaaaactgctctaaaaaaatgaagttaaaaaaagtccaggagtaaaatgaaatggttttccctcactgagtttagggttctttgttggatttgttccagtgaatcaatmactgaaacaatatcttttgtcgatgtatgtatatactctctacctagtctgaaagtgattattgatttttttttttttttcgctttgagctgacttgaagactagagaaattgcctcaggcttttctcctttaggaatatattcccttcacagtctgagattgtgcc

SEQ ID NO: 3489 - DNA, 600 bp, Bovine  MMBT03940
ggccgtgcacccgagtgttaacacactactgtctcacttggcatcaggctggcccgtaccttgtgctgacgagtccttcattctcctctcactgcacatccaccttcgcccagttaaaactggcccatttcaagttattctccttgcctgtggctctctggtccacatgttgctgccagtttctaatgtagaagaatatcaccatgccttccacattccacgagggttggttcagttttaagaacgctgttatagcaagcagcataatgaccactctttccctcctctgcttcctgcccrtctaagcagcagagtgtactaggctgaatgaacccagtaaatgtggcaccagtttgtacttttcttgaatgaaaagccataattagtttcctttaaacagtgtaaaatgaacaagatggattagagtggttgcttcaaataattatgtaattaagatttgtgtgcactgctaagtgaattcataatctttgggaaattcttttcaattatgactagggcatcataagccatgttttaaactttaaaatctcaaaaaatgtttttttgttttttcccttgacacgtccggctagacattat

SEQ ID NO: 3490 - DNA, 600 bp, Bovine  MMBT03948
aaaggtcgaaataatatttaaataagatgtgaaacatacagcataatcatacagttggagagtagtttccaaaagtcactacagaaaactgatctcatcaacttataaagagtgctgtgtatatgaagatatgtctgcataatgaaagcttagatatctctgccatgaacatttgtaagacaaataaccttttcagaaaacgtgtgtgcatgggggatattttgaaactcacaacacttgtcaagaggaaattaatttccacttgaactaagctaatgtgaatgtcaaaaatgccctttsaaagtttaatcacaagataaaagatcatgtctaagagtaaatttgcatatataaaaccaatctataacactgactaaatgttgttttatgacaacccagttcagtaaacaagcyggctttgtgaccttgggtaagtcatatagtttcatcgtcctcatataaataactgatatgtgaggacatcctgagacatccattcaataacagcaaaaataataaagtacgtctacaatgtattattttaaaaattgtatgagatatttatatatgcatgtatcatatatactcatatatacatgt

SEQ ID NO: 3491 - DNA, 600 bp, Bovine  MMBT04444
taatcaggtgaaaacactgtgttctacttgacgtgcaaccacagagcaacaatgatgcaggttatcctggcgaggcactggctcacttgagagcatgctgaggcagtgggaatgatcacgctcccatagcacatgacttctttttaatttttattgcagtatagttgctttacaatgctgtgttagtttctaccatacagcaaatcagtcagtcatacatatacgtatagcccctccttttgtattttcttcctactcaggtcaccacagtgcttgcagtagagttccctgtgctgtacratatgtwctcattcattttcgattttatacatagtatcaatagtgtatatgtgtgaattccaatgtcccaattcatcccacctcccttttcccctttgtatccatgcatttgttctctatgtctctatttctgctttgcaaaaaggattacctatgccattttctagattccacatatatccattaatatatgttatttgtttttctgttcgtgacttacttcactgagtatgacactgtccaggtccatccacgtctctacaaatgatccagtttcactcctttatgtggctgagtaat

SEQ ID NO: 3492 - DNA, 600 bp, Bovine  MMBT04871
tgtgcaaatgacagaaagcacaccagtggttgcctggatccagcaagtggaatggaaattgactgaaaataggcctgagggaatgttttagtgagaaggaaatgttctatatctttttgtggtggttacacatgtgtccacattttcaaaattcatagaaatgcccaattgaaatagaagcaagttatggtacataaatcatatctcaataaagttgattaaaaatacataaaccaaatatttcatacttgtgaaaagatcttgagttaaagccaatattttatattttgtaaatatcaramcttgagatcagcaggctggaaataggagtcctgtttgcatcactgaatgagttttcagcagttctcttagttcctctggctgtggttttataatctacaaaccaaaggggttcctacaatttccaaggttctatcaactctgcagtatttagatacaactctggtagaggtggtattgtttagtcctccatgacttctggaaaatctactttacaattagtcaagcaacattagtcagctaactatccagagaaatggacagaagtaagaacatgtgggggtgcccataatctagtga

SEQ ID NO: 3493 - DNA, 600 bp, Bovine  MMBT04873
atttcaataggcagaggcctagataatgcagtttcaccttaaaagtggtattctttatgtcttgacatttttcttatatcccagtgaggaaaagactcaaggatggtattaaaatcatgtatttttaagagccctactttttctattttgtaaagaatataacatttgataaaatatggttattcttacatagtaccatgaactacattttacctctgtgtcagtaatagctgcataactacatgattctgaaagtaatccctctaagaatacaaagcagttgttttctttgttagtatmcacagaacaaattaaccagatggaaagctcttgtcagctgttttgtttcatgggagagcagtggcatcagctctcaggagaattctcatttgacctctctacacaaaacattcagcttccaacaaactgagcttgtgaatacacccctagagactaatatcaaacattccaccacaattctatgatgcttgttttaaggttatttttgattaatggcctgaagttatggctttagttatttttaaaattgtttgttgagttttcaaaagtagtgtttgaggggttatgaaaatagcctcc

SEQ ID NO: 3494 - DNA, 600 bp, Bovine  MMBT05189
tgtctttagtatatttgtattccaatccacattgtcttacttagcacttatttctaataaattatgatatctggtatcacacatcacttctatcatgtccttctggattgtcttgaatagttctttgcttttcttcataattttcaaaacagcctaagttacaaacatgtatgtaatatgtgatttttcttgaactgcattgaatttataggaagatttggagagaatatctagtttaatgatttttttagtttttcagtcatcaaacaagaaatgcttatttagtggagtttcatttcrttactatttttttgttatccttgggtttttcattattactttttttatagtatagtatccctaatgcatttctaggtttgtttgttgctattaatctaggatatgagtgtttttcaatggagtattaatatctgtatcaggatatctagtcaagcatcctaccagaagtagaggatctatgtagagtatttttatatgtagttttctatttaaatctgtggatttctttgagtctggtttctatgccaacctgtttatattatcttataagaaatatacatacatatatataatatatat

SEQ ID NO: 3495 - DNA, 600 bp, Bovine  MMBT05363
catggtggtatatgttttggtgcacatatatatttttccttcaaagaagttccttgaaaaaaataggaagtgagtattttgctgtgttagaacagcatgcactgaatgatacttttttcagtcaaatttgctgtcctgtttgctacactcagtgctcactagtctaatgagacatgcagggcccatgtcagagagaagcacctggcctgaggccaggacacactgccttggcggccagttctcaggacacctctctgagtataggcttagaaactgccagggatcagctgaatggtaaartatttcggatatgttggagaaaaacaataaaccatcgagataaacacaccatcattagggtgcttgatgggcatccttcaataagaagatgttgggctgtgaataccgtgtgtttactttgcccacagtacatacatgaattctgtaatttggtaacaaagtaggagagtagaagagcattgttttactctccagctgttttcctgggggaaataatattatttcaaagtgaaaatattgtgctaaacatatttctttcccgtacccagcacagtttttagcatgtaaactcacacattg

SEQ ID NO: 3496 - DNA, 598 bp, Bovine  MMBT05856
  misc_feature (1)..(80): n is a, c, g, or t
nnnnnnnnnnnnnnnnnnnnnnnnnnnnnnnnnnnnnnnnnnnnnnnnnnnnnnnnnnnnnnnnnnnnnnnnnnnnnnnnttaggtttgtggtgcaaactacttttggcaaagtttctggccctgaagcttgaatctgtgccctcaaagatataatgccagataatgatcaaaattagtgttcataaatctaggttttagagatgataccaattcctgtcattattatttactcaaattctgatagttttagttacatttacttcaagctgccatgaggtcatcatagccccagtcctgytgactgtttaatcacaaaggtctgcatttaattcacaaccaaaaaagaaaagttctctatttttcaaaattgttctytcaaagtcagtgctacacaatatctaaactgggatgagaaaagggagattttataggagaatttctcatagaatatgcacctgatgctatggagaaaaaggattattatggaatttttgttagtttcattttcattttaattttctgatgaaagcatgttgaatactcaaggatattttacatatgcattcacataaaaatgttgtgcataatgtcagggg

SEQ ID NO: 3497 - DNA, 600 bp, Bovine  MMBT06019
tccgcctcccttgaagctaggtgtttgcaatgtgacccagtttgggtcatggagatacaataggaaatttgcttgttaacttcccaggaagatgttcctccctggtaaaaaggaaagttgaaagtgtcaaaaaagtctctttccttccccatccttcctgatttcctatatgttttctggtgaggaaaaatctgagactgttatagtcaatgtgtgtctatcaggagaaatcccacaattttctgctgtaccatcctggaaccattttttattgtatgacacacttaagtgtcttcatcrtgtaagccaccactggctgcatagtctgttgtgtatagcctaaaacagactgcataaatattatttatgtattaaaatatgtaatatatctgtcaygtttacatttgtggattaggaaacatatgattatgttccatttgttcctcccctggaatgattgccagaaagttaaaaagattctgtggaaatctttggcacaattcaatatttcaatgagaaaggaagagaggaacacagagacaattgcaactgctctgtgtattgaagaaacatcattaaagggatccataactaggaatc

SEQ ID NO: 3498 - DNA, 600 bp, Bovine  MMBT06068
acaacttactcttggtacagatgaatgctaaaaaaaycccatacaatccttcgtaagtactaaaaatgaactaaggagaaaagacatatcaggaaaagaaacagcatgggggtaattctgttaagagtgccttaaaagcctgtattgtactattgccacgtaaaaagggggaggctgctgccaaacacattgctgaaatgagaattgtttaaactacaaagaagcatgacagctccatgtgaacaccttaaaggcccaaggtcacttacaagggagaaccaggtggtgaaaccttggagygaaaaaaattacagccatatattgactctagttatcctcagttaggagatgtagcttaccattttcaaaaacagagattcttgttctgcatgtggattgatataaaattgcagaaaacagaaagctaagaattttttgttgttgttgttaatatgcctttttctaccctgattacctttctggggctttgtatcagaatgacctctgtatcagaaacattaatattgccagagttaaaataaataaatagtacaaaatcagaatattcataggcttgttccagcggggcccaatatcagg

SEQ ID NO: 3499 - DNA, 600 bp, Bovine  MMBT06145
agttggttttctgctgcttcaacaagtggtcttggaagatgcacctgcgatgtagagggccwttgacagcccttgaaagagctccctgccttctcccttccccttttcctgcagagactctgttcagaggaggatttctgagacaaactatcagttcacaaacactgggaacagtttctcaaccagcccctagtctcctgtgctgctgcggtccctgtgttgggaaccctctgcctaaagggctgggttgggagagtctctgggtctctgctgttcccacaaagcgaacatctccctaaytgctgtcctaaagacagttccttacagatttcaactcttctcatatcccycctcctttacaacctgtgcattcatctctgttttactgctgaaagaatgcagacttcgtttctctgtcgtctgaacatcattgacaagcattccacccatctgtgaattattccctgactctttgatcagagcggtgttacaggtcctctgccagcaggagggagcagtccaacaaaatctgaagacccaggactttgagaagctgtgccgggcagactaggaagccacaaaacattgcgagctgaggat

SEQ ID NO: 3500 - DNA, 354 bp, Bovine  MMBT06175
ctgaaagaagtttatgtgttataaattccatgacagactacaacatgaccaacatcttaatccagtttttaaaaacagcttccttccctgtcctaactcatgctgacctggagtttgtggacttgaattagtgggggatctatttatttattcctttacttccttttgtatgtatgtgtgtgtatgtttggtaggtttattccacagtctatcagttttgagcttctactaccagcagtccatcttcataaacgaggaacttcaacgtggattcatcctggctctgtcacaccaaactgytgggagttttggmtgtttatggctccctgccttcaggccctgcaaaagaggctg

SEQ ID NO: 3501 - DNA, 600 bp, Bovine  MMBT06189
tgataagtacatttttttctgaaatatatacagatggataatgaaatttctttcttactcatcatctgatgtctgctcagtttttctttaagtggaattataaaatgttttccaaatataagactgtttactgagctaataaagtaattagtctgattaaactgatggtcagctcaggcaaacaaagtctgtcaacacaatctgtgtgttaacacagaagatatttataatttaaaacaaatgtgttcaaataaaatattttatgtagatagatctctggccaaccatggagagctaaayaactttttgaaacatgtttggaaaccaattaaaagataaatttgatgacagcaaaagacaattaatcaaggataagcatcaaattcatatacaacaatttcttttacagaaagtgtgcagtttgacctgaatctgaaaacacaaatgacagaggaaacagaataggcagaataatggcccacccaagatgtccacattctaattcccaactcgaaattcactttggacctatgaatacattaccttatattacaaaaggactttgcagatgtgaycagtttaagaatcttaattaacata

SEQ ID NO: 3502 - DNA, 566 bp, Bovine  MMBT07385
cttagtatttaatttaatttaatttaattttattttatttttttagttaaaagactcattatggagccttggcactaaaaatccttctgtggtttacaaaaaataagagaagattatatattgaagtggagaaagatgaagctaggccaaaggtatagttaaaaaaagtgttttttaattgctcctttctggggtcgcacagagtcggacacgactgaaatgacttagcaatagcagcagtaccatttggaactaagcttcctttaatctgtctcttcttgcttgcttgttgattgctamttcagtatttttttaaaacaccacctccttttaataaatttaatagtaagcatttctaagacttggcatttctaagtgtactctaatgccttcactgtgtggcatgttggccgaggtgatcagcaactttgtactgtctcccttgtgtttcagtttggcatcacaaacaatattagtgctcagcggcagaatgccaaagccaggctgttcagcctagaagaatagatgatgaagaggcctgttaaaattttcttttgcagactaat

SEQ ID NO: 3503 - DNA, 600 bp, Bovine  MMBT07390
aaatatcattgacttactcagcagcatcaaaacccacaaaagcaaataggttagatccatcccagagacttttctgcagcagtaaatggatttgccctttttagagcagggagcacagttctgatacaattattcttattggactagatgaaggaatttacttcaaatgaggttgctagttgtcctgtggaagctgtgtcagaataaatatccagctactcttcagaggcataatttgttcattctcctgtgaaacatgtgcgcctcatgaactgtagatagctgactttgtttagatgrcggaaaaattcttttattctattaacacttgccttgctcaggtaaagtaccattttaatgaaaacaccttgacatccagttctttgcaaaagggctattttcacatgccagatgtcctgaagcaatctctctttgttacttkttcacaatcaattttattaagggaaaaattccaagtgacagatgtcaccagtgaatgtccacttcagtttaaggaagaagtactttgaaatgtatcattgtcgggtaactatttaaatgcaaagcctatattgctacaatttgacaagaggtaaagct

SEQ ID NO: 3504 - DNA, 600 bp, Bovine  MMBT07396
tggtctttacaagccctttgtttactgtgggcctacatctaaacgaagatttttaactcacttcatattttaacaggatttttaacagtcgcactgacattttctctaacagatcaaaaccccatcttagttcctctctctaaatggggtacaagactataggtgggaatttcagatcttttgcctagcttcacagctataaattaaataaattttatctttcaggggcatctctgtttcctacatcccatttcccctatcaagcaactgatttcctcctgttaccttaatttctatatytccttcctactgcccttctcaatggagcactggttgttacagatttttgctgtgccatcttccttctgatccatgtagaattcactttccaagaattctagatttaaaaattggttaaccaaatataaagagacaaagtactaaaagccaaggatactttaggattctctatttacatggaccactgatgtgtgtttatatatatgtgtatatttgtttgtttgcttgatctgatgaacatctaaaattccatggacagaggagcctggtgggctacagtccatggggttgcaaaaagtc

SEQ ID NO: 3505 - DNA, 600 bp, Bovine  MMBT07431
gacgtcaaatcaactttgggaggcaaaccacaggtttgtggaaagttcactaacaattcctaggtatcaaaattaactgccaatcaagtggtacaggaattacaaaaacaaatagcagaaacaaagaacacttcacaaaggaattatgtcccctcaagtgggggacatcttcagacaaaggcgaggaggccaagatgtgcatggcatgattggacagtggggagtaaagcccagacacgacacacacacaccccctcagcaccttgtattcgactcctctcttcacaggcccgggatgcrgggagctgagccrcacacacaggaactctgggggccaggctgcagaagaggctctctaaacctgagtgggaatcactgacactcaagcccccaacccaaacatcatctccagcttcgtgtttgctctaaacaactatttaagcaagctgtcatccacagaagctgcacgtgtgaacccagttcgagatccaacaagcattttgaaagaccccaaatcacactggttaaaattccaaaactgtaaggaytgtgggattatcttgggtaatcttacattctccaacccctcatctctcctct

SEQ ID NO: 3506 - DNA, 600 bp, Bovine  MMBT07661
gctatatagtagatccttgtttgttacctattttaaatatagcagtgtgtacttgtcaatcccaaactctcaagctatccttcatatatgtgtaactgaatcatgttgctgtacatgtgaaattaacacagcattgttaatcaactatgctccaatacaaactaaaacttgaaaattattgtagctaaatattgggggaaaaaagacactcacttggacttgaagacctttctgactacataacctctacaggctgattgccatcttctcaggggtccaatgtataagataagattcatrtgtctttcttttcctaaagagggctaaggaagagaaacaaaaagcagagtttaccagatttccttaagggaactctgacccttgttttctcagaaggaccaggttcaaaataaagtcatgtgttggctcagttagctttcatgacaaacaccaacactttactggctatctaaagtagagtcaggtaaaagaaagctgctatttggggacagattttatccatgcgtcagtcttgtgctatgaaggattcatagtgggttataatgagccattacaaaacatatttggaatttgggaagt

SEQ ID NO: 3507 - DNA, 600 bp, Bovine  MMBT07886
cacaggatatattgactgtagaaacaatttactgtccagttcctacataacattgtattgaatttcagaatatacacatattcatgcatatatagagtgaaatatatgtataattactttcaatttcacatcctaacagaggactgggatcagccacagttcaatctgtacacttgatacctggacaccagatgtctttagaatggaaatattttactcagtgatttctttaagagagagtttatgttaccttactctcaccttcaatatgaataagaagagattgagaacatcaaaggmggtgataactccttttgaaatgcagcacactttgttytaaacyctctgacagrcagccaatccttattaaaatcaagccttcaagatactgtgaagytgtccttctctctaggctgttttatcaaatttggttcaaaatagttctgaaacttttcatggatatagatgtaccctgtatgtggtacagtggtttgggtatggataagatgcacccggctttctgggaaataggccaagcactggcttaaggggaccactstaaggacttttcttgcttggctccttgacaaataggatgcc

SEQ ID NO: 3508 - DNA, 600 bp, Bovine  MMBT07894
tggggaaggaaggaaagaaatagtaggaaaaaagaaaaatcttagtactagaatgtcaactgtataatcgagtttggcaagagaaagttaggacccaaaccatcttcaagagctacttaaataaatgtcaattaaaatggcatatatgctgtgacttgcttaatttctcaaattatattttcttatttccaacatggagacaataatgccttatgttccacttgaaaattaaataaaacataagagaagcacctggagcagtgactggcacaaagtaggcacccaaaatatcaataacaytagcaatatttattcctttatcccagtggttctcaaccaggggcaatttcgtcccctagggaaaactaggagacttttttggttgtcacagttgggagggtgcttaatgctggcatagagtgggtagagaccagraacgctgccaaacatccacaatgtacagggtggtcccacaagaattatctggctcaaaatgtcagcagtgccaaggttaaaaaaaaaagaaaaaaacctgttttactccctagtttctgaaatccattatctcatggtctgagacagtcagggggacttagagag

SEQ ID NO: 3509 - DNA, 600 bp, Bovine  MMBT08080
agatttatttaaaaactagtgataaaactatcatatgacccagaaatcccactactaggcatataccctcaggaaaccataattgaaaaagacacatgtactccaatgctcatcccagcactacttacaatagctaggacatggaagtaacctagatggacattgacagatgaatggataaggaagttatggtatatatacacaatggagtattaataagctataaaaaggaacacatttgaatcagttctaatgaggcagatcaacctataacrtattatacagactgaagcaagtcaygaagagaacgacaaatgtcatatacttaagcatatatatggaatatagaaaggtggtactgatgatcttacttgcatgacagcaaaggagagacagacakaaagaacagacttttggacacattgggggaagaagagtgtgggacaatttgagagaataacattgaaacatatacattactagataatagataaaatagatagctagtgggaatttgctgtatgatgcagggaacccaaatccagtgctctgtgacaatctagaggggttaggtggggaaggaaatgggaggggtttcaa

SEQ ID NO: 3510 - DNA, 600 bp, Bovine  MMBT08098
acacaagcgccaaaaggaaccygttaaaaaaaaaattcattctcctccaagaagcagaaatgattaaattaatcatttcaaacggcctttttagaagaacagacagtacgtgcagtcgagatttgtggatacttgcttatggaggccacaggcggggaagcattttgtgacccggcggaccacaggatgcacgcacgccctgtggcagatgcaggtgaggtggggacgcaaggtgagcgagggcacgggtccctcaagacatcctgctctgcccacgccccagctcagctgcacccagasacgtgtcttctttgttctgattcagtgacgatatttatcactcaaaaggaacatctgtagctgggagacctcccctgatatactataaagctatttctgttcctatttctaaatgcattggcacaaaatgtgtgatgtccaccacacaatcaaagtgcacctggaggtgatttgaaactacgattacggacacggagaggtacagagactaacgagggcagagatttcagaaaaaaaggtcaccaatccctttcagtttgtgaaaatcacacactttcaattatttttaccactactggg

SEQ ID NO: 3511 - DNA, 598 bp, Bovine  MMBT08170
  misc_feature (1)..(9): n is a, c, g, or t
nnnnnnnnntcgctgggttctgttctgacggctgcctcccaccagtgtgaaacagaaggatgaccttattctgtgagcaggacaactgtgaaaggagctgtgtatgtgaaagtctgtggaaagacagagccacctagaatgtccctcccaaaccagtcagcagaaggtcttctgcagggggctcccaacagatccctgaatgccacagcaactccaggggcttgggacccggggactctccaagccctcaagattgctcttgtcgtgctcctttccatcatcaccctggccacagtcctktccaatgcctttgtgcttaccaccatcttcctgaccaggaagctccacaccccagccaactgtctcattggctccctggccatgacggacctcttggtttccatcttggtcatgcccatcagcatcgcctataccaccacccacacctggagcttcggccaactcctgtgtgacatctggctgtcwtctgacatcacatgctgcacggcctccatcctgcatctctgtgtcattgctctggacaggtactgggccatcacagatgccctggagtacagcaaacgccggactgtgggcc

SEQ ID NO: 3512 - DNA, 600 bp, Bovine  MMBT08852
gcctggcggactatagcccatagagtcacaaaagagtcagacacaacttagtgactgaacaacaactcatgcagaatcacttaaaccggtgcccgcacaagtaagggctcagtgctttttagttattattatatatttcatatttaacatgtagcatggcgcctactacagtaagttgcctcttgggcactttctttgggtcctcataaaggacaaacacaaagctgaacatctgcctctgatcatatcgtacctgacaagctttattgaaaatgctttgacatcttccatttttagcartttttatccagcagagaactgtcccagaatacataagctgaatacttttttttttgtcctgactgcatcaacttttattggctccaattgaatgataattatttgaactctactacatgccagggctctgctaggactagatatgccattataagcaaaacatatatggccctggattcgataaaacttaagggagacaagtactcaatacatttttaaaaatgcacaaatatatgtataataacaagactatggtaagtgcttgaagaaacagggtaggaaggaggcaaaaccagaagc

SEQ ID NO: 3513 - DNA, 600 bp, Bovine  MMBT08859
gcctgctgtccagctactgaagactctgtgrgtggctgtgcttsatgccattgttccctttcctcatctcctccctcaactggtctcacaaatacaagtttggtcactgcctaaaaggcaccctctgagcatttcctaagagcgcagcccacctgcttgtggtttttcatatcattctcaagctcrtgagaggcatgtttcctactttttagtataccagctattcaaaaagttcccackgattccatgagatcctcctgccttttgccaggaaaacatcagagcatacagtacaaggtrcctgtaaaattcctttttttgtgtccagatatttttttttaatgtaaaaacaacttcagcttaaaaaagttaaattccaaagccagcaagttctagcactgaggattctcctctattctcaagaacagggaaatcaagggagtttccattttaaaccatttaagaatcctgtgctttctgagtggaatccttgagagccatgacttatcttgtgtttgtctcagtgtttggttctcagagacaagggtcaaaatgactttcaaaaggctggctttccccgggggctactttttatgtaga

SEQ ID NO: 3514 - DNA, 600 bp, Bovine  MMBT08884
ttttgggaatgagaaaactgatgtttgagatagattcactcaaagtaccaagtgatccagccagaaaacagacccagctctaccactgtccaaaacgtgtgttctcgttcatcacactctgagccctagctcgtatgtggcagagcagcctcttgatcagatgcctttgatatcggctctaagagtgttcagttctgtacacatcaaaaatagacacaagggtcctccggtgatttaactgaatttaatccatttggggggtaatttttgtttggcttcattttactaagttcagccaarctgatttatatgaagcctccaattatcttttcagtgtgcccatgccagaaattttgttagggaaatgttcttttcattattccctctcagggagggatgatgaagaaaaatcaagcgatgtgacagctgtgtctcagaagttttctcctacctgcttatccagttgttttgaggatggcagttcacactgctgagaaagagtctaatatccaaagagtaataattgtaaagaaagttacgtgaggcaaagagccccagtcaaaaccacactgcccaattccccccagctactggagagat

SEQ ID NO: 3515 - DNA, 600 bp, Bovine  MMBT08952
accttgcaaagagacaccaaccacatcttggtgctgttatgatgagccacacctaaaatatcccagaaagccattaaaaaaacagccctgaggtctttagttcttttttctttttttcagggtacgaacatccatgatttaactcagcaatactttttcttctcaaaattcttttcaatgagaggaatctaaatctttcctgtggcagtttatttccctttcctcttttttcctcaatggtatatgtcttctgagagcgacatcgagactcaagccttttaagaatttttggagaagatragagaagaaaagcaygggtactgggggtctctgggctatgacatgcagagttccaaggcagtctgtcttccttgtaaatacaaggtactggaaggggattagggacccagggtaaagccacagggaagcactgttgtgccaaagagagagtccttgggaaggccagctgagctttctgctgtttgaccatgtgcatagcatggctgcccagtccatctcctgtcagatggccactctgtagattagcatagctgccacttggtaattcatcttatttttgtaatggttacaggcaatgac

SEQ ID NO: 3516 - DNA, 600 bp, Bovine  MMBT08957
gcggggtcagagsgaagtcttcaaaatgcagcagacactgaaacatgattctactctgagtcctcaaatctgcaacagtattctgttcacttcaggattcctggtgcaaagcgttctgtaaatgctcacaaattcaggcttccatggccgttacgtgataggccacttcctctaaagtgctctaaagcgcacagcacgtttmagttagacttttctgtgtgtaagagaaaagtggtgctgtcacaagcagaaaacctaacagccactgagggccaagttaaaaaaccaaccacattaacrgtggactaaatagaagagttgcttctcaggataaaagcctccattaaataatcttcatcagytggtttttagccaaacttgacagayaaactactcatttgcagctgtggtgatttcgagtctaygactttttcctttaagggaccaacccatggaaagcactggttgtggagggagcctcggggagaaagtggtaaccttcccctctctaaccaactctgcgctgggggaaggtatactccttaatgggcttccctggtggctcagacggtaaagaagccgcctgcaatgcaggagacc

SEQ ID NO: 3517 - DNA, 600 bp, Bovine  MMBT08993
tattgttaatttagttttattttattttttaactttacaatattgtattgattttgccatatatcaaaatgaatccgccacaggtatacatgtgttccccatcctgaaccctcctccctcctccctccccataccatccctctgggttgtcccagtgcamcagccccaggcatccrtttctagtttataaaccataactagtttatccatagttggattacattattacatataaatcactaattcttttctgttctattagaattagatcggatttaatgcttaatggaactctgctgraaagaccttatgctgtttttccatgcctgttttcccctaacattattgcataaagaaatgagataaaaaggagaacctggacatatctttctattgactgaaattttgtatcactaaaatgtattctggaaaaggacatcctaatcctatggtatattgctgccataataaattacaagagggggtaattttattttattttcaaattatttcctacaaaccagccatctaattcggaaagtggttaagagccaagttttaaaaattatgtaccaggaaatgcctcatttatgaatgtat

SEQ ID NO: 3518 - DNA, 598 bp, Bovine  MMBT09055
  misc_feature (1)..(138): n is a, c, g, or t
nnnnnnnnnnnnnnnnnnnnnnnnnnnnnnnnnnnnnnnnnnnnnnnnnnnnnnnnnnnnnnnnnnnnnnnnnnnnnnnnnnnnnnnnnnnnnnnnnnnnnnnnnnnnnnnnnnnnnnnnnnnnnnnnnnnnnnnnnnggtttcctttcttgaactccataaactttacaagacctattcaacatcactcaactaaatcacataatggtaaatttataacccagtggtgctaaatgatctagttgattgtctctactgctggctaactaaatattaaacataaagccagctaacccaacyttgttacttgaactttatcatccccaaacaagagaaaaactcatgcctcaccatatttcccttaattatgtcttcccccaactggtcttgtaaaatgggggagccagtcatgctttttatcccacctcagggggtcgagagaatgggaaacctgtcactaattcctttcacctcacaggcaaaactccttcacccaattaactaagaccaggtgcgccctccactgagtctgcggaatgcagagaactcacaaaccttgcttccatgttggcagaaaggagcccagcctgcacctgat

SEQ ID NO: 3519 - DNA, 600 bp, Bovine  MMBT09191
tcaacgaaaatatacttttcaggcaggcgtctaattgaatctggtttacttgaaaagaacagtgatagaatttgtcacaataggatcttaaaggtcatgcagggaagttcattcaaccctccttctccagccaagtaatttaggttctcaggtcttccagttagaatgatcagactagtgacttaaatgcattgttagcctgaccaagtaacgtctgtattttccttggaggcccgctggcctatgctcaagttcacgaacttctacagacaggtaaayggagtcacgttgccctcattwaccacctgccttagcacctgtttcggcatcaatttcacagtaagggattagagagagaaagccgtattccctttcttactcttttgggtgttaatgggcttatgtgtgtgtctatctcagagaaagtatttcccccttagttagcactgtttggggcagggagatacagggcttacctacttccatgtccttccaccctggcckcaatctccacaccaaatcctcagaaayatccgctatctcaaatctagctctttctctaggctttgggacagtctgaaatttgggagctgagaggca

SEQ ID NO: 3520 - DNA, 600 bp, Bovine  MMBT09283
agggatgggggagcctggtgggctgccgtctacggggtcacacagagtcggacacgactgaagcgacttagcagcagcagcagcatattaaaaaaaaaaaaagccaacccctggtctaaatcaaaaggcagacacgatgccatctttcaatatggtgtgtaaatgttcagagggaagcatgcagagccctgcacaaagacggaagctgaacttgatggctccagtctgcccctgatggccctcatcctgtatcacacrccrctcacttgatttgtctcaatgtrtctcaactstaagatrcaaggtcaagagttaccttccacctcagtcattttctttttcccccttaagcagaaaacgcatacttttcaaacaaaacctcatgcagaaatagagaaatttcaatacataaactgagaaaagcagaattgttctgttgaagaggggctggaagggtttggaagccccatgtcttggcatcctgccagctcttcctccttgtagccagggtttttcaacagcagctctagtgccattttggcccaaatagttcttggttgtgggaactgtcttctgtgctgtgggatggttagcagcagc

SEQ ID NO: 3521 - DNA, 600 bp, Bovine  MMBT09294
aacttggccactccctctgagaggccaagagtcaccactactttggatcgtctgtgaagtcctgtttgctttagtgacaaggctgcgtgtcacagcacaagaaggagcggtcaccccccacgttggccggctcggtcccaggcaaacgaggcgccacggttaaccttggtttctctgagacagcctgagaagccatccaaaggaaacatgacaaaaacatgtgaaaatctgcatctgcgaaagtatccactgcgctggtatttacaacaggggggagaaaagcaggggacaacttaaatrcccagcgacagtgagctccagtgcattttggtacacatcccctcaatggccgaaacagtcactaaaaatcacagttatgaacacagggcagcaatacggaaacagctcggttatacgagtatcaaatgacgattctgtcagaagtactcgtaacacaacacacatcaaaacaatggctgcaaaacactagtagaaacagggatggtttattttgtctttcaaattttctataatgtgattatgttatgtttataataaacaatgtcacgaacctcattccatagttcatcaggcactcta

SEQ ID NO: 3522 - DNA, 600 bp, Bovine  MMBT09367
ctatgttacaggaaacaaaccactcctagtccaagaaaaaagacaatttctctgaacctgaaagagacaacatttaaagaatccaggatcgcccctcctgatagccctctgattctcagttccttctggcgagcttcccaggactttaatttttgttacctttaacctgatttaaatgaagtcttcactttatgaacagtaatcatataaccagctcttctctgaatcctcttcctcctccccctccttttttggatacaactcctgtttttgctctgttgcaaacacttctcaaaaggraagcaacattgttctatatgcttttaaagtagctcaaagaccctaaattgaactctttcaaaactttagaaaacatccagagactatttaatttaggcaactgatattataaaaatcaggaataatcrttcaggcrttcaaacaaaagtttctccgtactaattaggcaaccattattctggggggcttgagtaactcgccagctgttgttaggctaaaacaggaaggaatttttgaacacttaggggtgtcttcttcttttaaaatgaacaagagaagagttggagtcaaaataataat

SEQ ID NO: 3523 - DNA, 600 bp, Bovine  MMBT09595
ctttcatggagtttatattttgtagagtcacacaataaactaatagatataataccaggcagttagagctgcacagagaaacttctatcaggtgaagggtaatgaacttgctattttagaaggacaggcaggagaggcactgtatccagtgggcaattttcagaaagaaaaatctatggttatcttatcaccttggaactccttagcaaccaaggttcagaaatatataatcatttttcattactttatcccttttagtactccctttgggaaaggtaattggactcagaattccaagaygtttctccaggcctggaagcctgtgacatgagacatattgcaggagcagcggaggttcttatcagaaatctggtgaaccccagagagcactcagattttcagatagaaagttacgagtctcatgaaagtgtctccattaatggttccttcaggtcccattgtgggatggtatgtgtgtgcacgtgtgtgtgcatttagatgttaactgtgtgtttaaggtcatgcctgggtgttgactcaacattcctgtcgtttatggctcatttttcaccccgtaaccatggctgatgaggtcatgga

SEQ ID NO: 3524 - DNA, 600 bp, Bovine  MMBT09661
gtcgaggttgctgcaggcagagcgcagcaagccagccctctgctgcctgtattcccctctccaccagccctcacttcctgtgcctgaaaacctaggcgatccagaggagaaaaagaaaaagtcactccctctccccatctcctgatcccaaccatggcgttctgacatgggataagccaagcactccataaactgaagcccgcccttccarcgaaaagagagacgacagcgtctaatgttgttagaaaagtgcagtggagttccgagtctgtccatattgggtgctgctggggaccaggmgagtgtgggcagcagcaggatcccagggcagggctgtgagactggaaccctcacgtccagccttcccagtgctcagagaagggtcagaggtctccctccccgcccctgcctycccactgggcgagccggcaccgagccagcatcattcgtgggcacagatgctcagggaaaacagacacccgggaggttatccggagcagaggacccccgaggcttctcctgagaaacgaaaaaccgcaattagcagcctccagtcatgaatctccttctacacttaggaagatgcaaaagctctactta

SEQ ID NO: 3525 - DNA, 600 bp, Bovine  MMBT09722
gagttattagtgagtcacagcaaactgactttgtgccatttcagactcttcgtcagtgcggaatgaagtgcaaccagatgaatcaacataatggttgaacaaggtcctaaaccaatgatcaccttcactgtgccatgaaggtgaagtaaagacagtttaaagcagacagtactatgctggtatacttgataggcacaacttcgagacagagtttccattggtgaaacttgaacaatatttatagaatatctactatgcacaataagcattctggaatagacagaatccagatttatgatwgaggtttgtaaaacctagtttgaactatggcttgcaaaggcagttatcttactgaaagcaatatgtagtcgacttaagtcattctctaacttcagcctgattccgtgggtaatttgcgataatcagaaaactatgctggggatcagatgttgttcagtggctaagtcacgtccaactctgtgtgacctcatgggctgtagcaggccaggctccagatgagatcaatacaatttataatacctcatgaaatgtagttagatagttctaagttcgagatgatctggctgactctctaggatt

SEQ ID NO: 3526 - DNA, 598 bp, Bovine  MMBT09755
  misc_feature (1)..(13): n is a, c, g, or t
nnnnnnnnnnnnnttaagtaatgtatctgttttctaaatgtatcccttcattggtgcttttatctacagatttctttcttaggataaatttagtcatgagatggtaatgcactggcagcagtttgcttctaaaaagcaattatatttctactaaggacaagatgttgggtggaggaattacatacttatttggttttaggtttatttagccatacaaaaatgtttttcctcttaagattttggcaagaaaatctaaccaattggaaaaacatctgctgttggttgagtgagggaatggcwtaatcagtaaaaattacttataggaaaaaattgttttaaaaaactctgcagcttcaactctggacttctctatggcagttcatccttaatctctcccagaaattttcttcccagcaaaagattttacctatgttgggctacttctgtatatctctaattttattcaaatctttgaaatttagatcacaagtcatacactttttaaaaggagaacctgttttcacagcttttgctgtctaacaaccactctgaaacttagtggcttgaaacagttatccggcctggcagttcttctgct

SEQ ID NO: 3527 - DNA, 600 bp, Bovine  MMBT09964
tatccatcacatagtctccattcatggaagaatgactatccagtggaaaaggaaaagcattttctttatcaaaggaggcttggggacagattacttcatcttcactttcttcctcaattttcttccttttggtyctgcctcccagtgacttcaggggtaccacatgtttatctctatcagtatctttactgtgaccaatattaccctgctcacttatgggttcacttgtatttttatttataagcatctgcttattagaagatgactgactagggatcttgttcacttcagtcccaagawgatgatgtgtgatgagggttccatcttcagattttgatctaggtttctctggtccaggagcagaagtattgctgaggggcactgttttcagatgggtttttttcccagtctctaaaagagaaggggacaaacttgtattcaaacctaaactacttttcacgttagagggagctccaaatacaggagatgatacccgagtagtcaattcttcttgaaaaggagtctttgaatctgaaaacctaaaaaaataaagagtggtaaaacttttttcctattaaagaaacagggtaaaaattaaaa

SEQ ID NO: 3528 - DNA, 600 bp, Bovine  MMBT10028
ctgaatttcaggttcatagatgagcaagcagaaactgtcatcagctggaacagcagagttaactgtagaatcagatatatactgatgaccccttttattgctctgaggatagttatagcccataataggatagcttagtttgaagcattttgagagacatgtgatttcctctggagggatttctccttgcccctgcagtcataagaagcagaaggatggtctctgctgaaagacgtatctcttgacttcatttctcagaggtgtgagcattacttgtgagacagagtcaagtggcaatgytttcatttactgtttcatttactctgttttcatttactggagccatgtactatgtttctgtcccacggagaagtctttgagcccctttcacacttgatggcttttaaatattatttccctccaaaaggcatttctctgtaaataaaaagctatragtyattctgctttattattctttcctctgaggggaaactctgggagataaacaatacccagataaataaggcttagagattgtgggccaaggyttctattgattcacaatatatttatctctctctctctctctctcaaataaag

SEQ ID NO: 3529 - DNA, 601 bp, Bovine  MMBT10128
  misc_feature (1)..(1): n is a, c, g, or t
nacttagaatactagttaatgtcatttatgagacagtattaaatattgtcttcaatatcaatcttattggccttaaactcaaataaaacaaaaacaaaaaaatagctgatggttgaagagaaggctagtagtggggaccctactctgagtgtccttcttgaaagtgttttagctcattgctatgagctgtggtttcttaatgtatctttgttgggaaatgatcagacacagacagcagataccagaattttactcaaagattattgtgggtttttaggcactaaaacaaaaaaaggagttragatatgatttccacatttcccagaacgttatgtccacatccttaaggatgaaactgaggacatttcgggtagctttgatgtttaatggagaaggaaatggtaacccactccagtattcttgcctggagaataccatggacagaggagccttgtgggatacagtccatggaatcacaaagagtcggacacgactgagcgactaacatttgatgtttaaagaaaacgtcttaaaagagattgtgttaaagttaagattaatctaaatggaagaacgtcctgaaaaatatatttgcaatgtc

SEQ ID NO: 3530 - DNA, 600 bp, Bovine  MMBT10132
gggttgccatttccttctccagtgcatgaaagtgaaaagtgaaagggaagtcgctcagtcgtgtccgactcttcgcgaccccatggtctgcagcccaccaggctcctccatccatgggattttccaggcaagagtactggggtggggtgccattgccttctccatattcaatgttagtggttgtcaaacagtggtccccaaccagaagtttgttagaaatgcaagttctcagtccttacctcagaactactacagcagaatttctgggaatgagaaaagagactgacatctgaaatttartaattccatctgtgaatctgacatgagctaaagtttgacagctactgggctaagatgtgtatgtgataaataaaggagataaatggcatttatttatctactctgataagttatgtgatgttcttkcaacttaattggtcaactggtactaaagtgtttttcaaaatgaaaaagaaggatcgaagttatcattacagtcacattcaaatcatttgttccagctcagctccaactttgcagaaatataaaagcctaagttatacattaaccctgtataaattcaaaaggtttactttgggg

SEQ ID NO: 3531 - DNA, 600 bp, Bovine  MMBT10394
ataaatgtgaaatttaatctagaaaatagatcatactgtctttggagagtgctttaattttcaggccaatcaccacactacccctgcacagagcatgtatcttaaggaaaactgactgcatgcccactttgggggcatatagtatacacccaaattaattcacataagccaatatcctggcctaaattctcagatcaaggctgggcacacagctcaacttaagcccacaagaagctagattttctggggcatctgggagaggaacagtctctctgcacatgactgaggaaccacgaaacrggttgagctatggcarccatcttgtgatcayagggttggaagtcagcttttactactaactgctaccacagragayratcaaataaatgggaaggaaccttgtccttgataacatcatcaagcccactcaacaaactgaaccacacccacctatgttcccatgtactttcaaggtttcagtaatactttatgggaaaacacaaatgaagtttttgaccaacccagcatctttcctgatttacacgctacagtccagctttcccagcaccacagtcctgaagatactgtcttttccccaat

SEQ ID NO: 3532 - DNA, 600 bp, Bovine  MMBT10449
ttggagcttacttagcaaatatattgagtacaattatgagaacatcataaagattggggaaacataaatagtgaatgaaataaattattytttcatatttatggactgaagcattagtgctcctttatatttactaaaaattcaaaataaatatgaattttgttgttttgtacaaaatrttaccaccccactgacatcctatagtttatgtatgaatagatgaacaaaaaaatgtctgtatagttttaagtaaaatggcattaatttataccatcaatgacaaactgtggccttggaagrtgacatattatctaagcccttaccagtggtaacacatgtaaactccaggaaaaaaaagtatatatatacatcamtatatgtagaatatatttgaaattttgtatataagtgtgtacatatgcattaacaactttactaagatataattgacatacatgtgcatgaccacattcaatttcaggacattttcatcaccctcaaataaaccctctagtactcacctccccaactcctgccaaccttagacaaccactaatctgttttccatctctaaatttttaattaagatatattctaagg

SEQ ID NO: 3533 - DNA, 600 bp, Bovine  MMBT10479
agtaaaaaaaaaaacttgataccgttcatcttggcatcctgtagccccttgcatggtgccaagcattcatgagattaataaatgtttgctgaattaaatggatttgagtgaaaccttcagaacagtattattgtcagaatatcacagatggtaaatggcagtctcctttgttaatagcttccaaggttgatgatgagataaaatcagtcaagcatccatcattcatcaatatgggaaaagctcctaaatacgaaatcctctttttaaaagtcattgtattattgttgcctcattgcaacscattccagtactcttgcctggaaaatcccatggacagaggagactggtaggttgctgtctatgtggtcgcatagagtcggacacgactgagcgacttcactttcacttttcatttttcacgcatcggacaaggaaatgggaacccactccagtgttcttgcctggagaatcccagcaagggcggagcctcttgggctgccctgtatggggtcgcacagagtcggacactactgaagcgacttagccgcagcagcagcatggtcacattaaaattgtgacttatgtacccatccttagagc

SEQ ID NO: 3534 - DNA, 600 bp, Bovine  MMBT10509
tttggccgaactagtctttattgacttagagagtaaattcgaatcacagmaggagacagaaacaaagctcctttctgacccagaaaggccccctgcatctcctggagtgcctgtcctggggtgcccgccatcctgggagcagcaccctgaagccgtggtcttcgccctggaaggcagtcttcttgctccccctctccactcggagctggaccgcctcctgctgtgggggcttctgactggttctgggactgatgctgttcccgaggcatgtcctttttacctcctgggctttgggggagyggaggcccaccwgtctggtctcatctctaagtagaatcacttggttgcctcgctgccccggggccggttgacacgagacacgccaagcctgggccagggcctgtggaccagcaggagcgcctcccgcgacggccagatgggcacgtactctgctgtgttgagagggaggcgttgaattgtctcaagttcgtgccgcggggagagccccattccagctgacctgtgggggacagggaccggcagcacccactgtggtctcacatcttccttccccagcctcctgctttcctgaagaccctc

SEQ ID NO: 3535 - DNA, 429 bp, Bovine  MMBT10526
cgggagtccccccacaggcctgcaggcttccaggcactgctggttccagagtttacaggccagtcactcagaggacattctgagagccagccccagccccacccccctgccagcctgacaacagccaaggaggttgtcaactacactgaggctgaaggtcttataaagagcggctctgtgcctctcagcaaaagtgtttgcttccatttgcccaaagggctgaatacataagacccaggtgacttctgatggcagagttcgttaggctcagaggagccgctggcagcagatcactcatgrccccaccagccgaggtcagcaggttcccagctcattcccctgccccgggrcccttccygccaaactgagaccccattaacctgactttgtttaagcgggctggggggcagccctgcggcttctgctcca

SEQ ID NO: 3536 - DNA, 600 bp, Bovine  MMBT11205
ctgaaagttatgatgactaatgagagtgtatatagatagcagaaaaaatataatgatgatatttattgagccttgctatgtgtcaggcactttcacagtacattaaacccactttattgctagatatacataatgctacttatctgcatcaagattgttgtctcatgttataaagagaaactcagtaccttaagtttctctatagaggatgctgtacctcttgagtgcataccaaattgttactctactctggtactcttgacataaaaggtttgttcagtgcaccccttaaaatgagamtaattccctctaactacatttgcttaacattagacccaaaggagtgtttccttatgcctctgacagaatttttagggaaggcagcttcttctatttctatttgcagctcctctgctcaaaaatcagatatacagccatggatcttagtcactagtgattcaacaaaggtcaccatgttgcacttaaactttcctactttcattcattcagggttgyatctttccaaggagattaccaaacttttacctagaaagacctgtggtagagttccacacttacctgaactagtgattacagcag

SEQ ID NO: 3537 - DNA, 600 bp, Bovine  MMBT11242
gtgatactttactttctatcatagttttctatcaccctggaaaatgggcagacagtactgccttcattctacaaggtgaaataatggagacttgggacagtaagagtgacatgaggaagataagccaattagtgctttatccaacctaaaccagagtgggagggagatttgactccaagggaccacagggcactgccactcagaagaaagttctgctgaaaccagacagccttgtgcctgtgccagacttagttaactccacccaagctttccctcccactagacttaattagtcatggytggtaccatgcacatttaagaatcatgtgtgtggaattcattacaatacaagatacactagctcagagatgcactgcttccctcagaaaggggaaagcattcccacaaatagcagagccttragttgcagatgatggaaacccaagagcagggaggagccaggaatgaggaggtaggagcctcagtgagtgggttggatgtttacttgaactccttgcctcactccatccattttattactaaccggtgcaggacagtgatttttacctgcgcgatatttcccttggagatttagttcat

SEQ ID NO: 3538 - DNA, 600 bp, Bovine  MMBT11314
ttcccaactttcctcacccacatttccatatttctgaggtttctattacccacaaaaaatgctcattagttagcaagaatttgcttttccagggcagctgggttccaaaatgttcccttatttataaactggagccaagactttatcaaactctgccactctttcaaagccagctcaaatccagtctcttttcttaaactgttcttgactgtcttcccttgaactggcctctccatctccaaagttctgaagcagatatagtgtaaacctcggaatttaacacgtaaccacataatacaratcsgaactgcccttactcagtaataactcccactcactcttctttggtcaattctatccccatgggatcctaagagggtcaagaattataggaatacacttctactctcatcccctgaacctccaaatttatctttaattgtcctctctgcttctgtctcctgcctcaaaagaagctattgtcatgattcctttgtaggtaaataactccgctagctttcttgatctccttccttctgcctctttcagaatttcagggcatcagttgtgttccttctcatgtttttagtcccttcttct

SEQ ID NO: 3539 - DNA, 600 bp, Bovine  MMBT11497
atgggattttccaggcaagagtactggagtgggtgccattgccttctccggaaagaggcaggcggaggccctatggtcctggcgttttttgtgatactggggtgggggtactcctacggcttaaaaaagggggagcacggtagcttaaattaacagagggagtactttgtagaaaataaaactcggagcccggtagcggtgcagctgttgtagtctcccagactagagacctgtgggatccaagcctggggtgctcctctggagccctgctttctgctcaagctcttgggggtgaaaggsgagacaggcggatcccactgtagtccctcaggtcacctttcctagatcttcctaggttctggaataggaccagcagtgcctttcatttggttggatttgcgcccccttgtttcccaggtactgccacgtgagagtacctgaggggctcctgaaggacctgttgccaggaccagtgaccctggtgatggaacgctcagaggagctcaacaaggacctgaatcctttcactcctgtgagtcagattttctcttgtgtcctgccattggctttcgctaggatccatgccaggcccattcccca

SEQ ID NO: 3540 - DNA, 600 bp, Bovine  MMBT11899
ttctctagctaacagaagtaaaagcttaaagacaagggtggtgtatcttatttacctgcatagtacctggccatataatgcatataatgtcactcaataactatatatttgaatatgctgttgcttgcaacaacgacaaagcaaaagatttgatacaactatatgaagttatcaaaagatatttcccttaaaactgactatactgagcatatattttcatatcaaattatatttttaaatgtgctatgaaacatgtgctaaagtgaatgtcactttggtaatatgcataagtgtctackwaattttatgttcttaaaattcrtatactcatatattataattttaatatrtctataatttaattgtagataaattagttgggagaagttttctataagtcaaattaaattatatatcaaatttacagcataaatattccaaatatcaaactgaaacagaagtcaaaaaggatatttaaactagaatgtatagtagaaactaattaatattaataatagtgcttgtgaatttagcatactgtttcatttccagtatttttcacaaatatttcaagataatarttctrtacttcaagaggga

SEQ ID NO: 3541 - DNA, 600 bp, Bovine  MMBT12012
cctgactctcaattagctttgccgcttcccggccaggggacgcacacttttctgggttttctgttttcctgggtctgttttctccactataaaaaaaagctggtccgggagcactcaccgtctcccttttgagtttctcccgcttgcgaatcagctccaccagcagccgtgctcgctccaggtcatgccgaagccgctgccaggacttaagctgttctttgagggcccagttcttatcctcggaatctctctgaagaggcaaaagggggatcaggagatgatgagagagccagaggcaaygagagcccaggaaacttgggtcaaaggcaggaaaaccaaagctgggagcagtgatctcttggtaggcttgccagctaaagtggaagctctgcaacccactgtggctgttgagcccagtagagttggtgctcggtatatgcttgttgtgaatgaaaggatgaacacaaggaataatgcatgaaggataatgtgtaaggatttcatccttagcctgatttgaggtctagtttaaaggaacaaacagcccaagccctcaggcattggaaactgcagtcacaaatctgttcttgggacctccct

SEQ ID NO: 3542 - DNA, 600 bp, Bovine  MMBT12029
tgactctccttttcccattttctctctcaggtatttcccctaacaaaatctgtgtatgcttacctgagtgttgatcaatcagtcatgtttgactctgcaacaaccccatggattgtagcccaccaggctcctctgtccatagaattctccaagcatgaacactggagtgggtagccattccattctccaggggatcctcttgactgaaggatcaaacccggatctcctgcatgggaatacctgcttaatcccatcttaccatcttgctctttgagggacatttcattcaaagaggatgtygtggagcagaaactactgtttgctcatccatatcacttggcacgatggagtctttctgcagctgctatggactcttctcacaatcacctgcgacttcctgaccaagccgctgggctcctgtgccatcctggaagaaggctgagcatggagaacccagactggctcccaggcacggttctcaaccacaagcgaggataaatggtggggaaatgttcttctcttgcccctccatgagatcctatattgtggcttcacatagaagatgcccagtttctccatggagcaggctgtcggttgacc

SEQ ID NO: 3543 - DNA, 600 bp, Bovine  MMBT12448
ctgtgtatatgaagatatgtctgcataatgaaagcttagatatctctgccatgaacatttgtaagacaaataaccttttcagaaaacgtgtgtgcatgggggatattttgaaactcacaacacttgtcaagaggaaattaatttccacttgaactaagctaatgtgaatgtcaaaaatgccctttsaaagtttaatcacaagataaaagatcatgtctaagagtaaatttgcatatataaaaccaatctataacactgactaaatgttgttttatgacaacccagttcagtaaacaagcyggctttgtgaccttgggtaagtcatatagtttcatcgtcctcatataaataactgatatgtgaggacatcctgagacatccattcaataacagcaaaaataataaagtacgtctacaatgtattattttaaaaattgtatgagatatttatatatgcatgtatcatatatactcatatatacatgtatagatatgaattatttgcttaactaatgattatacttttcctatttgcatattaatcatatatatatayattcacatacttatgaaaagtttagtgtctagatttgttaatgt

SEQ ID NO: 3544 - DNA, 600 bp, Bovine  MMBT12496
agtcataagatctctatataaaatatgtagacatctgtatctatatagatatacattcataagaaggtaaagagaaacccaaaacccccaaacgctagatgagagggataaaagctgaaaataaagatatacatctatgaatttttatgactaccttgtgagyttacttgctgtcaaactgttctgaagacatttatttgagcagctatagaaactcctacaatgccgttttcatcttgatacttctattttaaccttgaacagtctgtcaggcctcctacatttctctctgtcatagcyatgatgcctcttttggcaataaacatcagtaaacttaagtgccatgagtcatattgtcaatgtttaattaaatcatggtctagctagggtttgatttatttaggcctgaattcatttagaccctggtcctcataaatttacatagcttatttaacaagctcatgattgtataaattgtagactcctttgaaatttcaaacaatataagttgtaaaagccttttcttgtcaagccaagagtggtagaatataatttccaagggtggtgttttatttttaaaccgagcattataaaagaaat

SEQ ID NO: 3545 - DNA, 600 bp, Bovine  MMBT12586
caggaggagggctaaatgggagggttctgaggctaaagcagcactgtccaggctaaaggatggacactcattttcttagtaagcatgtgggatttccagagaaacctagattcaaaaactataaattacagaagttaagagcagactctgattatgagctcatgtacctaagattccctccacagasagaacagcttgcgtggggtaaagaaatagacatgggctatagacaggtaaccctgcattcaaaccccactctctcattaacttagttgagtgacttgcttcaggtaccctttygataaaaccctccaatggaaaagacattgggaggtttcggtaaaagcctactgcatttgcaagtaactgggagaggctgtttactgtgcagcctccattcacacggcaggaatacctgaatagctggaccacaggtgagcaaactcaccttctccacttgtccccctggaaagaagaaatcaaaaggaaatctctctctccagtgttcaaaatcgagctggccaatggctatctgtagcatttctctttctagaacacaactgagaaggaaaccttctgcagggttggaattgagcttag

SEQ ID NO: 3546 - DNA, 600 bp, Bovine  MMBT12625
caactattgtttaccaagtataacacgctttgcatgtctttgtttctctccatcagtttttgccacattctttctgagggaagaattatcctgaaaagccaattcccttcccaaggcctggttgccttctattgatagctaatcctgattcaaatgttgaacttaatatccttgtgagtagtagttgctcaatgggtaaagcccacaaactccatcagcggtgccacaggacagaagatcagaggttctggcctcatttaatccagacacaatgggatttgtggagagaaggtgagtagygggraaaggagagtctaatsttggaagaaatgaataaatagctccaagtctttctaagggaaagattgaattgaacatggcatttgcactttacaaggaagtagatatctaacccaagcaagaataagagtttagggagaattcttggtttaaaaatgaggagatgatcagaatgaggattacaactaacatgcttgcatttattagtgttctaccaacatacacacacaaatcacactcaagtttagggcctcagtacagagctcagcttcataaagaactgactaatgaaaacagaga

SEQ ID NO: 3547 - DNA, 600 bp, Bovine  MMBT12791
tttagacattcaacaagggattaacggttcttttccttgtgttttgcccttgaatcttcatcactatcttgagataagtggggaagatggcaaagagaggaaagcaaagtctttccttttaagaacctatgtgtaaggaaagtgagccaaagtccagtctctggaccaaactatgtctctacaaggatgctcagagaagaaagttctatcctccagcatgttcactcacagcagcacaaggatttatggcagtggaaaatgtaaaaggagggacaggcaaacagcaagttaactaactgytgtgagacaataaggatcagagtaccctttatgtgtacaagttccagcccagtgagtcaaccgatgagagcattcgaaccatctaagtgctctacctaagccacagttagttgcccagtgtattgcataatcttagaccctcacattcagcatgaggagagatgagggaaaggcaaatatatggaacccaagagaagcaaagtgcaattcccgtaaaggtagagaaggaatgtatgagccatgccctcacagtattttccgccatgacagctgttgccccaggatcacatggcctgtaaa

SEQ ID NO: 3548 - DNA, 600 bp, Bovine  MMBT12800
ccttgctattactggatgtgacaactctgccgtctgacacaaatcattttggcaatcccagaccaggaggtccatttattggagggtaaatggtaatgaccatggtgaggtctggcagaatcactgaaattgctgctaacctttcccagtttttgtccttcttttctcttttatatttatgtatttgtttggctgtgtgggtcttcgttgtggcacacaggattcttgatcttcgttgaggcatgtgggagctagctccctgaccagggatcaaacccaggccccctgcattgggagcaygaagtctcagccactggaccaccagagaagtcccatcctccttttcttagccccagagagtacccggattgggagctgaagccctggagaacactgtcatagtgtgtgtacacttggattggaataatctctacctaaagataatccagatgaatccccagccccccaaaatatcttcttctaaaggacaaataaaataagtaatctctgtatwaaagaaaaggtgattaggagataacagtaaagaaaattgagactgcacagcaggctctccttaacttcaaggcagtctttctttat

SEQ ID NO: 3549 - DNA, 600 bp, Bovine  MMBT12835
cctcacagtgggagcccttttctggatggggaagtaagaccttagcgtccattttagtaaacttctctttctcatgtgtaagtgcagatgaaaagtgctgactgcttcttttttggcattgctttttaattatgaccatcaataaatcattctatccctgaacaggacttgagaatggcccgaaggcagagacacgaytcctcaggaactaggccagcagagaacagctttctcactccccacctcttcctttaatcctctgtcagaaacagaaacattctctcttcaagaagctggcarcggacagccacacttgcgttccgtctgggaaccctgttagcacccagttctacccttggcctgccttactggccactgtcacagaaatgggatctgtcctctsttctgcattttttcccaattcattttcccttcttaccggtgcaatggcctgaacggtccccccacccctcctcaaggatacgtccatattcttattctcagaacctatgagtactgccttatttgggaacagggttttttgcagatgtaattcagttcaggattttgagatgaggagattcaaaaaacagatcatgg

SEQ ID NO: 3550 - DNA, 600 bp, Bovine  MMBT13031
tagggcaggcccctttgaagatcaggtgggttgggcgggacaccccgtgctaccatctcattaaaaggcccttcatctctggacaagtcatcagcacatctgactccaggattcccttgtggctcctccaaacgaccttggttcccacgtggtgtcagcttccgcatgccttyctctcctggttttttggtgctgttggggcctctgctcccctgctcatacctgtccgctctccagcacctctccatgaccactgtccctgagctgggatgcctccatggattgacttgcagactgctytctcctacccttctcagagccaggccaggatcactctgccactcactcatctagtgtctcccgaatccattggctcccaggagaaatttcatggtaacagattatatgtgagttctttaccctcaaacatatcagtctcagccagagatagtgatgccataaaggaatccatttgtttgttcagcatatgtttaccatatacctcctggagctagacttaacagctaataagatagctgttgtctctggccttccagaactaattgtccctgaaaaacatagccatggacacaagcagtt

SEQ ID NO: 3551 - DNA, 600 bp, Bovine  MMBT13155
gaggcagtgaggcagggtctccttaagtcagggtggrgtgcggtggggtggatgtgggtattgcagttgggatgcagctggggtaacctgaggcggggtggtgggaagaacaggcaagaatcaatgaagaaatgttcctccatgtttggaacacttaatttaggggaggaggagtttgggggttattttactgttcttagagtamcacgaaggttttccaaagaaaagcagcatattcactcatatgattttgcagaaagctgcagacgtagccagcccaagggagaaaaatgaaatacrcccaccatggatcatccctaagagcaaacagtcaaagaatgctaactgggttttcttgttgctgttgaccaccatgcttgtattcttaaataaacgctgggtctaaggccaggttaggtggacaggtgggtggaaagcccgggaagtgtggatccttgcacctccctcactgggagcagtggggccacccagggaggtgggggcatctcagaaggtaagagggtgcacaggctggaagggcatgatggatccacctgagtcgtttctaygtgtgctggtaaagggggagaaagaacccca

SEQ ID NO: 3552 - DNA, 600 bp, Bovine  MMBT13181
tttcactgatggtagttcgcagcccctgcaaagtagcctttgttacatgaagtccgctgggaaatagatgttctgtctctatgacaatatattttaactgactttctagatgccttaatatttgcatgataagctagttttattggtttagtatcttgttgtttacgcatggaatcactattcctggttatctcaccaacgaaggctaggaggcggcatcagaggtgctgggcgtgacagagccatgagccagccattttataagcactctgatttctaaaagttaaaagaaatatatawgaaatctctgtagcctttagttatcagtacagatttattaaattttggcccttaacccagccttttccagtgtgtaacccagtttgaaatcttaaaaaaaaaaaaaaagaaaaaaagaggaaaaaaagaaaaaaaaaaggaaaaaaagaaaaaagaaaaaaaaaaaacagtttgaacacaaaaggctctatggaagaaatgcctctttgtaggtgaagtgttatctctgcatgcaacagtaaaaattaatataatattttccccacaaaagaaacacttaacagaggcaagtgcaattta

SEQ ID NO: 3553 - DNA, 491 bp, Bovine  MMBT13351
aggatgattaatttgctaagaatgttcatgggaatgtctcaatattggtggagagaaatctccaatgcaacatttcttttcacttggttcatattcttcytgttagaaaaaaaataattctaaaattaaaactatacacagagctcaaaactgttcctaagtacatatgtaaaaatcaaatttaataggaaatattgaaatgaaaacatctgaataatattaaacactagagaactgtagacaatcttcctgaaagttttacatgtttggacacaaaatctgttcttacatcttacactrtaaaatcttcaaactcttactacccacatcactctaaaagaaccctgaggaagtgaaaatagttctcatggcagtactcacattcctgcttaaaggtaaaatattcagtaaggtgtctgcattcatggttgcctctcagaagaaataatgtacttggatacagaatcttcaggacccataaatataagaca

SEQ ID NO: 3554 - DNA, 600 bp, Bovine  MMBT13375
ttctgttatcctttattgcagggcttgatcccccatcaaatagtgattctctgaaagtgcagtacctgaagaattattcaaagtaccctatgtctgcccaggttaatgcattttaaattgatttaaatcttcactcatttcccttttgctttcattttattaggataatgagagctccagagatgttttgaaatagaactcatttaaaattccttctctatatttgagcctaaccaactgagtcctaactactgtaactagcaaggamtacttgagaaattcggacatagttatatctcygcacttttctaatgattttttggggtccccttctgccttattaacaagaagcacagtatcttgtacctgaaattatctaagaaccatgaggggagagtggtgagtaggggttggggcatctcactttagcctaaaaggaactcagtgcagcttccacacttctgctgtagcaaggagtgtgtgtgtgttagtcgatcagtcatgtgcaactcttcgtgacctcatggactgtagcctgccaggctcctctgaccatgggattctccagtcaagaatattagagtgggttgttattccccc

SEQ ID NO: 3555 - DNA, 600 bp, Bovine  MMBT13377
tggttgtctgatttcattgaggaggatatcactcagtaaccatgttctgtccctgcctcatccctacctccctgttatctcctattactgagtcagggttctacagagatcctcttctagtttctgaaggcttttaggtttggccttctaaccctctgtgaaaccttgcttccatctattttctgtattcatgtattatgttmtctctccatttcaatgaagatggagttttgtatytgtttcttattagagtggttttaggatatatagaaagaagayatgcctttacattgccatcckaaaatcaagtctagtagtagctcttgatgagcctatatcctcagtgaatctgaaaaaaacaacccrattcaaagaacttttacaaaaaacatgcaggatttcccagctgtgaaacaccactgtagacttaaatatatattcaagtggatggcttccctgatagctcagttggtaaagaatccaccagtttgattcctgggtagggaagatccactggaaaagggacaggctacccacttcagtattcttgggcttcccttgtggctcagctggtaaagaatccacctgcaatgcaggaga

SEQ ID NO: 3556 - DNA, 600 bp, Bovine  MMBT13394
tcatcattttccctgagtgcagactggccagctctattcttctgagactatcttgataaatatactatttcataggccctgtgcatttacttttaaaatttcttctcagttattttacataggtattttagtaaatgacattttcccaatgtgtatgtatacatttttaacaaataactaaaatgaggtatgaaaaccattatcayataggaatcaccttaaagcattctcattgactctaatatttttcttaattgctttttgattcttgtgatacatacatatttcaaagtatttctycctttggaatctaagtgcctcacttttctatttttgtttgcttttttttctttttatgttgcagattgctccatacactgtatcgcatgtttcctagtgataacktatcagtttgagtagaggtttaggagctcctttaatttgcacaaagtcaaggtttttttcttcttcccctttagttatcttattgtccaaatttgttttactaactactcarttgtctagaggtacaggtggatggagaggagaaagctggagttgtgggcactcatatcaggagaccatactaaaccttgggtt

SEQ ID NO: 3557 - DNA, 600 bp, Bovine  MMBT13556
tgacccagccaagtgcccatgggcaaagccaggccagtgacccaaagatttccacctgaccttgctgcccacggggtagcttaactgcactgggccccagaccccttggagaatatggtaaaatcctcagaccaaattctcccctaagtgcatatgcaggaaaatgtgtatattacttaaaggacccgtggctccccttgaagcctgtctggcggcccactgaggctgttcctggcccctcatcagagtctattgacagggacaagttcagtccctccagcacacgtgggccatacagcygggcccctcgggaatcaacagctcccctctacagctcttaacagaagcctggacacccgactctccatcaggtcccccrctgggccccagggagtcacagggcagccagagagtggagtggggagcaagtgggcgccagggctgagggtgtctgggtacatgtgccagcctgagagggagggcccagcagctgcggccagccagctgtcctgggggcaaaggagcgagggctgggccgcagctgtggggggcagggacagctgggctgatgcaggaggaatggagctgggtgggcagcgg

SEQ ID NO: 3558 - DNA, 600 bp, Bovine  MMBT13622
tttctatttacacataattattcagcaatatcagattattttgttaccattgcctcaatgaatcccctatcaattaattgaactctattcattctttaagatataactgaggattatttccataaaggctttcatgcccaccttccctcagatattccctcaatcttgattcatattttcctataggttttcataacatgctgtgcaaatttttttctaaacacttactgtgttacygtacaatgagactcaagtacagagctagcacataacaggtactcaataaatgaccacagatcyggggacctcctacaatgaccagacctygaacagctccacagtgaatgctccctgcactgcaaaagagacataaaaatactkcctgctgagaatcaccctggtgcatatatacaaatgtatatatacacatccatatgtgtgtgtgtgtgtataggcataggcatataccctgtacctcatgggaaattaagttatcttcagagatttcttggaaattacttgtataaatcactagaggaaagatttagaaatgataactaagtgtttggggaatttgcaataggcagtaatacaaaaata

SEQ ID NO: 3559 - DNA, 598 bp, Bovine  MMBT13788
  misc_feature (1)..(45): n is a, c, g, or t
nnnnnnnnnnnnnnnnnnnnnnnnnnnnnnnnnnnnnnnnnnnnnaaactatatgttaaaatgaagtgagtccatcttagatttacagtaaattaggaaaacagaagaatttgaacctaaaaatcaggctgtctgagttccaattctgactctatgttagcagcgtgacccggagcaaagtgctcgaacckcgttaagccccagtttactctcctttagagcatgatacacccacctcttaggattgtcatgaaaactgaatgaaaaactcaggtaaagatgtttagcacagagcctggyacccaggatagccctcacctgatttcagctattattatcttcatcatcatttggttatttgaagtaatgaaaagccaatgaaaatagtaaactattaataaacaaccatcaaaaggagaaatttcagttcaatctcttggtaacaaagagtaagttaagacgttttacaatgaacattactactttccaataagaacgcagatttatcttatattttgtttcgcaagagtagagaaacagttaatacttttaactgtacctacatcaagttttattctatcagttctttaaagacaaa

SEQ ID NO: 3560 - DNA, 600 bp, Bovine  MMBT14132
tgagcatggcttggcgtgttggggaacataytcaaattgcacaaagtaacaattatttaaagagtattctaaattcttggcatgtgttgatttaatccctgggtcaaccctttaaagccgatactatctttacccctattttataagtgaggaaatggtgacccagacagcttaagcaacttgcccaaaaygatatggcttgaaagaggcagatctgggatttaaatccatattcagttttggattcaaatccttgctttcaatggtggatacaatctcctgtcctttgcaagtgaagtkgatggtaacccttctacctttggcaggatgtgttccttgaggtgttccttccaaaaataaagatattctcattttttaattaaatactttgctacttttgactgcctcgagtcttagttttcagcaggcagggtctttccttgcggagcatgggctcctctctagctgcggtgcagactctggggcgtgtagtggttgtgggtgtgggctcaggtgcctgaggcatgtgcgatcttagttccccaaccaaggatccaagccatgtcctctatatcggaaggcaggttcttaagcacagga

SEQ ID NO: 3561 - DNA, 600 bp, Bovine  MMBT14148
ggcaagagtactggggtggggtgccattgccttctccatattcaatgttagtggttgtcaaacagtggtccccaaccagaagtttgttagaaatgcaagttctcagtccttacctcagaactactacagcagaatttctgggaatgagaaaagagactgacatctgaaatttartaattccatctgtgaatctgacatgagctaaagtttgacagctactgggctaagatgtgtatgtgataaataaaggagataaatggcatttatttatctactctgataagttatgtgatgttcttkcaacttaattggtcaactggtactaaagtgtttttcaaaatgaaaaagaaggatcgaagttatcattacagtcacattcaaatcatttgttccagctcagctccaactttgcagaaatataaaagcctaagttatacattaaccctgtataaattcaaaaggtttactttgggggaaatttggaggaattttaaatttcaaaaaaaaattattaacattgatttgggttcaaagawtcctatacatatactatttttttaaatacattgagtagttgtaatgaattagcatcaactggtt

SEQ ID NO: 3562 - DNA, 600 bp, Bovine  MMBT14157
gtccatggagccctcccaacgctcccaggcctacagtggtcaccccacggtctccggggtatcgcctgccccctgcccccgcagcagctcgctgaagagaagcctcctccccacattacagccatacaggggctgcaggcagtgcaccctcaatctgcctgtctgtaccgagcagactgggactcaactgggcataaaatattcagctaaactggctgagaggtgaagatttttttaagaacacagaaagagctgttggctgtcgccacagagtggcctctgggctgaactggcacctcyctgagcagggccaggcctggttggagtggagaggtacctgcacgctggggtggcccccggctgatgccttcacggccccgcggctgccctccgtctcgtagtgggcacggtggtgggacttgggctgcacctcgatcctcagctcgtagggtcctgagtgtgacggcagctgccagtcaagagccggcagggacgggctgaaatggacacacagagcgttagaggcatggacggctccccgcgcccacggacccggcctgagacagacaggcggcgtgtccttccggctgggtctgaaac

SEQ ID NO: 3563 - DNA, 600 bp, Bovine  MMBT14218
agttgaagtggtttcaacttggtagctcagtggtttctctgaatgaatgagacacacatgtatctgagagtggaactgctgggttacagagtatacaaatgttcagtttttagaaatcctgaaagtaggtgtcatagcatatatgagagtgaagggcctgactctggtttggcctgttctgaagatggtgagccctcaaaccactctattttcatctaccttaagaatatcatcttcatagacattgccaacatttattttttcctaaagaaaaggctgttaaaactaagaagggcagaygaaattgcactgttgttaaaggcaaattatattataaaggacaagctgtctagtaaaacaaacttataattacaattatcttcaaaataaatcaaattatctgtataaacccaaccactcactggtaaattaatggaaaaacatgacaatgttgagcttttaactgcttctattgcaaaagccccaaatataaacttcagttatcaggcagaaaagaggcaattagtttgcaacagatgtaccactaaaaacctgttacagtggagccccagagttattaattccaaaatttatgaagtc

SEQ ID NO: 3564 - DNA, 600 bp, Bovine  MMBT14713
ttgactataggacagggctgcaacgtcacacttcacctctaggtgtcactgtctgattttacttactctgcctaagacttccttaaattggaattctgtgaaactcatcagcgcccctaattttctaattccatgagtttaatataaagacttgcatcttttggtcatggaattttgctcttaggaagtagagacacaagtaagcaggtgccaacatggcccgccttatttcagtctgggtccctgaaaggagaaagagagaacagccctcttcaggcatagcttgtccccggctcctgytactgtctctgaaaggttggaaggtgccctcttcrtgtttcaggatcaggaaagaaaggcaagcatctctctctccagactgctcccacgtttggccctgaggagaccatgcagcctggcatttctgaaaggacaccaatggccttggtttgccaaatccttcacaaaggaacttgacaaaagtggtcaaatgaattaagtgcaaaygagaatttaatgtccccatttggtagtcagcttgtggggcgtgggggaagcctaggaccaaaattaaggtattccctcatttcagatgcacag

SEQ ID NO: 3565 - DNA, 600 bp, Bovine  MMBT14821
tgggaatgggaggaagaatcatagattaccttaagtttgtgggcttgaacagtggaacgataggttgctgttaaccaaggtaatgtataaagtgcttattagcttgcagtgtggcacctagatgctctgtaaagggtgattctcttctccaaaatttagggtaaaaatgaaagacttttcttttctctaatatgcttctacctgcataagtgagtagaatattgcaccaaataatcaggtaataaattacacatttagctggcactttggagttctataaagtactctatttgttggccragatatttatcctctaactggaggtggaactaatacttttttatatgaccgatacaatagtgacaagagtatcaatggtaataaaactttttttaaaattcaaagaaaaaataattctgtcaatctttcatttaatggatgcatagatctgtgactctatatcccttttcttcttttcaggatgctaccttacggctgcttagcaacaggagaccgctctggcctcattgaagttgtgagcacctctgaaacaattgctgacattcagctgaacagtagcaatgttgctgcagcagcagc

SEQ ID NO: 3566 - DNA, 600 bp, Bovine  MMBT14924
ggaggaaggtaacacaggctcggtggctctccggacaaggaaggctttgttgtggcttctgttcayggcttccccgggagccgtatctcttatgacaactggcaggctcttctctcaccgctaggcactttacagctacagtgccgaaaaccccacaaatccccaactgcaggggacaggtggatgtcaagggcaggggtgtgtgtgcacgtcggagtgtgcactggggtgtccccgtatgtgtaaggagtggaggtggggttgcagagcaagcaggagacaggccagtggttctcaccracctccatggccagaatgcaaggcacacagtggacacagtctctagccggggacagcaaacttcagagacaggaaagaaaagctcatgactcaggtsacctgcctgtacacagagctggtaaatgcagagatgaaaaagcatctgtattcaggggagtcagacccttctccaaagggcagagatgcacggtgcgctgtggctctttcctctctacggtctgatgccacggctgccactgggcaggagaaacacgatgggaacggacatgctgggtgtgaggatctgagtggggtgctggg

SEQ ID NO: 3567 - DNA, 600 bp, Bovine  MMBT14935
ctgcactgaaatgaaaacatcatttttccttccgtccagctcagggaactctgaaactgcctctgataattaatccacagagagaaatcaatactacaactggttgaagatgaaacaacccatagcaaaataaacttttgcagggatgcctcagcggcttctgcggacgcagagtgcctgctgcaggtgtggcaatgtggactctaaataaatgctgctttctctccccagatcatcccaccccaaaggtcaattacccgaaccgttttaagttgtacaacacttttgtataaatacatyctttgttctccaaatgttgaygggtcgggcttctttttcccattaggcccaacaaatgggtctacagtttggtagtcgcaaatagactgaaagaaatcgtttcggggtgaatgatttacgagtgaggaggaaaatccaggtttctcatatgggctgctcgtaagtccagtgtggtctggtggagggggcgtgtttcctttccttactctggttttgggttttggttgaggttttgttttttcagtttaacttacctttgggaagccaagctgagttggcagcatggactgaccctgtgtt

SEQ ID NO: 3568 - DNA, 600 bp, Bovine  MMBT15781
acagatcaagtagaattagctctgaaatatactctatgtaaaataaaagccaaatacacgtttcttatataactctttcaggtggttttactcctaaaacttaaacttgcttatgatgagaaagtttgccactatcacatccattcgctgtttattcagaacatcttggatttacttttcatcatgtaggcatttcattatctagaaaaacacaacaaaaccaagcactaaatatcttccttcttggagatttcccagagatactggggcctggcgagtctctgctttgaatyggtagcygggtagatgacttctaggttttgtcctaatgttcagagtccatgaattagtcaataagggggatgcacacttcctgatcgctgagcaagacccacctctcccayctctgatggatgccaggggccccgggtgctgggaggcctccacggttaatgtgaagtttgtaaatgcacttgcatttatgagcaggatggcagaatgcattattaatgcctgcctgagaaggataacaagaggcttttgtggtttatgcagtaaactgtgtttccactttagaagtggacgatagtaaatagaaat

SEQ ID NO: 3569 - DNA, 598 bp, Bovine  MMBT15794
  misc_feature (1)..(244): n is a, c, g, or t
nnnnnnnnnnnnnnnnnnnnnnnnnnnnnnnnnnnnnnnnnnnnnnnnnnnnnnnnnnnnnnnnnnnnnnnnnnnnnnnnnnnnnnnnnnnnnnnnnnnnnnnnnnnnnnnnnnnnnnnnnnnnnnnnnnnnnnnnnnnnnnnnnnnnnnnnnnnnnnnnnnnnnnnnnnnnnnnnnnnnnnnnnnnnnnnnnnnnnnnnnnnnnnnnnnnnnnnnnnnnnnnnnnnnnnnnnnnnnnnnnnnntttgaatactggtgcacttacgctgtcccagagatgtcctgatgtctgcaagtgcrtgatgttagagggtccccaacataataacctcttgcccctctggctggcctactctttttcatggactccctcagctgtgctgtattagccccctcagagtatcttcaccccagtcttctctctggggtccaacttctgaagcctgagcctcagcacccagactccatttgctgaagtgtgtgtactaacaagtgtctcaggctgggaagtgctggtcagcactgatctctgtggtaaattttctcctctttgccttccatgcacctgttgctgtactcccttctgagggacatacct

SEQ ID NO: 3570 - DNA, 600 bp, Bovine  MMBT15812
ctgcatgtgtagctggagaaaaacaaacaaaaaaaattgtgctaactgcaatcataattaatccatgaacatcaaccagtaagacaacttttaaagaagcccagcacgagtacacatttccatcacccagtcttacctcagctcctttttaaacatccaacagctttctccccatcttccctagaaacagatgacctgttttctataccactgagaaaataagagcaattgaaagttctttcataattttccatttccagattctttgcgcatacaacctacttcagagaaacaagtaayccacacaatgcctctgtatgcttcagatttttcccttaagggaagagcttttggtattgggaagagcttttggtattagttatttattcatttttaatgatacaatcacaattacagtaaataaaaaacattacttttaagttactttgaattacattattaaataaaaataacataaatcaaaattttaatcatatttgaaaaaatttgaagtcattgaagtatattgattgttttttacaaaatatatttatgggtgttgaagtatctgtatttcttaggggaaaaagtaataaaaga

SEQ ID NO: 3571 - DNA, 600 bp, Bovine  MMBT15844
tgtcagagccaacattaaaggagtcaaagtcatcagtcaggatgaaagagaacatcagtgtccactgccatttgaggccgtgcctctttgggatgtaacagactctattacgattctatcacgattctttcatctactcaataaacatttctgaagcatcttcagtgtgggcacacagacacaatctctgtccccatagagacctctgagcaatgactgctcccccgtagggagggttggtctggctaggctctgccaatagccgcatttcaaatcataccagggctcagagctgagagyggattccaatggcaggtcatgtttcagaggccctccaggattcagcacccttgcctgccttcttagccttcagaccaaatgactcttgtcatctccctcctctagccacctttcatctccacctttcatccaacacctgtgtgtgacctatgacaaactttttactccagctgaaataaatgatcttttccttcaatagcttttcactcgacaacctgtttttctgtgaataaattaaaagtattaggctagagatacgtatacttttaaaataaatcccatggataaaaaatatcaccc

SEQ ID NO: 3572 - DNA, 600 bp, Bovine  MMBT15892
agtgctgctctagaataagagagatgcccacagagtgtaaaggcaaattgtccacagagtgtaaaggcaaattgtcaagagctagtaaagaagtttgagtgacaacgacatcatgatgtgaatcttgcaaggtggttgaattggctggctatgactgacaatctaggggcaaactggccaataactgcatctcagtttcttcatctgtaaaatgaagcgaatagtggtggattgtttactgctagaaagctaaatggaataatgcacgtaaagacttcagtgtgaggtttgatgccctgrtcaaagggagcttcaataattatgattgccttgggcaactccagctgctgtaacaaaatactgtcgactgggcggcttacatgacagaaaattatttcttacagttctggcagctggaggtccgtgatcagaatgccagcatggttggattctggtgagaactttcttcctggcttgtattaatacttggctgccttcttgctgtgtgcttatatgacagggagagggagagagaaaggctccagtctctgcttacaagggcattaagtccatcgtgagcaccccacccacatgacctcg

SEQ ID NO: 3573 - DNA, 600 bp, Bovine  MMBT16395
tgctttcactcaatatggaatagcaggtactggatatactctcctgcctgaaacaatcaaaaagtagacaaaacatagaaaagtggtttttaagatcctggacatcaggcaatgaaggacaaagatctctgaaagacaggaaacaaatgaggtgggtcctaagagtatgccagcccatctgcccaggacagttttcaggttacgacacaggaggggacacaggcagcgtctggtggacatcctgggtgaattcaggatagaccactggacagaaaccgaagagagctgcacagagacaaygcygggaaactcgtgagtattcagcggaatagtcatccgggcatgtgtgagagaactgcctatccgagacttttggaaagaaccacccaatgragagagagggacaaatgttcagtgctcataaggagctggggatagtgaaagtttccattcatcacaatggttactcccatattagtgaaatgtttgtgccacagaatggggcaatttaaacatgggagtamtttattaagggcttcccaggtggctcagtggtaaagtacccgcttgcctatgcaggcgatgtgggttcaatccctg

SEQ ID NO: 3574 - DNA, 600 bp, Bovine  MMBT16535
ctagtttgagttcagctttttccaattgctcttggaagcataaattcagctgcattgaatctcttggggttgagctgtatacgtgtgcacataactattatgttctagtttatgacgcgttcactccaaataaccacacgtacctgacctcatgcctgctctgggaaactggggcaacgaggctcagaatacttgcgttacatgtcctggaaatgaaacagatgagagcaggcagtttcatcagtccttttacaaaagatgactctttaaactcctaaatagcaacaattttaaagatcycacattagagtaataccttatcagagttgtggaaaggattttgcaaaggagagctagtatttaatttaagaaatatttgcaccagctagacatatatataggctctcagtaaaatataaactttgctggtgttgcagaaagagcacaaggatgactttagacctgagataaattcyagttctgttatattctctgtagttttgaacaaatatcttaacctgcaccaaacctgttatttctgctataaaatgagaatagtaataattttgaatgcctggaggagatggagtcattaaaaga

SEQ ID NO: 3575 - DNA, 600 bp, Bovine  MMBT16645
gaaatatcacttctatcaacccctgaaaactagtctagcaaaccttgtcagactaatttaaatatgcatgtagatataatcaggttgaagttttacgaagaaaaataattttgcaatatgaaaaataagacaatacattcatttttatacctaaagatatataagcatgttgacttatactataaaagaattctggtggaatgaatttagatctgagtcaatcataggtgaatgcaaaacaatggtatctgagaatgagtcatctacccaagagatttgctccaattaacagaagactgmacacatctctgattcatgtagagatggctatatctctcctctgcccttactaagcccccaagctggaagaggacaaagcatctgcttggtgttttgagaattactgggcacagtcagaccatcctttctcatatcctggatttgttctggtcttttgtctataggagatcatcagcggcctcagccttatttctctgctgagatctagagtgggtgctgtttatggatcttctaaatgcccaaaattggatgatctgggaagcctagagaaattcacagagttcctgtgattgataaaat

SEQ ID NO: 3576 - DNA, 605 bp, Bovine  MMBT16680
  misc_feature (1)..(5): n is a, c, g, or t
nnnnnagacatcttaaattagcactaggcagagagaagtggctaagcttgaggtrttttgaatgcagtcaatcaraattcttgataggttaatagatttgctgggggcagrtggcaagtgaaggagaggtgagaatccaagatgacactaaggctgacttgaacctttgcatcagcacttttgcataaaacgccttaggctgctgttcatatctgyctctgccaatcctaacaacatattgtgggagccaattctccatgtgtctctcacatttctgtacattttatgagcactaactgcattcrttctggactatcttttcaaaagtacgtagagaaaaagccttcaaacaaagaccatgtgcccctcagaaacaaagcagaggttcgcttgctatttgatatcatagtgatcacgtctgccacagaggggaaagccagacaggtttacttctcactattaaataaattgggtttcctaagctcatggttcccatcttgtaatataacctgtgtgtcacaatcacttcgggctcagagaagcagtataaatgctgtatgctggatactcctattactttgagtaataagcagtcccttttctct

SEQ ID NO: 3577 - DNA, 600 bp, Bovine  MMBT16728
actttgaaaatatgcaagaatacacaccacacacatatgcacacacacatatgtgtgtgtatgtatgtatacatatgtatgaaatacgaatggttctgtatctctggagaaccctgatgaatgcattataagatgaattgtaagatctataattttataaattattagtatgttatttttctcctatggcatcattaagcaaactcagatcaacttttacccaatgattttcagaatgttgcccaaagagtcctcatttgttaaactatgtacctgttcaatgaactttttacatcagastcacgagggagctttgctgaaattcasatttccaggctccacctcagacrttgaatcagaatctcyttgagtggaacttggtgatctgtatctttaactagttctttggattcttgtgcacatgaaagtttgagaaccactgatttctatggtatttgttttaaaatttgcttggacagtgaaattgctggagacgagactattataactaagaccaaaactagtaactgaagaaggattcagcagtgaggaaaatggtagatgataaactctaaatggattatacattttctttaaaat

SEQ ID NO: 3578 - DNA, 598 bp, Bovine  MMBT16932
  misc_feature (1)..(153): n is a, c, g, or t
nnnnnnnnnnnnnnnnnnnnnnnnnnnnnnnnnnnnnnnnnnnnnnnnnnnnnnnnnnnnnnnnnnnnnnnnnnnnnnnnnnnnnnnnnnnnnnnnnnnnnnnnnnnnnnnnnnnnnnnnnnnnnnnnnnnnnnnnnnnnnnnnnnnnnnnnncatgttgacacagtactcaggctattcgtatgtacactactgtttgagaagtatttcactgcccaagttgtgtttccatgagacaaaaaagaagctacaaaagtgataacaagactctgagagattcagagctctggccagaaatayatacactattaggctgtaatgtgaactacacacacctaaagtgaggtcagttagaaacaaaggtttagctcacaccaccgaataaataaatgcattcacatgatgccatttgatttagtagtatcttgttttattcatctataaaatgcaaataattcttgagatttcatgaaatgggaggattaactcaatgacagtgataaatgtgttgatataagcaactagaggctaataaaagaaaggattatagagaaaaagctcatgaatatcatttcccatccctgagaatgttgttgcc

SEQ ID NO: 3579 - DNA, 600 bp, Bovine  MMBT17232
tgaattccctgaactgaggaacgagtgtcgagacttgttttattggtatttacaaaagtaggttttaaaggatcagcgatttgcagattccttttggatgtgtcacacccatctttcgttcatcacccaaagagagcagggaaatgtgaaggcagagactttgaaagcctggagactgtgagaggggcgacttgagatgccagtggaggttttttcccaggactttgttttgtccaggaagcagccgtgccctgggcaggggtttctttccctctctcatcttccaggcagttaggagcytgtcaattaaccctttcaggctatactcagtcggggttagagcttaacagagatcacctctcttccttggcagatgcaagcagcaacagaaactgctctgttcatctttcacctgcctcagtgcccagcacggcacctagcaccacactgataagagtttgtaggaagcaagggacgggggagagaagaaaaggagggaaggagaaatggaaaccaaggacatctatttgatactttacaaggtagtattaatagaacacactcaagggttctgggttcaaattcaagttttggtagttg

SEQ ID NO: 3580 - DNA, 598 bp, Bovine  MMBT17257
  misc_feature (1)..(4): n is a, c, g, or t
nnnngatattgtttctggttaaatggattacagtttatgggcttcaaagcaacagggtagtgtgagcaaatagctgaaccatccaggtatttcttcaacaatccctttttggtattgactcacttatttggagcacttggatctgtgagacccaggtttctggggagacagaaagctcagcccaaaataagactttgtgtccaagggcaggtgctgtgcattaatgaccatctccaggtcaaagtcttccagraaaaaagtcagtgtcaccaagaaggggctgggtaagcatcagaaagyggggggccaggttggtacccgcctcatgtcctgaaggcccgcagttgaacttcaggccrgcccctccagggatgggcctggtgttaattatgatgcaatcccccagccatgcagcctcagcaacaatttcgggagtcagggtccgtgtgcaaggccattaacactaaacatgttttaatccataattgtgcgagatttatttaatttaggggctttatttatagttcgattggaattgtaatgtattttcggccctccgcactgggatctgtcaatttttacggcgtcttttaattgt

SEQ ID NO: 3581 - DNA, 600 bp, Bovine  MMBT17456
taatgttktttttttccttctcyatgtcstataaacttcgagtgttgcattgtccatgtttggtactgctatggagggaagacaggtacaactgtgggaaaattctgatttatgaaatcaaagctttaaagaattgtcagtatagtgtcatttaaatatgtaacagcctctcgaacatatgcaagaccaacatgggcttccctggtgtgtaatccttatggagccggtgtagtgaataaataaacgttgtttgcaaytaatataccattgtwaagaggtagagtattccttgaaatttaygtcttccacatttgtggaggatccacagtgtgtaaaaaagtattctggctactgttacaggccccaaatgaagcttgttttcctaagtagttcaaagtattccccccagcaactcatttataccatttatttgcttaacaaacttgttgttgcaaaagagtacaaagttggctcaattctaaattatcccagatgccaaaacagcaggtacgaactaatgaggtttgactgtgtcaaaagcaaaggcaaaacgtgcgtgttctattgatagaagcccagcctctttgaaktgacaaagtc

SEQ ID NO: 3582 - DNA, 600 bp, Bovine  MMBT17566
gtctgcctckcaasttgatctgttcaaagcaatttctttccctcatgctcatatagccctgacacttaagtgtcttgcatctgtcagtcatgtttgtcttataytggaaacctgcagaccctcagccctgctaagggactcagagccaggctgttctctgcaaagtcctggctgctggttgaatcaaggtaggtgggggtggtgcagaagaaattcatttgatggattaattcaggagcccccagcaggtagtaatgccagccaatctaaattcttccaggatttgacctagaaagaatrgagaagcgaatggagaaaaatgtggagagaaactgaaacaagaagagagaactacaagagctgatttttggttccagctccaatccatgcataattattaatatttaattttttaaaaatttaaacaacttttttcccttaggaatktactaaacttcttttcctaaccaatccgtttaaattctcactgtgggttatgaaacacagattgaaaaccataaacactwctccatgaacctctattaacaatgatttcatattaactgtgtgtcacccagaccttgtcaaaagtttagagag

SEQ ID NO: 3583 - DNA, 600 bp, Bovine  MMBT17656
ttaggaagactcatctcacctcactgtgcccaccaatcctaaagttttatttcatgaactttcccagtctcaatctgccgcccactttgaaacatcagccataatacccttgagcccagagtgccgtgcgtgcttatgctcagtcgtgtctatttgcagctcctctgtccacgggactttccaggcaaaaatactggagtgggttgccattttcccctccaaaggattttcccgatgcccagatcaaacccgctcctcagtgtttgcggtatggtaggcgggttctttccccctgagccrcctgggcagccrtccagaccttccagatcctgtataatctttctctgatgcctctctctggattctgctaaggcactgtyctcccaactgcagcaacttcaaatgaactgagttctgctttggtaactgagttacaaactgagttcagtttgtatcttagagttcaagattctttcctatttttactctcttgcttttagagtgttagtcctgtaaataagtgtttacccacatgctctgagacctaccattagcaaaatgagatttttgaagtcaggaggacccttagacttactccaa

SEQ ID NO: 3584 - DNA, 600 bp, Bovine  MMBT17687
cctatgaggcagagagaaactagggtcataaaccctcagagtccagtctacctgcagaccctggcgaggaagactccaggcggtcacgtgatccctctcaacatagcggtgcctgcagctactggggttgattcctgtttttattttttaattactaaaagtgatagctaagaaagggtcctggaagcctcataacctagactggaccttttcaaaagatatttctagcacatattatagacagtaaaaaggagctatttatttatacctgtgatgccaattgtcattaaaacattttcyrtggcttgacaagtcagtgtctygtgggctgtctcttatttcacttaactcttattactacttctcyccatcaaatgtacaaygtgttgaagaaataaacctgtctgctaggctggaaggaaaacaatattctgtttgttggcttgttttcctcttggtttcttggctgatccgcagtaattcctcataagggaaactttcagtcatctgtccactgttgtctacaygaggggttctcaactgagtgtgctcaggatcaccagggggaaatgtgcattcctcaagagttccagagtgatg

SEQ ID NO: 3585 - DNA, 600 bp, Bovine  MMBT17772
ctacatctcctctatttaagaaactatttcagtgctgtgtatataggctcttaagatacacagatcaattgtagaatggctctgttccaaacatgtaacaaagacaggtaatttctgtgttcatcactaccactctggaattgttttctcctgttgccatggtttccattctgaaaatcagaagcattgaacacttccttcctattcatcctcagggacagagtggaaactaacttttgaaaagaaagaaaagcttgtgtgcaagtcactacaaagtttggcccactaatgctcttatcygaagaggtaatttagcccctggtctccaggaagtaataaaaacatgggctccttaagtctgattatccttcaagttctagtttagcctcctcatttcttagaaaaataaaactgaggagtgaaaagtattagctgttgtgttgttcagtcactaaatcatgtacaactatttgcgaccccatcaactgcagcacgccaggcttcccagtcttccactatctcctggagtttgcccaagttcatgtccactgagtcagtgatactatctaaccatctcatcctccgccaccctcttctgct

SEQ ID NO: 3586 - DNA, 600 bp, Bovine  MMBT17805
catgaatttcgcaaattctgccagatagtggaggacaaaggagctggcgtgctacagttcatggggttgcaaagagctgtacatgacttagtacctaaacaagaacagcaatctgtaagttgtgtgtgcaagtgagtttcggggaaaaattcactgaagaccctcaggaacaaaaattctctttattcttagtaattgtgcactttggctagaatgcagtaaaaactcttctgttacttgggctggaatatctaaagaacaagyagagtttcacccacagaaagctgcttgttgcattcrtaggactgaatgagagtgggctgccataatctgctatgttggacacttgtcctagttgtctggcagcatggacatttgcccatgtggatggaatcccattaggtttatgaagcatggactagagaacaaggtttgggattggagggaacttcatctgagggagaagttcagaatgattcagatgaatcttctgatgaggacctcttagccctttccctttgggcgattattctgatgagaatgcaattgaattctggttgaagcaggttatctgattcccgtggttcaagacatctctga

SEQ ID NO: 3587 - DNA, 600 bp, Bovine  MMBT17892
tacatatttttgcgcctgcatctgtttcatgccctctcagccaggagcctggaaggcttgatgtggatgaaatggcggtgggacgtggaagatggtggccaggacatacctggtgcggggaggggtctgtgttgcaggcttctctctccagaggtcgcacgggagctgctaactcctgtctctgttcctttatgactccacttgggaaattaaggttcagataattaacttctgctgcttcttaaacctgtcagacataagccacgtgagcacacagaggctgctttttctggcccagcrtgtgcacaaaacctctcttgctggccaacttggcaggtgttctagaacagaagccctggctgctaagtcmccaataataaaacctcagtgggtaagtattgccaactggctcctgtcccggtgggttctctatgagatgacatccggggcaaggggtgcagggaggactctggccataacaatattcctaggatagaactaggatgctagtgaggttcttctaagcatcgcctccacctatacctgctgtagccgttcctcctgtctccttccttccgtttgctacttaccttgactccg

SEQ ID NO: 3588 - DNA, 600 bp, Bovine  MMBT17980
aggctcgaggggtatggattcatgatgcttacctgcctggctttctggtaaatgaccccaaatttgaatgtgttgttgacgtcatgctcgtcgtaggacacaatcatttgggaggcctggaatacgaggcaatagaagaartcagattactaacctggaggcagagtgaggaggcaggtggaaggggaagtacccatttcagtggaggacgggccccggttgatatgagatgttcacacgtggagraagagaagagatgaagtcaagtacacagtcaggatgcagctccgaaggtctcarstagctyccagcccctgggcttcccccagtgatgaaacctctgggtcacccattccatttccatctagatctatcagccaatgcctgtgcacagagagtccygcagaacacagggaactgacttgaccccagtgtttttatctggggagtaaaagtgaagctggaaccccaaaaccatagtcatcaaggatgatgctagctctaatttcacctctaatcagcaaacttttttttatttggctgtgctggatcttcgcwgctgtgcacgggcattctctagttgaggcaagcggggctact

SEQ ID NO: 3589 - DNA, 600 bp, Bovine  MMBT18068
gtggcagataatttcacaattaagcttttatagtcaagatatcttaatataaatctcaatttatacttctgtgttctttctgaagtttcattttaaaaatatataattcttaatatttaatttctatgtaaaattcaggcatgttctctgaaaatttctcattatgtgtgcattcattcaggtgggtttatctctagataaactgtctgatcagtctaaatacatgcagttacgctgacaccgcctggtttctggatttgctgaggttaagtgtctgtgaggtggtctctcagatccatrcttcagatgctgcattctggagttgaggtgatgctgcctctgagcactgcagaaacctagcagggtaatttatgtcaggggtcaggacgcttgttgttatgttacagttggggaagactgcagttcagggtgggaaaggaagtgaccacagttcaccgctaagcactggtgccgctgtcactcaagtccagggcagaacctgggctgcaagtcattgatgctgatctgtagggtcaaaatcggaatgtcacctgaccccaactaagaaagtacaagaatatatgtaaatggtgtgattgt

SEQ ID NO: 3590 - DNA, 600 bp, Bovine  MMBT18121
gcagtgggtctactgattttccaaggagatggccagtgtagactcacagggtcatatcaatgggagcacagcctgaaatgagggaggtgaggccagtcaagccatgggattagggactctgtattttgttcaagacccatcctgagtcacagatggtagaaattggggtttgtggaacctgaggtcttcttgaacttctcagcactcctgagtagccaaaactttctagatgaacctctgaggcccaattgttgctcaaactggagttattgatcctctatgcctcagatcccaaacttktacttaatatatttcttcaatctactcacctttctagtcaaaccttacagaaataataattgcaatttatctgcaaatacttctcagtctaaaaaaggcaccagggtgtgaagcctccctccccctaagtctggctacctgctttctcctctcagaggcaggtgttgtttctacacacacacacactttacccattttcagttttctcatcacacaaataacactcactacacattttactcctcattttttgtccattttgtagggtatcttacattccttcccaagtagctcattaca

SEQ ID NO: 3591 - DNA, 602 bp, Bovine  MMBT18743
  misc_feature (1)..(2): n is a, c, g, or t
nnattttaagatttcactgtatttatagcattttataagaaaaaaggaaagaagagaaaaaaaaagcttatacttggggtaagaaggtgcagttttcagacaggagactccagacaaatayggaaattcttgggggccctgaagtgacacgttttagccacatttaggggcctattggattatggattcaattctgaagggaaccratatagaataagtgtgcaaggtcagagactcctcagcgatgattgcatctaagcagtgacgtgaactcaggggctttgaaatgtgttttatcacaraccaatgcagcacatacattgctggacatgaatgtctcatgcagtttcatgttaaagagcgtggtggtctgttgttcacatctcactaccatttttaattttgcagagtctaagtttatctgtctttaggaatgctttatgtgtgggactgggcactgctggtccatttattatttattccctttttttcatttatcaagcattttccaagtaccttccatgtgccaggctgagctgagcacttggggaaaaaaggtacctaggacacaacccctgccctcaggcagctgccaggtgggg

SEQ ID NO: 3592 - DNA, 598 bp, Bovine  MMBT18932
  misc_feature (1)..(2): n is a, c, g, or t
nnaggattttgtgcgctacctgggtgaccccaaccacaggtggctggatctccagttcggggaccacatcatccactgggtgacatacgtggagctgtgcgcaccctgtgagatcacgtacagcgtcgtcgggcaccacgagaccctggaggacgacgccccccatacatcctcagagaggcgggcatcgaccacctggtggcctaccccaccatccccctgggcatcaccgcgtacaacaggaccaaggtcgagcagtacttcctgggcatcagcaaacgagacatccggcgcctgtaygcgcggtttgagggggactttaagctctttgggtaccagaarccagagtttttgctaaactaatgtgtaggaccatgagttcagatatcttcgttagaccagaggctaaccaggtggagctcaggcacagaaatgacacttcttcatctcactcctcttgaagactgccactccctgaggaccggggtgcatcttgcccagttaagctggaccctgacagttacgaagtagtctgcatataagrtgcatggagggtcctggcccccaccctccagtgccacygagcctctgctctccy

SEQ ID NO: 3593 - DNA, 600 bp, Bovine  MMBT19019
atggcagagccagggtgcttccagaaatgtggtggtctgatcacccatacagatgggctctgaaatcattctaccaagagttttatattagcaaaaggacaggataggaaatgtgtgtgtgtttgtgtgtgtacagagggaatgcacgcagtgttcttgcatgaacaatttcctaaatccaaagctataatcaacctggctacaagtagtatccagagctacttgtaggcctaaggcaccagtggcaaattctaaacacctgcagatattgtaaatgaattaggcattagggagagatgyggactgtgaagaactggagagggtacataccctatccatagccatcatccttgattaccctatgagagaatttgagccttatcttccttttttttaaaagagaagctgaaagtcctgattttttaaatgtgaaatctctcaactttaaaatgttgattcaaaacaagcaaaccaacaaaaactttataaacttccagtttacactggcctaaggtattggcactaggaatcaaaggaaaaattggggattcggacacttgggggaatggaatggatacacacaaggaaaacagtgccaag

SEQ ID NO: 3594 - DNA, 600 bp, Bovine  MMBT19029
taccaaagaacaaatcgaaggaaatggttttctacattagggatcccaagaccacagaatcaatactactgcttaattatatcaaaatgtcataccacagtttataacagaggaaacaaaatgtaaggaaaactttatgactttatgtagcacttcaaaacaaacctattgtaaagtgtggttttaakatataaattgatttgtacatttcagaagggaaaaaagacactccctgacctctcaagtacctaactagaaatcttggcaccatctataatgatttggccccaatcctatctrtaataggaaaactagaggcaccagaagctgggtctgaaactaggggataattagttccatccattagtgaacattttatgagttcagtaaatgaggagtgtctggttgagtgcttagaaggaaaaggggaatttggcaccataaaatcataatatactatttattaggaactttcccaggaatttaaaggtcatctgcctcccagtcccaaagaaatacaaccctgcagaaacctccctggccatttacaacctacctggctaagccttccctcggggcctgaaggactgacctatctrc

SEQ ID NO: 3595 - DNA, 600 bp, Bovine  MMBT19052
tacatataagtttgtttaaagaagttttcattttgataatacttggcagaagagaaattttacttttggaagaaaatatgaagaagttacctgcttctggctacaagatccattttcctatattgtgaagagatttgtttcattcaacttggaataccatccccttcataaaaccttcccaggccatgatagtcagaaggtacctttaattccacacctcactttgtactatcaataaaaatcacagtgtaaaacgttgaactctacaaatctcccatggcacctaaaaatgtcccttasatgtaacaracacctagtaagtctccttaaatgaaagaatagcggggttgttatggaggggaaatgaaaatcaattgcaattctctcccacaacagatttgggctaataatgtaagaattcttctgttaccaagtactaatttccaagtttatggacaaagttatttgacttacacacgatgaacagcacattcccatggcaggatctgctgtgttatcaggctttcagaagtaccagctgcaggtaggttttattttgggattttaaatacacacacagaagggataagtacaacaaca

SEQ ID NO: 3596 - DNA, 598 bp, Bovine  MMBT19109
  misc_feature (1)..(53): n is a, c, g, or t
nnnnnnnnnnnnnnnnnnnnnnnnnnnnnnnnnnnnnnnnnnnnnnnnnnnnntattaaagagactcttgtaacattctcaattcactcattaaaatgataaatgttagtactgtattcatatgaaataatataaacaagtgttatcacctacagggaaaactgaggaccaaaaatagtaaataccttaacccaggctatacaacctgccactaaattaaaatctgtcccattcccttcagcttgtattctatttagcattaatatagtttagtagtattcttactttgttcactcagcyatcttacaatcaggtattaagtgcccatagatttcaggtgctgtgctatagaataacccagcagttaagataggaagggctgttcagataaggaaggctaaagamagacagggcattaaatgagattagggctcctgtcagtggtcagaagcagcatggatgattctgagatacaaagtcacttttctcctctggaaaggctgttttttattgatgctgttcatcttttaaaattatgccaatgtgataatacattaatttatataaatagaagccctaattcaaggtcaggcatatc

SEQ ID NO: 3597 - DNA, 600 bp, Bovine  MMBT19270
ttatcttagtttaggctgctatagcaaactaccatagattggatggcttaaacaagatttttgtttttcacagttctggaggctgagaaattcaagatcaaggtactagccaattcagtgtctggtgaaggccctcttcttaatatgcagaagaaggccctcttcttatagctacctttttgctatattattacatgttgaagarwgagtgagtgagcatgcacaagcaagcaagctagctctctgatctcttcttataatggcactgatcctgtcatcaaggcttcacatcatgtaaayctaattacctcccaatggccatacctccaattaccatcacattgagggtcagggtttcaatgtaagaattttggagacatgcaagcatgtagtccgtagcacacataatatgagtaagatttgtttcatggaacttatgtttcagtttcatgcttgtgcataaaaatagctatgtaagtgcatttaagtcataatgtaaaatatatttattttggttgtggttagaaagcttggtggtggtggtggttgtggtgtagtcactgagttgtgtccagcccttgtgaccccatggactgtagc

SEQ ID NO: 3598 - DNA, 600 bp, Bovine  MMBT19378
tttaaaaaaaaaaaraaaaagaaaaatgtagcggtttaaaagaaaatgcactttaggaattatgtattatgaaaagtttcggtagattccaatttgaaaattaacccrcagcagcatctttgtgagaatgtagacctctcagataaatgggtgagattctgaccatagtagataccatggccacctccagacttgcccttcttcctgtgtgtcttccagagataaggacattaacagtctcgcctccaaagaggcagtatctatttgaacataattctccaaatttccgactttctgaaygcagatcaaagtaaggacccacactttcttcttctaaacatttgttacatccttgagttarcaaaagcagctcaaaggcttttctttcaaaggctgttgttaatcagttgggagagtgagctaagaaatattttgtatatgcaggagatttaaaactcaacgtcagttacttaaaattcttgacggacccacggtaatattttgcatttgaagcagagttttcaggggtgaagcagagcttctgaacgatgatttctgcactagaaaatatcctgggtctaataccttgtctttcccctg

SEQ ID NO: 3599 - DNA, 600 bp, Bovine  MMBT19387
ctttataggtaattgtgggtttttaagaaaaacattgtattttcctcaaatatggagagaatcattacaagttcgcatgcacgtgtgtgtgtgtatgtgtctgcaagtagaaataagtcttagcaggccttctctgtctttaagaaagccaaaaattactgccagttctattaacatttcacatcttttagttgagtatgatatgacttgcatttttaactttacgattaaaacatattcttctttcccttcaagccatgctcaaattgagtaaactctcccttttttagtttttaagcrttcttcattgtgagttcaactgcaggtcactcttcccagtgaacctctcattcccttcatgttgtgtggtggtctgtcatcttctagcggtttttgatgtggttggtctctgagagccacaggaattccacccagagttcaattatcaatgaggaaataaagggtctgctggtgctcatttgccttgttttgcatggattgtaaaagaaggaaatctctaatgaggtaaatcatgagtttgtagctttgagtgtgttaaagttacattaaagttttataattttagaagtcaattttggt

SEQ ID NO: 3600 - DNA, 600 bp, Bovine  MMBT19396
aagcagaatgagagcagaatgacactatgtaaggagaaggggtacccaaagggcaaagaaaaacaaggtaaatgataatacattatccacctcatattttggcttcaagtcaattctacagcaaacaggaattttcagaaaatcatcatatttcacacttacttctgaaaaccctaagaacaaattrggctaatcctgtaacaaatcacacttggcaaaatcatatagcaataactttacataatgaagaaaacaccaaaraactgaatctcagccctggttccaaattactctgtgtgrtcttggaaactgtcctccagcatcaacaactataaacraacaascttctctatgtatctcatttattagaatgaaatgagtcgacaaatgtaaacatcttatttgcatgtaacaygtgaaaacatgtaaaggactacagttgtcaaatgagccatggtacagctagcagtaaacatccatttacattctgtataacttaagatcattgtgagtccccaaagaaaggtattacataattcccttcaaaagtatttaaacagacattttccataccatagaagtgaataatcctcaagctta

SEQ ID NO: 3601 - DNA, 600 bp, Bovine  MMBT19425
gactgacccagcctaagagagcttgttcaagtgaaaagacacctcctgtgttctatgatgtatatcttcatcaatcctgttgcattttttaatgaaagcttatttaataataagtaataacccatattgtggattcatatagatttcagggtggagtaattgttggagargcctcagttctcttcactctaaggcagtctttgttcttgaatttgaaagatagctgtgatgatgagaatcaccctcctttatctctccactgaaacagtaatcctaattttgtcacttgtactctgcagkgatgaatcatgtgttcggaccttgacagaarcctccttaagctcgttcaaagataacattgagtctcatgtataaaaacccatttgatttctttcaattatgtcatcgcccgtactttgtaacatctgacacctatttgtcccttctctgcaaaaacataaaaattcatttcagacaatgaaattcaatttgtcttgaaagtaattccataaagaaaaattaataatctaagcagcattctaatctccttctacaatgttatgctgagcctgggcagtgttaactggcattgtcctagta

SEQ ID NO: 3602 - DNA, 600 bp, Bovine  MMBT19454
aagattatgaaatatagatccataaatagttttataccaattctgagccataaaaaagtaatatgtccattgaaaattgcagattgttttaactaggcaaaataatgtccctatctcccagatattatatatactgtttttgtaaaactgaagaaaatagagcatatgacatctaaattgaaaatgctaaaatgattttcccctaatgaaaccgtaacaagtgtggtaaaactaaggaacttgagaaaagaaaaacaaaacaaaatagaatgccggcatttctgaaggcagtatattggyggaggggaagtgactagcaatttaagtagggcaaagtactaagtggataaggaaaggaaaaagatgaaattgctcaaatgcagaaataatccttcttcatagaaaattggacaagttacactttttcaatatcaaaaatggattaccctaaaaatggaattattgcagtctttgattgaaatatcagaaagtattaaaatccttaagttaagaaattgaaggggaaaaagaaccatataattgatcatcattttgacaccaaaggaaatagaatgttaaggaaatcttgattcattaaag

SEQ ID NO: 3603 - DNA, 600 bp, Bovine  MMBT19538
acgtttttcattaatgacatatttttatgtagttatttactacatagaatataagcaactctttaattcagaggatgagtagttttttccctatttcatcaaataggcactgaacactcctgataatatactgtgctcattaaggtttatttgggggcttgctgagtttgccgttggttaactgcactgtttggcttaactgtcaggctgtggagcaaggggtcatccctttaatctctcccctgttgctcttcttagcaatatgctacctgtaatggtactgggctccatgtgccttgytctggtccaagagttagttctagttagcattctttttcttgcaaagaccagaaatgtattcaaaccagtkcaagtrttaaaaggcttcatgagagaatataatgacttctcttggacataaaatataggaagtacgaatcatctcagaagaaccagaaaattgtcatttagttactcctattgtcccygtgaaggtgtcatatctttgtgaatggaggtgtaatctgttctgcttttcctgtaggctctttctgtgtgtacttagaatgcacatatgcacgctcagtcacttcagtcatg

SEQ ID NO: 3604 - DNA, 600 bp, Bovine  MMBT19667
ctaaaatagtctaaagagtattcagactcaagtagattctttttttttttctttttgtccatttctctaagactaatttcttcagtgtggttgccaaaaatgtacagctctgtaggagaaaaaaaaatttagagaacgtcagtcagaaagcccaaaagtttatccttcatttgcagcattattaaatttcactaaatttccttgagctatcacccagagtcctctggtttcaggtcagctaacctatttgaaagttgagattaggttgctgattaaagaatcaactttgtgaatgagaasagataatattgatgacaccatgcaatgtcctcaacatgcaaaaaatgcttctttaaaaacaatccattaattgcctcttttggtagcctagaaaatccttagtgtgtgtatttatttttagaagatagggcatttctgttagacaactgaaaaaatatgtaggaaaaatagggaaattcaaggtaccttgtaacgatcttactattcacctcaaatgttcaaatgttctagtttttatttttcaaaagtgttaataaaaaatgagcaaaacaagcttggagactcaatggagatttaaaa

SEQ ID NO: 3605 - DNA, 601 bp, Bovine  MMBT19707
  misc_feature (1)..(1): n is a, c, g, or t
ntgtggtctccagtccgctgagcaaagccagagaacgttggtcagaaagaaacaacaggggcagatggagggcattggctaaggaatgtctaaytctttgatattaaatgagcaacttgaaatatacatcgattacaaattaacgtgcatttcgatgataatttccgacccactggctgatatcgctaccatccacctgrgatattgctaccccwgtggtgtacatgtttgtttaaaactagtttcttctccttcctgtcaaaagtcagtaaaagggatgggaggagtgggtgggtgaagygtaaagtgtgatgaaatgccaacrtttggttttaactgccaaggcccccagattggcctcagaaaagcaaattaaacccactccaggaatcactgcatattaaggagaaactgcagcctccgggggccaacgtgatccagtctgtgacaatgcagggctttaaggctcttgcgtaggaaagaacaaggcttggggttttccaaggcaggatgtgtgggttgaatggctttttatttgattttttcttaatttcctgactatgcaggcaacagttgtgagccctgagggtcggggatggga

SEQ ID NO: 3606 - DNA, 600 bp, Bovine  MMBT19714
ttttttaaactctcaattcaagtaggaggtgatgctcttccctgtgagaatttacatctcctctctctctccctccatcctgcccactcctggctgggatctatcaagggcacagctgatgaaatataccctgttcagagggaccacaccacaggagcgtgggacagactcggagtgctatgtgggtccctgttgggctccctaagtgaaggctgagagcagacatggccaactgtcatgggtccgccawgtaatagcaccactcaagcagcccagaccacatgtgggaagagtaacacrggtctcacaagtctggatccactggggtggtatccatcctgatttgcggctgaagttaattctctgaggagtcttatcagaatccaccaaatatcatgcccagttggctatgagctgtaagtatagtccactgatatgcttttcatggcatggggccaacattctcaacagatcccttgggtttataaagctccaagtccaggtgtctttttgggtgtcgttaaacacagctatgtacctgggggacccctgcagggctactatcattcgctgtgtgctgtgtgcgcgcagttgctcagt

SEQ ID NO: 3607 - DNA, 505 bp, Bovine  MMBT19762
tgggcggatttttcccagatgtgctatgtagagattcagccaataatgcgtgatttcccacccactagtgtattatcactccttggtctgaggataaaagtgcttaagaaagtttataaagtagaagttccagattgaattacatggaacattgaaatcccatgagcaaatatggcaaaaccaccaaccatgtaattataggttcaaaacaactaaagaaatcaagtgattgaaactggaccccagaatctttaaaagatcacatctggagatgtcactcatattgtacagacagtagcrtggtaatgaagcaagtcaaatgtaatatggaacccaacagtgaaattttgaaagagcattctctttctaagtcagtataaacatccaggacattattgagtccctctttcagttcacatttaggacaggcccaacccagtagactttttggactgctccaatatcagccagcctccagaggagactccaggagaatgaatttctt

SEQ ID NO: 3608 - DNA, 600 bp, Bovine  MMBT19912
ccaatattaaatgtacaycttgatgatggtttagatatgtttacacttgaagagccactacccagatcaaaatataaaatatttgcattactgcagaagttcccctcatgccttcttacaggcaaacctgcccctcccctgaccatgattgttccatgttctcagcctcagggtccctcaatggttggacttagagactcatcagggctaactaggtgaatggattaaagaatcacacacacatacacacggatacacacacatgcacacaygctcataactggtctctctgtaatcttrtaggttaaaaaaaaaacaaacacactttcaatccatcttttcatttgggcttttttggtttcttgtcctctgagatgttttgagaggacacggtgatgctcagcatctcttgagctttttgaggygggaggataggcttggagggccaaaaagtcatctctctgggatggattgtgtatttctgggtctgaaactgtaaagtcggtaagaagtgagccactgagatgaagaagccccacccggtaggaggcaagacgtcacagggccctctcctatagcacgtggtctgtctgcagtggc

SEQ ID NO: 3609 - DNA, 600 bp, Bovine  MMBT19968
ctcagtcgtgtccgactctgtgaccycatggactgtagcctaccgcgtcctctgaccattggattttctaggcaagagtactggaatgggttgccatttccttctccaggggatcttcctgacccaaggaccgaaccctggtcttccgcattgcaggcagacgctttaccttctgagccaccagggaagccattagcaaactggagcgtgctcagagaaccctgctcagccggaccacaggggaccagggcccagacccagatgggactccttcactcagcagygagatgggagggatgrrgcaagactgcagatgagcaaactgaggcccrttccacagagcaccgggagcagaggctggcagtgctctgcctggtccctcctgcctctgacactcctgccccagcccctagcttcagtgtgcttctttctaaacatctcactgtgaagcctcattgaaaagatgacccttgtggtcctggaactactttctttaggcacactgggagccaaagctaatgactgcagagccgtccatcaccagtgactggctggtacgaggttgcagaggaacccttgcctcgaggagatgaatgatgc

SEQ ID NO: 3610 - DNA, 600 bp, Bovine  MMBT20029
acaaagagtcgggcatgactgaatgactgaaatgactgacatatgttaacttgggcttccctgatggctcagcagtaaatatcctggtttggtctgggtcaggaagatatcctggaggagggcatggcaacccattccagaagtattcttgcctggagaatcccatggataggggaacctgggaggmtacagttcatggggtctcaaagaattrgacaggactgaagtgactttgcacacatgcacccataatgtctaacttaatgattagtartctctttagccaggctcagataacarttgctccctatataaccattatggtgtttagtgtcatgatattagtatctaggattctgcaaaagtcttctgaacactacactgtttgttcatagttaaaattgcccctctaaaataattgtttttttttatttagttttgtttgcttttactcttccttataatttttatgctaaaatcctttacaagaataaaaatataagctttctactttctacactatatattgaattatattctgcctcaaagtactgtagaactttatatattcatygctttactatcaaagactcccttgac

SEQ ID NO: 3611 - DNA, 598 bp, Bovine  MMBT20493
  misc_feature (1)..(50): n is a, c, g, or t
nnnnnnnnnnnnnnnnnnnnnnnnnnnnnnnnnnnnnnnnnnnnnnnnnnacctggggtgaaagttctccaggagaaaataattcatggcctcatattcctcaggggcccttccgctttcaaattccagttacacattcaaatagctgttacccgagatcaggggccagacatgctgagggcctgcccacgtgggcatagccagcctgtcctaaccagggccccgcggtgtggggcrarcacacaggggctcagcagagatctcgtcaccacgtcccaggaattttctcagcccccagayrcaggaggtgaggtcaagaatccagaattggacatcgagctagtcatcttatcattcaataaggaaaattccccataaacaaagaagacatagaataagtggctcatgttaaggacaattatttatatgttatgaaatgtctgaactccgtcccctgagaacaaactatcttgatgtatttcttcagcttcgctgagaaaaattccacaataataaacatgagatgtcggccctttttattctccagcaaaaaagaaatgagactctgctctggctgcctcagcacagacccatgtgt

SEQ ID NO: 3612 - DNA, 598 bp, Bovine  MMBT20498
  misc_feature (1)..(49): n is a, c, g, or t
nnnnnnnnnnnnnnnnnnnnnnnnnnnnnnnnnnnnnnnnnnnnnnnnnacctggggtgaaagttctccaggagaaaataattcatggcctcatattcctcaggggcccttccgctttcaaattccagttacacattcaaatagctgttacccgagatcaggggccagacatgctgagggcctgcccacgtgggcatagccagcctgtcctaaccagggccccgcggtgtggggcrarcacacaggggctcagcagagatctcgtcaccacgtcccaggaattttctcagcccccagayrcaggaggtgaggtcaagaatccagaattggacatcgagctagtcatcttatcattcaataaggaaaattccccataaacaaagaagacatagaataagtggctcatgttaaggacaattatttatatgttatgaaatgtctgaactccgtcccctgagaacaaactatcttgatgtatttcttcagcttcgctgagaaaaattccacaataataaacatgagatgtcggccctttttattctccagcaaaaaagaaatgagactctgctctggctgcctcagcacagacccatgtgtg

SEQ ID NO: 3613 - DNA, 600 bp, Bovine  MMBT20841
tcagtccttccaatgaatattcaggacaggattcctgcctgaataaattctatggacataggagtctggcagactccagtccatgggggcacagagtcagacgcaactgagtgactgaacacatggatagaagtattaatataattatgcatagaatgcatttttgctgtgtaagttttattccctggaatagtgcaatgcagaggccctagccaggcacagtcctgtccttaggcaattcaaatatattttatttaatagtcatagaagctccatgaaataactattcctattgtagasatatggaaattgaggagtcctgccaarattaagtgatttgttccaaggtcacacagttatcgaatgcctgggctaggatgtaatccatgcttgtttgactccaaaatccagacctttgccttccacccaagttcatgtcttatgtgagcaactgacagagaagaaagtttttcagtattagcaaagcagagctaaaggatctttgagttttctgagcaactgtctatcaggttcattcaagaagcactgatcttagatcaaaaagaaatctgataccaagattgggtttgatgcataaat

SEQ ID NO: 3614 - DNA, 600 bp, Bovine  MMBT20857
gcttggatcttcccgcgtcctcgtggggaagccctctgtgccgttcccacccgtcctcaggccagcctatagggtcccattggcctcccactatggttagtctgctgactagcatccccccactgggcctgactcagtgttttgttcccgagtacttcgctgtgcagttcatttggcagttcatcacgtggtaccttttgcagttggcaaaccattagcttttacccttgatctgtacattttttaaaatttaggtgaatgctttggctctccagcaacaatttaagattgagttcttaygtgatgctcaatacggttaatattttaataaatttcatgcattatctcaggggctatgtgttatgaaggggagataacttgaagatgtcrgagcactgaggttaagtggaagagcaggtacacacagccctccctcttcaggcttcctgctctgccgtgttctttttcgtttattattaacgtgcagttggtttacagtgttgtattaatttctgctgcacagaaaagtaattcagttatacatatayrtacatttttccatattctcttccattacagtttatcacaggatgttgagtg

SEQ ID NO: 3615 - DNA, 600 bp, Bovine  MMBT20859
ctatggttagtctgctgactagcatccccccactgggcctgactcagtgttttgttcccgagtacttcgctgtgcagttcatttggcagttcatcacgtggtaccttttgcagttggcaaaccattagcttttacccttgatctgtacattttttaaaatttaggtgaatgctttggctctccagcaacaatttaagattgagttcttaygtgatgctcaatacggttaatattttaataaatttcatgcattatctcaggggctatgtgttatgaaggggagataacttgaagatgtcrgagcactgaggttaagtggaagagcaggtacacacagccctccctcttcaggcttcctgctctgccgtgttctttttcgtttattattaacgtgcagttggtttacagtgttgtattaatttctgctgcacagaaaagtaattcagttatacatatayrtacatttttccatattctcttccattacagtttatcacaggatgttgagtgtttcctgtgctcarcaacaagaccttgttttgtgtctcctctgtgtataatgttttggcatctactcatcccaaacccccagttcatcct

SEQ ID NO: 3616 - DNA, 600 bp, Bovine  MMBT20909
aaattcactagagtgtcagagactaagtaatagtttcaaatatacacagcatcaacagtaaataygaagagaattaccattttaattaggttaaaaaggaaaacaaaacatatgtcccataaactaagtatcatcacataaattccctctagtgatgacttacatggaatcaatcactgtactgccgagactttaatagctctgcttcaatttctccatttacagatttgaatattgaaaattacttacatttcttatctatactttgtggggcactgaagcaattgataaactgagttratttaggaaaactgaaatatattttgtccttgacctagaacaatttggtgcgggctacaaagaaagtgaactgcatcagtacaattatcattaggatgaaaaagaattaatgtggttgaatgttattaatatacaagctcagcactaccacaaatctcaggttgactactgttctatttcattaaaatttaccttctcggtggtaaccttggagagatctttgtacaagagcttccggacatattcctggagaggaggacgtttctttttcactgttttttcagctggaggggggtagca

SEQ ID NO: 3617 - DNA, 600 bp, Bovine  MMBT20936
gtttaacatacccagacttgtcaaatcaaaagaaatgaagatcgcacctgaaaatactgctttagcggcttgcaacaagaggctcgagacttccagagaaatacattactactttcaggatattttaacagcccatcaatccacttgtcagactgcctcccattatcctctcagtgccagtgcagtgatccttgttaaacagtgggaatggatctgtgtcccaggcattttaacaaataattataaaatacagtgctccattgtatgcttcttgtctcttcccgcctcatcttaagtacmtcagctgacaggtctccagaaatacttcacttaagcaatgcttaatgtttttttttcagctgctttgctgaaaagctaccaacttatggcttgttgtttcagagttgaataactacttgtttttctttaaaacattcatccattggtcgttatgtaatttactatgccttagcctttggactttagaaataaacatttcagaaacctgtcatcattgttgaagtaattttgcatatagcttcaaaaatacatacattaaacccaagggagaattacaagcttcttccaacatagtactga

SEQ ID NO: 3618 - DNA, 600 bp, Bovine  MMBT20965
caccccctcagcaccttgtattcgactcctctcttcacaggcccgggatgcrgggagctgagccrcacacacaggaactctgggggccaggctgcagaagaggctctctaaacctgagtgggaatcactgacactcaagcccccaacccaaacatcatctccagcttcgtgtttgctctaaacaactatttaagcaagctgtcatccacagaagctgcacgtgtgaacccagttcgagatccaacaagcattttgaaagaccccaaatcacactggttaaaattccaaaactgtaaggaytgtgggattatcttgggtaatcttacattctccaacccctcatctctcctctttttaaaatgaaatcctatatgggcttaacagtaaaagtccttcagacaccccctctcagccctgcagcagcacttcctgtttatcaaaagactaacgtgaaaagcaggtcaacaaaactccacaaggaaaacagaaaacccatctgacatgtgctgtgtgagccagagaagcacccccacctttcagtcrccagccccacataccggcggcatcaggcgtgtccagcccagccctctgaccacctcc

SEQ ID NO: 3619 - DNA, 600 bp, Bovine  MMBT20986
cagtttcaatggatcaatgtggtgtcacaaactcagagctgggaaaagatgtattgtaccccacaccattgtatgatattccactgcctagatacaactgatataaacaacctcaagagcatacataacagtaaaatgtggcaaaataactaggaagtgatgagttttgagtattttttacctttgtttttcatgtaacttatttcactataaattgattaatttaatttttaataacaaatatatagaacacccagctaaagaaaaaccctgaaaatttaacaactgactcaccaacargttcaggctggcttcagcacacctctagaatcccttgctccaaattttgttgacttagttcagtaacctgcaatattgtcctcctgggaatatgtaaatattctggagaagggaatggctatccataaaggagtcttggcttcttcacttttattcacaaagtcactggttcttattcttccctgaaaaagatacagcaaacaatagacagaaataaaaatttgggttgcaaatatggttcatctcatcccttccatccagtttggtaacttatatgctgtatttcatctccaagtgtga

SEQ ID NO: 3620 - DNA, 600 bp, Bovine  MMBT21098
cctccctgttatctcctattactgagtcagggttctacagagatcctcttctagtttctgaaggcttttaggtttggccttctaaccctctgtgaaaccttgcttccatctattttctgtattcatgtattatgttmtctctccatttcaatgaagatggagttttgtatytgtttcttattagagtggttttaggatatatagaaagaagayatgcctttacattgccatcckaaaatcaagtctagtagtagctcttgatgagcctatatcctcagtgaatctgaaaaaaacaacccrattcaaagaacttttacaaaaaacatgcaggatttcccagctgtgaaacaccactgtagacttaaatatatattcaagtggatggcttccctgatagctcagttggtaaagaatccaccagtttgattcctgggtagggaagatccactggaaaagggacaggctacccacttcagtattcttgggcttcccttgtggctcagctggtaaagaatccacctgcaatgcaggagacctgggttcgatccctgggttgggaagatcccctggagaagggaaagactatccactcctgtattc

SEQ ID NO: 3621 - DNA, 600 bp, Bovine  MMBT21109
cctgygccctgccctactcagtccactatctgcttttttctgctctattctgtgtaccaggaggctgatccctagggattgtattatcytcttcctctgaactctcccttagaccatgtggcttctggttgggtttggtcaatggaaattagcaagggagaggagaaagragtcarggtatttcttccccgctcctattctgcattagaaccctggttctggtagagattccacccctctgagtctgtggctcccaccagctccctccaagaagtctcttacattccctgatctccactracactggtccctcttcttccccctttaggcccagaggtggtgatgaatgcccactgctgctagtctctggtgcctcaactttcctcatgggctccctcaaccctgattacccttctatagctggtcatctccctaagtctcctaatttaaaccatgcttcctgcctggaccctgagagatcctgtatctaaagtacatagaaattagcttttttttttttaaattgaagaatggcacaaagcatgtaagccaacaacttttcaaagcactattttctccatcttcatgttaagttcttga

SEQ ID NO: 3622 - DNA, 600 bp, Bovine  MMBT21111
agtatttgtgggagggaaaaaaaaacccacaactcttgggaggtttgaccaataaaatgacatttagcaagagtgatggaaaacaatgctctgaataattctgtattctgggtacaagagagaattagtacctgygccctgccctactcagtccactatctgcttttttctgctctattctgtgtaccaggaggctgatccctagggattgtattatcytcttcctctgaactctcccttagaccatgtggcttctggttgggtttggtcaatggaaattagcaagggagaggagaaagragtcarggtatttcttccccgctcctattctgcattagaaccctggttctggtagagattccacccctctgagtctgtggctcccaccagctccctccaagaagtctcttacattccctgatctccactracactggtccctcttcttccccctttaggcccagaggtggtgatgaatgcccactgctgctagtctctggtgcctcaactttcctcatgggctccctcaaccctgattacccttctatagctggtcatctccctaagtctcctaatttaaaccatgcttcctgcctggac

SEQ ID NO: 3623 - DNA, 598 bp, Bovine  MMBT21246
  misc_feature (1)..(6): n is a, c, g, or t
nnnnnncttaaaatccttcagttactctgctttgtcctgaacaagatcaagttctttatcttgacattcaaggtcctctgtgactccttccccccacctcctcctgttatgttgaggctgggcccaattatcagtggtccacatcatgcttttttattcactccgtggcccctgctcctgctttcccttctttttgtgtgtgtgctgtcctgtccacccctttttgcctggctggatccagcttatcttttaagcatcttatcacttgtcattttcttcaggaagcactctgaagatcckcccrctatgagttaaatgtctctggtctgagttctcctggtcccctgtgttcaccccgtacttagcatttgatgacacttgatgttatctgtgtacgagtcacctgcagcacatccarttgctccctgaggatagagactgttattcatcattatgtaaccagtacctggcaaaacgcctggcacaaagtcagtgtcgaataatttcttgttggatagaattccggtttcttctgtcttacaacttggaaaatgattgctgatttgttagaaagactctggatgtcatattttcaaac

SEQ ID NO: 3624 - DNA, 598 bp, Bovine  MMBT21247
  misc_feature (1)..(2): n is a, c, g, or t
nncttaaaatccttcagttactctgctttgtcctgaacaagatcaagttctttatcttgacattcaaggtcctctgtgactccttccccccacctcctcctgttatgttgaggctgggcccaattatcagtggtccacatcatgcttttttattcactccgtggcccctgctcctgctttcccttctttttgtgtgtgtgctgtcctgtccacccctttttgcctggctggatccagcttatcttttaagcatcttatcacttgtcattttcttcaggaagcactctgaagatcckcccrctatgagttaaatgtctctggtctgagttctcctggtcccctgtgttcaccccgtacttagcatttgatgacacttgatgttatctgtgtacgagtcacctgcagcacatccarttgctccctgaggatagagactgttattcatcattatgtaaccagtacctggcaaaacgcctggcacaaagtcagtgtcgaataatttcttgttggatagaattccggtttcttctgtcttacaacttggaaaatgattgctgatttgttagaaagactctggatgtcatattttcaaacatac

SEQ ID NO: 3625 - DNA, 600 bp, Bovine  MMBT21248
tgggcccaattatcagtggtccacatcatgcttttttattcactccgtggcccctgctcctgctttcccttctttttgtgtgtgtgctgtcctgtccacccctttttgcctggctggatccagcttatcttttaagcatcttatcacttgtcattttcttcaggaagcactctgaagatcckcccrctatgagttaaatgtctctggtctgagttctcctggtcccctgtgttcaccccgtacttagcatttgatgacacttgatgttatctgtgtacgagtcacctgcagcacatccarttgctccctgaggatagagactgttattcatcattatgtaaccagtacctggcaaaacgcctggcacaaagtcagtgtcgaataatttcttgttggatagaattccggtttcttctgtcttacaacttggaaaatgattgctgatttgttagaaagactctggatgtcatattttcaaacatacaggcatatggttctattaatgtatacaagtaacccagtgctagctctgaaagctgaagaagctccctttttttgaggactaaatgagctctaccttccttccagcacccagttctc

SEQ ID NO: 3626 - DNA, 600 bp, Bovine  MMBT21249
tgttggatagaattccggtttcttctgtcttacaacttggaaaatgattgctgatttgttagaaagactctggatgtcatattttcaaacatacaggcatatggttctattaatgtatacaagtaacccagtgctagctctgaaagctgaagaagctccctttttttgaggactaaatgagctctaccttccttccagcacccagttctccaagtgaaagacggcagccatagagctattcagtgcaggcaagttctcagtcatcgtctcaggtgatatttgtggcaaaacaaaagaacrgacagttctcacaaagatctctgcaaaagaatcacctgagtttaaaagtacaatggaagatccgtgactgtttcctccaggaagctcagaattccttcacccttgtgctcaccatactggctgcttgtctcaacaacctttcaagattctccttgcattcctgcatcatttgttayattgtggcattctgtccaagtaatgatcagtccagctgcctttaaaacaatcactttgagagggaagtgggggactcagtcatttacttattcatcagtgaatattaattgagtgccatactac

SEQ ID NO: 3627 - DNA, 600 bp, Bovine  MMBT21446
acttgagtttttgacattgggttccacacgatgcaccatcgtgctcagcctgcatgcaaattgttttctttaagctctttataaatgatgagatgacattaaaagaatagtttaatcatgttttcgtttttcaatatgtaacgctagaggagaagaggaaaagtagatttcttcatttcataaaacaaagtatttttgcaataaagttctaactaaaacttaacctggcacttttttcatttaccttggttattgcttttcacacgtctcatggttcttgtaaacatgcttttctccctrtggagctagattcaaagcaaaggttatgaaggaaagtcttggtatttgagcatcttgcttctgatgtttagccttaagaaatagatttgagcttaaaagaaaagtaatacgtttgcttgaattttcttacctttcttcacattcgcttttactgcctctatggatagccctaaaacttggtttagatagagatctgatgtaatttcatgaagcagtgctgtcagatgacggcaaagcatgtttatatttrttgacacagttctgtagatttcctttccaaagagcatgtgcagatattac

SEQ ID NO: 3628 - DNA, 600 bp, Bovine  MMBT22131
ggaaatggcaacccactccagtattcttgcctggagaatcccagggatgggggagcctggtgggctgccgtctacggggtcacacagagtcggacacgactgaagcgacttagcagcagcagcagcatattaaaaaaaaaaaaagccaacccctggtctaaatcaaaaggcagacacgatgccatctttcaatatggtgtgtaaatgttcagagggaagcatgcagagccctgcacaaagacggaagctgaacttgatggctccagtctgcccctgatggccctcatcctgtatcacacrccrctcacttgatttgtctcaatgtrtctcaactstaagatrcaaggtcaagagttaccttccacctcagtcattttctttttcccccttaagcagaaaacgcatacttttcaaacaaaacctcatgcagaaatagagaaatttcaatacataaactgagaaaagcagaattgttctgttgaagaggggctggaagggtttggaagccccatgtcttggcatcctgccagctcttcctccttgtagccagggtttttcaacagcagctctagtgccattttggcccaaatagttcttggt

SEQ ID NO: 3629 - DNA, 600 bp, Bovine  MMBT22250
gccttccgtaacttaaaaaggaaggtgtctgtgaagctggacagttttgtaattggccgcgtggcacgtttctcaacaagcagcaaacattttccagtccagatgctgaagtcatctctgagaacagactgattgccttctctcccgacacccygtcccytctcctggtgtccagcrtgtctgaattctctttaagggcctgagattcatttctggtgacacttacattccaggaggagaggtgagagggtcacrtcaacagagacaagcccggactcttggcacttagctcttcagacraggtatttttccttgaggttgatgctacaaataaagcgctgacctgcggtgtcaagcagttgcatgtgggagcaggagtaggaaggagaaagtgcgaagctgggggcagctttcccccgtgtgtatgcgcagagtgccaataagctgtcaaataaaattaaggttcaaaacatacagccttcaatttgattccgctaagatgccggctgctgcagggagggaacacaatcgattctgttttgacaggtctcggtgttcgctaagcagcaaaagtctccactctgtacctgattgataaaa

SEQ ID NO: 3630 - DNA, 598 bp, Bovine  MMBT22358
  misc_feature (1)..(8): n is a, c, g, or t
nnnnnnnnaatggtcccagtcttggggccctggcgtgtatgtgggtgctgggtcccatcccagggcagaaccatggggtcagacatgaaacacaagccccagaggtggagaatgatgaactttaaacaaaagaggcatccatgatacatgcaggagggcacagtccatcttgcagtgmcctgggggtgacaaaaatcaccctgatccccacgcaggactttcccaaagcgacaattcaggctgaccgcgaggaggactggcccctcctttgtgataaccctactcgagcagagaggaaayggtctcgaattctggtgtatcccatcattgggggatcgagctccacccatacagaacaagggggaagagaagcagctgggtgatggacacagaagctgtaggcagagaggtccatgggggctctggagcgatgcctccagtaggaaacgaagctgacagataaagcratacagcagagccttcagagcagagaaaacgtctactctggcagagggctagccatgaattaatcataggtacctagaaaaccagagaaaacaaaaagttgtacaagaaggtaaatgaaattataaaactc

SEQ ID NO: 3631 - DNA, 600 bp, Bovine  MMBT22405
ttgttctccgtaagagcaggggaagcccagccactttctgctttacacccatctattctgtttgcatttccctcccttctctcaaaaaaacacatataacttgtataggtttttattctgaataaayttaacattttaaaaaggaagaaaatggcacagcacatgggcatgcatgatgctctagtagctttctaatttcctgttaaaatgaatgctctctttactgctaactggaaaaaagatgcaataatggaaaaacatacataaaacacacagaattcagataaataacacagtatygacaaagtaaaacccagtgtaatcaagacacatacctaggcattaagttcctgtttttttcataaaacatccttaggtcttgaggactattagcctgttaaaaaaaagaagaagaaaatggtttaatttcctaaaaaaccaagtgcaaaaactccaaattacatgatggatgctcatattcttgcaatagaatagagactgaatttgaaagccatggactcctgagggagccatcgatgggcacaaggaacttctaacacctctgacactgtacagattctgcacatctgggcataatgt

SEQ ID NO: 3632 - DNA, 600 bp, Bovine  MMBT22425
tcccaggacctggctctccagctctgcctgttcaagatgagttattcccccgtttagctgcatttctgatggcgcctgccccactctggggacagcagagatttaagggccgtggtgtcttgttacagtaccagagattttctctcataaaacccacccggggaaaggtttaggagatttgtggtcttaggctgaggaggcagtcacgaggcaggcagaccagcggtaggggtgagtctggagtaggggtaggctctggagaagctcctaaggctgccctgggcagacyctcctgccccrggatttgcccccatcccgcgtgaaggctgggactccatcctgctcctgggctgtccaggaagcctgctcctttggggcagggaaatrgtaccctaggcaacctccctctgagcctccctctgagcacagcactgtcctacctcctggtcttagccagccagagccttgtcttgctgaagaaggagggggtcctcggctgaagggtccaccctggtttgcccgttgacttttctgtgttcttttggcccccttgcccacccttttctttctgtttccagtttgcaggacatggtgacaaag

SEQ ID NO: 3633 - DNA, 600 bp, Bovine  MMBT22607
catttctcagaggtgtgagcattacttgtgagacagagtcaagtggcaatgytttcatttactgtttcatttactctgttttcatttactggagccatgtactatgtttctgtcccacggagaagtctttgagcccctttcacacttgatggcttttaaatattatttccctccaaaaggcatttctctgtaaataaaaagctatragtyattctgctttattattctttcctctgaggggaaactctgggagataaacaatacccagataaataaggcttagagattgtgggccaaggyttctattgattcacaatatatttatctctctctctctctctctcaaataaagaaataatgatagtaattactttaaaaatgattctcttttttaatcattttaaattgctatttcccactctactcagatagtaattgtttttatggcactattgtaactcatgggaaaaaggaagayggaaaaagcagctgagatcactcctgggcagcatctctaaggcacaaagtagatttgtagtagctcatctatcaaaccttcttcaactctcagtctgaattttacatggagatctgtggtgg

SEQ ID NO: 3634 - DNA, 600 bp, Bovine  MMBT22633
tttaaaagcctgatatctaggtttaacattttttaagagtttaaatactcctggaatagtttttgtggagttaacttttaatgattttacatcattttttgaacatgcctaattttygtttgaggaaaaattgagtgtaagaaaaggaaacaactcaatagtcttcmgtttagttcttactttgtataacttgaatttcttagacttagtagggaacaggaagatagtgaatgtattgaaatatactctttcccccatcttcctcattgtcttctctttcccatctctaratttccccarttaatttttattaatgtgtagtaactttctgttagaattgctttgtgaaaataataaaaggccagactcttgggcattttattaccctttggttgtctgtgagccaaccttttaataattgtgggtgttacttggkctccatttttcagctccatttttcagcttgtcatattttaagagttttatggctaggatgcatatccacctggggttttggatgtgactactaagttgtagtgtttgatttatatttgagttcatgtctttagataaaagcgtccatctccactgtcttcattt

SEQ ID NO: 3635 - DNA, 600 bp, Bovine  MMBT22683
attaattgttggcctcaccatagaaaaactccacaaggatgataacatggtaggctcattgaaagaaaatcctgcagagatcacataattacctgagagagatccttgggggaaatgatgaagactgaaagtacttgcttgcagacgtgatgattgttaagattatgcagcaaaaacaaccatgaagagaaggacgcagatgacgaaactgaggcycagagattcagataactcayscaaagtctagtgtaggatgcagctaagatgagttgaaggcattatcctcctcgttccataacytataacaggatttgcctagagcctccaaaggttttatcatctgcaaaatggggataataacagtccagtccttccaaggaggctgtgagttttaaccgagataatgtgtgtccacgctcagcacaaggtcaagcccaggagagacagatgagtgytgtgactcttactatttacagcatcacgatttgacatgaagwrgctgcataaatgattcaggcttaccaaacataaatacatacttggtgcttcctttgattattttcatgtgagaaggaagtgagcctttctttgccaaataaa

SEQ ID NO: 3636 - DNA, 600 bp, Bovine  MMBT00010
gcgccacctagaaaccacttctggggcacctggtgggcacatgcaaaaaaccatctggaagaacttgcctggaacttccttggtggtccagtggctaaggctccatgcttccaatgcagggggcccggggttcaattcctggtcagggaactagatcccacatgcttcagctaagacccaacacagtcaaataaataaaaacaaatattattaaaaaaaaaaaaaaaawagaacttgcctgcaaagcaggccagccaggagccccacagacagagcctggaagtaggaacaagtcccctrtcccaggtcacaaacacgatcataaagargcgtcagaaaacaacaggatacccatctgcttcaggtactaggtgagtgacacggagactgtaaggatgtttaaactaacaatggaaaagaaggcatcaaaaacagaaggggccatatactcaaaacagacctactgatctgaaaaagaaagatactttgcagaactgaaagacagtgacactaagtacttatgggtttgtgcacatgtgctcaatcatgtccgactctttgcgaccccatggactgtagccccatcaggctcctctgttc

SEQ ID NO: 3637 - DNA, 601 bp, Bovine  MMBT00030
  misc_feature (1)..(1): n is a, c, g, or t
ntatttttatgagtatgcattaattaacccagcatgtactatctttcagactatcttgccagggactttcatttaaacatgtttattgtgaaatgtttgcattctccacatttgtggcccacacgcagattatttcatactttcctttagagcacttagaaaagttaaaaggagttattgtttttgattaatgccattttggggcagttaaaaaaaaaaagagttccaaatcctagctctgcataaattctttgacattaaaaaaaaggaaaaaaaaaaaccctctgcaagttccactgcrcaaagatatgtgggggtttgttctgggtttatttgaaggtggcctgctaaactgaactttattaactttggtgtttgcatgaactcgtgcaagagcgatggccaatgtggagcagctatcaatcacaaaaggagagccgcgctcggggctgtggtgtggtgccgcacagatgggagttctaaggcyccgcctgtcatcttttgattaagaaaaggaaatgatttcactaaaaagatattccctcttgtgttgttttgttttaactgagtttgtactttccaccaaactggacatatttat

SEQ ID NO: 3638 - DNA, 600 bp, Bovine  MMBT00429
tgtctttactccctagaatggcttcaataagaaaacccagccgtcctgtgcgtgacatctttggcgacctcagtgatatttccttagaagattcaaagttgggggacatgtggaactctgatatcagtagacatcttaccaaaatagcacccggtcccagcagatttttaaaaagaaaccagactctgggtggaaaacacttcctgccaaaagagaacgctgtcctggggagcgagcactggcactcttcaagtagaccgtcaaccactgcctccaaggtcagggccaacgcggcgctcrtgaagctggcacagatagagaccaagatcaggaaccggaaggtgcgggtggatccatcggacgcagaatccgaggactggctccctagcagagctgaagaaactccccctaggaggacggctgacctttcttcacagaacacaggacaactctcccaggaacaggcccttgaaattcctgtccctgagacagacatgccgagtgggaaggtcagtaggtttctaaagaagagagaagcacaggtggaaaagatacccatggaagcccaggttgggaaggagagggatgctcaaagaccca

SEQ ID NO: 3639 - DNA, 600 bp, Bovine  MMBT00433
ccaaggcagatctatcctccaaagaggcccaccccctgtgaactatgtgtccaaatattgagagactttctgtactttgatgaatgtcaagcaatacattcaaagctaaaattacataggtctgggaaacagttgtatgtcagcacaaaccttcatcagcatcagaagcagtgcataggggagaaactcttcagaagagatgtggatagaacttcatttgtgaagaactgcaaattccatgtgtcaggaaagtcattagtcttcagggtggttgagaaggacttcttgaccaggtctcartttctccagcaatgggctactaacacctgggagaggtcaaacagaactgagtgtgagacagcctttcagaggggaaaaacttatcctaactggggagaagttaccaagaagtcacacctcattgtacaccagagagttcacaccagggaaaggccatataaatgcaatgaatgcgggaaatcatttagccaaaactctatgctccttcaacatcagagaatccacactggagaaagaccttatgagtgcagtgaatgcgggaaaactttcaatcaacgttctgcccttcatcagcatcag

SEQ ID NO: 3640 - DNA, 600 bp, Bovine  MMBT21673
ctagttagatccggtttggggacaggcggctcccctttctagaagccaaaccccatctctcyagagcagagctggaggagggaagatactgtttcatgcattgtgacagccttagggaggaaaagatattggagactctttatttgctcttctcccttcccttcttcaactcccacaccagtttctgtaatgytttccaacatctcaagtgtataatcagcatgttcagatgcttttctaaatgcagattaccagcacaatgccccagatatgcataccccttaagtcaagcagcattgsattccacatttttaaggagcatagggattcttacactggtggtcagcaatacacatctttaaaaacactgagttagtgtgatccagtcattgaaatccgaaacagaagaaacatcctctctagggaagcagaatagaagaaagcatgtcattcayagcatacatacatgagaaaaatatttttctgtattttaatttatttaagccctcatctgtgagcaacaaataaaaattgtaacttcatgaagataatgtacatcacttctgcctcaaaactaactcgagtggcttcatagatatt

SEQ ID NO: 3641 - DNA, 600 bp, Bovine  MMBT18173
cgttgcttctttctggaaatgtgtggcaggtttttgctcattgttgcgctgatagccgtgtctgagatggatacccacgatatcctcatgatgctctgacttttgtgggaagagacacattgaacaactgattttcaagaattttgagagacaaatgagaaatacagcatgatgtggaggaggtyttggtccagggtgggagatgctggaacctggaaaataaaggcrttagggytggtgaagaaaggacaaaaccacaaatgtacagaaaatgggtaaaagaagctggaaggcagttcmtaaaacaaacaagcaagcaaaaacatttgcaaatggcctgttgacacaagtaaaaatcctcagccttgatagtaacaggagaagctaaattgtaaaatgacgagttaccattttatagtatcagaccagcaaaaatgaaaacaaagtgttgccaaagatgcaggggagactgcttctcttgtttatggcaagtgaggatgtgccacggtgcccaggatggggggagactgcagcagactgacagggtgctaggcatagacctcctgtgatgcctctgccttttaatgagatcgatgtgcg

SEQ ID NO: 3642 - DNA, 600 bp, Bovine  MMBT11072
atattgttttgttgtttagtagctaagtcctggacgattctttgcagccccatggactgtagcccaccaggctcctctgtccatggaattttccaagcaagaataccagagtgggttgccatttccttctccagggtatcttcccaacccagagacaggtatattatgtagttcttaaagtggttgacaaggactaaattaaacacgamgtgacatttcttatggaagcatctgaagactagttagatccggtttggggacaggcggctcccctttctagaagccaaaccccatctctcyagagcagagctggaggagggaagatactgtttcatgcattgtgacagccttagggaggaaaagatattggagactctttatttgctcttctcccttcccttcttcaactcccacaccagtttctgtaatgytttccaacatctcaagtgtataatcagcatgttcagatgcttttctaaatgcagattaccagcacaatgccccagatatgcataccccttaagtcaagcagcattgsattccacatttttaaggagcatagggattcttacactggtggtcagcaatacacatctttaa

SEQ ID NO: 3643 - DNA, 598 bp, Bovine  MMBT13782
  misc_feature (1)..(51): n is a, c, g, or t
nnnnnnnnnnnnnnnnnnnnnnnnnnnnnnnnnnnnnnnnnnnnnnnnnnntaggtttctcccatcttttccattggcagggccctacagtctctttcctatgcctggagacattagggtagattgagagagtggcactggtctygaggtttggagtagattatacattgtgtggatcacattttcatgtagttatttcctaaaccctgcaggcagtatcatgtcaaaagacatgattacatgcttttgaacacactatttcctttctctgsaatgttcttcctcttttgcctccactgyatrtatctttgcaaaccttgttaaatgtcattgcttcctgaaacctgtcggaatcccctaggcagatttagtcggtttctgctctgtcctgttgtagtacttctcactttcttctgttagataactcttctgttcaattgtaattttttaatgatttctgtatgtatataaattggtcagacccaataggctgaaaacacaataggctttggccatagagggcaccgctcatagcatccatcttcatatccttagcacatagcctcatgcctcatctatagcagttgctcaattaata

SEQ ID NO: 3644 - DNA, 598 bp, Bovine  MMBT21342
  misc_feature (1)..(116): n is a, c, g, or t
nnnnnnnnnnnnnnnnnnnnnnnnnnnnnnnnnnnnnnnnnnnnnnnnnnnnnnnnnnnnnnnnnnnnnnnnnnnnnnnnnnnnnnnnnnnnnnnnnnnnnnnnnnnnnnnnnnnnagacgtgacaggaaatccaggctaggttctcaagagcgagccggtccagagtcccgagagcctcccctttacttacatgtcagcgcggccgcccttacttcagcccaacggaaagtccgataatcaacgctaaaatgcccagcaacacaaccactatcacaatgataattaccaatttctggaragagggataagagaaataaaaacaagtcatcattacaaaccaccaaaaagccggagtcagccatccaaaacccacctctgcaccggaagcctcttatsrccccagagagagtgaaatgaamagctgacatcgctacataaagacgttccactgggctctcgtgtttaagttgcctctgcactagcagtgccagcaggtgcaaatacggagcctccatcagctccgagctcacgctgcagccctcacgtgtggacagacgtggccacaaccrtcacggggtgtctaagcagcagtaaac

SEQ ID NO: 3645 - DNA, 598 bp, Bovine  MMBT11915
  misc_feature (1)..(160): n is a, c, g, or t
nnnnnnnnnnnnnnnnnnnnnnnnnnnnnnnnnnnnnnnnnnnnnnnnnnnnnnnnnnnnnnnnnnnnnnnnnnnnnnnnnnnnnnnnnnnnnnnnnnnnnnnnnnnnnnnnnnnnnnnnnnnnnnnnnnnnnnnnnnnnnnnnnnnnnnnnnnnnnnnncaccacagtatctttagattttgccagagcaaattatgtcctattaatacaggaatatgggtctgatttaagaagccagttgtctttctgacatcccatcaacttaaacacagtactcttcagataaccaagacattaasaagcaaacccaaagaacattttgtttaggatacaaaataatcagtaayagagagcatgagcaaagaatgtcttcatctgttgagttttatgcgtcctctgtcattcagctccctccaaagtcacagctggtaaaaccaaatgggtcattttaccacaatcagactaacgtcacagttcaagaagcaccatttgtcctccaaggcaaagccatgcacctaattacaacacactgttaataaatttataatagacaaaaagaaattgactgctatggattttttccccctagtaaagcaa

SEQ ID NO: 3646 - DNA, 600 bp, Bovine  MMBT21339
srccccagagagagtgaaatgaamagctgacatcgctacataaagacgttccactgggctctcgtgtttaagttgcctctgcactagcagtgccagcaggtgcaaatacggagcctccatcagctccgagctcacgctgcagccctcacgtgtggacagacgtggccacaaccrtcacggggtgtctaagcagcagtaaaccaagatacaacgtgactgagattttccttttcaggggggaatatgaagacatatttgacacagtcctcctaaatgcaaactgccatccatctctccccsaaagaacactcccacctgtcaaacccaggacagtgactgagggtctgaaagtacaggtcctgttgtgaacaggacaggattcatcatgtgaaataacttcccagctccctagacacctgcccaagcaacaggtaaagttgggaaaaaargaactgaagaatgaaaatatcagagcacaaagtcagaaaagagcaggctaaaaagcaaaccccaccacagctggctactgcagtgactgagcagagatgctccaagaacaagggcaccagaactagaggtgggggcgggcactggagcagg

SEQ ID NO: 3647 - DNA, 598 bp, Bovine  MMBT21343
  misc_feature (1)..(17): n is a, c, g, or t
nnnnnnnnnnnnnnnnnagacgtgacaggaaatccaggctaggttctcaagagcgagccggtccagagtcccgagagcctcccctttacttacatgtcagcgcggccgcccttacttcagcccaacggaaagtccgataatcaacgctaaaatgcccagcaacacaaccactatcacaatgataattaccaatttctggaragagggataagagaaataaaaacaagtcatcattacaaaccaccaaaaagccggagtcagccatccaaaacccacctctgcaccggaagcctcttatsrccccagagagagtgaaatgaamagctgacatcgctacataaagacgttccactgggctctcgtgtttaagttgcctctgcactagcagtgccagcaggtgcaaatacggagcctccatcagctccgagctcacgctgcagccctcacgtgtggacagacgtggccacaaccrtcacggggtgtctaagcagcagtaaaccaagatacaacgtgactgagattttccttttcaggggggaatatgaagacatatttgacacagtcctcctaaatgcaaactgccatccatctctccccs

SEQ ID NO: 3648 - DNA, 600 bp, Bovine  MMBT21341
actttccaggcaaaaatattggagtgggtttccatttcctcctccagtgggtctccccaacccagggatcgaacccacgcctcctgtgtttcctgcatwggcagacaattctttatcactgaaccatctggaaatcccagtgggagcacagtaagtttcactctaaagccgtggcctttataagtctgctcgcctttctccgatgtctcccctaacccaatccagcctcaacgttatcagcaattaccctcctgaagtccacgtctgattatattcctttccagctcggaacgtctcccrgcccccttcactctgccatggggtccaaagtcctcaggacaacaggccagttcccaggtgagccctccctccaaccgtcttacccccaccctgctccgcccaagcgcaccctgtccccaggccctggccggcctgccctccctgcctgtgaccgagttcattcagttctcagagcatgttccgcgctgcagggccctgattgctactgattcctaaagttactgactcctaaagttactgattcctaaagggcgaggctgtattaactcctttacacaaacggggcaacctgcaccattc

SEQ ID NO: 3649 - DNA, 600 bp, Bovine  MMBT21048
gcacaggaagcatatcctaattctttaagagagccagaacagagactatatagagctgcataaagtatttcccagaagctaccaaactagaatttcagtgagtaaagactaaatgagggccttccctggtggtccagtggctaagactctgtacttcctattgccggggaccagagtcagtccctgttcagggaattggatcccacatgccgcacctaagagtttgcatgctgcacctaaagatscctgcgtgtacracaaagatcaaagaacacgcatgctgaaactaagacctggtgyggccaaataaataaacatatatttttttaaagactaaatgaaaagactcctgcacatgtcttcagctccgtatagatgctgcaattcagacttttaatttagatgagtgggtctctgtgttttgatcaaaatattcccattttcctaatggatgacagtgtgactataatgattttatggcatctaccctggcttgaattttatgaaaattgatgatatggtggttttcyaataccaagtgacagaagaagggaaactttactgataggtttttggtggttttcacttgaatgaattaat

SEQ ID NO: 3650 - DNA, 603 bp, Bovine  MMBT21345
  misc_feature (1)..(3): n is a, c, g, or t
nnntatttctgtgggcggatatatcagagaccttgtattccagcaccttgctgaccctgagcaaacgttttaaagccagagtgttcgttaatagttttggacgtttcctgcacgtagcatgtagcgcccttcctggcacactcaaattccacatctgatrtatgtctcagtgtttcctcctgggccagaaaactctcagggaaaactcttgggaaaaaaagaaaccttaggtcaaaaaccactatgcctamaattwaaaaaaaaaactatgccaaagaccttcctcatgtgccaagctccccmatcctgcctgctccaacttcagaattacaacttctgcttccatttgtatatgttgtaagtcctgcccccatcacatttaatctcttaggaaacataatttgcttatacatctagagtgaaatgggaaagagggaacattaagagtcattcacataatttattctcattggactgaagggaatttgaaccctaatggtttaagatgggaacaaagaaatattatttcctcattctccctagccgtatctttcaagtcttccttgtttattactttatttgggcaaatacacctgaccacac

SEQ ID NO: 3651 - DNA, 600 bp, Bovine  MMBT15249
tctctragcctgcttctgtcatcagtggaatatagtgaataacaatagccaacacttactgaatgcttacaatgtaccaggaactaatgcttcatgttcatcaacttatgaataggacttaagttaaacaacctgaccaatgtgggtacaagaaacccagatcttattctaggtagcttgattcaagaacctggtatttaatcactgtataagactgccttttcagcagagttcccagagccatgatgagaattaaataataattcgtattyagctcacatttattgagcactcatatgytcaagaccccagtgtaagctcccctgggagcatattaactcatttatcttcacggcagacctgggagggaatatttgcaatcccatcttacaggtttaaaaataggcacaaacaagttacacagccgaaggtcacaacaccagagcggtcaaggtcggaacccaggcggtttaacagctgagccccgcgctcttctgccatcagccaggagaggaagtggccccggattccggggaccagatcgccgggatgggggcacagccgcgccccttcagggcggactaacctccaggcccgctc

SEQ ID NO: 3652 - DNA, 600 bp, Bovine  MMBT01817
accagtttttagtttggcaacccttaagccgattcattgttaatagccactgaaatttcagtaccctacatataattaggaaacaagtctaaaattttggtcaaagtgaatttttgaccattttaagccacaaatacacatggtcatgattcatatttttccctattattttaacatattccttgccaatttgtgtttaaaaaaaatttagtgatttggagaccactttacatccatatgggatatacaatatattgtagcatatcatattaatgcccaacagagctaacagtgatagtyaawacatacaatgagacttcttgaggttttcccaagaatctggaagagttttatgttgccaagagtagctcagttttcccctgaatttctcaactaggttaataaaatccagaaagtcttcagagttagtgacagaaccatctttatagtttaatgcttccatctatagctaaagcaaagaatagcaattagaaaaacttcttttcaattgcacaattaatacataaatgcttaagtgagcatgggatttccactggtgttaaattcttactacaagcaaaattaaaatatctactggcc

SEQ ID NO: 3653 - DNA, 600 bp, Bovine  MMBT16130
gaatatgcatttctcaagcacttcatgaggaaagtacacacattctttgaaagaggcttatccatgtgtcccacaggacatgaggaaacatacctctctgcatatccccttaccagaagctatttctcctgcaaaactgcaccatctgaaaaatacaaaatgacctcacaaccagcatatataaaaatactttttaagtattactaacaagatcacacatagaaataggtgtcagctttgaccaagtaactcaaaccatgttacagagttttcctcttgaggtaactagcttcactatcsgtatgaggaaactraggaataaagtaaattccataggtcaggaacagagccaaactcgaccctgccctttagaacagatcaactccctcacttgaagttggcatattacactgaaggtaacatcatacaagtatctaataaagactttaagctattatactagagaggcttcagacaaaattcgaattgattgaaactttcctctgaaacttgaatcaaagcaagccccatttttttccctgtacttcttctcttgcactgaaggatccaaagatagcacacaaatggatgtttctcctg

SEQ ID NO: 3654 - DNA, 600 bp, Bovine  MMBT06686
tgtataaccttagacaagtcattttacttctctragcctgcttctgtcatcagtggaatatagtgaataacaatagccaacacttactgaatgcttacaatgtaccaggaactaatgcttcatgttcatcaacttatgaataggacttaagttaaacaacctgaccaatgtgggtacaagaaacccagatcttattctaggtagcttgattcaagaacctggtatttaatcactgtataagactgccttttcagcagagttcccagagccatgatgagaattaaataataattcgtattyagctcacatttattgagcactcatatgytcaagaccccagtgtaagctcccctgggagcatattaactcatttatcttcacggcagacctgggagggaatatttgcaatcccatcttacaggtttaaaaataggcacaaacaagttacacagccgaaggtcacaacaccagagcggtcaaggtcggaacccaggcggtttaacagctgagccccgcgctcttctgccatcagccaggagaggaagtggccccggattccggggaccagatcgccgggatgggggcacagccgcgcccctt

SEQ ID NO: 3655 - DNA, 600 bp, Bovine  MMBT11450
gattggcttacagcacagactaatgggtttggggagggcactggacaggggattcatggagaacctttgggactttaggagctattatgtaggttaggggttagcaaaccaaagtctgagggcagtatcccactgctgcctgattttgtaaataaagttttattggcacatggccacgcccactcatctgcatattgtgactgtttttgtgctgcgaaggacaggattgcatgattgtgccagggagccctgcccagctcagcagcctgaaatacttgctctctggacttttccaggaasagtttgctgacccttggtgggttcagaggtcagagggaaggcagatgtgctggtggtgaagtgaaggactgaagtcagatgcaaggggggactttctgatccagagcacagctggccaggcttttgtacacagcaggcaggagctcttggcccctggggctctggtttgatgagaagcttgtcaagccagtttttgtttgcacagaggacagggcagagtaagcaggctacactcttctctgcctccccgtctctgtattttggggtctctggcagaaagttctgtgcaaacaaaagcct

SEQ ID NO: 3656 - DNA, 600 bp, Bovine  MMBT02070
gccaaagctgtgaatatatattttctgtcagcctcctgtgtgtctgctccaggacccagcctgagcctgaaacttcctttgtgccggggaaacttccagactggccccacactccccactcagcttctccgtgggcaataaagcagcaatttctggcaccaatgtccaaacagcaaatgagaagtgatggtttgcgtggaaagtactgtctgggagacaagagaaagaggcagcgcttgtgacagagctgttcacactttccctgcacagctgggagacattagctgatctctccagacyggtctgctttctggcaccggtgagttaaaaccccccagagcctccaaggtaagctggacttctatcatatgcatttagcagctaaatcagcaaaagtcattttcaaatattcatgcaaagctgaatctttacccaaggtcagaagttcaatagaagttagcacacacacacgcgcacacacacaaaaaggatttgcaggcaggaggcaagaaaagaaacagaaaatatggatagattatctcagttcaaaatctgctttttcttggagggggcttgtgctctgggaaagtagataaaaaa

SEQ ID NO: 3657 - DNA, 600 bp, Bovine  MMBT07676
aaacactggttcaggctataaaatagttttaaatcctggtcccatcttttagtagttcatgactttgagcaagttatctctctgaacctttgttctattcatttgtaagaggatgatgtcttgttttataggttgtagtaaagattttttaaataaataaatatatatatataagtaactttataagtcacttctttatttaaattcaaagaaaaggagaaatactggaataactggaaaagcagaagacaattgaaagtgagtgaaatcttaaaggatgaaaaaccattttaaatactyagagaagcagaagaaaacattctggattgctgtaaggcagctctccaaccttttcattctaaggtcatactgtgaagctttgaggttgctgaccattgctgcagagtcaaacacatctgggttcccatctcagatcttctacttaccagccttgtaagcttcagtgaattaatcaatcaatatatctctcactatattcccagaaaaaaatatttcagggtgacacatgtggccaaaaacatgacttctcaagtcttatttctttatttgatgagaccactccaataatcagtaggatta

SEQ ID NO: 3658 - DNA, 600 bp, Bovine  MMBT02218
tgtccctcccttctgatcatgaggcgcggaactgcctcgtgtcttgactcccagaaggaagtgcgccttacagtgtgcattgtaggtacttagtgagtatttgtgtccttgtgtttttgatcacaactgtgggccctctctacgtcgcccactgactccaccccgtcacggtttaactgcacccagtcagttgaaatgcaggccctcaccctgccctagacctactccatcagacctggcgtggcatgtgcatttggaaccatggaccctcatgtgcatttgtaacggatgcattaggckcctaacgtgccagttactgttgtccttattgatcaaattacttaagcatatcagctgccagttactgttgtagctgctgagaatgcaaagatgacagcatgggcctgggcctcctaggagttccaggaggagctctgtctgcctcagtagcatcgatgaagagtttgatgagggacctgccttccagggtgaaaatgtgtccaagggcattccggtggtggctccatagtaacaggcatgatgggggcagggtgggaccaggcttgacacagaggacccccagaatgtccttcctcatcc

SEQ ID NO: 3659 - DNA, 598 bp, Bovine  MMBT14794
  misc_feature (1)..(122): n is a, c, g, or t
nnnnnnnnnnnnnnnnnnnnnnnnnnnnnnnnnnnnnnnnnnnnnnnnnnnnnnnnnnnnnnnnnnnnnnnnnnnnnnnnnnnnnnnnnnnnnnnnnnnnnnnnnnnnnnnnnnnnnnnnnnagaaagattatggtgttttcaggacattgagatgccagggaaaaaagcaaaaggactttgtgtgtagctttttaaaaaaattatcacacacctaaaaatgcagatccccaacaatgtaggcactgttgtggtttcttttttgttctctttataaaaacatgtttgtgcttacacctcscggcacttgttcagtgttaaataaaaacaactctggtaaattgctgacaaacaggtaatacaagtagaaagaattccctaactttcaaactctctgctcaagggaaaagcaaaagctgaagtaaaagatgtccccaaagtcatctggtaaacatgctttcccraagagaacgtgaaacgcatagcaaaacagacactaactaattttaaacacctaattatatactgcctaaacagaattatcaagagacttgattgacttctacagagccgtgattgccatcaagcaaacccagaga

SEQ ID NO: 3660 - DNA, 598 bp, Bovine  MMBT01166
  misc_feature (1)..(49): n is a, c, g, or t
nnnnnnnnnnnnnnnnnnnnnnnnnnnnnnnnnnnnnnnnnnnnnnnnnctactctgccagttgcctgctggaggtctgacaatattggttttattgctacaatattggttttattgctacaatgcctggaatttcttgaggttagctcttgaaaagtgggttagcaaatccggtttttgctcccttgaccagggaagtaccaagaagataacatctggaaggagaccctgaattcatgtaaggaatctcttgtatggaatcacggggcttccgtcagctccacttctgtgctgctctgygttcactgcctctgagcaagacactgccctactcacaccacactgcccacaccttagccgcaggcgccagctgccaacccatctggggttcctgctgccgaatgccagagggtcagaggcagggagggacctgcatcttctgcattcccttccattttaagtcrgggcgagcctccatctgttgggttcttgggtgtggagctagtcttaaacattaatcattttacgagagtggtgaagagggcttccctggtggctcagatggtaaagaatctgcctgcaatgcaggagatgcagg

SEQ ID NO: 3661 - DNA, 600 bp, Bovine  MMBT11684
tccttctccccatcctgtcatccaagttcatacatggagaattaaatataatattgttgccatactgttaagaaaggcagaaaatccacttttaagaaacaaactattgtcttgctgtcaaattcctctacccaaggyttgagaagcctcatcaccatcatgcttcaaggaaggaaaaawaacctcatatactttagtcacagagagcacaaaaggggatttgctttagatgtttccatctctgtgtccacatatcatccaaggccaaacaacaggcatgtttagtgtttgtaattagawgaaaacagcaatacttttttataagaagcatcttatcttccccgtatgtatgtgcacacactgacagccatgagctgggtgatgtatctaacacagcctggcaagacaagatgacctttctaattgtcatsatgagaagcacaattgcaagtgactttgaaacatatggtaaacttcattatgctaaaatataatagcttcttctttggggctcatgatgaatattaatgtcagggctcctgaggaaaatgtgctctaaatattatattgtataaaaccctttcaataccaaagagagca

SEQ ID NO: 3662 - DNA, 601 bp, Bovine  MMBT08121
  misc_feature (1)..(1): n is a, c, g, or t
ntggtcatgtcactgctaccagccaggagccsgaagactttatcttcttggcctcatgtcaggtctccttgatgggtcttcttgcccatgatggaaatattctgtatctgagctggtcagggtgtccatgagccgtctgtgggggttgagcrcttgaaatgtggttaggatgaccgaagaattgaagttattttcctttcgttgaattttaatcaagttaaatttaagtttgaatggctgcatgtggcccacggacagcatagctttcccgggtggtgtgtggttccctttcccactgtgstcgctgcctcacccagggagcagctgtaggcaccgctaggcttgtctttgtttccaccatgagcaggggaaggaaagcgagggttgagggctgctgtctgaacctgaggctttggtggctgctggctgccagggagagtgtcaggagaccctggcctttctttccgtggtaggggtgcggcagccggctgtgctggagggtgccctgggtgtcctgttcaccttagtggcagcctgtgtgcagatgcttcctcccactggggacctgggcgctgaaggcggacccgtgtgtcttcgcttt

SEQ ID NO: 3663 - DNA, 600 bp, Bovine  MMBT17068
cggtggttttccctcatataaataaacattgctgcattcaaaaacaccctgtctgcttgttgagagcttccaaaagagcatatctggatagttytgattaggtcataatcttcaaaacatggcatgatttcagtgacaagtttaaattttttgtgccctattctaaaatgcagttaaaatcctgtgctttagagctattttttactatcataatttcagaggtgaaaatggtcaggcacataaactgttactgggctgtctactggctcgtgaaagggcactggcccggaagccagaagrtctgggctctgggttctggacctggctggctgatgctgcagtcagcaacgtctggatgggagtagagtctcagacatgtgctggaaacacgtacagcatgttcacatccagaccgctggcaccagcctcacctcaagaagagattcccttccctttgacaaatgatcctcgtgggtctgtctggtcaacatgagatgcatggcccatgtcccacccagtcctcccctaatagttagtccagggagaaaagcaycccaaagctcccagaccctggcctcccacttttttcatgacacggta

SEQ ID NO: 3664 - DNA, 600 bp, Bovine  MMBT02674
taaataagtcatttcagtgaagcatctgggtaattttgacagctaccttttaatagccacatgacaatgtggaattctaaagtacccaaataacacaacaacaaaatcaatatgcttttcagaacatgcttcaatccatatcttttggggrraaaaaatgacctgcctgaaattccaaataaggtgattgaaaacatacacctttctcattattggaacatattttgagatagactctatcaaaaaggcacggaaacatacggctgtaagtaaggaatagttgtgttgaaattagcatcrtgctgatcctgctgcccgcttcattggttactaagtggatgttcagcatcctggccacgtcttaaaaagacaggttcccagtctccacaatagttaagtcctgcttgcccrttccatgtctgaatttgacctttcctttggtggcacaagtctccttgtttaagtgtaaagctgaactctgtgtttcaaaagcctattaagtaagttcaagcaacgacaagttcttcagtgaagtttcattttcacaagttccactttgggtcacggaggaattttggaaagacttcaaaaaaaggaaga

SEQ ID NO: 3665 - DNA, 600 bp, Bovine  MMBT20681
gtattagcagtatctttggttgggcaatggaaaacaaaatagtcatggtctctgacctaaggatctcataaagcaggtataaaaaattatgttcttagatgggcatttcaataatatttgtagtagtagctgtgattagaaatgaggccaatattcaaaaatacatgcaataagtaataataaataaaagattgtacggcatattgtggattactctacagtcagtaaaatatgcttctgaggcttaatttcctcatctggcagatggggataccacagagtcatcaagaggatcagaayagtcataaatattaaaaggttttagaaataacaaaataataaatgctaattattattatttgttagggtctgtagaagctcaattatgaaaacaatcttaatgaacatttactatgtgtcagatactgtacacatactacctcacctaatttccatctcaagctgcaaagtttggagataaaaatacacaatgacaaattctaatttcagataaaacatttttagcatgtccaaaatatctgaaatatttgggcatagtcatactaaaaattattcattgtttatctgacacattggaat

SEQ ID NO: 3666 - DNA, 600 bp, Bovine  MMBT18732
ccaaggyttgagaagcctcatcaccatcatgcttcaaggaaggaaaaawaacctcatatactttagtcacagagagcacaaaaggggatttgctttagatgtttccatctctgtgtccacatatcatccaaggccaaacaacaggcatgtttagtgtttgtaattagawgaaaacagcaatacttttttataagaagcatcttatcttccccgtatgtatgtgcacacactgacagccatgagctgggtgatgtatctaacacagcctggcaagacaagatgacctttctaattgtcatsatgagaagcacaattgcaagtgactttgaaacatatggtaaacttcattatgctaaaatataatagcttcttctttggggctcatgatgaatattaatgtcagggctcctgaggaaaatgtgctctaaatattatattgtataaaaccctttcaataccaaagagagcatttatttatagtcttcaaccttcttcatagatgctgttaaatattccattaaacatggcaaaatggaatgaataatcatggaacattggaggtgggtggggacaatgatccctttccgagtatcaagccaa

SEQ ID NO: 3667 - DNA, 600 bp, Bovine  MMBT11369
taagtatgagtcataggtctacatgtaggtgacacagcaccattactaacatcagttaaacgcctctatttatgtgattccaaattttccattcagcttagagaaaaaattatgtaaacctgcacaggtgcagaagcagttggtagcaccaggttgcaaattagcaggccagaaaggccaggaccaagaaagtataaacatggatttctcagaagcagtttccctccaggagtaatgagaacagacaaagaaagaggcagtttccatggcagattgcatggaaagttataaaggactatygttacccttgagacaatagaacacctttaaagttcaaggctagaactttaatcctacttcagtgcacaattgtaggcaaatctgttatattttctggggttctgtttcttctgcaaaatatttaaaagaatacataatttagaagactggtgtgaggttttaatgagataacatacttgatgcaactgggacataaattcacagaatatcaactcaatgagtatatttaagtgccagatactctgttggataatggaacacagtactggacatctccctccccttattctttagtagaat

SEQ ID NO: 3668 - DNA, 600 bp, Bovine  MMBT17212
taacttgcagttttggccacatactaactcagttaactttggctaagtctttcaacaactctgtattattttctctttagtaaaaaaggaggtagtacaacctcacaacagctcaaggatttaaatcatatatgtaaaagtatttatttagaaaaataacagtgctgagaataatgtaagaacttataaagtagatacactaagtactaactctttgatacattttaaaatcattagtatgtggtaagtttataatacctgcttcatagatttcattaacttaataatccaaagtggggraaaatggtaatagcaagatgttcgtgagcaaaataagcatagaatacttaatttatctgattacttttcttcactgcctttacagaagagccttgaatttaggaattcttcgagaccctgggtcagagattgaagaccgacaataccaaatagatctgcagtcgatcaatattggtactgctcagtgggatcaactgaaaccagaaaaggaaaatggcacaggaggagtgctaacagagactgaaagaaattcacagaatccagcccttgagtggaatatggccagcaggtaggaaatgc

SEQ ID NO: 3669 - DNA, 600 bp, Bovine  MMBT01503
ctctttttaaaatcttttctatcatatgcttcccaagcagattgtctattctgaagggcagagcttgcattttatgtctctgcatgtctcctgcagtcatgccctacacctacttggagctcaataaatatttcagaaaaaaaaaagtgcttcttaaaccctattctgcagggctcaaagggattattttatgtgcaaagttcagaaataaaaaagccaaactccagcaaaattgcttctttttgcattcttcattttgatgatgtctctaaggtgtggttttccatattctttatgctyctaatatactccaaattaccttatatttctgttgtacctaatagaaaggaggtgacatgtaagggtacagggcccccggtcacctagagtcatataccaaaacctgtctgagtgatctccaaaacagactgygccagacattttattaaaggcttttaccttgtgccataaagttaatccacactggaaggaagcaacaggaattttgagtgggttgaatgtaaatcagccagttgggacaatggtgattgggactactgtgggtgaaacaacactacgtcattctgatccaggcattat

SEQ ID NO: 3670 - DNA, 600 bp, Bovine  MMBT16950
aaaacaatttatgcaaacaggaaaatttcagtgtagaaaaagatgagatagaaacgcatacctcgcttctattgaygctcamaaacacactgtatgtgaatgtataacaagtattttcatcatcatacatagcttctggctcttttccatttacagtaattaaagggtgaaatatatcaacaatgatttggttttccttctttctgatacccagtttaggtggtccaactttccctggggggtagggaacaaaaaagaatttgcatcagccttggaactgtgatccacagcatattacayaacattaccaaactcaatccatcaacctactcttttcgttgctgttgttctaaagcaggactgcatttaaatcgttccacaaacatctagaatatattttaactgtctttaatgaatcttggtaaaaagccttgacataaaagaagctcaatgaatttatctttcctttatctttgattctgtagattaaaaatcattaaacagaacatggtttttaaaatacatttcagaaaaggcattgtaattatctttgagtcctcatcaaaacccttcgtatttccagtgcctatggacacgggg

SEQ ID NO: 3671 - DNA, 600 bp, Bovine  MMBT00491
aacaaagatgttgtccaataaaattgttaggggactcagagccctgaagcaatccttgaaaataatttgtaatattatattaattgtatgcaaatgatgctgccaaaatgctggaaaacaattgatttttttaataattaaatgatgcccctgaaatcctgtgcaacataatttgcttagcaaaacacttcctcctaaatcgttcccaggaaggctttgatcacatcataaattgtatcatcaccaactctgcaccactgcagccacgctgcaggagtcagggatgttctcccatacctraatctgaacccagctttcttgctstcctgtatctcccccttgggggcctttttgctcctaagcaaagtttgttaagttagcaaaacatagggctcacttcagacttctaaattcgtcatagtgcacaaaccagaaaggtgtgtagcactttcctaaaggtgccctgtgggcactgaattctgctgtatatgtgtctttatgtgcatgtatgtatgcatatrtgtgtgcatgtgtatgtgtgtccacatatgtccctgtttgggggtacacatgtacacatgtatttaagtgtgcttgtgt

SEQ ID NO: 3672 - DNA, 601 bp, Bovine  MMBT18525
  misc_feature (1)..(1): n is a, c, g, or t
nttaccacctaggagcattgtgataaaaaaaaaaaaagtgaatagctgtgatatctgtcagtgtgaggtggatttttatgttctgacagggagatgtgtctctcagatattacgtggaagagcaaattatgaacagcaggtaacatcccatttttattaaaaaggaaaaacaagattgtaaacagaagaaatcttagtggctcttatgcaaactgaatagtggttaactttggatgatggggttatatgtgactttattttttctaaaaattaggaattacatatttctgttaatgttttyaatttatgaaagtaagcaggtatatctttcctaatcagaagaaacaaaggtaacaaaataaccagcttaaggaggcagagaagtatataaacattttagaaaaatctggttcttatttaatgggtaagtgaattttaaacrtatgtggaatatctcccaccttgacaatgcacacaaatgatttgaatgtcagacactctttacaacaatgcttgggtgtcagtagctctttttctgactcctgatcartttcccccaaccatcgaggtgaacttatatatgtatattactattggggtt

SEQ ID NO: 3673 - DNA, 600 bp, Bovine  MMBT14792
tgggtgtcacactggcggtgtgttttggatgggtcctttttgcacaaattaaggaagttttaaaaataaaaccttgttttctggtgcagacaccttgtagttacactgggattgcagtgctccatgtaataaggcgacatcagatgactccaaacaaaccttagataagctcctttcctccaataagtcttacaagaggatgcttacatagcacaattgagtaaatatgtgcagagctcataaaaagtcaaacgtgattgaacctaaagaaaaagccaatgcttaatgaaattgcaatgwgaagatatactgcttaatctagcctcagagcaaaatgccaggcaaaatacacagaawttgcctaagactttatatgatttctttgagttctcggcatgtaaaagaagtaaggcatttcattttagagaaagtartccgtactctgtttctcaaatcatggtcttccagtttctattaatagtaaactagtaatattttttattaataaaatgttttgtattaatagtttttattaataaaatgttttgagaggtttgtttaactttattcttgtgctttaagatgagggtccaagtctga

SEQ ID NO: 3674 - DNA, 601 bp, Bovine  MMBT18947
  misc_feature (1)..(1): n is a, c, g, or t
nagcatgctcgctgttgaccttcagcccagagcctctgcctgcccgcagcacacctgggtggccgagccttcctraacccacgcctgtctaccccctgacagcccaccctcctccaactgctgtccttgttgtgttgttgcgtggtgaaagtcgctcagtcgtgtccagttcttttgagaccctatggactgtaacccgccaggctcctctgtccgtgggattctycaggcgagaatactggggtgggttgccattcctgtctccattttgcaaaktacctttttgttcaaaggaatgagygyggttaaggtgactactttaataaattgccaaatgctttgatgtcccttgcaccttgcccrttctccccaacctctggcacaggtgtgtggtcccagacactggtgggtgtcactcccagctacagcaaaacagggggtggggaggggcctggcacttgtgttaccatcagatgagtcagccaggtggaactgtaaagcatttaatcacatgggtgtcagcgttgtttctcgaaagaacatttttccaggacctggtatgcaggatgggcacacgctgttacgtctgcggttttcacat

SEQ ID NO: 3675 - DNA, 598 bp, Bovine  MMBT06450
  misc_feature (1)..(91): n is a, c, g, or t
nnnnnnnnnnnnnnnnnnnnnnnnnnnnnnnnnnnnnnnnnnnnnnnnnnnnnnnnnnnnnnnnnnnnnnnnnnnnnnnnnnnnnnnnnnnttctgtaccagccttcagcatgaaacaaaaataagactacgtgttcgcaaagcaagtattgcctttacgctaattaatatctatttatcatacaaatattctaggtcccatcatacttagaacactgactgaattaaaatatcaacagccttttatcttcctaaagcaacccagagctgggtacttgagatggtgggaggaggaagackgaacaggagtgatggagacggcacggaaacgctgactcagcaacacacacgcccacgactgaggggatacagggcagcgtgagttttcaaaaccacgtacctgattttctttagcagatgattccaaaaacgctgcgttccaagactctgctaacgctttcccttcttcataactgatcaccctaatggaaacagaaaattttaatcgaagtactttgctctttaccacrtaaggtgtgtgtaactaactgatgaggcagttggctcagtctcatccagagcgcacgcagagtctctc

SEQ ID NO: 3676 - DNA, 600 bp, Bovine  MMBT11147
ttcctggtttgtttgttcttttttctgttcttttttctatttgttcttttttctgcttcctttatataaatgtgatgacaagtgctggattctttatatttcccatatagaaaaccagtagagtctaagtacataaacaaggaagatgaaaaagcctaggtatctggggactccaaaaaggaaaattgccacaccagtcctgacatgcatatctttagactttacatgaaacagaaaaaaatacttgtaagagctcttatttatgacactttgaccttggtgctcccacaaaatctaatyccaacagatacagtggcatatcagttcaattcagtcactcagtcatgtctgactccttgtgatcccatggactgcagcttgcaaagcttccctgtccttcaccaacccccaaagcttgctcaaactcatatccatccagttgttgatgccatccaaccatcttatcctatgttgtccccttttcctccagccttcaatctttcccagccatcagggttttctctaatgagtcaattcttcgcatcaagtggccaaagtgttagagcttcagcatcagtcctttcaatgaatattcaggac

SEQ ID NO: 3677 - DNA, 561 bp, Bovine  MMBT18945
  misc_feature (1)..(1): n is a, c, g, or t
ncgagccttcctraacccacgcctgtctaccccctgacagcccaccctcctccaactgctgtccttgttgtgttgttgcgtggtgaaagtcgctcagtcgtgtccagttcttttgagaccctatggactgtaacccgccaggctcctctgtccgtgggattctycaggcgagaatactggggtgggttgccattcctgtctccattttgcaaaktacctttttgttcaaaggaatgagygyggttaaggtgactactttaataaattgccaaatgctttgatgtcccttgcaccttgcccrttctccccaacctctggcacaggtgtgtggtcccagacactggtgggtgtcactcccagctacagcaaaacagggggtggggaggggcctggcacttgtgttaccatcagatgagtcagccaggtggaactgtaaagcatttaatcacatgggtgtcagcgttgtttctcgaaagaacatttttccaggacctggtatgcaggatgggcacacgctgttacgtctgcggttttcacattgtcatgtgaggtgcatgcgag

SEQ ID NO: 3678 - DNA, 600 bp, Bovine  MMBT08229
gactctctgaagccacaactttgtatccacctatctctccagtcttgagggcagcgattttccctgtgaacttgtcttatggatccaagaagagttgttgactttcagtattttcagttttccacctcttgttaagagggagtagcaacttccaagcttctatcatgtcaaactggacatgggaatataaaggataaaaaaaaaataagaatggctgcattaaattttatgattcaaattgctgttagtagatttaaggaaaactgaagacatctgtattgtttatagtgtatctaactrttttgcaccgatgttagtttcttggtttagataatgtactacagttaatataagatgttatcagtgcacgaagcttgatggagggttcccgcactctgtactatcttttacaacttcttgagaatctctaaccatttaaaaatagaggcttttcttaagtaaatgaaactagaaaaaacatttgcaacataagaaggaaaaaaaaaaaagcctcaatgtatagaaagctaaccaatcaataaaaaatacatcctagcagagaagtaggtaaaagacataaataggtactttgcaaatcat

SEQ ID NO: 3679 - DNA, 600 bp, Bovine  MMBT08706
cggctgatttcaatgtctgtgagggaggaaatagagatgttgggttttgtagctcttctgcattacctgtaatctggtgacctgtaattagctggctgaaaatcagaagccctcaattctctttttttcacccatcactgaagataggtgccaggtatctaattatattttaaaaaatcacattgcttatacatttgagaaatgtaggctaatgataacaaaattattaacttcagctcwtattttatccaaagtcatgtatatgaaagattacgggacattgtgtggacatagctgatrgcagtatttgactcactcttacttccaacagggccacatagaattattttactttgtttggaaatattttcagtgaggtatttggacatttggataagattgtttcatcaagatatgctcataaagttgcttggcggccacaccatcttatagtttaatagcttctatccttcctttcttgtggccatttatggatctttttatctgttcttgagaggtaagaaggttaggtttgaaaccttcaaatcatttatgtccttccatgttaagtacctgctaagctctttcacttccacttgt

SEQ ID NO: 3680 - DNA, 600 bp, Bovine  MMBT13523
agcccaccaggctcctccgtccctgggattctccaggcaagaacactggagtggattgccatttccttctccaatgcatgaaagtgaagttgctcagtcgtgtctgactcttggagaccgcatggaccgccacctaccaggctcctccatccctgggattctccaggcaaagtactggaatggttgccatttccttctccaagaaatatggcagttttacatattatcctacttcttcaacagtatatacattgtgatttaacacttctgtaatgattggggacaacatcatgaaacttyactagagcactgggttccagaaagcagaactgcttatgccatctggctttggggaaggtttgggtatgattctttgttaaaagaatattttgaagtttgaaatgagaaaaagagactaagtggctggaagaatatgagcastgtttttgcagcatagcctcaggagagataaagtgaattgattcagagtacagttaggctttkgggactgcatttctgcttctgagaaggaggaaacaaagatgaaagagaagaggctgacatgggtgctgctctcctatgaatggcattttcctgtaa

SEQ ID NO: 3681 - DNA, 600 bp, Bovine  MMBT01533
cggcccggagccacagcgggggtctctcttggggggccatccctggcctgggaagggtagggggaagaagactgtctgtacctggcattcgcccagctgaatgagcagggggtcygagcagcaggttaggtgctggtgtgaccctggcccacctgagacagagctgggccgagtgggcacagccrggtcaccccccgaggtgcaggtggcagacaggagaggcatcagcatgctcgctgttgaccttcagcccagagcctctgcctgcccgcagcacacctgggtggccgagccttcctraacccacgcctgtctaccccctgacagcccaccctcctccaactgctgtccttgttgtgttgttgcgtggtgaaagtcgctcagtcgtgtccagttcttttgagaccctatggactgtaacccgccaggctcctctgtccgtgggattctycaggcgagaatactggggtgggttgccattcctgtctccattttgcaaaktacctttttgttcaaaggaatgagygyggttaaggtgactactttaataaattgccaaatgctttgatgtcccttgcaccttgcccrttctccccaacc

SEQ ID NO: 3682 - DNA, 601 bp, Bovine  MMBT17373
  misc_feature (1)..(1): n is a, c, g, or t
ncagagggatccccttgggtctccacatcagggtgcaagaaagaagtaaacttccagtggagatggtgagcccaaggaccaagaaggagactgaagggcctgtacctgagatgctttcartctcagaatctggtttgtccaaagacaaagggaaaacctcagtcacaagataataaaacttcagaatatagcatcaggaggaaaacaaaacaatatatcggtttcaatgcactcatgataacttgggggraaaaaaaaagagcaaatccacagtcaggccaggatccagactaagtgacasgttgaagtttaattaaactagtcaagcctatataaaagcagaaagaatttcaaaggagaaggggacactgggaaaatcaatacrgtttcattgcagcaggaagaggcacccaaactcaaggtcagacccagggggcttgtccagtctctccaacrctctttccatccttctaaagcatttcttactggtggaaaataaactgtcactgaacttgcagatgattatctctacgcaaaaactctgacaagactttgtcagtaattctagaccagttgcatctggagaggagactatggcaga

SEQ ID NO: 3683 - DNA, 601 bp, Bovine  MMBT20348
  misc_feature (1)..(1): n is a, c, g, or t
ncctctagactcaagcatgtcacgtgttcacctgcagacccagttgctggaatcaagggataagaaagaaggtagatttcagaactggcccacaccctgtgtccaagcccctgccatgcgatrgtcacttctgatgtgttctgtgggccaaaagaatccacaggcccagacccaaggggagagcacataggttctaccccagggtgggaggagctacagagccccaattctgagtccggcctcargaagccttggatagacctccctgtcgtggggagccccatcacggtcatgagagcaygcccagtctacccgactgcaggaggagaccgcatggaacagacacaagctgttctggccraggccactctggtccagccagtccccaagtgacctgctaagtgaccacagatgggtgagtaagcacastcggggccagaagaatgcccggcccaaattgctggcccacaggatggtgagctaaatcaatggctattgtcttaagtgtgggggaggtttgttatgcagcggtgggaagactgacgcaggacccaaccttgctggccatgggaatcgagcaggcgggagaggaggcatcaga

SEQ ID NO: 3684 - DNA, 600 bp, Bovine  MMBT06668
gatcaaaccccttgtcatcctccgctttgtcaactagattctttaccactgagccaccagggaagtcggctggactattcctcatgagagcagtagaaatgaatattgaaaatcttgcatttccttccacatcactggtctattgctgtgtaataagccagtcccaaacttaatggtgtctattaacaataatcattttataattaatcactgtttctgagggtcaggaagacttctcagggttgacatgccatagtgtctactgaatggttttgttagccagtaactggagctggagcrgtgtggggctggaagatggggctytgcaggcatgtatgcacaccctccctttctctctctgtccttgttgtctcagggcctctcatgtggtcttcccatgcaggctaacttgggcttcctcacagaatggcagcctctcggtggtaggacctctcttcctatgcagagactacgcagagacttggagcttcactttgactgtttcatctattgttgtttagttgctaagtcgtgtctgactcttgggaccccatgggctatagcccgmaaggctcctctgtccaccggatgtcctaggca

SEQ ID NO: 3685 - DNA, 600 bp, Bovine  MMBT13069
gtgaattaaaatctatagctgagtctacattgttatgagtcaccattttcacacaatatcatgaatcttcagtttgttaatactttcatatagaattgggctgaagaaaggattgttttgtgtaggtgtttaatactactatacagttatatctcattgaaaataaaataattggggatttttacccctaattcagatagaaagcacaagaagctgcagattcattaatatgcaacagattctctgttaatgaatatttcttatggattaaaatagaaaaagctcaaattgttttttttyctttgaaattttaatwacagtttcaccagctagtagagaatatggatatatgacggttgcattgtaatttctgtgtgtgtgtgtattgtttcgttttggtttgtttttataaagagacgtgtgtttgtacctatgggttcaacatttctgccatcttgctaatcagtttcacttgccctgtggatggtgcatgggttctgtcctttccctcctgacccaaatttaatctttaacttctaaggtttgtattaagatttcagggcttaacgttagaattttggtactttttctcattagggg

SEQ ID NO: 3686 - DNA, 600 bp, Bovine  MMBT14704
gaagttcagcataaccagtgttgaatgtattctgctcattctagcccrgaagtcccagaaacagtcatcaactacaagtgacattcaaataccttatgaactcagtgtgttggtatttgaacggtttccctctaaagtcactacaaagtattactgtgttatagccaaatgttttctaacagtttgcacaattctgtcatctacccagggaagcaaatatagatagtattcagtctgcagagtaccaaaatctagatggaaagggtcaagcttccatcacggcattatacyacgttayayggctatttcagccataatgtcagttattatatattggcgacgtgcctaaaggctggttcaaatctataatttaagcacatatcatgctaaatagtgttgtgccatagccaagaggcatttggtacgtgatgcctttccccttcctgagacacaaagaagcttattctgttctccagtcataggtgtgacgtaggaaaatgcctcgaaaattccacccacgcatttgcctgggaaaataactgatttttctgagctataaaaatgtactgtcttttccttctgagtgggttcatggaaatg

SEQ ID NO: 3687 - DNA, 600 bp, Bovine  MMBT18399
agacacatgacaaggttagcaacagaggagctgataatgctttacttttatataatgagggctgcatttaagatttgaaacacagcatgatgtgtgtactttgaaaagactggagtgcaaatatgaagtatggagctttgaaaagatagttaaggagaaatgtcagcatcatggtggcatgagtagttccctcttgctttcctctttgatttacaacaaattgaacatctaaaactaaaaaaaaaaaaaaaagttatctacacagcataccagaacacctgaaatcatccatctatgcartccaagtgagtagattggacccccaaggaggttgcagagcaagggaagtgttggcagagagggtaatggagcactgtcagccagtacatcagtgagccagcatgatctttccggcagaggaattggaggtgaaggtggttggtgtagttctgcctggccacttgggctgcagctggagggaccagtttctctctgaagagagaccttactgactagggggaaggaaaggaaaggaaaataggcagacaaaaaggactgaaggaaagtgtctcctggtgtctgacctaggaaggcaagcga

SEQ ID NO: 3688 - DNA, 600 bp, Bovine  MMBT01319
ggtgagcaaaactcagaggacctgtaggcaggcgggagggtccacatgaaggacccttagattggctgccacaggcacagggcccattactgttgcatttacctagagctgacctgcctggagtcagtcttcttttgtgaacgtatcagaycacgcatcctgatttccagaaaacttggcgaggcgaccactaggaagacttgcctgcaagggacccacgatcacacctgtgtgtcctggactcattgagtagccctggggtttcagctgagagggagggagcactggcccagggaagcrggctctgctacttggcagagggtgtaccttttaaagccggggtgtacaggatgcccagtgggttgatgaaggaaaccccgtcctccccgtccatctcggggtcattgtttgaggctgcattgccacctgtggcaaaccagagaagagtttaacgcagagaggtgggtgcctaagtctggatacacgtgcgcatcagcggggtgagcagcagggtcagggaggggccttgagggcggggcggtgggagggaagggagctcatggcacacaggatgcagttggggctcggttctgtagcttc

SEQ ID NO: 3689 - DNA, 600 bp, Bovine  MMBT08325
actcccatccatctcaagtcttcataccagactcatccgaacaaatctgccaaggagaggaaagaacccaaaagaaaccctcccccgactcccactccttcccacacatggctatttccacagtggtgatcaaacttaaaaaatcctttttttctccaggtttcaagaccatctccatggctcagtggtctttacctgctgtgttatttttcaggctgaagccacgtcacctataactatttctcactccaccaggaactgttccttattggrctttctaactatgatgagtgcttcttmttctgtctgatcactgaagcttttttcttctagtcaaatcagcatttgaatgagaatgaatgggaatttcaggagcagggacaaaggtggcttcacttccttctgagggtggagaaggggagtgtttggcggctgggttggtccttttaaaataggtttcattggtgaactgcctacggagcccctctgggctggcacgaagcagcacagaagtcagaggcaccaggcactccgcaccagggtgatctctgctgggttaatgcactcctttcccaacacagcatcctctactccttccga

SEQ ID NO: 3690 - DNA, 578 bp, Bovine  MMBT17601
ttgccatcttccctctccaaaaaaaccccttgttataataaagtcattagtcatttcaactaattttacaaagttcacagtcactgaattcttcaaaaagccttgatacttaaaatccacctttaagcatttattccaatgtattaaaaatattttatctttaaattactcaaagcctgttctgaaacttgcatayctttactcaaatatgccaatggagtattaaagtgagaagaaaaaattactcccagaactcagtaatattctgaggctcaccagtccatctctgcatatttgttrggaatatgctttaaaaacattttttaccttgtctcgtgatacagctgaaggcaattctcttgctagcctgtttctcctttgttcctatgaaacacaagcaagcaaaagattcatgattatcagaacataagagatgtaagctactaaaaaaaatgtgcagcttaactgaaaagtatggaataactaacagtgtatcctcccactgttgagactcatgccataattatattttaaaacaaacaagaaatcatttaacctaatgcttctcagtctttttt

SEQ ID NO: 3691 - DNA, 601 bp, Bovine  MMBT20347
  misc_feature (1)..(1): n is a, c, g, or t
naagaaagaaggtagatttcagaactggcccacaccctgtgtccaagcccctgccatgcgatrgtcacttctgatgtgttctgtgggccaaaagaatccacaggcccagacccaaggggagagcacataggttctaccccagggtgggaggagctacagagccccaattctgagtccggcctcargaagccttggatagacctccctgtcgtggggagccccatcacggtcatgagagcaygcccagtctacccgactgcaggaggagaccgcatggaacagacacaagctgttctggccraggccactctggtccagccagtccccaagtgacctgctaagtgaccacagatgggtgagtaagcacastcggggccagaagaatgcccggcccaaattgctggcccacaggatggtgagctaaatcaatggctattgtcttaagtgtgggggaggtttgttatgcagcggtgggaagactgacgcaggacccaaccttgctggccatgggaatcgagcaggcgggagaggaggcatcagagactccaggctgcggcaggcgccctggggttcttgtcactggcgggctgggactccaggc

SEQ ID NO: 3692 - DNA, 600 bp, Bovine  MMBT00576
ccagccctgttggggggtccttggctgtcaccctgttggccccctgctcagacctatgcccatccccaccatttccggtctttctggtcctcctggctctaagacacacagaccttgtgggggatagacgtgtgagagaccctgaagaccacagagaggggacttcccttttccaaatgggaaactgaggcttcacccaccactctcacacccaacagtgtgctgagtgcctgccacctgccagactctgttccgggcactgggatgagctgatgttccctttggggagacagcagtgcygggtgcagagaytggaagtgggcagcaggagagactgatgggagggggcagcaggggcccaggaagacctcgctgagcaggtgaccttgagctgagcggctgacaattgaaagaagtgagggctgagccatgctggctccggggagattagagtgtgtaggagcttggtagggtggggagaccccgcccacccaggaaggatgtccctccacctactctagggtttttgcaaaccttcaagtctctaggtcacaggtgggaccctcatcctgagggcaaggggaacagagaggagcaagg

SEQ ID NO: 3693 - DNA, 600 bp, Bovine  MMBT12558
ttcagaagaaaaagctgtgttttaagtaatatgtggatttctttccagcgcctagtggaactcaaaaagctttcagttagatatcaggttggctttctaaaaaggcatgtcactatttgagaaagagtcagaagatttctactgaaatctttgaatgaatgaaacaaaagcaccctggctgtctttctctagacggcagacacctctgggaggagtgagacattcaagtgtaataaatccatgggctttyccttaagggaactgagttgtcatttttctacaaagtggcaggtgagaacwgcagcataagaccactgggtgtctgtggcagataagtgaacggcgaagaaaagataagtaaagactgaaaataaatctgcactcacatggcaattttgccttgagccagctaggtagaccagtagccttttagagtcagaagattatgtagtaaaagtgacagcaaggttaaccaatcctcacctagaatactgaggcaagccttctccagggcaggtctgtctgagcattttctcttaataggaacgatatcattggtagttctatagtaactttatttgaaaacacatttgtctcttg

SEQ ID NO: 3694 - DNA, 600 bp, Bovine  MMBT13071
acctgcccatctgttcatctgtcgtctgtcttcttggtaagtcccctgctgtgttgccaaggcaacactacctgctacatcaccgcaaggaatggctatctctttgctggacttctgatatcaaatacaacacttgactttcaaaaccacggcttttcatccttagggtaaaggtttcttccgtgggaggtgaggcaacaggcattctcaggggttacctcaactattctcttagtcaagagctccttccacaatcaggaagccaagacccctaagcccacagcctcctgtctttcaccstaccagactccatctcccacaaaggcatctgaaagtgctggggataggaaatctctggcaagaagactgacagaaacagttttcaatattcagcatgactcagaatagaccctgactctttggaaaagatcctgatgctgggaaaattggaggcaggaagagaaggagacgacagaggatgagatggttggatggcatcacagactcgatagacatgagtttaagcaagctccaggagctggtgtggcagggggagggcctggcgtgctgcagtccacggggtcacaaagagtcggacac

SEQ ID NO: 3695 - DNA, 457 bp, Bovine  MMBT17285
ctgcctgaagagaattgtgaaatgctctgtgtctggatttgaaagaggtttgcatcctgaatgctcatctctctattcatctttcatgtaatctcctttttgcatatttaagctaagtgttttttcctacttttcttagaggtatattaatttaaaaggcctatagaactcagactatccaccctggcttggtacactttactcattcttaactagattttagtattataattaaagtaggaaatgtacatgcaaaatagcagaacaggtaaacagcaaaaataaatttcacttccattscacaacatcccacagggagttactatttaaacattctttagtatattttctggaattttctatgcagattattgtgccctgttaccatctttgacagattttttttttcctcctaataatatatcttagagttctatgtcagtatatcagtacataa

SEQ ID NO: 3696 - DNA, 601 bp, Bovine  MMBT20640
  misc_feature (1)..(1): n is a, c, g, or t
nattttggcttggctcaagtgtaaactccttcaggaagtcttggatgtcttcacctcccccttggcccttagctgctctgtctttgaaatcccattatacctcatgcatgtctccatcaacaamctttccacactgaattaaaattrttgttttatttctctatgtttccccrtcagactattgacaatagctggcatctatttgctgttcttcagcagcagtgcccatattttccttgagaagtcccctctcccttcctcctagtgtgtggttccagtgaacagactgatttccctcccrgcctttgatgcgctccaatccacttggagcttcacatgcatgcatgtgtgctatgtcactccagtcatgtccgactctttgcagccctatggaccatagataggcctgccaggctcctctgtctacgggattctccaggcaagaatactggagtgggttgccatgccctcctccaggggatcttcccaacccacggatctaatccacatctcttacatctcctgcactggcaggcaggttttttaccactagcatcacctggcaatcccctggatcttcatatacttagtgacaaaggga

SEQ ID NO: 3697 - DNA, 598 bp, Bovine  MMBT00520
  misc_feature (1)..(1): n is a, c, g, or t
naaacccccctactaaatacttaacctatggtgccaggcatggggaaaaggggatggtatgtgctgtgattagtactgtactgcctggaggaaaattaagagtgcgttcatccctgtggaatgctgagtggtggggccaagccctcttggagttgcctagattttccttgtccaaactttgatccactaagcaatttaccaggatccttgsaaggggtggaggtgggtgggaaacccattgaccatatcagtgattgtactgaccacaaccctgggtctgccaggagttgacgatcagakgtagggccctggattagcaaatggctttaaggctggctgtacaaggtctggatgtgggccagcctgtgagaccagaggggtcactcaagatgtgataaataaaagcgaagtccaaataccttttattccggttgcagaaacccaattcatggtaatttaagggagcactatcaaacagctatttgggacgytctgaaygaagatgacagatagtataaagatctgagttatcttggagatcacggtgggtggtctgcagaaagttggaaaacattggagattggcacctccctgcagt

SEQ ID NO: 3698 - DNA, 600 bp, Bovine  MMBT04301
gatgcgtcagtgaaaaatgaggtatagtgggtgccaactcaacagcgagtttcagaagaaaaagctgtgttttaagtaatatgtggatttctttccagcgcctagtggaactcaaaaagctttcagttagatatcaggttggctttctaaaaaggcatgtcactatttgagaaagagtcagaagatttctactgaaatctttgaatgaatgaaacaaaagcaccctggctgtctttctctagacggcagacacctctgggaggagtgagacattcaagtgtaataaatccatgggctttyccttaagggaactgagttgtcatttttctacaaagtggcaggtgagaacwgcagcataagaccactgggtgtctgtggcagataagtgaacggcgaagaaaagataagtaaagactgaaaataaatctgcactcacatggcaattttgccttgagccagctaggtagaccagtagccttttagagtcagaagattatgtagtaaaagtgacagcaaggttaaccaatcctcacctagaatactgaggcaagccttctccagggcaggtctgtctgagcattttctcttaataggaacgat

SEQ ID NO: 3699 - DNA, 600 bp, Bovine  MMBT04586
tgtgatcccgatcttttaccttgaaagtcgcaagatggatttaagactgaaaatacatggtcagaaattaataagaccagcctgctgagaatgggggcctgcattcatyatctcttcattcattcagcaaacagaagttttttcctgcctgtcctctccatacccccagccctytaccagattcactagcaaatactattcattttcctgagaattttcagaaattscctaatcaaatgcaaatacgttgccaggacattaccttaaactctgtcagatgcaaatctgaagtggggagakgaggcttacatggaaccccaggacaaggaggactcctagggtggcctgggttaggctgtgtgacatcctgtttctatttcgatgtcccctcttcactcacatccctgrgaacatgagtgtctctctcagtaaatgcctgatctgtgcttctgaagaaatgaagggcttacaaggaacaaaatgtcctgagtcacttaagtaaacaaatccrgtaagtcccctataaaatcctttgtcattttaaacactctagactgctttcaactgtggaggagtatttatgaacacggcatgttgaag

SEQ ID NO: 3700 - DNA, 600 bp, Bovine  MMBT06695
aggtggccaaagtattggagcttcagcttcaggatcagtccttgcaatcaatattcaggactgatttcctttaggatggactggttggatctccttgcagtccaagggactctcaagaatcttctccagcatgacaatttgaaagcatttattcttyagcactcaggcttatttatggtccattttagacaagttatttaatcttatgtatcttaactttcatcatccataaatgggtctaatgttaggagttactttgtakagctatcatgcctgacacataacaaattctcagtaaamtagtaactcattggcttgaattcaagctcgtcatcttccagatggggaagctgatccagaggatgaactgagttggcagagcaaggactgtgtgtgtgtgtgtgtgtgtgtgtatgttatttgctcagtcatgtccaactctttgtgaccccatagactgtagcctaccaggctcctctgtccatggaattatccaggcaagaatactggagtgaattgccrytcctttctccaggggatcttcccaacccaggaaatgcacctgggtctcctgcattgcagacagattctttactgtct

SEQ ID NO: 3701 - DNA, 598 bp, Bovine  MMBT10514
  misc_feature (1)..(93): n is a, c, g, or t
nnnnnnnnnnnnnnnnnnnnnnnnnnnnnnnnnnnnnnnnnnnnnnnnnnnnnnnnnnnnnnnnnnnnnnnnnnnnnnnnnnnnnnnnnnnnnatctgaatgaagtggggagagtttggggcagtggtgtgacgtgatgtgactcagcctctagtaggatcactctgactcttttgggggattgagttgcttactcactggtgcccaggacaaggggaaaccagggagaccagtaaatgagaacatcttggaccaggtgatcacagaggaggtggtgagctgaaggatttctcccaatgmcttggaagagagatgggagatgagataatgtgaaggttggttgtagagctagagagaatctgggtgaataaaaacaagatggatcaaggaatgttgagaggagatacagrcttacaagagggatgctgtgtattcacacacagcagagagaaaaagctggagtcctagggaaaggatttcagctgtccatctaccataaaattacagaattaatccagttgctgagttcattataactgatggtacaaagcagcataagtaatttgagaggatagaattgctttgctggctttatttt

SEQ ID NO: 3702 - DNA, 600 bp, Bovine  MMBT15248
gtctgattctttgccacctcatgaactatagccagtcaggctcctctgtccatgggatttcctgggcaagaatactggagcaggttataatttccttctccaggggatctttctgacccagggatcaaacccaagtctcctgagttacaggcaggttctttaactctgagccaccagggaagggccatgttacaagtttccarcactaaccctaagtctcagttccagctccyacttgccttttcgagtatgtgacccaayaaatctcctcagcagtttaggtcattttgagctggggtstctattactggaaacttgaagactcctaacagatgtaagatccgtggctgtatcaaatgtatccctcagtgatccctgaaggaagacagagaggaattaggaagtcatcagcagcaccagagggagagagatgctagcacaccttcctgaaataccacagtttgtgtgcaaaaagtaaaaaataaaaccctttcttaaggaatatcatggcttgcccacattttccaaaccagaaatccataaacataatctagcaaaaaaaatttttttctgatatgccaattcattacagaaaatctc

SEQ ID NO: 3703 - DNA, 600 bp, Bovine  MMBT15512
gcgagtgatggaaccaaatagagtactttctggatcttcaactctaccatgctgaatgggttcaggagcgccacagtccacggctacatgaggaagacaggagagagatggtcaggatagacacttcttcccaggaagagtccctgggccagtccatcctcccagctctgatcctcactccttccctgcctcccccatccataagcacatctggggtgaatcccccacatcagcttctgtggccatgatcatctccccagcctactgagtcctgccacttcaaatggcccttagaacackgcaagaactaacctgcttcccagtgrttggtgaggcctctgtagaaatggacccatagaatgctattaactctactaatctcatagcccctttctttctaagaaagctgctagtctggcaggcctggggtcagatcaggactaggattctacgactgatttcccttcaaaacccaatccactatctcacaagcctaagaagaaaccatgcatttgtatctcagtgccttaatctttccatttcctttgggagaggggaaattattcccttctttattcttaagggaaagaaggtttattc

SEQ ID NO: 3704 - DNA, 600 bp, Bovine  MMBT20088
gacccccggaatggggctggaggctaggaatcctttagcccaccycscctccccactccttggaggcctgggagaaggactttgctgcagtgaggcccccaagtcttccctggccctggataagcactgcttctcaaaatgcggtccaaggagccatgccagctcataagctgcttgctactagtccatgaggagataaggcagaaactgagagtaagactttagaaacttagatggtaatttcgcatggctctgattatttagttaatttatttatttgattttgggctgtgctgggtmtttgttgttgtgtgtggtctttctctagctgcaatgagggggactgctctgtagttttggggcacaggcttctcactgcagtggcttctcttgttgcagaccacaagctctaggatacgtgggctcagtagctgtggcacacaggcttagttgtgggatcttcccagaccagggatggaatccttctccactgcattggcaggtggattctttaccgctgaaccacccgggaggtccctggttattttttaagcaactcatttttgttatggttgacaaaagcatcaatctgagatggac

SEQ ID NO: 3705 - DNA, 555 bp, Bovine  MMBT20242
ggcagttccccagggttctaaggacatagggaytggaggaagaagtaaattgttgaatcactaggtagggtttctgtttctgcttttacagctttgtaaacgatatccaggctttatgcgtgtggcgttatcggagccccagccggagaggaggtgaggaaggtgggaggtgtgaccctggacaccttggggaaaagctttagggaagatgagtggccagcatcacctccatcccaggattatgtgggcattttcttgttcaggtttttccgccgtggttgggtgacctttgaccgcagygtgaacattaaggagatctgttggaacctgcagaatatccgagtgagtgctgggagtggggctgttgaggaagagaaagtagggccttgcatgctccgcacagtcttgttcctttgttcattgacggctccatccatccagtctttatttcatccattttgcctgctcacgtggactgcatgcagttgtctctgggtgtggccctaagactgttggagtgagcaagacatcctggtccctgtacacgggctcggt

SEQ ID NO: 3706 - DNA, 600 bp, Bovine  MMBT20522
gctgccatttccttctccgggggatcttcccaacccagggattgaacctgggtctcctgcattgcagacagacgctttaccgtctgagccactaaacaacaatataaatgctttcaaggttcttgggcttgagttaaatgatggaggtagaactgttttatcatccagaaagagttaaagagatgttacttgctgccatgattataacaacaactttgattttcccacttttactgcagttttgttgttgctcagtcgctaagcactgtctttttgtgacccatggactgcagcatgccmcaacttcgttacggtgaaggggcttgtgtaagccaatgaagctgtgagccatgctgttcggggccacccaagatggatggctggttcatagtgaagagttctgacaaaacacggtccactggaggaggaaatggcaacccactccaatattcctgcccggaaaatgccatggacagtattgcagctttactcacacataactgcgtgttctttgacttttggtactttttatacccccaaagctcaagaaatgtcttgattcccctgaattacaagatgatttatctgacctccatattg

SEQ ID NO: 3707 - DNA, 598 bp, Bovine  MMBT21348
  misc_feature (1)..(112): n is a, c, g, or t
nnnnnnnnnnnnnnnnnnnnnnnnnnnnnnnnnnnnnnnnnnnnnnnnnnnnnnnnnnnnnnnnnnnnnnnnnnnnnnnnnnnnnnnnnnnnnnnnnnnnnnnnnnnnnnnntgggactgcttgcccgtcgtcccaagggcagttgactccggggcaccaccaggaaggagccccttccagtggcttgttctacaagggagtccacggaaatgtctgcacctctctcacacaacaacaacaaagcctatccagtaaattagtctctagcactcgggacacaggcaaagcattttgtgaaygataycactatgtaaatgtgattggtgtttgttacgtcaggagatgaaggatgacctggattattataccaayacttaccacatcttcaccaaagctcctgacaagttagaggaagtcctagcgtgcccgcaggtcatcaactgggaacaagccttccagattcaaggtgaccggtctaaattaaagccaaagatgtcccgtttaatttacagtagatatgaaagggggggaggaatgatgcttgcttttctcctctctacaggatgtcaagagagcttgggcgaggcaatacaaaaa

SEQ ID NO: 3708 - DNA, 600 bp, Bovine  MMBT21560
ttaatccatgatgggaaagaactgacctaaaaatgagactcagattctctctctgctgtttttcagagaagaatctcaattattactctgcatacacaattctatcacagattttattgttactatcattttcagcatccaaatcttaagtcttcttagattcagtgattgctactgtaaaaaaggtaaacaccagacagactatacacattacctttatcatgcatatttaaagcttttaagaggtcttcccggattggatacttggctttataacacagcctttgaatgttggaagcygtgtcatcacctgaaagtgtagtaagatctatacaggtaacagccttcaggagccatgcagcctggtttgaagaaaagtaaaaacaaggcttaaaaaaaaataattaatctccaatacagttagttagtagaaaaccattaggtacataagggtgctaaaatctcatgtctagggacttccctggtagtctggtggttaaaacttcaccttctaagggaagaaggggttctagttcaatccctggttggagagctaagatcccatatgccttggggtcaaaaaaccaaaacattaaaaaa

SEQ ID NO: 3709 - DNA, 601 bp, Bovine  MMBT03892
  misc_feature (1)..(1): n is a, c, g, or t
natacagattttcaaaactattgatccactgttgctttcatgttaaagagagaattgaaacctcagggctaaaacaaaatgactccagggctgaggaggccagctggccgattggggtggttgatttcagatgggtttcagagcgttgcctctgtggatgatcagttgcatgcttgcacctgggcatccctgccttggggctgaaggatgtgtgggtcctcaggtcagcctggctggagggtgacttagttatccttgcagaagtgctcccagcatccccacaggtctgtgcctttgcccrctggtcagactgaaggcatcctcttgtccctccaaagccagatgagagaggagaactcagggtgatccatatgtgaatctcatagctatgttgtgacttaaacaagtcacaacgtgtatgattaattttacttgtatgtaaaattattttactcctctgatgcaatgacttgctctgagcaccaacgaggggatcccagctttgacagcagaggctatgtggtttcacgaacctccactcccatcagtagagatcaaaatatttgtgtgaattttctgcacttgtccagtgtatgtgtta

SEQ ID NO: 3710 - DNA, 475 bp, Bovine  MMBT03909
ttcttacaacagttgcatagccatttagagacatgcacggagctgcaaaaaactggagtttgctgatgcgagcattcaacctgtggttgattaggtggttcttgtcttcttgttttctgctctcataaacaaatgtcctcttkgcactctacttaatgccacattttttgcatttcggtgctttttgttggtgataatattgtttaaaatggcccccaaacatagtgctgaagttttgtctataatgttctgaaatgcaaaaargctgtgatgtgcattatggagaaaatatacatagtrtttttgctcaggcatgaattacagtgcttttggcagtgaacttagtgttaatgaattatcaatatatatcaaataatgtgtctttaaatagaaacacacagaaaacaaggttagatattgatcagttgttgaaaatgttgtgatcagaggcttataggaacttaaccctttgttt

SEQ ID NO: 3711 - DNA, 600 bp, Bovine  MMBT06656
gttccaatgcagaaaatgcttcatcaattatatgcgatttttaagaaaatgaatactaaatgatacacattaagcatggtgcacagccctccaagatattttgcatactctttctgccagaataatcaactctgatgagaactggctcttcctgttgtcattttcattctgaatagtttcttatgggaagcattctagtgcaacaacagtttataaaaagtgcttcataagctctaaaatagaatcgctgtctcaattaatgtgatatctctgccagttccaaaagattcacctgaatcrttatgttcacacaggaattgctgaggctaaatggatctgctgtattttctgtattttccaggactatataactatactcttctctctgtcccattttcagatagaatgccactgtaacaacaataatgtccttaaaattgtcaagataaaagagaagaatgaaagaattttggaaatgtgtttccccacattgaatatccaattcattaatttgggtaaactttctttttcccaataagcaacatgactcagcttaggtaggagtcgaatacacttgggtctggattctgattagttccc

SEQ ID NO: 3712 - DNA, 600 bp, Bovine  MMBT06658
aggcaaaaatgctgggagtaggttgtcattccattctccaggccatcttcccaacccagggatcgaactcaagtctcccatactgcagacagattctttaccatctgggccaccagtgaagccttaattccctgacctgggatcaaactcatgcccccagcattggaaacatggagtcttaaccactggacctccagggaaatcactgtgacatcgactgtactgaagatgaccttgaagagaatactgactttcattcactcagcatcacatatcaagcctttccatgaattcagaatrgcaggacctactgagttwgacagggcagtccctggtcttaaagaacttcccccagcagttgaaagagcttattgcagtttaacatccacacagaaaaagaagtttttgcagagtgcagtagcagcttgggacatctgagcacacagtcctgagtattcaggaaaggtttcaccaagctggtatcatgtttggtgtatggaggatatggaagaattccccaggcagggaacagagaaaagagaggaaaggagtaatcttggtgcaaagataaatatgtataagagagcccatgtacctaaa

SEQ ID NO: 3713 - DNA, 600 bp, Bovine  MMBT06674
aaaactaccaggaaacacatattgcaaagaaaattaaacaatactaaaggtgttgtagactcagattgcttcaaattatttagctaaatactcacatccatgttttctgtttgtttacttagagtttcttcttcacggattgttacagctccctaatatagtagtcttccattaaagcatatcctcagatctcacctactccaggaagcatttttgaaattgatattgctttcttgtaattctccccctcacctctactggctggtttttaacctgcccctccttcattcccaccttaawatgtgggctcaccagagttctgcctttgatcaggtcttcttgttttacatgttctccctggtcatgtaataacctttcacgccaactaacctctggtccgaagcggtcatcctgcatgctgccggatggcttgtggaccctctcagcgagcatgtctaatatcacacacctgacgcactccctccccaacctgttccaagttccgcatcctctcctctaccttgctaatgatgttactgtcaagtgagtcattcttctccctccctttcctttcactgagactccaaatcttaattaaat

SEQ ID NO: 3714 - DNA, 600 bp, Bovine  MMBT06682
actgacattgctgttgttgctgcttagtctctaagtcatgtctgattctttgccacctcatgaactatagccagtcaggctcctctgtccatgggatttcctgggcaagaatactggagcaggttataatttccttctccaggggatctttctgacccagggatcaaacccaagtctcctgagttacaggcaggttctttaactctgagccaccagggaagggccatgttacaagtttccarcactaaccctaagtctcagttccagctccyacttgccttttcgagtatgtgacccaayaaatctcctcagcagtttaggtcattttgagctggggtstctattactggaaacttgaagactcctaacagatgtaagatccgtggctgtatcaaatgtatccctcagtgatccctgaaggaagacagagaggaattaggaagtcatcagcagcaccagagggagagagatgctagcacaccttcctgaaataccacagtttgtgtgcaaaaagtaaaaaataaaaccctttcttaaggaatatcatggcttgcccacattttccaaaccagaaatccataaacataatctagcaaaaaa

SEQ ID NO: 3715 - DNA, 600 bp, Bovine  MMBT06692
catataaagtgcctctaaatatatgaaaatcacaggatatgctggacattttgccattctgtatacacattatgaagtaacctaatgctattgcaatctgaaamgacataatctattcctcataattgaagataacagttttagacatgtttttaaagycttgaatagtacaatatataaaattggactgattccaaaacagtggtgacagcaaaaaatcatgtgagtgaatgaataaggacaactcttcaacaccactatgtacctctgtgtgacggtgggcattcaactgacctgcakcttttatatgagctcgggcatgttcagggtggtgtgaccctagattggccttgatgtgaccatagactggccttgagtttttagaatgggtttacctaaatgctcacatactgttctgaaaccagtgtacctttaaacgttacaaaagcctgctaacagttcttccaggttctcccaacttttgcagtttaagtgtggacctctgcctctctccacctaaaacagaaggtcacgcctagaaatgttggttcttaatatggggctgaatcataaatacttgttaactagtaattcatagtc

SEQ ID NO: 3716 - DNA, 600 bp, Bovine  MMBT07066
cagagactcaagtgaaaacaaatcaataatttctattactgtctgacaagaaattctccccagctcagagcatgcaggattcagagaagagggcctgctgatcccaaaactgtcactgttcctgagactggccagggggccacggatgggcaaagcctcagctgaggccagtggacctgcaatgcagatcagcaactgcactggggctcctcttccctgtatcatagaaaagtgcaaagccccaggcagaattagrtcaaaattagatgtgccctttctaacttcctgggcacaaatgcmttttctgcattatgttacagcacagagatatgggaagagagccggggataatcccccacaagaagcccaagtcctttcttgtttcccaatcagcccctacctgctgtgacggacaccactgtgaggggaaggctctcggagatgtgaaatccatagtcctggaggagggtgtctttgtctatttttactgtgtatttcacagggatgatggtctgggttgggaccccggggggcccatcagctgtggcaactttagccctggaagagaagcagtatgtaaaagagacagcaaggggagtc

SEQ ID NO: 3717 - DNA, 600 bp, Bovine  MMBT08717
tttggtgagtggagactataaatatacttgaaaataaaygattggttcaggcatagattacacagatcaccaaatctgggtacaaagtatttatgagtcatataggaaaattcaccacatcttaaataaccccttcagaggaatcttttggttttgagctcgctggctaggcttgaggatgggcaggagtggccccttagggtatgcaagatacaggcagagttctagaaaagatgtgctcccaccatgtatcggagactggggcaaagatttcctcatcattacaggccttcagctctyctcacagacttcctgcagagaccacaaacatacttctgacaaattctcgacagtttatttgtcagatattttattcaaattgcttccttctccttgcagagtacgcaaaagaacagcaatatcacgcccccctgtaccttctaactgctatttcaagggataatgagcaaatttagatcttcattacaatgttagtttgtacagcagcccctagttattttctctaccttgctattgtaatcaccagaacaagaagactgactctggataaaagtagttatttggggccagcgttgcaaa

SEQ ID NO: 3718 - DNA, 600 bp, Bovine  MMBT09635
ggctttgaggatgcagaattgacctcagttgctgctgttgatgggctcgcccagcctgtaatttttttaattaaagtttcttagtttttttgtgatygttcttgtgtttttttagtatttatttattccttccttttggttgcaccaggtcttagttgcaccttgagggaagtcttggttgcagcatgcaggatccggttccctgactggggactgaaccccagcctcctgcgtagggagcgcggaggtgcggaccaccagggaggtacctctgttttgtttttaactggcaggtggtgyggtgtgaaccaagccttggcttgtgtccaggggagcccscaggtcccctcatgacccagctccagctcttagtgcagtgcctagacctcacctcgtgtccctgtcctacctgaatgggacctgtgacaggcagagtcccctgraagcctccagcttcctcgcctggaggggtttctgggtgggacatggttctactctggactcccagagcttctcacttgctcacttgggacactcattcccacagtgcctgtgaaataactgtcctagggccagacttgtagagtttctccatattat

SEQ ID NO: 3719 - DNA, 600 bp, Bovine  MMBT12715
catttcttacaactaattgaattaagaaaaagctacatatgagagcagaggcttttgagaaatcagatactttattgacagccaccagaagtacttacttgtttaactttgctggttgaaaaaatgatacattccacagaaacctgagktgttgtagaagaaaacctttctctggcagagcctgcagaatgtgataaaatgctttgacrgtatgttsgagttacatgaccttcaatgaaaatagccaagtaataaattagtcttcccagctgctagtgaataatcataacagccaatagyatgtgaaaactaacaccatgacagatagtaatcatgtaatgtaacatattgatcccaagyrctgaaggatatgagtgcagaggcctgaaaggagctcagttaagaaaacatgtatttcatcaaaaatttcttgtgaaattagcactgtgttatgcaaagacattgtggaaaccgttttaagtcatgctctaatctgggaggatacaagggcattgtctggtgccgtggttttactgttactgtctttgagtagattttgaacaactatactttgctcaacatcatttatcccaaaaggag

SEQ ID NO: 3720 - DNA, 598 bp, Bovine  MMBT13078
  misc_feature (1)..(65): n is a, c, g, or t
nnnnnnnnnnnnnnnnnnnnnnnnnnnnnnnnnnnnnnnnnnnnnnnnnnnnnnnnnnnnnnnnnattcaaaactaccactaggaagttatataatatagatcctttcttctactaattcatagaagatttaatttggagatagttttggtaaattaaaaaaaacactgccactaaagtaatgtttatgcccagagctttctaaagagtcaatcctgtctgtgctgaattagcaacctataaaaacaatagtgagttgctggaggaactccaaatttttggaataatttatttccgaggytactcaggatttgggggattaccaaggagaatttatcaatatgtcaagcctcgatagattcttcctttttctgttaatgtactgtaagtatgctgggctcatcctgcctgtggggcatgctttgttcagactgttgttggaatcgccagcatcgctatccctctgggcctgacgtaatgcctactcaggcttgcgacccataggaccagtccagccctgccctgacttgcattttcctgtaacaccactgattttaagatcaataaactctctactctgacaagtaaaaggagcacac

SEQ ID NO: 3721 - DNA, 600 bp, Bovine  MMBT13130
acagttttacaaatggaaatgccagaagtggaagatatggtgtgtcactaaaaatggcagaccagtgagctaatgcagagagggttctgtgaataaaataaggaaataaagaccagaaaagcttgataaatttgactaaataatatattcagattataaaaaaygatacagaagataaatttggtgaaacttggatttgcttgttttcccacaatgagacagaggatataaacctttggcaagaataccacaaaagtgctgtgcagtgatacagagggaagcttttattactggtaattktaaatttgattacttgctgaagaaggtgtctgctaagtttctctactataaatcactgttttccccatttgtaagtaataagtaccytgggggagatacacaccgctgcaaatactgaacatacctctgtaatactctgagtagcttcctgcttttgatggggtatttcttctgaaggttgagaaatgccacatgaatgcctttatctataaggttactaaatgctgtttgattttcaggcagctgtagcagtgagcgccaaatgaacattctgaaattaaaacatagttttaaccaaga

SEQ ID NO: 3722 - DNA, 600 bp, Bovine  MMBT13211
ctcctagaggcagttcttgttacctttttcttgtagactcttccagaatcctaaggcatatacaagcataccctatataaaccttttattttgcttcttatatggtctttttttgggttcacccaaaaaggttaaattttaaaaagataatgcatttgacgacatgaataatttttacacaacttgatgaaatggttattttactagattcaaccagacatttaaaaagtagtagcatgttattaaatgactccccaaactaaaaatgatttaagaaacaatgtatgtatccaatattcrtaccagataaattccartgggagacttyctcttgttccttttactgttcatgggattgtgtctctcatcaagggaagtttccctcttattccagtttattatgatctttaaacattctcactgattcycatttatctcagccattccttaaaattattcctaaaaataatttttcaaagttttctagatagagatggcaaaagccatgatttttaaaattagccaacagaaatcaaagtccttactgctggccacagatggccgaacactggcaagaatgagagaagtagtgttacactg

SEQ ID NO: 3723 - DNA, 600 bp, Bovine  MMBT17517
agaagtgttttccaagactgaatgtacctcttgatcagggtaagtgatgaaacttgtacttaacagaggaaggggatggtggaatagcttgtattatgcatgctgtggctcatctcccccactgtgctaatggcttggcctctgaagttttgataatcaggaaaaggatcagggatgccagtttctaaaagtgtaaaggaggactagtcaacccaaatgcagatttgctactgttctcaccttcaaagagccttctaggtaaactggactggggagttcctaactcctccctggtaccayccacaggacttccttaatggagggggcaacatggttggctgtagcagcctgaatggacagaaagttccctgcatcttcacttcacactggctggcttcagacagatcccttgagttttggatgaagctgaaccagctggaactttccggtagagagatttggagagggaggtctcttctcataggcagatagccttgtggcgaggtagggagagggagggagtggtggtgtgctatattggctcaagggactcttaggagaaataaatcaatttcattgttcaggttactgctgaaaaag

SEQ ID NO: 3724 - DNA, 598 bp, Bovine  MMBT17767
  misc_feature (1)..(119): n is a, c, g, or t
nnnnnnnnnnnnnnnnnnnnnnnnnnnnnnnnnnnnnnnnnnnnnnnnnnnnnnnnnnnnnnnnnnnnnnnnnnnnnnnnnnnnnnnnnnnnnnnnnnnnnnnnnnnnnnnnnnnnnnnaaaattcccacaaacagtgaagctggcagataatatttaaatgcagaaagcaagaagaaaatagcagagtggacatgactcttcctctctgctattttcttcttgctttctgtatttgcattttaaatattatcagccagcttcattctctttgcgggaattttttttaagacacaggtgrtgcagtkgtaaagaatcagccwttttacaaaggaaagcaaaataatccaggcatatttcaaaagaaacagatcaraagtgtttcagttayacaaaagaaaattttaaacatgaattcacagaaccattattgaaacactccgtaaaaacttatttccctatgtacttttagtatatatggtgctgtgctgtgctgtgcttatttactccgtcgtgtccaactctttgcaaccccatggactgtaaccctccaggcgccttgctccatgaggattctccaggtgagagtactggagttc

SEQ ID NO: 3725 - DNA, 600 bp, Bovine  MMBT17888
cgtggaaggtctccccattgctggcgtgcatgcggtggacaaccactttctggtagtggtacttagagtggaacagtggtgccttcagaggccccatgggctccaccctctgcaccacctcagggtgactgtcggccacctggaaggtctctgtgggtatcggctgccggtctgggaggcactgggcgaggagaacaggtccagatcagtggggtggctgggagatggggtcgcggcctgggccatggcgggtgtcactgctcaccttgccaggccgtgggttggggaggctcgagtggwagcccttgagtgaggaagtgcagaagaccttgtcaatgtcaccgagggagtacacgcagacagccgagtagttcctggggggacatagagaccacctcagtgggaggcccaggaccgcccacctccactcactcaggccagccccgcaccagatggagtataactatagccttgcgaccaagccacctkgycttcgagctctgtgacagcagggactttcctggaggccaaygccagtgcctgagtgttagcaaataccactgaaggaaggagagaggcaggacagaaagagggagggac

SEQ ID NO: 3726 - DNA, 554 bp, Bovine  MMBT18230
cgtggaaggtctccccattgctggcgtgcatgcggtggacaaccactttctggtagtggtacttagagtggaacagtggtgccttcagaggccccatgggctccaccctctgcaccacctcagggtgactgtcggccacctggaaggtctctgtgggtatcggctgccggtctgggaggcactgggcgaggagaacaggtccagatcagtggggtggctgggagatggggtcgcggcctgggccatggcgggtgtcactgctcaccttgccaggccgtgggttggggaggctcgagtggrcttacaagagggatgctgtgtattcacacacagcagagagaaaaagctggagtcctagggaaaggatttcagctgtccatctaccataaaattacagaattaatccagttgctgagttcattataactgatggtacaaagcagcataagtaatttgagaggatagaattgctttgctggctttattttcaaattatggaaagaaaagcagcacatcagcttagtgaacaagcacacagaggtgcttctgaacca

SEQ ID NO: 3727 - DNA, 600 bp, Bovine  MMBT18323
gaatgttcaagcgcaagcccacacccgccacagcccaggaaggcgacgagaaccgcgggcgcctgggcggagaaggggaagagactcccaaaggcaaacgacccaattcgaaagcacatcccaccgggagagggaacaagtgcagtgacgacggcaccaccgatacctcagcactatcccggactcgccgccaggcagttctcctgcctctctgccgccgagactggtccctgcagttccacacaccacacaccccagaccaagagggctctgccgcccgcccgcccgtctgaccttgtrtttcccgtcctctggagctgccgaggctcttggatgaagtttccccagcgtctttgttttgctttctgtattggaagttgtgctgaaggagttaggtgttctgcctctagkaaaaatcccagtttattgaaaaaaaatctgaaatctcccagggcacttaaggcagggcaatcgggcgatcacctttcaggctacccggagggagcggcgcgcagcgccctgcgctccttctcgagccccagagctcagccgcggcttcctgtgcctgcgaacaatgctgctgcgtcacccacatgcagc

SEQ ID NO: 3728 - DNA, 600 bp, Bovine  MMBT18733
agaggaacctgatgggttacagtccatgaggtggcaaagaattggacacgactgagtgagtcatgcatgcaaagagatgctgggcatatttacagagtcagaaggaaaagaaagtcagcagcattggcttgtctttaagcttcttaaggagaaaacaatttgggggtcttttgtggagctcggaaaatcatacttctggaaggtacaaacacttgagaataagaggtgtgacaatctcataggctttttaactattcaggaaagtgcacgatatttcaaaggtgatcttcagcataaaakatttctttttgtctcctgttctcagataagtttgaaaaccagtttttggtagggggccagggaagaatttgataagcaaaaggcatcccctttgaactggagggggtgatgttcagtcactaagttgtgtctgattctttgcaaccccatggactgcagcacaccaggctcccctgtccttcactatctcctggagtttgctcaaattcctgtctgtccattgagtcagggatgctatctaaccatctcattctctacccccttctttttttaccttcagtttttcccagcatcaggtct

SEQ ID NO: 3729 - DNA, 600 bp, Bovine  MMBT18790
tggtgacaaggaggaagggtcagcctcaggcggaggccaccctgcaccccaccctgggctctgcgcttcatctccagctgccggtccctgttcctacatcccactgccactggaagcactgcctgtgcaggcaagcccctgatgcatctggtgagcaaaactcagaggacctgtaggcaggcgggagggtccacatgaaggacccttagattggctgccacaggcacagggcccattactgttgcatttacctagagctgacctgcctggagtcagtcttcttttgtgaacgtatcagaycacgcatcctgatttccagaaaacttggcgaggcgaccactaggaagacttgcctgcaagggacccacgatcacacctgtgtgtcctggactcattgagtagccctggggtttcagctgagagggagggagcactggcccagggaagcrggctctgctacttggcagagggtgtaccttttaaagccggggtgtacaggatgcccagtgggttgatgaaggaaaccccgtcctccccgtccatctcggggtcattgtttgaggctgcattgccacctgtggcaaaccagagaagagttta

SEQ ID NO: 3730 - DNA, 600 bp, Bovine  MMBT19397
aagtggttctccatgagccagatctgggccactgctggcyaacctttgaaggagaccaccagaacaatatcatacaacatgyractgctccccacaccagaatgatggagatgatrgtcccrttcttttccactttttccacctttggcttcyctctctgggrtttcttctgtatctctgagaggacaatactgatggagtcatagaaccagtccgccactttggttggagagaaaaagtagttggtggaaccgttgatgtgatctacgatggtgcagcggtctttccatttactgatcrtcccctcgtcgaagagctgaaggctcagccaagacataaggctgagtggcgcatatccagtgtcacaggctgattayggtcatgcagcttaagtgctgrcaccaggagagtgaagtccatatcatagtcggtcccttgggcatagacattaagctcatctaagtacaggtctaccacgccttctcggactcctccagaaagcagcaggtactcattggccactggcagtttggggtccagcttttgcaccattcccggcacggaaaagatgaaatccttagctgtgtgaatctccagtgc

SEQ ID NO: 3731 - DNA, 600 bp, Bovine  MMBT19612
taaagccaggctagggaacagtccagaagccagcaagccagtgctcaccctttggggtaagacacactggatgtaatgaaggagggcctcctgatgtacaaacggccaactcctccccgcctgcagtgatcgaacrcgccagtttctggctttagaggaaaatcatatcacaaacacccacaagagatctcagcttggggttcctcttggcctctggcatccatctcctgggtcccagacaggaggccttctccagcaccaaacaaggggcctctgtactatttttaaaagctctccagkaaatacccttgtgcctacacttcctcaccacccactcaccttcaccagcttctgatctgccttccgccccacctctctctccacccgctggagcctcaggaaggacccgggaccacctcctcagcagccccagcccagtcctcatccttgaccagttcagtatttgtcaggaaatctcctggcttctgggacaggaaactcaggatttcctatcctttttttttttttttttaaatttggccgcaaggggtgttagttgcggcgtgagagatcttttttagctgtggcatgtgagctcta

SEQ ID NO: 3732 - DNA, 600 bp, Bovine  MMBT19613
tcctccaggaaacaggtttccctctgacctcccgaggattgatgaagggactcggaggcatgctgacctaaacggagtgccaggaagcggtcctccggataaggctgcaggaggggcagtcagggaccaggaggagagagggcgggagggggtggcaggagccccccgacacagtggaagctgcccaggaatcaaagccctgactccactctcctcctactgtgcccacactggacaaacccagagggagggcaagggcaggccgcctggagggtgcagagtgatccggagggcaaaagragagaagccacaattcgtatcatcatatatgctgtaagtacactttcaaaataagaatgcctagtattcctctataggaaagtatcataaattatttatcacagtccctgtggattctttctgaattttttttttttactattacaactagaaccacagtaaccattcttatacatacatttctggctgcatctctgagtattttctcaggataaactcccaggggtggaattactgagtcaggggaatctatatgtttaaggctttttatatatattgccaaatagccctcccaaaggc

SEQ ID NO: 3733 - DNA, 601 bp, Bovine  MMBT20519
  misc_feature (1)..(1): n is a, c, g, or t
ncattttttctaccatctgaagatttttttttgcaaattgaatgtttgtggcaatcctgccttgagcaactcttaayggcacccttctttcgacagcatttgctcacttcgtgtctcagcatcacattgtttctcatgatacttcacacttccattattatatttgttctggtgagctgtcatcagtgatctttgttactacagatcagtcaaggcttaaatgatggttggcatttttagcaaaaaaaaacatttttcattaaggcaacttgttttttaaacctaaagctcttgcacgctyaatagaygacagtatagtgtaaacataccttttatatgcaccaggaaaccaaaacatttgtatgactcaatatgttgtagtgtcagctttactgcgaggggggtctggcactgaacctgtgtatctccagggtctgcctgcgctgccctggtggtgctgatttccttattcaattcaggtgaagaaagaagttggtgatgcttccatcctgatcaacaatgccggaatcgtaacaggcagaaagttcatggactgcccggatgagcttatagaaaagtctcttgacgtgaatttcaaatc

SEQ ID NO: 3734 - DNA, 598 bp, Bovine  MMBT20524
  misc_feature (1)..(50): n is a, c, g, or t
nnnnnnnnnnnnnnnnnnnnnnnnnnnnnnnnnnnnnnnnnnnnnnnnnnactgaattgctccttttatcacttacaattgaccattaaaatgaaatttatctcagagagacactggaaaaaagaaaccacagaagaaacctattgtctatctcaaaaaatatctcagcagcccatttccagtcattgcaggaagaaccactcaatattcaacttctcatttctcaatgccagcttttttcaaatgttatgataaacactctaaagtgacctatttcccctgatacctgagaaaagtgaygtgtcattccaaaatctatttctccyacgtgcacgggaagcgatgatacttctacagtcaccctgctctgacaggtgggaaartctcttctaagtaaaaatctcaagaaaagagttactctgaaaaagatcacatcttctcttcaagttcggcaatytggaacagtgttcgtcttcgcctctttaacctgaaccagaatgttagactgggagcacccaggacagaccctcgaggggaactaggcagtgaagtgatggaaggattatagggattgtcaaagaacaggattatctcagag

SEQ ID NO: 3735 - DNA, 600 bp, Bovine  MMBT20526
cattaaaatgaaatttatctcagagagacactggaaaaaagaaaccacagaagaaacctattgtctatctcaaaaaatatctcagcagcccatttccagtcattgcaggaagaaccactcaatattcaacttctcatttctcaatgccagcttttttcaaatgttatgataaacactctaaagtgacctatttcccctgatacctgagaaaagtgaygtgtcattccaaaatctatttctccyacgtgcacgggaagcgatgatacttctacagtcaccctgctctgacaggtgggaaartctcttctaagtaaaaatctcaagaaaagagttactctgaaaaagatcacatcttctcttcaagttcggcaatytggaacagtgttcgtcttcgcctctttaacctgaaccagaatgttagactgggagcacccaggacagaccctcgaggggaactaggcagtgaagtgatggaaggattatagggattgtcaaagaacaggattatctcagagggacgtggcctgagacccccagaggggcaggaacacagggtgcagatcaggttttagactctaggggggtcggcgtttgaatcct

SEQ ID NO: 3736 - DNA, 600 bp, Bovine  MMBT20566
aaatagagaatggactaacaacaaagtcaatatatgcaaaagctggctctttgagaatagccaaagtggtaaactgctagtcagactggttaaaaaatagataacacactgaccaacatcagaaatgagagagggaacattactgtagattctcaacatttttttaaaaggcaatattatgaacagctacatgctgtttaacaattttacatgtcatggataaattctttgaaagacacatattaccaaaattgactcaaaaacaaacgtgaaacctgaatagcactagagttgaccctrgaacaatgtgagggttaatcggcatataacttacagttggccctcggtatccatgatccctccacatcttcagattcagccgaggaccatgtagtgctatagcatctaccattgaaaaagatctgcatttaagtgaacttgtacagctcaaacctgtgttgttcaagggtgaaccgtatacaaatcttataaattgaatctgtaattaaaaaaacacttccataaagaaaactccaggtccatttggctttaccagtagacctaccttttaaggaaaaaaataccacaaaacaaattcag

SEQ ID NO: 3737 - DNA, 600 bp, Bovine  MMBT22092
cctgaggcctgttctatcaggcaatgaaggactctaaaggtccacaaccaccttccactttcaacacagcaggatttgctgtgttgaaaagtagaaaatttctgttacaagtctctttaaaaggagtcattatattgcagagactrtaaaaatggttcccaaactttagcatgcatcatcacctactgactcagcgggtccaggtgggacctgatcatatttgcatttttatcyagttcccaggtgatgctgatgctgctggtcaggggactacacttttgacatccattagtctagatyaggcttagcaaacatttcctatcaaagaccagacaaayattttaggctttgtgatgccatgcagtctctaagtgcaaaagctgccataagcaatatgtaactgaatcagtgtggccatgttctgataaatcattatttatggacactgaaatatgaatttcatgtaattttcaaacgaatattattctcatttttttcaactacttaaaaatgtgaaaccattcttactttgtgagccatataaaaataggccgtgggctgaatttggctcatgagccatagtttgccaacctctgctct

SEQ ID NO: 3738 - DNA, 601 bp, Bovine  MMBT04602
  misc_feature (1)..(1): n is a, c, g, or t
nagaacttcactcgcagaacctccactcatgacgacrgatgattcaaggtcagtctcggcagaaagtgaaatgtatctgaacttcctttccttcacagtgggcagcgctgctttgggttctggcacttaaagaagggtgaggctcctgacctcattttctcagtgactaaagaagcacaccacacacactggaaagcaggattagccgggggagaacttggcagaaattaagcacccccacatgaggttccccctgcacaagaatccttcgaaaygaaaggctttagtcccatcaggtgasgtgtgaacatccccaaagacagctccgtaacacattctggagcatctgaggttgtggagatgacgcgtattgtaagcagaagcatcstgttcrtaactacacacacgaacccatacccttgagtgtgggtacagacctttccttactgcagtaacattcagagatcccaatttaaatcaattccccaaggctgtggaagtatcccatttgggaagcaattccgtcaacagaatgactcatttaataaatattttagcttgcatctcatkctctaytatagtagacagtaaaagaccggct

SEQ ID NO: 3739 - DNA, 600 bp, Bovine  MMBT06549
ggagttggacatcctgcttcaggacaccaccaaagaaccttcggatctgccctacaacccccaggagacgttttatatcaacagtgtgcctaacactaggatctcagatgccgaacttgaagctgaacttgagaaactgtccttatcagagggaggtagggagctgtgttccaagggtggctggtgggcttgtgaccctctggctcatggttaatgggtcccaacacgcttgctccatctgccagggtaccaaatgggggaagggagtcctgggctccttatttatattaagactcagtyccttaaacactgggttgctttcatctgagagatctgccatagagttcagccatttcttctccctgcaggtttggtcccaagcaggaaatctccaaaaagacaattggaaccaactctctaaagccattgtaggaccctcaagtgaaggaccctcacatcagagagagaccaggcttgcgtgtatgtgtgtgtgtgtacatagttatttaaacgagaaacttggaatgtgttgggaagaggaggaaggacaagcactgctgcgtctggatgccgccacttaccacgggcactgagagtttc

SEQ ID NO: 3740 - DNA, 600 bp, Bovine  MMBT06660
ggtaagagttttggagctgttctagagaaaatagccactaagaaactttgtgatagggacttcccctggcagtccagtggttaggactcccccatctctactgcaggaggcatgggattggattctggttggggaactaagatcccacatgccatgcagccaaaaaaagaagatataaactctgcaataaacagaattacataccaagaaaagactggaatctctaacttggctgaagagatatttgaaacaagggtaatatgtcagctaaaataaaacctcaagtcaagaaacattctrtattcctgtagtttttataaagtataacatcaatgtagataaccagagaaaacaatttttatctgtataatttctcagctgccttgtcaccactagctgggtcatggccatggtgacaaataacagcccttaaactgacaatctgtaatacagagagttcacatatggagaactgggaattcatttcaggtaatttaatttcccctctctatccagcagggaaaatatctcagatattttccagagtaaatgatcacattcccctgaagatgattctagaggtacagtattttaatgcta

SEQ ID NO: 3741 - DNA, 600 bp, Bovine  MMBT06672
cactgattcaatggacatgagtttgaacaaattccgggagttggtgaggacagggaagcctggcatgctgcagtccatgggattacaaagagtcagacacaacttagtgactcaccaacaattcagtgttttatctattgcaaggattacatcatagaaagtttgtcttcccccaaacattagtgcactctttgttttttactttaaaaagttattttgtatcaaattggaaagtagactaaagaaaaaatgcccataaatcaattcttattatttacactcttctagaatgttttaatmaaagcctctaacctgaaaattattttgctgaggctctttgtctgaaccagtaactgtgatgtcagaatttggtgcaagctgttgaaacctgtttccagtttaaagtcaagtgcattgagaatataatctaaagaaaattaactctgaaatttataacttttacaaagtaaaaaccgcacaaaaattaaaatctattttggtgtatataaaatagaacaaacttcctgcagttcacacttcaaggacaaatggtgggaaaacatacagccaggtccaaggttgcaggtacattctccagcc

SEQ ID NO: 3742 - DNA, 600 bp, Bovine  MMBT06977
atctccatgacttatattatagctcaaagtttgtgcctcttaatcccagcctagtttgtcagtcctccagaaatggtgcagstactgtggaaaacagtayggtgtttcctgaaaaaattaaaaatagattttccaactctgtagcccgccaggctcctctgtccaaggattttccagggaagaatwctggagtggtttgcyttgccctcctgcagggaatcttcccaacctagggatcaaacctgcatctcaggtctcatgcattggcagatgggttctttaccagcggtcccacctggmaagcaccactgttaccatatgatctaccaattccacttctggatatttacttgaagaaaattaaaatgcttaattcaaacaaacatgtggttaccaaaggggaaagtggaatagagtgatacattgagtgtttggaattaacacatattactgtatataaaatagataaccagaaagaacctactgtataacacagggaactagattcaatattttataaaaacctataggggaaagaaatctgaaaaagaatggatttatagcctgtatatatatagctgaatcactatgctgtaaacc

SEQ ID NO: 3743 - DNA, 600 bp, Bovine  MMBT08313
cctcacctgcacacgcccatgtacttcttccttggtcatttgtctttcctagacatatgccactcttcaatcaccatacccaagatgctgcagaatttcctgtctcagaggaaaaccatttcagtgtggggatgcattacccagagtttctttttcattttctctggaggcacagagagctgcctgctctctgctatggcctacgaccgctatgctgccatctgtcaccctctgctctacactatgatcatgaatggacctctgtgcactgcaatggtcagtgcagcatgggtgatgggrtttctgaactcactagtgaataatctttgtacccagaacttacagttctgtggtcccaatatcatctcccacttcagttgtgaactgccttcactcttccctctgtcctgcagtgacaccatgcctaacaccatcctgctggctgggtccactgcatttctaggacttgtgacacttcctccratcctcttctcttactcaaaaattattcttgccattttaagtatctcctcctctaaaggccaaggcaaagccttctccacctgctcctcccacctcaccgtggtgctctcgttctat

SEQ ID NO: 3744 - DNA, 600 bp, Bovine  MMBT09272
ggggccacggtcttggagaacctgaagttrgagttgacccgtgaacacatccctgtggtgtagtaggaactcccacactcgtgcgaccagagggggctgcaggcctgtggagcacagaacggacccccagtcagtggaggccgcagggtccgagcccaacagcctttggcccagccccaccctccaagacacaagacagaatcctccatctgagtgctggtatcctaaatttctcttgtggtaacatgtaccagtttccttggtttcaggcggaagggagactaactaaccttggagtcygctgttgtattttcaaggatccccttctccaccccatcatccggggtgtgactctctttcccctgcttgtccacccctcccaccacacaggaggcaggaaaaccttgtcatccatgggagggaacctttcaaaagtcttcctgaagaggtcacctgaaggtcattactgggcaaacttccaggacagggtcccaacaacatgcccatggctccttgctagggaaaggaaaaagtgtgtttctgctttttctctgaaatttgttaccaaaacatggatgtcagcccctcgtttaaagactg

SEQ ID NO: 3745 - DNA, 600 bp, Bovine  MMBT11019
tcttgaaaccaggatacggacaaaaagggagcctgcaatgctttgaccatttggggttgttttgttttggccgcaccatgcagcttgagggatcagtccccccaccagggactgaacccaagcccacagcagggaaaggccaggtcctaatcagtggaccactagggatttcccaagtggtttttaaactgtgttccctggagttctgagggtgctctccctcctttaacacacccttttagctcacataggagttctgctatagtatcttattgaaatgaatttgaaagcctctggttyggtctgcgtggatgcagcgggattctgggcagcaaaataattagagtcctggtgcccacattcctgtctcagaccgtgcataagtcaccttcctctgcacctttctctgcttacctgtaggatggattgcaggaagactaggtaaggtaatctctttaaagtccctggcaaaggttaaccaccccaaaggtgatgatgatggcccagagagggacagcgactttcacagagatgctcagcttcctctctctccttttcagtcattcatgccttcattgattcaccaggtgcccactccat

SEQ ID NO: 3746 - DNA, 600 bp, Bovine  MMBT13229
ggtgaggaagaaccttcgctgaatgtaygctgacwtgagtcttggggcttttcctctggaccacactgctcctgtgttagccagactctggtattggaaacttcagtatcattattttaaaagctgtactttttaaatgaaatgcttattcagccgtagtaaaacaccaagcgcttctttaccataagataacttcttgtaaataacagcactacactcatctctcctataattacttccttagggcaaagtcctcaaagtagaagactaggggcaaacggaagttaggaccattttcakggacttttggaacaagctgccagattgccctgcaaaattaaacgctaytggagaatccctatagctttaccagcatagagttttatccttttacatttatttctgctaattttataggaataaatagagtgctttcatttactatatggtatgtgttttcagacacacacacacwcaagtcctggaatcaagatccctgggcttggttgcttgtctgctgtgtgatctttgacaagtcacatcccctccagggacagaggatatctatctgtaaaatgatggggttgaatgagatgattt

SEQ ID NO: 3747 - DNA, 600 bp, Bovine  MMBT14697
tgagaaaaggtgggcaaatgarcgctgttaggtattagatggtaaacagatcaggaatggaggtggaaggtctagctcttgtgtgaagttgggtggtgaatattagaagggaaatataggaggaagaggagggctggtggcaggctttttgttttatttttcagagctrgatcactctgtgcagcaggtgggagggcaaactcaaagagtccatgtgcttgttttaaaaataattcacctcctctgaatgcagacggagatttttgaagatatgcagataggatgtgaaggacgctggayggggatgygccacaggatggatggggccatcagcaaggatttgaaacactgaaagagggcttccctggtggctcagtctaaagaatccaccagccagtgcaggagacttgagttcaatcccaggtctgggaagattccacgtgcctcggaacractaagtttctgtgccacaactcctgagcctgcaccctagagctcagaagctgcaactactgaagcccgaatgctctgagagcctgtgttctgcaacaggagaagccactgccatgagaagcctgaacaccacagcttaagagtagc

SEQ ID NO: 3748 - DNA, 600 bp, Bovine  MMBT18286
gcatggcacagtggtaaagaatctgcctgccagtgcaggagatgcaggtttgatccctgggtcaggaagatcccctggaagagagcatggcaacccactccagtatctacccagggaagacagcccctcctccccgctcccatgcaggttcaatgttacagtcctcagtcattactgatcttttgtttaaaaactcagggctttctctgaacactgacagttattagttgaccttgggaaagttgtttgaccttgacactcattcctttcattgtaaagtggggaagttcatagtttcaycacagtatcactgtgaggactgataaagcaaccagcacagagacgaccgcacacacgctcagtaactaggagtttgcaccccagtctgcccctccctatgtcctggggctctctctgacccccattcattctacactgacccccactcattcttcccatctctgtcattatcatttccaatttctgtgcccaaagataactgaccatatgacctttctgactaggagaatacatacacataaaaagcagtagtaacaaggcttttcatgtattaactcatttgattctcctgacagttct

SEQ ID NO: 3749 - DNA, 598 bp, Bovine  MMBT20525
  misc_feature (1)..(24): n is a, c, g, or t
nnnnnnnnnnnnnnnnnnnnnnnnactgaattgctccttttatcacttacaattgaccattaaaatgaaatttatctcagagagacactggaaaaaagaaaccacagaagaaacctattgtctatctcaaaaaatatctcagcagcccatttccagtcattgcaggaagaaccactcaatattcaacttctcatttctcaatgccagcttttttcaaatgttatgataaacactctaaagtgacctatttcccctgatacctgagaaaagtgaygtgtcattccaaaatctatttctccyacgtgcacgggaagcgatgatacttctacagtcaccctgctctgacaggtgggaaartctcttctaagtaaaaatctcaagaaaagagttactctgaaaaagatcacatcttctcttcaagttcggcaatytggaacagtgttcgtcttcgcctctttaacctgaaccagaatgttagactgggagcacccaggacagaccctcgaggggaactaggcagtgaagtgatggaaggattatagggattgtcaaagaacaggattatctcagagggacgtggcctgagacccccagaggg

SEQ ID NO: 3750 - DNA, 600 bp, Bovine  MMBT20562
tttaatcatcaagtgcatggacttcctaagtgtagccaagactcttcttatcagcaaggtcagcttccggtgtgaggaaattgaagtgcaagtgcaggaaatgacctgcaacagatctggcatcgggaaggccctgctgatgactgtgtttgcatygagctccgtgggacccgaatcactacaaaagtgaggaagggcgtggcatgggtgctgtagggctatatattgcaaagcaatgtgcgttcctctctgtgtattaggtttcagtggccttaagaggctgaaagtgtattgaggagmgcataaatakatagtaagcaaatagaatagactaggtcctctaggtccatttgtgaatctttatggtaagcacctcaggggctccaggcttkcttgcaatcaaagtcaagaaatatttcacattcagaaatactttttaaactaaaggttttgattgtccccacataaaattttaatagcatattagacctaaaatttaaactccaagatgaagtattgggttggccaaaaagttcattcaagattttctatgagacagaaaaaccagaactaccttttttttttttttgctaacctaat

SEQ ID NO: 3751 - DNA, 600 bp, Bovine  MMBT21426
ggtcctatcagtactgagatgccacagctcctggaattgactgcaatgctccagggctgtcttctgtatgccctgacatcccactrctgtcatgggatgccttttctggcaccycatggcacttctgaccagttcgcacaatatctggggtgcctccagagctgctctcaatggcttcaaaatgtttgccagtaagcattagatttttyccccatttcttactgcaaatgtgttagacaagccgcaaggttaaaagtaaactggattcatgatgacatagaatgttaacaagctcctgakctgtctcaccacacatccctccaacccacactcagcaaccaaactctaaatcaacytgccagaagaaagaaatgttaaaggaagtctttgtcagcccctataactatcatgtgaataaagttaagtcaaccaaaaataagacttttagaatttattttagcttctatttgtgatactgcatttaatccttgactgagactgaagtgacaaatgttataatatttctagcatttgagataagccaagatcttccaactgctgaggatttgaaaccaagtcaattaagagtgtcatatttca

SEQ ID NO: 3752 - DNA, 600 bp, Bovine  MMBT22415
atgtgatacaaagttctaaacatcaacaaaagcaaattcactgtgcatttaaatcctccatatactcttcattttctttttgatctatgtcatctgtccatttctagaggaactgtattaaaaactcttcccaggaccatagtttgtcaaattatccttatactctatttctgcctactattttcatgctgttattggggtttatctgctcaaaaaggagaccgggcccagggaggatgggatctggccagggcagggaagggtactsattgggctcagggagaccctcaggtctgagcmgggctgagactcaccactgtgcagtaaagtccacaaactcaggggagaaacggtcagctgggagctggggggacggctcctctaccacctgcttcagctgctggaagggggtcccccaggactcgtaaggaaatcgcagaatggccatctcgatctgcagtggagatagcactgctgggtcagagacacccacgctcccacacggaagcaaagcctccaaagatcctgcctgtcctagtccagcagccagagctggactgtgaggcagggtaaggggctgacaggtgacatcagtccaaa

SEQ ID NO: 3753 - DNA, 600 bp, Bovine  MMBT04561
tgtttatggagtttcttgtcccacagtcacacgcgcaggatggagcccggcctctgagtgtgagccccagtgagaggcagcagggggcgcttctccctgtatgcgcgtcagagtgctgctgtctttctgcccacaggccttgcagttggcttttttgggcctccttcggctgcaaaaggccttcatggttctaggcttttaactgatgttttgcacacgcagtgccttgaaacttataaaaatgttactaattacttggaaaaaaataacttcactttgaactgagactaagatttgctygtaaaaagtctgtatttctaatttattatactgattgtcacaaatgggcattttttacactgcttaaattatgatggagacaaaccatttaaactgaaaaagaagataaaaacaggttcatattaataagtaaaagccttccctaggttttatttcttaaaagtcctctctatctagtaggagagtatttgtaagtgaaacttttggaggtggtacatatatggatgaagcacaagctggaatcaagattgccgggagaaataccaataacctcagatatgcagatgacagcacccttat

SEQ ID NO: 3754 - DNA, 600 bp, Bovine  MMBT10964
aaccaaccacgcagctggcttatcacagtcttcagctgaggaagggagtttggaagcattttctaggtgagaagaaatcagtagagagtctagagaggagaagggaggcaggcagccctccaggcaaggggccctggggttttgtgactcccaaatctcaatgaggtcacacatgcatcttctaggagtagactgggctttgtctagtatttcaggcagggttctttgaaggagataaatcaggcaggtggaaagtgggggatggaaaggcctcacaggagggaggccatgctgtcagcygggtgagagagactgagccttacacacagacggacgggaggggatggctcctctcaggccccacctctctctggaggcatgatgctgtgggctcttcaaggagccaaggcaccgtctgagcaggctagtcccctcctcccaactctggtattttctcccaccttcctggctcagtttcctcatctgcccaggtgtccaaaccaagtgtctgtgtttctcagtgaagtgtgggaacacaaggaaggccctggcctcaggataaccctcttgcccccaaatatgttgaaatgagaggaaagc

SEQ ID NO: 3755 - DNA, 600 bp, Bovine  MMBT23093
taatacgaggttcatacactcatcaaaaccaatgatagagccctctgtccgcatattcacttgttcataaagccacacccgaatccgtgatctattttgcaagtrtctgaagatgagattgatgggctgcaccatcaccttctgcaccttctggccctggccccggtacgccatgctggacgctcacaagcaccacagtgctccacactcaactttctagattttaattcgtcttgatttactatggctttctttccaaggtctcttttctttttctttttggctaccctggctcttctrcgggtcatgtgggaactcagktcctcgagcagcgatagaacccgcggcctagcttacattgggagcgcagggtcttcaccactgtactgccagagaagtccctgcagtcactcttttctatttccctcagactctctcggtatttttatgtggctttgctggacagggagccaagatatccgcgacacaatttggctgctcttccgtcagctgctcgccagaaggcttccacgtaggcctcctcggcttgatgggacgctccaggagagagagtgggaggatttctcccagtccagatcg

SEQ ID NO: 3756 - DNA, 600 bp, Bovine  MMBT14336
ggtgactcttgcttatatcacttgaacagtttctctaaatgtgacctttgatttcagcagtggttggaatattataagaaaaatccatcacacaagaaacaatatctcaaacatgctgttaacattttattcaccaacggtacaatgtctagaatgctacctaaagcatgcaacaatgtcgaacaattttgtgttgcartgttgctgatttccctttccaggtttctgagcagctgacagaagagggatagggtttacactttaaaaccccttggtaattggaaatgagcgctttgttgytsttgtcattggaacaagcagttttggagtcatttggggtgccacatcaatgtatttgacaacaaattgctggaaggamattcccagccgtgttactcctgaacttctcttttgttgccctaggctgtcgtcaaactttctcagcactcgacgggtagaaacttccccagtattgacatttgtgatgtcatcatttatttatatgaaacaagaaccagtttcttactttaagactgctcaggtaaaatgagcaagtcaaatgttagactgttaccttaaatgatggggaatgacactgga

SEQ ID NO: 3757 - DNA, 600 bp, Bovine  MMBT03197
ttaacattcagagatggagtgtttgtgctccttaaaaaaggctttcctgaatgggaaaagagaaacacattactttttgatttgtggtggtacagaataatgattttgtgagtttgaagatacttctgttttcaaatttaaagctgaaagagcattcttattcattgaatggtttctgttggtactggtagaattgrcctttgagagaggaaggagaaactagcttctggtcaggggacaagctcctgagcttgcttagttctaccaggaaggagtaaatgcagtggttctggccctatsgcccatgtgtacccttggttagyactctgtagagcagaacccacaaactgggagtgtatgacatacacattgattcgcacrtgtaactckgtcaattacaacaccactaaaggcagcctgatagaacattatgccatagattactctaatcggcacaacatattggtttttgagcattctcagtttgtttatcagaacaaagttgattcttttttaatgactttgccaatttatcgttgtgttccatggcttttgcaatattttcttctacatggttttaccttgtgtgggaaaggccct

SEQ ID NO: 3758 - DNA, 598 bp, Bovine  MMBT00013
  misc_feature (1)..(53): n is a, c, g, or t
nnnnnnnnnnnnnnnnnnnnnnnnnnnnnnnnnnnnnnnnnnnnnnnnnnnnncctcctcctcctccccctcctaagatccttctatggtcatcctggctcctttaacattggttctgatccagccgtggaactggagattccttcatagratccaccactggagatatgaatcatacccatttgacagatgtggaaactgaggctcagaaaaatgaagtcacatgcctgagaaataacctagccaggatcagaaatggtggctcagagtttgaatattatgtacatgtgcaagtgttcrcatgcatgtgcaaagccctgagcacccgtgttgacaggcacacgtatggtagcccccacactctgctgggctttgcctgccccayctcaccctctctagggtgggcgggggacttgggttaggcacctgaggccggctgtgtttggtgccagcagctggggcaggcgctgggtgagcaaaggctgcagagcctcccgcaggcgggaatagttgcgctccaattcccgatggtactccttctggtccggcccaatcagggctttgttcttcctcagcgcatcctcacacctgaggatca

SEQ ID NO: 3759 - DNA, 598 bp, Bovine  MMBT10675
  misc_feature (1)..(7): n is a, c, g, or t
nnnnnnntttttctacatatgatttataattacagaagttccttcctctctaccaacaagatattttaaacgtacctttatccaagtttaaaaatatgttgggtgactcttgcttatatcacttgaacagtttctctaaatgtgacctttgatttcagcagtggttggaatattataagaaaaatccatcacacaagaaacaatatctcaaacatgctgttaacattttattcaccaacggtacaatgtctagaatgctacctaaagcatgcaacaatgtcgaacaattttgtgttgcartgttgctgatttccctttccaggtttctgagcagctgacagaagagggatagggtttacactttaaaaccccttggtaattggaaatgagcgctttgttgytsttgtcattggaacaagcagttttggagtcatttggggtgccacatcaatgtatttgacaacaaattgctggaaggamattcccagccgtgttactcctgaacttctcttttgttgccctaggctgtcgtcaaactttctcagcactcgacgggtagaaacttccccagtattgacatttgtgatgtcatcattta

SEQ ID NO: 3760 - DNA, 600 bp, Bovine  MMBT05333
aaatcaggatgtatgagatgaactcagaaggaacatgataactatctcaattactggaggagttataaagtagaaggaaggaatgaagaaaggtattacatgagggaatactggtatgtcaggcacttccaaagggcatccatatttaattttctttaatgtgaaaatgttgcctgattttataaccccagaaagtaaaagagggacaaacagaaaagacatgagacagaaggggaagtacggatagaaggaggtcggtatggaagtgcagtagaggagaaagggaaccaaagacagaaytggtgacctccraagacaacagactggcagaccctggcaatgctctagtcctgactggatgactacttgccttggagcctgtctgaaagaatggggtacgagtttcacactcttcccaactgcaaaatcttrgtctatgaagtgaggaggtttacagggtgggtgagaaccactggcgccatctgtggtggaaatcggggcagtgggggctgtgtcgggtctctttaaccaaagacacctgcagcacctacacttacactgtgtctgccacgactcccctcctaagtgccagcctcggga

SEQ ID NO: 3761 - DNA, 600 bp, Bovine  MMBT08255
gggggatggtcctcattgtggcaagttccgaggtatttccaagtgtaattccatccttcctactgacttagaatctgaacccagtttaaacgtaactctccttatcaatttcaagtaaaagaccaattgcacattgtatactatgcacatataggtgagagtaagtaatttttctacttgctttcatttctctaaaaaaattgggggcgtaatattgcaaatttttataatctcttcaaaaatcgacatgagttaggaactgagagcaggaatacctgctgttcactaacttaacttacrtaacaaatactcattttatgcccactgtgtactagtactctcctaggtactgtggatacaaagacaaaaagatatattcctcattgtaaaaatgcttataagttagaaacataaattatcactgtactagaagcagtgacggaagaatggtcacaaaatgagactgttcagctcagggaagaaaggatattaaggcaaggaggtctacaaaggaaaactagtttacctgagctaagttttgagaactaagaggagtgtttcatgtgactgaagagaatactatcatccaagcaggggagg

SEQ ID NO: 3762 - DNA, 600 bp, Bovine  MMBT11328
atattcttttaaaactagtaataattcagatagtcaaagatatcttttactattcattgtataatatatactggaaaatataatttagttatcaaattttagagctacaaagaatcttgccatctctccaatcctttcattttataggtgaggacactgagaaacaggattctagctcaaataaagaagctgggtaggaagctagtgaacattttgtagccaaataacaggtcaggagagtggtacagggggcaccaaatgatgagtcagctaggggaggagtatattggagccacatawagaaataccttctttattgagacaggtcaaaaatcaggagaactaaagagtgaaaatgaagatttgtggctcagatgactaaatgtagaaaagtatccaaacctagagatcatatcaagacagtttctaaaaagactgaggagttcctcaaactggaaactgttcaaattgaataattttttgtttagcatccattccatacagagttgaaacaagggggaaaattgattctaatttaagacagttccaagtttggaataaaaattagctctggtcaacttgtgtctttctgtgttactg

SEQ ID NO: 3763 - DNA, 600 bp, Bovine  MMBT15296
cgaaatgaggtttgagttttcagaactgaaggtttgcagtccaggccggctcactaatgaaggacctgctcctctaacctggtgcacaacacaaaacattaatcaggacattgtttgcattaaagggctgtgttttccagagggtaatcatcagggaaatccagtcaagggcgaacaaggayggcagccctgattaattaaacatctgcactggggctaaaagcaagacttaccctgttggttgttataagagctattgctattaatgccacccgtggaattgggagatgttgtttgctraaatctactctgtacagagggctcggtgttcaaggcatatcaagttatgtcctgatgttattttggcttctccctgtggcactgggtggaagggactgtgggcagggtaayggtgtacatagcttcttttcaaggagaaagcgtttgagctagccatgaagcacaggccgtagttggaaatgtggatttgggagaagactaccctgggaagggcattccggggagggggactagtgtgarcaaaggcaggatgtctggaattgtacagagcatgtctttataactatacagtctggtctg

SEQ ID NO: 3764 - DNA, 600 bp, Bovine  MMBT06764
tcaaaaaagcttatctgcatccttgtgtttaatagttttaaagacttcttagttaatttttctaccttgccaatttaatgtctctgccttttccatgkcccctaattcagtgccacttcttcctgctgcagtgggttagttattcctagactacagatattcataaaagtatggttcagatacaaagtcattatattcttaatttaaattgttaagtatacctttatttactttttattttgaaattattagagattcttaggtggttgcagagtaaagaagtctcatgtacccttcacscagtttctaccagtggttacgtcacatataactatagtaccatttcaargccaggaatttgacattggtacagtacacatatgtagtttgtagttctgtttcactttatcttgtgtaaatttctgtggctatgatagcagtcaagatacagcactattctatcacaacaaagataccacttatactatccctgcatagtcatgttcaccttccctccatcgtccctaaccgctgtcaaccagtaatctgtttttcttttctataattttgttgttttgacaatggactcatacaatgtat

SEQ ID NO: 3765 - DNA, 600 bp, Bovine  MMBT06801
gacagtaaatattttaggcttcgtgggctatacagtctctgtcacaattactcagctctgctgtagcagcaagggagcagccgtgggtgatatgtaaatagatgtggccgtgctccaataaaattttattgataaaaacaggcagcgggccagatctgtctcacaggcttaagtctgctgacctctggattgtagcctattaaactgaggtaaatatggatgcagtccttagatatcacgatgtctaaatacataggaatagatttgcttctccctggggaaacagacaaatgcaaaacygtattaatatctatgttctcaaccatttctatctatttacttagccgaaagtgttaagacaattaggaaaatgaaagttctaccttgatcaattaaggaattaacctttttttttttttttccaaatctttcttcttttatcacacgactaacaaatgtgtactgagggttaaacaataaaactatagacaagttcacacaagaatataacaagagcttttaacattctcagcactatcttccaaactttgtttttacaaacatgagaccaaaatgtgyacagctttattttatattttc

SEQ ID NO: 3766 - DNA, 600 bp, Bovine  MMBT16844
gttcagtccctggctagggaattagatcccacatggtgcagctaaaagagctcacatgccacaactaagacctcatgcagccagataaataaatattaaatatatatatgtatggtaagaagaaagagaaatsggacaagaagaaattaatagaaaaagttcataagaacaacagtcaagataaccaaatggactaaactcaaaggttcaagggaaaaagagtcacattggatttaataagtatgtgaatcctaaaggactcagcccaattgtaatcaattcacaagggcttcccaggcracgcaaataaagaatctgcctgccgaacaggagatgcaggtttgatcctaggtctggaagatcccctagagaaggaaatgacaacccactccagtattcttgcgtggaaaatcccatggacagaagagcctggtgggctacaggccatgggggtcacaaaagagttggacaygacttggcaactaaacaacaatcgactcacaaacaatattacccgaatcactgctgttagcatcagcaaacaaaaacaagaaataacagatttagactcataaaaactgcagatgtttaactcagtgg

SEQ ID NO: 3767 - DNA, 600 bp, Bovine  MMBT04419
ttgagatgaacagaactggtgactggaccagagagacttagtatattatagtctgtacttttcagtgtgcttgagaaattgctttaaaaaaaaaatcaaaggataatgacttcagggaatcagttgggatgtacaaccggcaggcttgggggcgggggcggggttagagcaagtgcttgggatccggtgaaggagagatgagcaggcagactcaagctcctgaaggtggcaggggacgtgaaaggaggggcctaggagtaagatcaaagcactgtcagagttgagggccgggcccagggyagtccagatgttcaaggaagtgaaagcgcgggagagagcrgtgagggtgtgtgcrcagagggtgtgtgccctgtaagccccatagacgtggcagctccgggtagggacccagctgaggcaaccggctctcctttgcccggctggccgccagtcccaagagagccttgcacagccggacaatgcatcaggtagattctcagctcacccccttctgccaggctggtgagactcccgcaatcaagggctccaagtcttgcaccagcctctgcttcccttttccccctgtacatccggaactgc

SEQ ID NO: 3768 - DNA, 600 bp, Bovine  MMBT07724
gtgggcatcccagctcccctaggagcaagggatggccctggagcgagggctggaaaataacctgagttcacrgtccygggcgtgacattagtctggagaagaggtgagygtaggtttggtcagataggtcagtgcgtgagctgagcctgtttagatgcggataacacaggtggtcatttcagagtccctgccatcgggggacagagggacccagatgacatttttcctgcatggacggtaggctctgttagcaggtccaggcatgtggatttcacagtctagcttgatcaggaacacaaratcctgggcactgaacttgagtcatcagctcttcctttctttgagtcaggaagacatctaaaaaccaccttctccacttagcatcactttcggaaaccgaggacttcccaccattatgagggaggaaggaacagcgcccagaggcaaggccagtgctttacttttagtaagaacacatgtcttctttacttttctcattttgcttcaaaccaacgcaaactccgtggagcggcagctgcccagagcctgtggcttcaaggcggcaattaacccgaggcccggcaacgctcacctgttggc

SEQ ID NO: 3769 - DNA, 600 bp, Bovine  MMBT15810
accatgccgagaaaataagcatgtaacttcccgagttcacggccactgcttacaaggaacactgctcagagtgatcatccacaaacccagcttctcctgtgacactgttcgggggtaaaactgattgcttaacacacttgtctaaatctcggtaggagtaggtgccttcataatataccacatctcactaatcagagaagtatctagaggggactgttatagacaattttaatgaaaagaaaccacaatgtgggaaacctgggcttggaaaaatgtcaggtttttattcactcctgtttkaaaatgaataagaattaagggcagagtttctgattagaaacagaagactaagcttaggtcaatttcaccaacctcgtaacttgctaggagtttcagaagcagactttggacttaccttacttacatgctcaaaaggcatacrctgtcttgctaccacttctgatttctgaggttccacccatgtttgtttttaatgagcataatcacacataacttttaataactaaaataattccagcatctctctcccacctttatctacagagcaaaatatactctatggattccgaagaaagaaca

SEQ ID NO: 3770 - DNA, 600 bp, Bovine  MMBT02256
aattgccattctggaacaattactcaatcttttagacttttcctgcttgcattccatgaccctgttcattaagacatatgggtatttgattttgatctggaactttcaattatggtaataatgccagttctgtttttatatctgtaaatcatttttagttctcaactctatttggaagcatgctcctctrcctgcctgtaaacacttgaccctattcccaaatcagacccctggttatatactcactcctgttttagtccatctgccaactgtcataaaaccctgagctttatattcaarcagatctggcatagggtttcctaatgtttactaattcaagaggctttttccaagtgaagagacaacgattttgtgaaagataaaggatgggtagaaaactaggcaagtaattggcttatatatctttgtttcagtatgtgcttactgaaaaggactgcttacccatttacagaataataggccatagatttagtaacaataaattggcaagaggttggtttataaatcaggaagtctgtattgcagacattaccaggatattaatatgacatttgtgatcaaaagaaaggacaactagaa

SEQ ID NO: 3771 - DNA, 600 bp, Bovine  MMBT03012
tcttgtctgccacagacacctcccagtagtgacagccagctatgaagtactcggagcccaggacgctgacaacgaagtcaaatcgctcgggattgtcgggcacgggctgccttgtgtctccaagcttcacacacttgcggtcctcagacaggatgagtttgggatgcgctgtatctgggtccagggtcacagtcactgcagagagtcacagagagatgaggtttaggaagctaagtctccagcgacctctgagtagctgtggagggaataatcatctctaggtctgcaaccatggtgccstcatccccacatgtcctggaactaaaaaaaaatacattgtccagtcttctagatctactcgtggattaagtaaaagagggcaaagtttttcatctgtctgtgaagctgtcttaatccttaagaaatattgcctttgtctttgctggtccaaaggactctcacatatgaaaataaacaagttttgatgttagacccagtagcgtgatagcatattggagccccagctatgtcttacactagttatgtgatactgggcttgttattcatctctaaaccttcatctgtaaagtgggaataata

SEQ ID NO: 3772 - DNA, 598 bp, Bovine  MMBT04166
  misc_feature (1)..(84): n is a, c, g, or t
nnnnnnnnnnnnnnnnnnnnnnnnnnnnnnnnnnnnnnnnnnnnnnnnnnnnnnnnnnnnnnnnnnnnnnnnnnnnnnnnnnnntactcttatgtaaaaatactgtatctaatttaaattttaggaacaaaaatgtcagattataaaggagtttaaaaattcaaaattttcctttgtattgatcaacttggactggttcttgtttcttaatatgcgtttttttagagaatttacatgttgcatywttgttttcaagcactgtctccagagtaattgcctcccattggcccaatgtttaayaggattttatatcattatgatttattaataataatagaattaaccctttatgatgactatagccttgaccaagcaactccatgcccagaattcatttyaggacagcatttaagasatgtgtgcaaagatgtgaatataaagacactcatgcaaagacaatcatcacagaattattttatkattggtagtaaatgtacaacaatcgaggactggttaaacaaattatccatacgatggaatactatataatcattaaaaatgtaatacaaagcaggagacacaaccctcacacacttca

SEQ ID NO: 3773 - DNA, 598 bp, Bovine  MMBT06987
  misc_feature (1)..(149): n is a, c, g, or t
nnnnnnnnnnnnnnnnnnnnnnnnnnnnnnnnnnnnnnnnnnnnnnnnnnnnnnnnnnnnnnnnnnnnnnnnnnnnnnnnnnnnnnnnnnnnnnnnnnnnnnnnnnnnnnnnnnnnnnnnnnnnnnnnnnnnnnnnnnnnnnnnnnnnnacagttctttagacataatttctttaaaaataaagtgcatataattttccacattcaagacttctctatttgtggaagattctgaaaatagaagcatctgccataatatcaggggctttggagctgaagcgtctgtccaaactcacagacrggtatttcaaaatattgaggtagtctccrgcatagccgtgatgaattttgtcaggagaagggggccattttcagtcttggacccccacctggttttgcctcactgttgactcacatacctgcctacagcaatacacactrgttttggcctgtgctaggccacgcaccatcaatggagtccattgttttccagcaaggcacctgcacaacaggctcaaacaatgaggccatacctcaagcccctcctttctcctcagggcacccaaggtgaaagaaaacttgttgaggcccggaagccc

SEQ ID NO: 3774 - DNA, 600 bp, Bovine  MMBT11350
gacactaagcaaaatgttaatttacatgctttatttttcccttttccctttctaaaaacaacagggcctttaaattcctatggtaatgatgcaaccctaaagtagattgttttgaaggcacagttttcaggaaattctattcgtgccacattcttaagaatcagcaactatgtgaaatgaatattcaaagaaggtacaaatctctgtacactacttctgcaaggctagttgagtgccctgttaaagcaggcagagttcccattgctagagtatatattcaagccatctaacaaatcttayacagatgaggcccactcacttcagggaaatctaggcaaaataagattcaagacagtaaaacatttaaatagttacatttcaatagcatctctctcatggcagagtggttgttttaaactgaaactattctaggcattttgagttagagaaaatcatagcttaagaccagattcttctgaggcttaggaagatatttttgattccatattatatgttataaagagaagtactagataaataaaatgaaagattagcctgaatttcacagacctcataaatcagaaatttgagcattttata

SEQ ID NO: 3775 - DNA, 600 bp, Bovine  MMBT15809
gcgggagacctggcttcgattcctgggttgggaagaccttctggagaagggaaaggctccccactcccgtattcttgcctggagaatcccatggactayccatggacttgcaaagagtcggacgtggctgcctgacgctcacattcacgttcatactcaccaggggggccctggcccccaggcaggccaggaggacctggaaggtaggcgtttgaggccagtgccttgtgaccagtgatgtacttgcccaggtcggcagcgctgttggggagcagggcaacctgcaaagagaagagggasctgggtcaggagacggtgccgggcccactgcaggcagccccactgcaggcggtgtgcggcagaggcttcacagcctgccctggcttctttccccttatccraacccgtcagagccagaagggctggagagaccctccttctaaacccagaggccttccagtcaacacaacttgcctgagagtgctcagctacttagtgggcgaccctggatcggctgcagtctgcctgaatatcattagactcatgaatgccataattaacacagtcgatctgcctcaggctttccgttaagctctttat

SEQ ID NO: 3776 - DNA, 600 bp, Bovine  MMBT17567
ctgctccactgctctgtttcttggctcatgagactcctttgttgcttcactcatctcgcttctgaactcggatctsacggttagccaccttaacgctgatcccactggccactggaacgtgtgcgggcctctggcctcgtcccctcccggcacccagcctggctcattcacggtgtccactgtttcccctcccgggttggaaagcactgctcattgggagtctaccatgaaggcrctcccacagagctaatgatcgacactttcattcatcccctggctgtcatatgaacaccaccagckgctctgaacccttccccacaccacagtcttatgggttgttctttccctgatgtctcacttgctacactacagaattaagtctattctatacaaacaaactcatcttccttctatgtcccccaaagtgcctttgtagccatgtccttggtccragctttaattctcactgagcgcgcacccctgcacaccttctcagaggaggaggaattcctctcctctaagccgaccattccctctgtgctcctcatcccgctgttycttgtctaacctgggaccttgtttcaccaactgtttcttctt

SEQ ID NO: 3777 - DNA, 600 bp, Bovine  MMBT18397
gaaaaattgaactttgaatgactcaagcctgacatattacactgcaaattcaagattctacatttcattaaataaaataaatgacagtttaaagttggagcataatggaactttgataacttttttctaaactatacttttatatctcataatcacttgcaaatatcttctttaaaaatatcattttcataatgagttaatttttattgtaaagttgtgttgaaaactcaactggcaagacttgaaagaaaagcccacttataattgattgtatccagtaggacaccattaccaaaagayaaattataggtatgaacccctaggagagattaactacactagaggcttgccttaaaatatcaattttattcaagagaaaacaaaaayaaacacttccagtacaaagtttgaagttcaaatattctactgcatttttatgtaagaagatcagaaattatgttgcataactttaaataaaaatatataataataaaatagtgcttccattgttgcttattcatctgatatattcatccatatagtgacactaagcaaaatgttaatttacatgctttatttttcccttttccctttctaaaa

SEQ ID NO: 3778 - DNA, 600 bp, Bovine  MMBT04691
agctggcatgtttgtgctagggagagatgagctgaactaatgggtaattgctactttatgggtggaaattagaattctgcatatctcagcaattctcatctttgcaactcaaaatgtaagcagtatacagtggagaaattttggaaacactgttacactgacccagttaggccattcgttacacagaagtgatacaaccaaagaagtgcgggaactagcagagatgccagagattgtctagtacaatgcagtccctattttcagaggagaactgaaacctagataattgaagtgactcaytgtgtaggatttgtttaaaaacagccagcaaaatgaagccggcctcattgtcagttttctcagttttaaaatggggatagagagacctacactgtaagttgtgttaaatcttgataaagaaacagatacttgggggacatagttttttgaggcagcaacccgctgtgtccccctttgcctagcaaaagtaataaagctaccctttgctacttcaaaaaaagaaaaaagaaacaggcatttggaactatacaataaatgatgcatatactatagaaaggaaactcttcttcataacaatat

SEQ ID NO: 3779 - DNA, 600 bp, Bovine  MMBT12975
gggggtccaggatttgacagtacctcccatagtgttgctgtgaacaaaatagataatgagggctgaatgctgatttccatactggttgaacagttgtccctaagacgtgttgattgatgaacacatgtcaactgggaagtccccagtactgggtcatgagaggcttgtccatttccttaaagaaccatatgatgtgtctgtattctttgacattttatccttagatacatgaagacttagaaggcatgattagcaaattgatagatggagcaaagctagatgggaaagctcatatgttgratgacaaagaagattaaaaaagagtctgggcagaccagaacaatggactgaatctaacaagatagaaagtaggagggataaatcaaagtcctgcctttagttcaaaaaaggaactacaagagggctggatgagggaggctcagtgcaatagcagcttatatgtgaaagtcctggggctctcattgtctgttagcctgatataagtcaagagaatgacacagattctcttaaaatgcaggacaccttaggttgcactgatggaagcattatgcccagacttcagtcattcgctcagcaagt

SEQ ID NO: 3780 - DNA, 600 bp, Bovine  MMBT22651
atggacttgcaaagagtcggacgtggctgcctgacgctcacattcacgttcatactcaccaggggggccctggcccccaggcaggccaggaggacctggaaggtaggcgtttgaggccagtgccttgtgaccagtgatgtacttgcccaggtcggcagcgctgttggggagcagggcaacctgcaaagagaagagggasctgggtcaggagacggtgccgggcccactgcaggcagccccactgcaggcggtgtgcggcagaggcttcacagcctgccctggcttctttccccttatccraacccgtcagagccagaagggctggagagaccctccttctaaacccagaggccttccagtcaacacaacttgcctgagagtgctcagctacttagtgggcgaccctggatcggctgcagtctgcctgaatatcattagactcatgaatgccataattaacacagtcgatctgcctcaggctttccgttaagctctttatgtatcaaatatttgagaaactactacatgccaggtaccgtgctcggttctaaggcgaccacggtgaccaacacatggtctcggctctgaaagatctcagcc

SEQ ID NO: 3781 - DNA, 600 bp, Bovine  MMBT00746
atgttgactctattgggaatcatcccttctaatagttctccctagtcttcagggaatgaatccttattctgtactctttttgcatattgcatatatgtttattattagataccacaatttttgtatttgttcatttcaagcagaaactcaatcttatctgtcttttcatctcctagagctagtacacctaacagaatcagaactccacaaatatttattaagcagaaatgaactgaatatttttttccaggaacgatagagataaactaaaaggctgatgttggtcaggtgatgttagcyrtttttacatagccacaaagcccagaaaattttgttctgattcctcatgtgttggttttactatgcagaaagaaaagtacaaatggaacagggacaaaaaaaaaaagattctcttataaaggtttggaaatatatacccaagtcagaaccaatcatcaattgaatttactctattagctttagaccatgcaatagaccatttagatgattgaccatgtggaaaatttgagtagattatctagtcaacctttttaaattatcaatattttttcattagatactatagcaataaagatgcat

SEQ ID NO: 3782 - DNA, 598 bp, Bovine  MMBT04291
  misc_feature (1)..(131): n is a, c, g, or t
nnnnnnnnnnnnnnnnnnnnnnnnnnnnnnnnnnnnnnnnnnnnnnnnnnnnnnnnnnnnnnnnnnnnnnnnnnnnnnnnnnnnnnnnnnnnnnnnnnnnnnnnnnnnnnnnnnnnnnnnnnnnnnnnnnncagtacttaccagtatgtggctcataccgttattatcctttttcttgtttccattatctctgacaagtgactctttactggaactctaaatgagagctgatttctaccaaaaaatttgcagtagcctgttgagttactattgaaatgcaacagactgtggctaaatctrctgtctttgtgtctgtgggaaatggagtttcctgaagctcataaagttaacattactcgcagtaagatgatttccccagagattatgcttcaatatggaatacyctagatttatggcacagttccaatctaggttttggattctttctacagataccctcataaatttatgaatcaaaacacacatttagaaattaatggaagcatgaatctgaagataacaattccaaaagtcagcttggcttttagtgtygtgcagaaaaaataaattactctcaatkggaatttagtttaattta

SEQ ID NO: 3783 - DNA, 600 bp, Bovine  MMBT04703
tggccctggcaggcttcttgacctcacagtttgcctcctctctgaagggacttacttcctggagttgtgctgaggattaaatgtaatgaagtatataaagggcccctttcttgtgcttccctctcctgtggtgtgctgccagcatacctttccagctttacagtcacccccaacaataaacattttccacttactctccrtttcaacccagctagtctctttcccatccccgaaaacaccccgggggttcgcagaccttgctctcctctctggcccatctggtatgtgcccgtccccacstccacttcctccccgaagctgtccccccatctctcctgctagaaggtgaatgcttggagaacctctggacctttaagccgtcttccatatttttgcccccccttgggtttttaacatactgaagggatttacttactgtagaattcattaccgtatcttatttataatagactcttatctaggtttattaaaaagtgaatgaagcttttgggtacagggcagagtgaccattggcagaggtaagaagccccatttcctgctaggctgtgtgttgggggggtggtctttgtgccttttccc

SEQ ID NO: 3784 - DNA, 600 bp, Bovine  MMBT04855
tgtcttaaattctgtaattataataccagtttacttgaattctgaaaatatccttcttctaaacccacgctgcactgaaaatgacgtgcctttctcatccctcctcccgaccccagcagaccagatgagcagaagtgcacttccacagtgttcctctgcggtggtaatgtggacaaacatatgcagcaaggttcttttcaagaagattaagtgaagggggaagtttaacacagaagctcagcagttctgccaggatctcacttgcaaacagtcattaaaaaaaaaaaaaaaaaaaactaygtaggagggaaygggttgatgcttgctgtttgctacagggcatctcagaaatagcaaaggaaaccacagaccaggccaaggattgctgtgtcttaactagcttccctggggaaagcagcccccgatattatctgggaactggatggaaaatggcaagcacatgacactcctttctaggtatagagtgtttttcatattcaaagctctttaatgcttccctcaggagccttgtgagataagaggggaagtgattatatcctcagtttgtgaaagggagaatcaaagctgaagggtcaagca

SEQ ID NO: 3785 - DNA, 600 bp, Bovine  MMBT12609
ccccaggagccagccgtggaggtgagatccagcacgctcctaattgataaggtatcagctccacctaccgccaccagcaccttctctagagaagttactcccatctccagctccaggcccctgggcccagatttcatgtccagctccctgctcattgatgtccagcttggagccccagtggtgtccacagagcaagagatgtccgggcggacaactgccaccacgcccaccaaactgtacagcgaggtccacctcacgctggccaagcctccatccgtggtcaataggacggccaggccytttgggatccaggcgccgggcagcacyggtcagatggagcgaagccccatggtagagagacgacatcgtggggagaagacccccgtcccccagccccccagtgtggcagacaggagcccccggccacagagacacgtaatatcccacagccccatgctggagaggaggcccgtggcacagcgaagccccgccttggagagacgccccctgggaaacttcacccccacccacccacctatgctgagaccttgtccacagcccctctgacttccggggttaggtctcccccatcttattctg

SEQ ID NO: 3786 - DNA, 600 bp, Bovine  MMBT19113
gttccagtttccaaggagcccaactcatattccccttcaggagcttaactggctttaaaacctgcctcagaatttatgcgtctcggtcttcctcatggtcagagccaactcactgggagccacccacagctactgctgtttctcctggatgwggctattcctgtaacaggcagacttttcttcttgaacaacccacccagagggtaagtcattcctttrctgagcttggggaaagctgtggcagttacaaggcacattttggtcactgatggaccgtgacattaaagtcagtaaattccrtttggagacagagattcccagaccttactttcactaggattgargaaatcatagccccwgtccaaaaagaaaaaagaaaaaaagaaactacacaggtctctttcctgaagagtgatattctgaagggagtgggaaggaactaaatcaactaattatgtgtcagatatttattaagcatgtagtgtatgtaggtgcctgagacatgaaaatgaayggtgaataatatattggaggtcttgtccacaaggactgaaatcctcagaccccatgtacatgtctcataagtgccagcacctaatt

SEQ ID NO: 3787 - DNA, 600 bp, Bovine  MMBT21449
agggaaattttattaagcagtttgagctccacactccatatgatctgatgagatraaaaaggagcatcccacccyatcccaggaagatatcccttcccttgcagccacgttcaactaggtcagtccttttgagccctgacagcttgtgctccctacrccccagggaagggttaacagatttgggggcagggcccccctggggaaagtcccctgggaggtgtcccttctttgcttcttcarttgcatcaggcctccaktcgcctttcttctcagagaacatcatggcaagcgtggctgcakttctgacctgggctctggccctcctctcacgtgagtctccaacactgacttctccatggaggtgtgggtggactgttcttcctggaggtgtgggtggactgaggggttcctgagggaggaaacccagcccctgttcacctcctcttcacagtgctttcacccacggaggcacggagaggcttctgggactacttcagccagagcagcggggacaaaggcaaggtggagcagcagcagaagctggcaagggagcccacgtgagtggccagggcaagggctgcaggagaagggagaagacac

SEQ ID NO: 3788 - DNA, 600 bp, Bovine  MMBT23308
cacccccaagccccaaccaaagcactttccatggaggcaggcccagggcaggggtgcacagggccgtgggcattactgtcacctgcacaggccctgcccttaagagcaaatggttgctagtgcacaggtgcaatgtggaagcagagccaggactggaggggcgggagaagagggttgggggaggggcggagctaatggccataaggaggcgggatcagaaatgaggggcagggcctaggtttccccaggcaggcggtgggtgaggggcaggggccagggcccagggggcgagcccagaastctgtgtcttacaagatggaggtgaggcccgttgcacttggagcagaggagtcagcyaggtgcccaccctccctgccgagttygccacgcactcgtccttctgaattccttggcttgcatgaggttctgtgaacacattttcctgcttattcatgcatctctcagacagattattggcacctacgctgcagatgttgcctgmaacattaatgggaaagccccaaatactagccagcataatccagagcagcatgttcaaagagtgcaccgtgaccagggaatgtaaggaaggtttaatgc

SEQ ID NO: 3789 - DNA, 600 bp, Bovine  MMBT00963
tcatctttatttaaggtacctttttctgggattgtacatcttcattttctagtgcacaattgtcatcttgagagtaatacgatgaagctgaagaactctctttacaacacacatgccaactgggaagcctgtaaaacatccaccgacaccatcaaaaaaaaaaaaaagtaaggctgttaaaacaacatattccataccatgaactagaatttgaggcaatagaccaatagatggttcttatcctaatgttcttgacaatttgacaatttaatgatgaagacaaatgtacataagacaaargtttttttatttaataccctaagaaaaatatagtgttatcagcactccaagttaggcatcattaatctcacaaaggtaaaacaggaaatacttcacaataataagagtatctgacaattatcacagaaagaacagagaaagctracaaacagctaacctcctcaaaagctccagatgccactgatattctaaattctaccaaatatttaagaacagataatgctgaagctacctaaactatytcaaagtatagaagtaaagcttccaaattattttatagggaacgtaacaatgatatca

SEQ ID NO: 3790 - DNA, 600 bp, Bovine  MMBT02581
tccaaaaaacttactttattagcctgtttgaactatttctctgtccccttttccccaccacctcacatctcctgcaggacagtacgtccccaggaatcctctatatggttctcatgatggaagaataaaagggtagcccttctgagctggtcctggacactcagcagagcgctgttcttttgaggggaagggcaggacaaccaccttctcctccatgggctcctggaagaggaaggagacatccaggggttctccttggggattggtggttagatcgagctgcacagggaaggtctcaayagggtccttttcctgggaaccttcacgcttcttatcccagtcaggaaggtactggacagaccctttgggcacagctttggtgggtgagttggtgggagctgtgttttgctgttggagctcttctgtcttggaggggtttgcaggtctctggtttacagtagcgttttcacctctaggcgtgggagcctgaaaagagaatgctttcaaataagggaaagtcctccaagaaagtccttgatatgcttgatactagattattctggttggtacctttctgatggaattctcaaaagaagatta

SEQ ID NO: 3791 - DNA, 600 bp, Bovine  MMBT03259
taaatacatgatatgttttcataactataatcagctaaactgcttaagtgagtgattctgcttaaattaggaaattaaaaatttgaattatttttctgcaaatttgctgctgcttctagaagaagctaaaggcttgttggatgccaaaattcagcatagccactgattgtgtgctgtttatagtcaatctataatttgcctagctgcttccagtaaaatattaatgcaatcaaactaaaactgttttctttcacattcatttatcatcctgggtcagggtgtaaagctcttaaaaaaaawaataataatattaagccaagctgtttaattgtctaaatgtaagtttgaaatcctatcctagggtggtcaagagatttttttgggggagggttgggacttcctcatctgtatgatttacagcaaagtatgtttgttgatatacttttatgttctagcacactcgtactaggcaagtgtagataaagggtacagattaaagtctctgacacttacactatgattggggagacaataacacacttacaaagaataataatatgaaacagcacactctttaaaaagtactaccagccatcattt

SEQ ID NO: 3792 - DNA, 600 bp, Bovine  MMBT08546
gaaacaagctggtctctcctagtgaagactttcccacattcacagcattcatagggattctcctgtgtgtgaattctctgatgtaaaacaagttgtgaattgaaactaaaagttttcaaatcactacattcatgtagttgctctcctttgtgagttctctgatgtgcaacgaggtaggacttgttgctggagtctttcccacatccatcacacttgtagggttttgcttcttcatgagtttcctgatgcaccacaaagttcgacttgctgctgaaggccttcccacaggaattgcattcwaacgattttcctcccatatgcatttgttggcaaataagcagtggctttctgttggcagtttttccagattcatcactttcacagtattttatgccaataacagcttgttcatgtttagaaaggaaggatgattccctcaatgcatgaatgtcattaggattctttccagcgtaattattactgagacctatattacatttcaaactcttcccatttgtgacacatttatgaagtctctgtcttgaagaagcattatttgcagtaataagacacagttttccaaaagcagtacagggatag

SEQ ID NO: 3793 - DNA, 600 bp, Bovine  MMBT06517
acttcttcctttgctgcctaaagtctctcagctacccattatggccataaattgtctggaaacttttgatgcaagaagttgccctccttgatcctatgctatacaccattagtagtaattgttggctacatactgattttactggaaaatctgataggtcctaagaccatgacccttcctcctcrgatgcctattatgccttaggtcatggaagtacttcagtacgtcatcaaggcttccttcccaaaacaaaagcagtacagtatagttaaacctgagcctctggcatattccacctasaggrgggattggtctccctcgtcctcagtcctttgctagatgccatagtgctggagratgtcgcccttctattggaccttttagatacttggggagccccgagratcaactgagtgratgttaaaaggagtttgtacartttggatggcatcacagttgatggagcccatgggaaagctgttgctattaattccttaagcaggatgtttcctgatcaagggcaggatctgagggttggcactcctggccaaactccacacagttatcttagcactatatgctctactcaacagtcaattc

SEQ ID NO: 3794 - DNA, 598 bp, Bovine  MMBT07579
  misc_feature (1)..(12): n is a, c, g, or t
nnnnnnnnnnnnctgaaaagagaaatctatcttgattggcagatggatccctttgtttcatgttttattgtttttgaagaaaggggctttgatttcctgccagggagctttcataaaaggaccttagcatgctgagtcctgattaaacatcagggaaaggggatgattcttttgtatagctctttcctgaaaggtgaggaagccaaaattacagtgactctaggacagttatctgctgaaggaccacattcagctacaggaaaaataaaaaatcaaccattgcatagacagcagtaatastgggatgcaaatatcatttgyscctattttatgaatmctttaaaaaggtctgtacaataaagggtcatactgatactttagtggagagaatatcaggttagttttatttattgctgtagagtcttgacctatatagagagctttttataaagttaaatagattttcatttaaggattctgctaattttagcaagtaaaagagatttactttagtgacaagtgtttgtctaaattaaaccactcacgttgttttggatttacaaaggttgtttttaaatcttctgttgtggcaatcctg

SEQ ID NO: 3795 - DNA, 600 bp, Bovine  MMBT04402
tgtgggaggaaaagcttgtccttggcaacagttcaagacagggaagacttcctcagccctccaggagcctaggacttgagggcgtcagaggctccccctgcccctgcagagacttctgggcttgaacccagggctgtgcacagccagtccccattcagcacccgtgcaatggttcgattctatttttaggtggagaaaggttcaaaggccctgcgcaggaaaatccaagagggaggggaattctcagcgccatgcaaatcacactttcccctcagcctctgcttgacacctgtttccccytagccagctggcctatcctgggtattgatagcagcctggtccccaggatctccacccagagcagaggcccctcctcctcctgctgcttaaagtgagagctaggggaaagaactaagccagccccaggggctccccggaacttcccctccattctccaatctgaatagcccatgaaggcagtgaggaggtgagattctcagaggcgggttcctcagtttcaaaacagcaggatgactactgcctttcaggaccagggagacacaaaaagtggctagggttttactaatccagcccaagtag

SEQ ID NO: 3796 - DNA, 598 bp, Bovine  MMBT03195
  misc_feature (1)..(46): n is a, c, g, or t
nnnnnnnnnnnnnnnnnnnnnnnnnnnnnnnnnnnnnnnnnnnnnntttgcaatgaatgacaatgtggtgctactttaagggttgaggaagttggtcagatgtggggatggtgttggaggaaagacagccattttgctttccctttccatcttccataaattgcattatatgtttttaattatatcacagaaatttccaatccaattgctcaagaacaatattctgtcagcactatgttagaaaagaatgaatttgaaacaattcttaaacaatacacagagcactgtgcaacatcctayggtgactttctccagcaaaatcttgaggcatttctttagcattgtctttatcttcccatggtgacttatgaggcatgcttaagaaaaatttttattaaaggtcagagattccaaaagatccagccaaaattttgggaagttaatagtgtgattaattcttggagtccttcattttccagtcctttaatttgtgcaatcacaatgaatgttcaaagtatatactgctttttaaagtcttttaattgggaattcataaaaataactgattaacattccccaccacaaggagccttgaagg

SEQ ID NO: 3797 - DNA, 598 bp, Bovine  MMBT06252
  misc_feature (1)..(36): n is a, c, g, or t
nnnnnnnnnnnnnnnnnnnnnnnnnnnnnnnnnnnngggcggaaaaatagatcgcatgagtcaaattggcaataaacccattataaagaagagagtggcactaaagtgaaatttcagagtatactgctttctatatacctaactgtgatcttacttaaaaacaagtatttacaaagtttctagaaaactagaaccaacttgataactagggtttcaatctttattttgtctccataatattcagctgtcagcagtttcagctacacatttaaacatctaatgtgattttatgtcctactyacactactcggtatctttatataaatttataaatattataagtgacattatgcacaatattacttataatattttccagattaacaattttgactttaaataaaaactggagcatttgggctttaaaattttttcaatttctaaattctttttaagaagtcactgatggagactgaatttaaagttaaaaaaaatgctaccttttgtaaattttaacaaaaagggatcattatgaacaaatwtattaataagtaaatacctgttctaaacaaataatcaagtagcacttgacactggc

SEQ ID NO: 3798 - DNA, 600 bp, Bovine  MMBT07712
tttgtaagaatcagagaatgtgaaataactttgccagtgcagtgtgctgtccccatagatggtacaactgcctttattttgactccatccaggtctgttttcgctggagagaactgctgttctttttacagattcgctttctattaggaggacaggtgcggctgaaaagtgataaaggtctaccctcttttattctctgaagacaaatctgaggccttgtcatatttcctttgccagaggaaattcagcacgtggtcccctccccacctttggtgagagcagagctctgcctcctgattyttctgttatttgcatctgtctgagctgttagatacatcagtgtctttccagaattactttaaattacccttgatcatggaataaaaagcaggagatttatctgttcaattatttgcagataatgtggtgattgaaagggaaacctggctgcagaaggtatttggagctgagacctgtatgacagttagacaagcaggaattgggttagagttttaaaaattcaggaccctgatatgaaaatgtcattcactctgtattatgattctggagtcatcatagtaaaaattgtaaagcaggcac

SEQ ID NO: 3799 - DNA, 600 bp, Bovine  MMBT07923
cagcttcccagtttcttcagattgatttgctttgtgctgtaaatgggtggtagaggctgtgccatagaataagaccgctaatgtgaggtgagacgagcaagtggagaaggctttagccctccctctggcggatcgcggtttcagaatgttggagatgattttgccataggagacaccaatcaacagaaatgaaaccatgatgaataccactacaactgcatagactgctatctcattcacaaatgggttcccacagcaagcttgaatactcaggggaggtcacagaaaaaaatgattaaytgtggtagacccacaaaaaggcagagaggaaacctgccatgtttgcccattacaacaggaactccactgacccaggaggcagtaaccagctggcacagactaggggctcatgatcagaccatagtgaagagggttaaaatggccatgtagcagtcataggccatcatggccaggaggagacactctaaacctccaaacagaaggaaacacgtttgtgtagcacaggcaatgaaacaaatgtgccctttctggctcaggaggtttgtgagcattcttgggatagtaacagttacataacag

SEQ ID NO: 3800 - DNA, 600 bp, Bovine  MMBT11096
agaaagaggattagtgttttctttttgtttgttaataagacaaaccatccaggaaaagagcttgtttcttaaagtgagatgtatacaaaatgcccaacagagaaactggcacattttactgtgatctctaaatgatacttttctcttctcctccttaagagaacaattaaacattcattaaaacagtaacattttctgagattgtgaaaatgtaaatacttttacataaatgggattaattgcatagcacccttgccttaagtagatgttctccatcacattctgcaaattaaatttcayaactcgttaagcagaaaaaatgtgtacaatgctctattttaatttcatttccaatgctgtgacagctcatggatattaaaaatgacttctaaaaaatcatcctgccaaatttctcctatagctggaatttagggtcaaaaaaggattaaaagttgaataagtcaagataaaatggaacgtgaggcccttaaaatctgaaagcccctaaaatcagcatttctctttcagcatgttttcaaagatgtctttctccttcaatactgttccctctcccttttctatcatcattatctgaccagt

SEQ ID NO: 3801 - DNA, 600 bp, Bovine  MMBT06741
cagacagtgagacaaagtaattgaagtctgggctttgtgtgatttttctggacaacataattggacatgaattgggatgtgcagtattatttacaaaagtaccatgcaacacattccacgaattaatagttgggttatactgccagggaggatgcagtgtttgtggagccatgaatagacaataattacataaactctacatttgccgagatgcacttgttctctagaagactcatgagtttgcaaatttaataacgttagacccctccagagaatcatcacgcagaaacttataaggayaacatgtattttcaaattaattttgatgccagagggaaagataataggtgtggcccaatgtgytgatggggcaagaattcactgtttctgttttgaggacatcatcttacccattttgtggctccttcaatactttaaaaaaaaaaatttatttatttggctgtgatgagtcttagttgcagcccatgggacccttgttgtatcataggggatcttttgttgtggcactcaggcttctctctaattgtggcacgcaggctcagttgctccacagcaggtgggatcttcctttcctggcca

SEQ ID NO: 3802 - DNA, 600 bp, Bovine  MMBT04984
attcattgccagacgcagagacttttcctgatatacagataagcactgctttttaagaacttattttcaaccagaacccaattttttttttccctagctcaaatgaatgatgtattttcgaaagtaaagtttagtttctctttacgtatttacttttcttaaacaagaataatctggaagggaaaagaagtcagttctcttaagcatcactagagaaaaccacagctaaatgataaagtttattttwwwaaaaaattactcttcaaattaacccacaatcactgtacactgaaaaatatrtttactgctgtggaagttcagtaaaatttcttcaagtataaacactgacattacaaacagtgactgtatgcaaattccagccctcattaatactgctaaatgatgtagaaaaacagttgattaaaaatgataagaaggattttttccccctaagatatttctggaaaatcaatcccaggataaatgcagtaaagactgggtcagaagcattagtatattttcaagaaaagtctatgcaaagagggtccaaggaaacaggaakgtgaaatctggaggggttgtgaagaktcttgagaattt

SEQ ID NO: 3803 - DNA, 598 bp, Bovine  MMBT11020
  misc_feature (1)..(25): n is a, c, g, or t
nnnnnnnnnnnnnnnnnnnnnnnnncggggtgcggtgccacgtgggaccaggctccgtcccgctcccaatctccctggggtgagaaattcaggtccattcaaaatgtgtgctaggcagtgcgagttcccctcccccacttcgcactgctgccgcggagtaggactctgcccatttcctccgcccctagagcactgaactgtccacaaacagggactttccactttcagcaaaacagactgcacagaaagatccacaattgttcaagagtagaacagggacctaactatcaccaaaagcartctacctgctagatttctgtgggggacaaggaagggtaggtgggtaaattgtgtctgtgttggggcgggggtggagggtgtggggtgtgggggcagctgttcacagaggcacgactcagttactagggtctgcgtgggtgtggagggaaatgcagatttccttccaagccctatttcactggggccatacaaccaagcacgccctgctttcatcaaaaaaggcagactccagctgaggcccttcaagaaaccatataaagaagccaccacccttcaccagagggggtttgggacaggg

SEQ ID NO: 3804 - DNA, 600 bp, Bovine  MMBT06794
tagaaccaggaaacgtgtgttacagcaatccaaccataaaatacctgaaagctctgtgacccaggaaagactcctttaacaccaaatgtcaaacccccaaaatacccttagctaagtttaagatatgtgttattgggttggttcaaatacaggaagatttgtcctctgtatatcccaacatctgttgttacatcttttcaaagaataagaaggtaggggaaacattcatctaaaatacttctgttttactaataagcagcaatcttccaaaaactgaaagtagaaattttagaacaaaaracactttctggcatgtctttacctagatggtcagggaatcaatgaataagtaagggaatacagagcctataatggaatcaagaacatgctgcccaactgaaagtaacacattaccaactccttgtaacatacgagtcaagcaaatctgctcctctttgtccttcacttacctcctttctcctacactgctcgatttacagcctcgctcttcaaaggcatctggaggcaggaaagatttagatgcctttcacatgagagaagaaataactcactgatgaaatggagagatgttcagagaag

SEQ ID NO: 3805 - DNA, 600 bp, Bovine  MMBT09173
agccctacaatgcttcaaggttcccccttcctctccaggaaaacacagacactgagcttccaaatgtctccctagagagacaataaacctcatgctcttgtttcttccaaaagagactcaatttcttcttggaaaaaaaattaatctctttcatcaaaagattagatttaacccatatcctttccctgtccaggtttcctttcagtttgtttccctcttaagcaaaagccagggaacatgccccttccagcccccactgagggccatcagtggaccttaatcctacccttccttcctccrtaccggggctgtgcagccccatcggccagcctactcaggcacaggtgggccaggggtctctcacccaacagaaggggcaaagcagcagctctgagaatttcacttaaggccagatgcaaagagagacgcggtgacacaagggtgaagagtggtgggagacaccaggactccaagattacagcccaaggctcctactcaagagtccctctcagagcttcaaatgtccacttggccggaggttgtggccaccaaaggggaccctgaaggctcactcagacccactggggtgggaaactcgaa

SEQ ID NO: 3806 - DNA, 600 bp, Bovine  MMBT08784
tggcactaaacatattttggatacttcggttctaaaaaagttttctgtaatgccattttgggggtttgtacatgatttttttttttatgttatctgttaatactttaagttgtgaaatatggcatatttgcaaatgaagctataaaacgagcacatgtaatttaataaataatgacacaaacatccaagcttatagtacaaccttcctggtatgggccctcccccattgcttcactctctctcccagaaataatcacagcctggatttcctgttaatcattcctttgcttctctctatgrtttggygcacatgtgtgagattstaaacaatagcgtgtttgagtcgtaaattactcatttcatgtctgtctgcccagttaactctgagaagaggaattgtgtggattctggtctctggtctgttcctagcctcaagcatggcccttagcacatggcaggggtttaataggcatttatggattaaattaatgaatagagatgttttattcttgtaaaaaaaatagtttctcatatatggctaagatacataaatgtgtatttgaataaccataaaagatagagaatatcgaaaggttttat

SEQ ID NO: 3807 - DNA, 600 bp, Bovine  MMBT09424
tcagctctgaccacagtcccctcgggtccccggttgcacactgtggtctgtgatttatttgggccctggctttcttccaacaggcctgtgtgtcatgatcgcagcttccatttacacagaccggcgcaaagacattcacgagaagaacgaagaactgtatgcccagacctcgggcggcagcttcggctactccttcatcctcgcctgggtggcctttgctttcaccttcatcagcggcctcatgtatctgatactgaggaagcgcaaatagagtccaggagctgggtggctttcgccgcrgttcagaatccacataaccgttttgtatataatcagtttttttgtgtgtgtggtttttctagcaaacacattgtttcctttaaaagccaaaagaagagtttttatgttcttgagatcagagaatagactatgaagtctggaattcrgaactcctgcccatccgaaagcctcaacatgacaaagccaaaaatcttgcaatgctcaaatccaagtgttcagcaggataaccacagggatgtaatgggatggacaagactccgaaaaakccaggtcttgggggcatcttcccctaggtttggg

SEQ ID NO: 3808 - DNA, 600 bp, Bovine  MMBT09893
atgcaatgaagagaaccatctctaacccaagacaggagcaagcaacatgaccccaaagagagcagcacaagcttcccaagaactggtcttctacatctgggctcctgaattcaggtgctttgaaaatacatgtgtgcacgtgtgtgtgtgtctgtactcattcactcatccctggatcctaccctggaggatcctggttcacaagccatggctagagcagggccgcagagtaaactgctttttgaaatgacacatgagattctgtagataagccaggtatgggaagcactattctacccyctgtttactagattcccagcttcaggtgggcaggtcaacaagccactttttaagcttcagtctgacccctgcaggagcgccaagtacacattcttcctctcgtggtctctgatatgggagatcccctgacctttgcaaccaaggggttctgaggttcttattttctccaagctgcacacctccaagagcaattcagtctcacaagggctgttttcttcacttctgctgcacaggcaggaatcggggatgatgtgcaacatatctttgtgtggaaatcaactgaccttggaggtaacacag

SEQ ID NO: 3809 - DNA, 600 bp, Bovine  MMBT03481
ccatatgactacaatacgcctgttaatgcaatgctcctcaaattgtttccatacttcctccactgcctcacaggataaagaagctcatctttaggagtgacactgtgcagatggaacagcaagaaaaagacgtgatatgttcagaggagaaataaaactcagggaaagagaaaccacgtgaaacctaggtcaattctgagcacaaagtatatataataataggaaactggtatcattggatcaaggtaataaaggccacacacacacacacacacacaaagccaataaaactagggcaakagaaaatagaacttaaaaacaggccawatttggtgaaatggrttggattccttgtcacaagaaatgaatagcctgaaatgttttattatgacagcaaagctgtgactttaggtttgttaaatayttcaagttcattacaaaatgttacaatggtgcaatttgattcttgctttgcatttkgggaaataaccaggaagaaaagaaagctactagaaatctcagcaccaccatccatggacagagactttctacctgtattttacagctttgaccaacacaaactagaactcctaaaatctc

SEQ ID NO: 3810 - DNA, 600 bp, Bovine  MMBT08574
atactgatatcatacaaatcttattcatcaaatgcttagattaattctggaaagtacttactcttgtacttgtcttactgactcatatccaaactcatcacgagacaaaagaacacgaagtataataaaaatacagtaatttctcagctattaacctgcagatattatacatgacttaagctacaaataaagtcaaataaaagattcttcgatgtcacttaataaactaacatttaaaaatcatccccttttagactaataaccttgggaaaattcaatactcaatatactcaataaackattgattagcatgtgaaaataaccattcttttttaattctcctttagctattctttaacaggagaaaactcttctccatttgcattttgaacaattagtaaggtgaactttcagtccaaattaagctatctttccccatgaaattctgtcatacatttttatgctcctctgcttcttgaataatcgatctcaccatctttttaattgagagccacatatgaaagtgtgactcatgagtataaatcctacacattgtaactttgaaccartattgcaaattagattctctgagccattttt

SEQ ID NO: 3811 - DNA, 600 bp, Bovine  MMBT00779
tatggtagcaggagattgggctgggtttcttctctcagtttattgcagagatttatttatggttcactgatccatttagaagtgccagagcagctgggtttatcatggcatcctgccagtttcacatgcatgccagacaggctcctttccagataaaaaattaccaaaatttatagcataattaaaaaaatatatactttgacttattcctaagaaatgcattacagaaaaacaaaggaaagttaacatagccatggactcatttgggtgttgttaaaaaaaaagaaagccaaatcttamgactaatgagcctggtggttatgaaggttgattgtgtgtgtgtgtgtgtgtgtgtgtgtgtgtgtaaacaaaagaaggcagccaggagaggaaaggacagattccaacattacagagaaaaaagactaaatgtttatgtagtcctatgcaagaaaagatctgagaacttattcctttctccaatcctgccaagactagtgcttctcaaatcacatttgtgtggtgaaggatatggttttgttctttagtctttgctttttcatttcttgtcacagaccaataccacacaagctataaaat

SEQ ID NO: 3812 - DNA, 600 bp, Bovine  MMBT12980
cctgtcttaatggtggttcagttttctcgctcgcctgagagtgatcctagtgttgagatgcacttttcaaacaggtggctaaacatgaagccacctactttatttgggttcagctaaataagagatctactctgacagtggaggaaaaaactagccattttttacttactaaaatggcacacgagtctttgtttcatgtgaattctaacataaaaggttgtatactgtgtacttcatgggtgacttaaaggaatttcygagacaactttaagcaaaatttgatgtataatcaagaataasaggcaactctacttgggtttttgtttctcagtttcatcagctataaaatgagctgrtatcaggtgatcatttacagcttttccacccatatagagttgtgatatgagaagagaagaatcagatttaatgtatttgcaaaagacagcactaccaagcagagctgttaggtcctgtccagcagcagagcgattctagaagacaaggagttgtgagtcacagctgatgctygttagtcacatctggaatgagcaggctgctttggactgaatctatggtctggggacagaacagtgctgttcg

SEQ ID NO: 3813 - DNA, 600 bp, Bovine  MMBT12730
aaaacctcatcctgccaaaagtgtagtgccacrctgttcccacaaataaagaggataattaaagcgagaaaagaaaaggatggagatttgtaacatcttatcaaggctgttagagcatttatactttacctggacaatctttagcttgcaatgagactacataaggagtgacattattctgaaggacttctgttagacttctgagtgttaaatcatgatctgttacattcacacctatgggataataaaccawtattatascatcatttttatcattaataatttaacrataagaaaagsaactttacatgccaagtgaattactaagtaaaacattttcaaaacatgattaataatagaaaataagaaaatatactgcataaatgaaaagatctccattacaaacacatacaaagaggcaggcactatacctgtcagggaaggtatttaacacaacttttctttaagaaaaaaaaaactactggggatgtgtaatgacccgtgaaaacatcttaggaggaatttcaaactcataaagagcttttaaaataatcattcaaaaataaggcccttagtgtgaccctaacttaacaactgagg

SEQ ID NO: 3814 - DNA, 600 bp, Bovine  MMBT12889
gtagacctgagcagccaggttattttgtgtgtaattttgagctactcacctcgggaatggcacgctcagattggagtcataatttcacttcactgacgagggtgtgacatacaatagaagattgttgcctggagttcattccttaagaatgctgctctgctagctctgctcattttaacaayataaactgtacattatactccatggggttgattattgtttgaaagtatttgggtgtttggatactttgtcttgttatatttaacactggaactctgccactaattctctgtgtgacaytsacattcattttggaggcagtgtatttcatgctatgaaagtcagtgaaacatgtatacagtctttgattaaacttatagtatcttcataacatgtaaagtcaaggactaaaagaggacataaaaagagcacctgttaaaagaaaaaaagatgtcggagaaaatgaacaaagaacaggaacagtttaattcttcagagaaagcatgctaatgaccaataagtatctataaagatggttaatttaaggacatatgtgttaaaacaagaaatgcttctccttttttgcctctcagatcggca

SEQ ID NO: 3815 - DNA, 600 bp, Bovine  MMBT11812
ctaaatgtgttgttgctctaaaaagtcttagaatctagagaaattgtatttcaaacataaaaggctagtttttagcttgttgcaacaacttgcctgagtttctcattatcactaaaatacttgtccctgcttcagtaagattattagcctcttaatgaaaactgtgccttgagatcaatgaataaaccatattacaaaagcatgctgattaggcatgaatgcattttctctaggcactaaaatcccagaggtttagttctagttattattcaatattacaaacttcatcttagaatttaygaatacttcatgttattttatatggtaatattgtaatcattggttaaaatattagtgactatatcactgaaaataaatcaggagatatttggacatgactcatttgaaagagatatagaaattaaaagtgcttcttactatcacaaagtcctccaaccacaccaccctcgccttatctccatgccagccacagactttgacagttccatggttacaggcgtttctttcttttatgactttgatccaaaagttattatcaacatctttgaatatacacttcctgacaccttgtaggcacct

SEQ ID NO: 3816 - DNA, 600 bp, Bovine  MMBT13971
tagacattacaaccaaactgtaaactccatagggacagaaattttcatcgtctctttgaactaaattcacagcccctaagtcagtgctcttaaaaaacaagaactcagtgaatacttggcaaaggaatgaatgaaggtataaaaggttcttaactttatgccttgagtcttgtgagcattcagtaaatactaagccactttcccaaagtattacagtgctagataagtgatttcaggatgatgcaaataatatttaactcatttgaatgtaaccttcatgaggcagggaacggttttgtycagttctgaatcctcacctcctagaaccatgyscagcattcagtagacactcagaaaatgtctactgaataaatgatttgggtctttcttcccagacaggccatgtgctacttgaagggaagaattttcttatattctcaccccgactgtgtgtacacaaaagatattcaaacattcaaagcagatgagttcagtggactatcaggggctcaaggtttcttagaaccaccacgatctgccaattacatgtaagtgtcatgagggttatacagtacttttgactccaaagtaatggaaaca

SEQ ID NO: 3817 - DNA, 600 bp, Bovine  MMBT13362
gaaatctatcttgattggcagatggatccctttgtttcatgttttattgtttttgaagaaaggggctttgatttcctgccagggagctttcataaaaggaccttagcatgctgagtcctgattaaacatcagggaaaggggatgattcttttgtatagctctttcctgaaaggtgaggaagccaaaattacagtgactctaggacagttatctgctgaaggaccacattcagctacaggaaaaataaaaaatcaaccattgcatagacagcagtaatastgggatgcaaatatcatttgyscctattttatgaatmctttaaaaaggtctgtacaataaagggtcatactgatactttagtggagagaatatcaggttagttttatttattgctgtagagtcttgacctatatagagagctttttataaagttaaatagattttcatttaaggattctgctaattttagcaagtaaaagagatttactttagtgacaagtgtttgtctaaattaaaccactcacgttgttttggatttacaaaggttgtttttaaatcttctgttgtggcaatcctgttaactaagtctgtctccccact

SEQ ID NO: 3818 - DNA, 601 bp, Bovine  MMBT13892
  misc_feature (1)..(1): n is a, c, g, or t
nattcaggttgatggaagattgactayagataaaaagtaaacactctcatggtgatgtaacaggttcccagatcatacagcacatcatattttaaattgtttatacagcaaactaggttgccagtgtaaatgacaaatctcttaactttcttgtttctggcagcaatctgtgaaaaagcagaaaactgcttccaagttatatcaagacttgttttttttttccagttgtaaaccaacctgaattttgttcccagaggaaggcacaaccaagaactacaagcatctggactatctgccttargtgggctgtgacaccaccaccaccacctagaacagagcacttggaactcacacagtaaaaacaaaaaacccatgaccaaactgctcttgaacagatattcaaccctgcccaactccttctccgataccacttgcatccgcttacaaataaaaatatctaatagccaatttagtccatatggttgcaatatggccacatgagtatgacctttttatatagacatccatagaaatttgtggccgctataccattccccaccccaaaaccagaagagcatactgaagagtttccaacatgtct

SEQ ID NO: 3819 - DNA, 598 bp, Bovine  MMBT12659
  misc_feature (1)..(55): n is a, c, g, or t
nnnnnnnnnnnnnnnnnnnnnnnnnnnnnnnnnnnnnnnnnnnnnnnnnnnnnnnaattatgttttcaagtccaaggaacctgaaaatagtatccctaatattaactgttaccaatttgggataacagtgttttctccttaaagcagagaaactcctaatattccatgtctccttgagtttgacatcaagtttggcattttgagtttggcgctaactaatccattttacagaagaggcttagagaaatgaaggaacttgtccaaggtccaaaccaggactaagcaggggcagatgaggtrycttgggtgcaaaatttaaggaggcaccagttctcaggtttgtgtcagttgccattggagagtgagttcctccttraattttacaccccagatgttttaaataaggagcacctctttaatttattaattcaatcttgaaagatataatcaccaaatacaaattatggtttctattttcttggaagtattttagartatataaaaagatttmtcctkcaggttaaattgaccaataatgtrgattattgaaactgtatgttctagattatgtgtatgtatataaacatatatatacaca

SEQ ID NO: 3820 - DNA, 500 bp, Bovine  MMBT17006
agctgtcagcagtttcagctacacatttaaacatctaatgtgattttatgtcctactyacactactcggtatctttatataaatttataaatattataagtgacattatgcacaatattacttataatattttccagattaacaattttgactttaaataaaaactggagcatttgggctttaaaattttttcaatttctaaattctttttaagaagtcactgatggagactgaatttaaagttaaaaaaaatgctaccttttgtaaattttaacaaaaagggatcattatgaacaaatwtattaataagtaaatacctgttctaaacaaataatcaagtagcacttgacactggcaaacaatgaactttctttccaaccacaggagcttctattgtaggagctgcagcatagaaccttatgacaaacaaaggctacatgaataagactgtgagagtatggtactggataaagaaggacaagggaattcaggccaataaa

SEQ ID NO: 3821 - DNA, 600 bp, Bovine  MMBT17802
ctttctatactgaaatgatccccattctacagtctctgaaacttccaactcctttgacaaatggcaagagttgacattcccatcaccatactgcttgccttctggtatacccagggaaaagcacaattataagcttgatttgaacaaacaaattaaaacataatacaaattggggccagttcctgggaaaataaaagggcctgttctgcatatgccctaatctctgttactgatttactggctgaatggcccactccagaaagcatttggagaagcccacatgccagaaagcactctaaygcttttcagttttcaatcaagtgacttggaatcttcctttgacaaaacacacttattgtaagctggccacttatcccaacctaggayacaacttatctgcagcataagggctataataaaatccagcttgagtgacagagaaaacatgagctaagggagctcaacttggaatccagatgttgttaactcatgtaaagtatctgagtcttttatattttatacttttgcaaacagtagggtacctagtatttccccccttacctttcaagtgctgtgcctataggaatgcaatctgcagag

SEQ ID NO: 3822 - DNA, 600 bp, Bovine  MMBT15263
tttgcgaccctatggactgtagacttccagacttctctgtccacaggattctccargctagaatactggaatgggttcwatttcctcctycaaggaamctttctgacccagggattgaacccacgtctcctgcatctcctgcattgcaagcggcttctttaccactgagctaccagggaaggccagtcactacaytaccacttactaattgtgcaaatttgaggcaaggtaattaattatctctattgtagagggctattatgaggtttcagtgaaagaaggtgaataagccctcagtayagttcataccacctaggtggagcttcatgaatgtccttttctgtctggcctcagtggttaaagaaaaggactccgtcctcactccagggtgtgattctaaattatatcttctccctcagcactaatcagaaaggtctctgagctgaaattcaaagagatctctcgaattttaattctttattcacttaatgagtaactaagttttctgtttggtgagtaaaaaattggatctgggttctgttaatttaagctactataaatgtgtgtgcttaacaaaggagaaaattacaattttccatg

SEQ ID NO: 3823 - DNA, 600 bp, Bovine  MMBT15082
aggaagacctctgtgaccttaggatagtcattgaattcattacctgggattgcacatgtttctgacattttatcattattatgcatttcatgatctaacagtctctaggtttttaatttatatagaaacatttccatgattttctgtcctaggatgtaatccgagagttctgagatgcttatcattggaaggctaagtgcttgggaataaaacttaaatctggcatcttgcacttagataagggaatggctgaatttacaaagatgaatttacaagatcaagaggaagaagagcatctaytcatctttgactctcatcgcttgccatggtcctcagcctagacatttcctcaaacattagacttagatgattgctctgtggctttgctttctgagcctcattcatctttcagccctcatttaaaatctctcttgttctctgtagttttctctgactgtcccctcccaaggtggtcttttcctccttgaatttccacagcagatagtttgtgggactttttggtcacttagttattttgtcatattgcacatgaaatatgttatttgcatttataatatccctggtacaatacttagatat

SEQ ID NO: 3824 - DNA, 600 bp, Bovine  MMBT16433
aaaaattcatcttttcagtgcagagatgtactcttgcttcaattctgccttgcttttcctgcttccaggccactttgctcctctccatctgatagatttgccccagtttactggggtgcatttggacagcttctctcaagcttccccaagactcctgttttgtgagatatatggcatcttagtctggagtaaaaagccactccaagaacatgtaagtaaattcaaagtgcagcatacatacagtgggatactatacacctataaaatgaataagaaatgctttgtgtgaaaataagaaaygatgcccaactygtattaatgaaaacagaaaggagaagattatataagtgagcttttacataaagagcataaaaatacacactagtctgcttatattttcaaatggatgaatgaaagggaaacaaaagaatagtaaaagtgatcattatgttagggaacaagatgatcatgggatacaatgaggatttcaatgtttcactgaatatcttttaatattattttactttgtttttttttaactacgtgaatatatcaccttttaagtgtcagattttggtgatggtcatgaatctgtgtcct

SEQ ID NO: 3825 - DNA, 600 bp, Bovine  MMBT17035
ccattctgttgttttcctctatttctttgcattgatcgctgaagaaggctttcttatctcttcttgctattctttggaactctgcatcagatgtttatatctttccttttctcctttgcttttcgcttctcttcttttcacagctatttgtaaggcctccccatacagccatttagtcagccttttaccaatattacagttctggtaacatttctatcttgctaaagcatcttcaactaggtgctttcaaatcctgatcctgactttcatagccctcttcaaaatgatggtgtttatttytttcatgtatcatcaatgccctattaagcttcccagaaaaacgttcattgaattcagccagtatgacttgagagtaagatggacatttgaatggactttcacctgatgcaaatttttttccaaaaaataggcggagtagactattagccttttaggttttctgtagtaatgttcccatctgcttacaatgtttaattcactaactcgaggggaatcagaactgtttttttttaacctgctcctgacctattgtactctcatgggggaagtctgccttttgttgtttgcttgcctataaaa

SEQ ID NO: 3826 - DNA, 600 bp, Bovine  MMBT14433
ataaagtgctgtgggacagttaaagagcaagtaaaatgtctttgcacatcacaggcttacagaggtgatagtgcttaaattgcctctaaaaagatgggtaggaattttgtcaagttgacagttattagaagagtgttctaagcaaaggaaacttcatgtagtaaaacccagagaatatgagtatgttggggaaattataattgatacgaagggtggatatggaataattttaaagaataagccttgaaaggataggatagatctagaccagtggtccccaacctttttggcaccaaggarcaatttagtggaagaccgtttttccatggacaggattggggggatggttcatggggtaatgtgagagatggggagcggtagatgaagctttacttgcctgccgctcacctcctgctgtgcagccgctcacttcctgctgtgcagccgctcacttcctgctgtggggctgggttcctcacaggttggggacccctgctgttgactgtaaaaagcttcaggtgtcaggccaatgagtttggacttcatcccatgtaaaaagaaggacctcagagacatttatttaaacaagagctgacataa

SEQ ID NO: 3827 - DNA, 600 bp, Bovine  MMBT16786
cttcctagtagatgctttgtgttatgtccaacagggtgcatatcttttgttatttgcagacacagcattctattaatcttttttttttttttaatcctttcttgtttgttccacaggcattgttctctgttcttggaagaaaaagaatgggctgttcttgggctggttctcttctgtcttcaagttattttttccctatctctaagcctaatgaccattgctatcttattaacaatttttattttttgctctttgagtggagactgagaactggagatcatactagtccctactcctagrtggtcagtggtggtagtcttgggtttctttgygccttcattgtttytgggtggttamacttttccatatatttgaaaactccaaatatggtgaggaagcttatatagtaaacacctgatcttctgtgtatcacatatatagctgggtttttggaagtgtgctgagattaggatagatagcgtagtgttaagagttcgtattgctcaggaccaaaagtatttgcaggttggtggtgcacagggccagagataccacagtcctggccagtatttggttgcgctaagtcttagttgcagcatg

SEQ ID NO: 3828 - DNA, 600 bp, Bovine  MMBT17210
aatatttactgttgtcttcttggcttattgagtagagtttgaggtattggragcttatacagtgcccaggggagtttattgccagctgggggaggttgttgaaagcttttacgcccttgcttatggctgctgagatgacttctgcagcctctactggaaacaatatggaaataatgagcccacgaggacagagagacatgtggactctsttttctaacctcaggtcatattgtgatatacagatgttttctacttcattttcactatactcagtaatggaaactgtgattcacaagagartagaatgagttttttctggagcagagaattcagagagtcagtggaccccccagaattgcatttaaatattgttttttgggcagatgtccarcttttggtgagaaagttcacagttttcatcaatgaaaatacaagtttcttgatccccaaagaccgagaactgtggctctcaataatagtattggagaccctcaaaagagtttcttattatattgtatatttaatatgtggttttgttcattatttactttattacagcatatcactcttctgtgttttaatctggaaccaggaactata

SEQ ID NO: 3829 - DNA, 600 bp, Bovine  MMBT15491
tggctgacggagctgctcctggggtctgggggcagtggaatggagggaaattttattaagcagtttgagctccacactccatatgatctgatgagatraaaaaggagcatcccacccyatcccaggaagatatcccttcccttgcagccacgttcaactaggtcagtccttttgagccctgacagcttgtgctccctacrccccagggaagggttaacagatttgggggcagggcccccctggggaaagtcccctgggaggtgtcccttctttgcttcttcarttgcatcaggcctccaktcgcctttcttctcagagaacatcatggcaagcgtggctgcakttctgacctgggctctggccctcctctcacgtgagtctccaacactgacttctccatggaggtgtgggtggactgttcttcctggaggtgtgggtggactgaggggttcctgagggaggaaacccagcccctgttcacctcctcttcacagtgctttcacccacggaggcacggagaggcttctgggactacttcagccagagcagcggggacaaaggcaaggtggagcagcagcagaagctggcaagggagcccac

SEQ ID NO: 3830 - DNA, 600 bp, Bovine  MMBT19353
ctctcggtgcgsagcacaggctctagggtgtgtgggctttcgtagttgctgcaggtgggctcagtagttgtggccacgggcttagttgctctgaggcatgtggaatcttgtcagaccaggggtcaaacctgtgtcccctgcattggcaggtggattcttatccattgtaccaccagggaagtccctatattcatatacaatttgattcacgtcaaaatatgagttgttctctacaagataygattacgtgttcttgagacttcatatagaaaaagatggtatccctgagccatgtctaamttgtctcttttctttcttaattgttatagttccactttacaactatgatacattcagcattaaaattcatttttttcttaataaacctgccccattttataaagaaatatgactatctgattagtgactttcactgagactattacagaaatattttattaatagaagtaaagaaacttattattacctggcctaatttttaaccattttgtaacatttgcattctcctttttctgcctctaccctctctgttcctgccagcaatccccatttcgttttaaacacaagtgaagaccactg

SEQ ID NO: 3831 - DNA, 600 bp, Bovine  MMBT20419
agttaaaagaaaaagtcatcttacattcctcatttttctgttcttagaggtactttattgcagttccccagatactgacaataggctatattactactcttcagagagtgttgctcaacatatgcacccatattttcagattgattgctgaatcatgccagtcttattcagacacattcaagcccttatatcttctaactgtgaaaaataaagcattatttacaatgaagaatcgttataatgcagtaatatttcactagtattcacagaatatacaaaaagtgattcacaacattgcaktcaaaatacttgtactgttcccttgactcactaaatctagactatttaagtgtcagcaaaggatccattttcaaagatataaaacagagcctctgaatgaagatgcaagcaacattcttaaaatgtggctatattctttgaagaagtgaaatataattactttattcttccattttaaacatgtaacaaccaggatgtggagtgaaacagggttcgttgctcctaaactgtcaaacaaggttaaaaaaaaaacaaaacaagaaaacaccacaaagtacctcacagcctaagtcaagcctc

SEQ ID NO: 3832 - DNA, 598 bp, Bovine  MMBT22855
  misc_feature (1)..(147): n is a, c, g, or t
nnnnnnnnnnnnnnnnnnnnnnnnnnnnnnnnnnnnnnnnnnnnnnnnnnnnnnnnnnnnnnnnnnnnnnnnnnnnnnnnnnnnnnnnnnnnnnnnnnnnnnnnnnnnnnnnnnnnnnnnnnnnnnnnnnnnnnnnnnnnnnnnnnncagaatcgtaaacaaatctccaatgccaagatgaaggggctttcctctgattcatgctcaggaagcagatggtcactactctcatgggataacagcaatattcctggtctttccagacccaggaggtcagtgatgattccactgattctcatstcttcaaaaagacttttttttcttgaccacatttatcagctataaatgggctctaggactcaataataccaaytcaagtcatgaaacagaattcttctattytgcttcatatggtttgttgctggagagacaaagatgccaccccacctggaatggcttcctcttggtaaaggagggttctctttgttgcaagccaaataaagtaagatgtayrctctgaaagacaagccacattctctggaatttcccaagagaamcttgctgtgcatttctgcctgtatatacatctgctgtgact

SEQ ID NO: 3833 - DNA, 600 bp, Bovine  MMBT20147
gagtgtgtgtgtgtgtgtatgtgtgcacatgcttatatataagtatgtattataatattgctactgcagattatattacagtatactcatatgattctattgtgaattccctgagcgtaggatacacattacaatcatcactattccccctattatttgttgaatcaaaacaacaaatacaagatgaaaaattaagcaaacataatgaatgcttccatttcaacttaaaatttaaaaatattmttatggagacaatactgaaggacaagttttaaaattcagatatttctaccatgcacracttttgtcatttccctatttcaatttaaggatttagccatgctcctacaacatatttgtttatgtaacagaatgttaaaaataggatttgtcatctctagttttggctaaagccccactagactggaacaaaacaagaggtgatgaatactcccacattccaaaaatgagatgctaacacttaacacctattcagagcctactcaccctctgctccctgcacttctgacttccgcgtcacaatctgggccaggtgccctctttgcaggtctctgttatggatattatcacactgtactg

SEQ ID NO: 3834 - DNA, 600 bp, Bovine  MMBT20195
ggggttctccctcctgctggccctcctgcaggggtcaggctgggtgtgggcagggtggaggcatcgccagtcacctcccccacgtggtcccgctctctcggcagctgcgcaccaagctgtcgtcgcaggagatccagcagtttgcagcgctgctgcacgaataccgtgacggcgcctcagtgcacgagttctgcatcaacctgcggcagctctatggggacagccgcaagttcctgctgctcggtgagcgcggggtgggtgggctcccttaggggtggaggccagccagccagcaagccragtggttcttccratggcgcttcccagtggctctggggaccctgcccccagggaagcaggaggggccccttgggagccagactcggggtgaggtggccactgtactgcccggtaagggctgagggaggctcttcagaggaagttggtgcagggacaggtttggaggagtgggcaggaacttgctgggcggaggagtgatgacaccattcccagggaaaagcagctttagctgaggccccgagagcagagcctgcagagtcagcagggcggccgggtactcagtgcctgccacagccagcc

SEQ ID NO: 3835 - DNA, 600 bp, Bovine  MMBT22917
aggctcctctgtccatggaactttccaggcaagaatactggagtgggtggccatttcctcctccagaggatcttcctgacttctgtgtatatgaagggtgtttgaatattccttgctcatttttatgaaataccacctttaatcactttccttccattattcaagatattatttcactaacttgtttttactacctagaatatacttttgaattttccaaaggtggaagattaattgccagactcctgccttaagttccagctttacattttttgagtgacggaaattcagtgtactttyggctgtttggcttagctgaataaactcttgctgttaatacccaggtcttgccaagcatcgtatagaaaagcattttcaggaaggaaatggggaaattgggaagatttgactttttaaagaaataactttggaaggcagtttgggtggaatgagcaacggtggggctgttttatggattagctgcaaagcgtttccaatctaaaagtagggtaacatctcctgaaaaataaaagttatataccatgggcccttgacatttgtaaaggatatattccacagccttcaaaaccctctaaattt

SEQ ID NO: 3836 - DNA, 600 bp, Bovine  MMBT20686
gcgtgcaagacacactgcgaagaaaaggaaaacattcaatgaatcaaaaattcctagcttggtaaatggaagcatggtagcagcaactagaaaaagtggaaacagcaatgttggaagaaaagtaatactggaaatgaatttaaagtgatgttgggatgtccatgtaaaaatgttgagaaggtcattggaaatattggcttatatgttgagaaaactgccagggtgtccttctttaatatagaaaattgaactggttggctgaagtcctttgatttccaaattccatttggcaaagaatayatttgaggtcatggatcaaaagagatttttttttttaatgtacaaaagctaagaactacttttttgtccccatcctagccctatctcagaaatttaatatctactttcatgccattttcatttttaagagactttttggtaaattaaaaaccagactttttccttttaatataataaactgtattggaagaatccattttagaagaagtttaaaagaaaatatattagcttagagaatgctttttttatttactagaggtgttaatatcttctttttgctgaggcagttttgtgttcatt

SEQ ID NO: 3837 - DNA, 598 bp, Bovine  MMBT18929
  misc_feature (1)..(113): n is a, c, g, or t
nnnnnnnnnnnnnnnnnnnnnnnnnnnnnnnnnnnnnnnnnnnnnnnnnnnnnnnnnnnnnnnnnnnnnnnnnnnnnnnnnnnnnnnnnnnnnnnnnnnnnnnnnnnnnnnnngccacttgccagcctggggtgctgtgaggttgcctagaagcctcttagccccgggtgctctggtgctgggagcgatggagcagatcagccggtgcttcctggtcctgcttctytgatgtttgccccggtttcagaggacmggaagtgttcaggtttcaggcatcctgcttgcaggccgtgagctttygtacatggcagattgagcctcattcaggtgctcctgcctgtaggcctaactccctctgcctgactcctcygtttcctcccgttggctcctggatcaccaaaagcttctcttcagtctcaccctgccacaggagcagttgaagttckgagttgagacctaaacatggatacggggggatggtttgtggggagtgtggacctgcattctgagatgggcatctctctttaagggcmgcrgtggccaacttaagaggcgaccagaccaacacacctcccccaaccccaccccctgtttgctt

SEQ ID NO: 3838 - DNA, 600 bp, Bovine  MMBT20128
cggcgtcgccctcgctgaccctctgagacggcggctgcccggtgacgagcgtccgcctcctgctgctcctgtccacgccccgtggcccggggcccccctgagaggggcgtccgcgaggtggagaagctgcgtgccaagtgccattactactgtacacggacccctgccgccatgcccgccgcgtccccgccgacggagaaccgtggcatcagggtaacaccgtggacctctctaggtccaaagcagccgtggtgtyatcaggcgtcccaggcctcgctgtcagtctcctgtctgccgagygcactgactgtgaaacagtaccttttttgttgttggcaagccacaggtttgttctgcaaaaggccgattaatgaaattttaagaaaaaaggttcttttttcaataaatggtttattttaggaaagctgttatgttgtctctcaatggttttcagcttcagagccaacacggtatccgtacagaggtctgcccttgtcactgcggtgtccctcaacagaacgggcaccgtcaggccttcaggctctagagttgcctcgctgcagagcaggagagaaatgaaacagcactaaggatgtcgga

SEQ ID NO: 3839 - DNA, 600 bp, Bovine  MMBT14707
accccatggactgcagcacgccaggcttccctgtccttcactatctgccgaaggttgctcaaattcatgtccattgagtcagtgatgccatccagccatctcatcctctgttgcccccttgtcctcctgccctcaatcttccccagcatcagggccttttacagtgagtcggctcaaatggccaaagacctggagcttcagcttcagcatcatgagtattcagggttgatttcctttrggactgactggtttgatctccttgctgtccaaggggctctcaagagtcttttctagcaccaymgttccaaagcatcagttctgcactcagccttccgtatggattgtaatccagaatgatgtctaaatgcttgtgggccttcctttcttccttacagtttcctgccccgctctgaatgcccctctggatggcagaaagtttggaagcaagtacttagtggatcatgaagtccattttatgtgcaatcccggcttccggctggttgggcccagcagtgtggtgtgtcttcccaacggcacctggacgggggagcagccccgctgtaaaggtacggtccctccttcccaggggcctgctggatg

SEQ ID NO: 3840 - DNA, 601 bp, Bovine  MMBT20553
  misc_feature (1)..(1): n is a, c, g, or t
ntggctcaggcagattaaggcagaggggagagtaacattttgctagtgaattcaagatggttgccaaaagggaaaaagagactcctgactagaatgcggactgttctttctctcccttaaaattcagcttcttctccagctgctggtttttcctcttcagtcagagatgtaaagagcgttcagaaggaaatagatgagaaacttttttttttgtttttttttaagaaaattttgttctttaatgacagtgctcttgcctttttcaggagttgctgctcgctccccgaccaattttctgaaytaaaaatttagagaactgcccctagtaactatgtaaatataacggttaatcagacttgagaattaatttttaacactttcataatataaatagtggggagctttcctttgaaagctggcagttaatagttatgtggatggtgctcaataggaaaagaatattttgaagaaaaaaggtttatggcttaagtgttgaagtcataatctccaccttctttcaaaatctacagttgtttatcttttgaatggtagcttttctcttgttccctagaacttgggtccttttaagacctgccactgt

SEQ ID NO: 3841 - DNA, 600 bp, Bovine  MMBT18720
tgcccatggcacccggtgattgaatctgctgtcaccagcatcctgataataatgaacacccaggctcaacgaccgtgattatgattatcataattgatgtgcaggagcagtgtgtggggatcattacagctgaactgtacatcagagaaacaggcctcagttatgggtaattttactcttatgcattgattgggataaaatatgcctttctctttaaacagaccagcttcatataattttaagaatctttctgtacacgctgatggatgattatgtrtctgctgaaaacagcccccgacygttgttagttttgtgttgtttcgtttcattagcaaatgtaaacaattaaataattmagtgtaattgagggaaaatattttgcttaggaggatggtcttcaataatcaaatattcagttyaagtgctttttctgtctctctgacgatctatctgggactgaagttcttcagtgttctccctctgattatccttgtacctgaattccagaggtcagcaaccatcagggaaaatataagcgtatacagttttttattataaagtattgtgcatttgaatatgcatacatttttgcatatactc

SEQ ID NO: 3842 - DNA, 600 bp, Bovine  MMBT20393
accattagtagtaattgttggctacatactgattttactggaaaatctgataggtcctaagaccatgacccttcctcctcrgatgcctattatgccttaggtcatggaagtacttcagtacgtcatcaaggcttccttcccaaaacaaaagcagtacagtatagttaaacctgagcctctggcatattccacctasaggrgggattggtctccctcgtcctcagtcctttgctagatgccatagtgctggagratgtcgcccttctattggaccttttagatacttggggagccccgagratcaactgagtgratgttaaaaggagtttgtacartttggatggcatcacagttgatggagcccatgggaaagctgttgctattaattccttaagcaggatgtttcctgatcaagggcaggatctgagggttggcactcctggccaaactccacacagttatcttagcactatatgctctactcaacagtcaattctctctcacattttttctgactcttgagccatggccaatagttggttgtctggtcctgccagtgacagcaacaacaacttacccaaggttaatcctttaggtaaa

SEQ ID NO: 3843 - DNA, 600 bp, Bovine  MMBT20392
ggaaacttttgatgcaagaagttgccctccttgatcctatgctatacaccattagtagtaattgttggctacatactgattttactggaaaatctgataggtcctaagaccatgacccttcctcctcrgatgcctattatgccttaggtcatggaagtacttcagtacgtcatcaaggcttccttcccaaaacaaaagcagtacagtatagttaaacctgagcctctggcatattccacctasaggrgggattggtctccctcgtcctcagtcctttgctagatgccatagtgctggagratgtcgcccttctattggaccttttagatacttggggagccccgagratcaactgagtgratgttaaaaggagtttgtacartttggatggcatcacagttgatggagcccatgggaaagctgttgctattaattccttaagcaggatgtttcctgatcaagggcaggatctgagggttggcactcctggccaaactccacacagttatcttagcactatatgctctactcaacagtcaattctctctcacattttttctgactcttgagccatggccaatagttggttgtctggtcctg

SEQ ID NO: 3844 - DNA, 600 bp, Bovine  MMBT19518
ggctcagatggtaaagaatccacctgtaatacaggagtcctgggtttgattcctggtttgggaagatcccctgggggagggcatggcaacccactctagtattcttgcctggagaatcccatggacagaagccctggtgggctacagtccataggatcgcaaagaatcaaacatggctgagtgcctaagcacagcacagcacagccatcattgtcttgaaaattacatgggaatctctgtcactcaatctatagttttttctaatacttacagaggcttgaagaactgtattttgtcctrtatgggaaaatatggttctaaataatggggatcttaaccatggaccacgactgagtaacytcactttcacttttcactttcatgcattggagaaggaaatggcaacccactccagtgttcttgcctggagaatcccagggacagggaagcctggtgggctgccatctatggggtcacacagagtcggacacgactgaagcgacttagcagcaacagcagcagccatggaccatagatcttaaccttaatccaaacaaaatgtcatttaggcataataacctattgtatcctgtctgctct

SEQ ID NO: 3845 - DNA, 598 bp, Bovine  MMBT22593
  misc_feature (1)..(37): n is a, c, g, or t
nnnnnnnnnnnnnnnnnnnnnnnnnnnnnnnnnnnnnctgcctgatttcttatctgtgaaaaagaagcatgattaacagtagtctgctcatgaagctgtgaggacagaatgaggcataacacatgaaagcttccaacagcgaccaggcccaggctaaacattccataacaccatctgttattattttccaatttctctagttttcactgagtgctccttcatctgttttccccattacaggaacttcaacgtgtagaacaatttgcctagaagtcacttatttatgtttcttccactgcraggcagagaggtggtatttattttttgtatcccccaaagccctttcataaatctttatgtaactcaatattcaaagtgttcatctctgaayacctctgattttctcttcaatataatcaacaaatatttaagcgaagaatgggaactaccttgtaagtcctcagggtgaccatatggggcaccaccatcaccctggcagggaggctctgggaccttgagaactggccaggcctctgactgctcagccagacacgcatgcctcacttcagaacgcctccacatcatggccgttcccaac

SEQ ID NO: 3846 - DNA, 600 bp, Bovine  MMBT18904
ataatatattcagatcattctccagtaatcagggatgctcaacactgccttaagacacagtaaaatcgccatcactggaggtcaggtgtaaagtgtgcatgatccttaaaaagacagtatttcttgaatgtcttaggaggtagacttaatggtcttgaagacctgctctagtcataacatcctgattctatgggttttttggtaagaacttttaatggcttatacaaatagagttacagatgrtggaatctcaggatggcagggaatatatcttggagcatgaatgsctccaaccaactrcatctttttaarttttacttggawaaactatcaaaatatgacacctgcagccccagagatatgtttattttacagttaacaaaagagaaggcaactgtttctgaaagtgactgttttgcttcaagaatctcaatctaaatgtatgtgtctcatgggaaatggagaaagaatatatgctatggacatctgttttatttttattgcatttttgccttttttcaaaataaaacacatcattggaggagtttaccattcccatttccatgtagcttctgataggctgtatttaagtattttgac

SEQ ID NO: 3847 - DNA, 600 bp, Bovine  MMBT18917
catttgattattttggactgcctttaatataaaattgttagtttggcttattctgtgsaatcagtatctaaatgggatttgacttttaaacattttgaggggaaagtaaaaggagtttatactaccttcayttacttgctttttagttcatagtttatggcttattgtacaatgtaagtcaattgaaagtattgtcrttatagaggctgacaggatagttctggctgggacccacagaatggttgtaccttgtgaagaactgagatctggggttctcactctyaactttgcacatttagraactgaaaaatgattaggctttttggggagatgatttatattaatcagactcacaaaagacttactcattcactgtcagtccatttgacatactttcactgaactgtgtgctggcagctcttatgggataagttattctaagccccaaatgattttatttggccttagtaagaattataatcgaaatcctaggccacaactttcaaaaatacttagttagaagactattgacactatgatacactcagaatgcagagtttgttatttttattttattttgttttttattattttattttg

SEQ ID NO: 3848 - DNA, 600 bp, Bovine  MMBT19430
cttcagaaatctattcctagaagaagtgttatgttcccatttaaatggaaaaccggaatcacttgttataaaaagaaggatatctaataaagagtaagagaacatcaataattaatatgtttagtagttgctattgcctggtgaaggctatgagcctgaacctgtttttcttttgttaaaaagaaatcttagtctaggagagctaagagaggtggtaaaggttttttatctccaacccaagactttctctttgatggaatcacagtgattgaaaacaggattgaaaaggaacttagcacrttgtttaatgctgtgcttgctggactaacaacatcagctgtctggtgtggtgggtaccttgagccataagatgtggtcgtgacttgctcagcccctgctaattcggtaggtgggtgggcacgaaagatgcaagtcttcgctgctttttttcattgtaactgaatcgaaggtgttgacagggcacttgtaccttcttgaataattatgcaacagcaaatatgccaaaattcttcctgctgcatttatagctacagctttgcagggtgttaaaaaagcatggcgtgctaccagttatggtgt

SEQ ID NO: 3849 - DNA, 598 bp, Bovine  MMBT20778
  misc_feature (1)..(82): n is a, c, g, or t
nnnnnnnnnnnnnnnnnnnnnnnnnnnnnnnnnnnnnnnnnnnnnnnnnnnnnnnnnnnnnnnnnnnnnnnnnnnnnnnnnntcctaatatacttttaatactgaaattggcttctcctattgctgctgggatacttccaagcaagctccccttgccaaacggccagtacgtttataggaatagttagctgaattctcatactctcactcttcaaggagaaaaagcacacctttcaaactgtgtggggagaaaccctcccagtggcctcttttttcttatcctgaattaagcattcctgrtcctacagaagccattaaaggcctgcttctgctaattcctatcagactstaataataatgaggataataataatgctgttcataatagcattgtaattagatctctggctccccagcaaactcagacttttgtttacaagtgaatactggcttcctttaacccattttccaagattgcattaactgttgtattaatgagatatgtttcatgatgcggttaggtgctaacccaagatttgataagagttaataaatcttttggagaaggcaatggcactctactccagtactcttgcct

SEQ ID NO: 3850 - DNA, 600 bp, Bovine  MMBT19233
agaacaaaagatacataacatgcctttgtttctgaaaaaaaaaaaatacattcagtaatttcctagtgtaacacatgtccagagaacacactgattatctttcaagtgtgttgtacttcaaatggcatgacctttagcctgtgaacctgaaatgatcactcttttgaacatcatgggcactratatcatgttctcctacttgaaggcacattaaccagaatgattcatccattcatttcattattatttatgcatgtgtgtgttcaaacttttgtcagttgtttccttcccattgactakgacccagacagtactgtcagtatgaatattttcatgaacaaaacaaaacagaatgcaatcactytgtttctgctttaagtaaagtcattcttggttttgttttgttattttatcaacaaaatgaataaatatatgatttataaaaaagaagttgatccaacatcttcatgcagttattctgtacatgagtttgtttcagtttcaacctctgcttattcaaatattaaactcttaagtctctggtcttatcactgtgaatcatgaaattatttcatactataaacatcaggaggatgaaaa

SEQ ID NO: 3851 - DNA, 600 bp, Bovine  MMBT21838
tactttggycacctgatgtgaagaactgactcattggaaaagaccctgatgctgggaaagagattgaagatgggaggagaaggggacaacagaggatgagatggttggatggcatcactgatacaatggacatgagtttcagtagattctgggagttagtaaaggacagagaagcctggcatgctgcagtctatggggtcataaatagtcggacagcactgagtgacagaactgaactgaactttctacagcagacactttaacacacataaagtaagaaaggaagtatgagaatatttrtataatgaggagatgttaataaaaccatttgaaacattcaaatacagaatgtactgatttgtaawctgtagagtgccttcacaattaacatacattcatcataatatacaatcattcagtaatattagtcatagctactgtaatactttggtactacttatattaatattaatatactaattactaataaactgtcataaatgaccattgtgtaaaatgatattagggaatattacctagattttgcatttgaatcattatttcacatcatctctggtattttaagtagatcctgactta

SEQ ID NO: 3852 - DNA, 600 bp, Bovine  MMBT22261
atacggcacaatgtggctacttgtgaaattttagggtaaagtttaacacaagccaagacttcctcactgatggatatgccttctattttcacagagctattacagaattacatgcaattctgtctgtaaattatttagttcagggcctggmacacagtgaatgctcaataaatggtagttttaaagaggggggcagygcagaacaagatggcaccaggtaccacctgcagtttaggggtgctggcctcagcatcagagcgtttgtacaacaaatgaccatctgygttgtgctggggatasggtggtacatggaataycaaacaaatcaaaaggtccccatggacctttttcttyaataagttgggtcttaactcagaaaagcagaagaaaaagcagctccacttacgtgcagagaatggactggtcctcccgatctgagaacaaaaacaaamaagagccacgagttagaatcagctctgagttgagggtcaggacatgctgccgcccagggctcccatttaagctcacacaccctggcccctctgggggtgacaaggggccagctgagctcattgcccagggcataggggacaagrccaa

SEQ ID NO: 3853 - DNA, 600 bp, Bovine  MMBT22259
gagagattttcctgaatactgaaaatcctctgagtgattctaaactgaatgtcttctgactatgtatccaggtcttcaaaaaaataatgatacctaccaccaaatacggcacaatgtggctacttgtgaaattttagggtaaagtttaacacaagccaagacttcctcactgatggatatgccttctattttcacagagctattacagaattacatgcaattctgtctgtaaattatttagttcagggcctggmacacagtgaatgctcaataaatggtagttttaaagaggggggcagygcagaacaagatggcaccaggtaccacctgcagtttaggggtgctggcctcagcatcagagcgtttgtacaacaaatgaccatctgygttgtgctggggatasggtggtacatggaataycaaacaaatcaaaaggtccccatggacctttttcttyaataagttgggtcttaactcagaaaagcagaagaaaaagcagctccacttacgtgcagagaatggactggtcctcccgatctgagaacaaaaacaaamaagagccacgagttagaatcagctctgagttgagggtcaggacat

SEQ ID NO: 3854 - DNA, 600 bp, Bovine  MMBT16644
aaaatataaggccaaagttaataatgcaggcaaaaattattagagtcctgcagagcaatcctaatatttgcttcagtagccaaaggaaacccaatatgatcagcacaggaattttgacctggtctgttttccaacctggatcagttcaccaccccctcccaactttagacaacaggtggttcccagctcyccagaggtcatcatattactgctgaacttaatgccaacacctaatcacacctatagcccagaactcctaggttcaagcgttccttctgcctcagcctcctgagtagctcygtatacaggctgtaccattctgcctaacagtgaaagagaaaaccagataccagttattaacaagttcatggaatctagaaaaatggtatggatgaacttattagcagggcaggaatagatatgcagacatagagaaaaatgacttgtggacacaggggagaaaggaaagggtgggaccaactgagagagcagcactgacatatatgcactaccatgtgtgaaatagatagctagagggaacctgctgtatagcacagggagctcagctcagtgctctgtgatgatctagagggaagatag

SEQ ID NO: 3855 - DNA, 600 bp, Bovine  MMBT05218
ctgattttaggactggtgttgccctaggctcccctgagcagccacccacatggtgagcagttgtcctacttttcaggattctaggcatcctgtgcctttgcccaggtaatcctgcaggaccagtagggctctgggattctagatctctacactggtacagccactcacagagagggcaggcctcccaccccagcctccctgagatgtgtggtgactcaccagattgtaggtaaacactgtcccaccccactggctaaacactaactttaacaattagattcctgcttcacaaactaccartggggttaggctagggatcacaatgtcaatcactttctttctcaatttgagaagaaaggggaaattccttgcaaaaggaatgcaggtataattcagacaktgtaacgttctcttcaagacaacagcagccactctctagatgcacagaacattttatgatttatcaggaactttcaaagacaggatacaatttgattgttacaggatttatcattattcccactttatatataaagaaatcsagaggcccattcattaatataataaaaatcatggctctcatctgggcacatcgccacg

SEQ ID NO: 3856 - DNA, 598 bp, Bovine  MMBT09575
  misc_feature (1)..(96): n is a, c, g, or t
nnnnnnnnnnnnnnnnnnnnnnnnnnnnnnnnnnnnnnnnnnnnnnnnnnnnnnnnnnnnnnnnnnnnnnnnnnnnnnnnnnnnnnnnnnnnnnnnctagttctgcacgtaatttttctgctagtgcttgtggtgtttcattgtggagaccctgaggtgtttcacatctgtgtgaacaagctgcctcatttcagcctttcctgcacctccgtcatgtaggagtgacccttgacacattccagattatataggctttagaaaacaaagttcaagtctctgacctcaactgtccaaatacayggaggcatgaaggcttgttgttggtgactagtgtgctggtttactatttttagaatccttttcatttctttatagttttttttttagccacaggcacccaggttttttgtttttttacctacatagttgatcagttactattcagtgaggctactagaacaagatttgtttaccttttgraaagtgcttggctaaagttgcttctatcagaaaggagaaggtagctcrttgctagaaacgatrgtgttttataaatatgaagtgatagtctgcatgctgggaattgctgattatctgg

SEQ ID NO: 3857 - DNA, 600 bp, Bovine  MMBT03270
ttgagatgaaaattgggcagggcagggggttggggggaggaggaagaggctgtctcttccaagaggttgagattaaaaggcatgtaacagtacaaatgttgcgatccatttttttcactatgtaaagagagcttggctgaagatgaaatcaacagagagggacacagaaatagagtgacaaacaaatagactgaccacaggacctcatttaagtacttggataaagctattcctaaagcatgaaaagaataacagaaattacataataaggtaaaatggttgatttcattaatattcagytattttggaaacaaacctatttgcagaatacagctgtaaacctaaattttgtaacaccacacatcaatagtccttgtatctttttttgtatgccatattcattggaattaaatttatgtactttacctagtagctcagcttgtaaagaatccrtctgcaatgcaggagaccccattcaatcaggggtcgatcaggagtcagaaagatcccctggagaagggakaggttacccaccccagtattctcatctggagaattccatggacagaggagcttggcaggctacagttcatggggttg

SEQ ID NO: 3858 - DNA, 600 bp, Bovine  MMBT07367
ctcccttataagccagtgttagctgggtcttttgcagtctgcatcttatctaatccctggttcttatggtcttgggagtattagctttgtaaatgtttttctacttttcagtcttaaagaggaatttctgagagaatcgttttaaaacttgtccactagaggtcactgttgggatacttttttccccccttcctcctcatctcatgctaaaagattaaaaaccaaattggtgttgttagaggacgaaawttttttgcaagcttctctcagggtatgatgttgctgccatttacataggcyagttttgccacaattaatgttgatccttccataaggaggtatgttatttttcttttgactcccaaacttaaagtacatgttcagtttcacgtgtcatgtttagtgtttattatggtttctttctcatgttagaaactttccttccaatctctttaaagtgagagaattctcttgccttttatgtattttttttgtatggagtatacataaaatttttttctcccttggaagaaagtttaaaatatatatgtatggaaccagattttaattaagaaaaaaagtgtaatactcaggaaaata

SEQ ID NO: 3859 - DNA, 587 bp, Bovine  MMBT07774
ctgtgcagagcccgtttggtggcagccagacaatcctctggactcaaacggaaaagtggtagtaagttctgcagtgagctaagagcctttatgatggtcatgccatgccagaccacacgccgatagggtgcccacagtgccacctccttcagcttcagctcttctaggtcctctaaatgggcatgcagctgacacagctccgcctgggccctcaccacgtctcgcaggaacttggctggtttctgacgccgtgggccctggagcagtagcatcgtcagcagccgctcctacaaacagttmcttattgcatggayctggtccttctccacgtagatccccgctcagtgacattcatctccacccccatactgggccccatcccaacccacagactgaatctccaagcacctcaacagcccctgcagcttcccaggagtccaggaatctgacggtcaggtcccaccagtgggtctcaagctcaggacgctccgtgcataagatttcccgcagcatccgttcttctaggatttctgtattcacacccaggtccagcacattcagccccttcagcaattcacagcctagca

SEQ ID NO: 3860 - DNA, 573 bp, Bovine  MMBT15427
tttggtggcagccagacaatcctctggactcaaacggaaaagtggtagtaagttctgcagtgagctaagagcctttatgatggtcatgccatgccagaccacacgccgatagggtgcccacagtgccacctccttcagcttcagctcttctaggtcctctaaatgggcatgcagctgacacagctccgcctgggccctcaccacgtctcgcaggaacttggctggtttctgacgccgtgggccctggagcagtagcatcgtcagcagccgctcctacaaacagttmcttattgcatggayctggtccttctccacgtagatccccgctcagtgacattcatctccacccccatactgggccccatcccaacccacagactgaatctccaagcacctcaacagcccctgcagcttcccaggagtccaggaatctgacggtcaggtcccaccagtgggtctcaagctcaggacgctccgtgcataagatttcccgcagcatccgttcttctaggatttctgtattcacacccaggtccagcacattcagccccttcagcaattcacagcctagca

SEQ ID NO: 3861 - DNA, 600 bp, Bovine  MMBT07369
gcttttttatatggatttactagcctgtagggcccttttgggaccgcaccgccatctccaaagctcatttcaatcagacccacgaacgagaggtgaaatgataatgtttcaggccatgcaggtcttcagctcaatcttgccatcaagagattttcttcaatatgttatttgacttcatccactcagcacagaacaaatatttgagggatgaaggaagagaacacagtcatattttcttaagggtgattatcttttagctgagaatagctatcaggggaccgacatttcataatcaccacratctcctaataacttgcactgtggctaaatcagatttgctctgaaatgaaggattagcagagtttcaggtgctgagatagcaatttgatgtaagctgctattttctgcagtttaaaagaggtgagagtggccagtcgaatgcagaatgctgacagctgcttggaaatggatctcttctattggatgattctttcttgtatgcagaatgctactcacaagctacagacttagaaggtctaacggtttgcacagctccttagactgccatattgggactcatgtagaatttaaaccacactc

SEQ ID NO: 3862 - DNA, 600 bp, Bovine  MMBT13021
ttacaccagtacacatcagaattacctggggagctttctgaaagtacagatttataggcccctacaacctgaagtcctcaagtgattctgaagtatagccaggtcaggtgtagataacgaacaaagagtgtagctgaaaattgtcactaaaaacagagtattaactgaattatagtgacctggcaactgtattgtttttaaataaggttttaagcaaatgaaacaaaaattgaacctccctaaagaaaaacatacttttgattttaaattataaactgccagttaacatgcatttcactsattcgcttctttcttcctcatctttaaagattcagaaagttgtgaacaagaagttgagagagcggttctgccacagacagaaggaagtgtccgaggagaaccacaaccaccacaacgagcgcatgttgtttcacggtgagcacccgctgtcatcagctctgtgtttgcgaactccaggaaggtgaaaagcctgtggcattgattgtgttcgtgttgtgttaaaaatggtttttatttatctttttcattacatgttggtaccagctttctaaagcattacatgtatgggctttccaaggc

SEQ ID NO: 3863 - DNA, 600 bp, Bovine  MMBT20107
tatgaattttttcttggagcatcctttctgcttttaagatcatcattaataaatataaagttgattaaacttatgttccatagacttgaatgcagagaagaatgaaattgcttaaaatgtgcaagttctatggacaaaggattgtcttcagaggctgagagcagacytgtctctatatcaccagagaacctccagagccagggagaaatactataggactgttccattcttgattcctgcccayagcctgattatttgtgaaattcactaggattcattcacactgacaattctgaaaaraaaagagaagaatcttgcagacatgcagagtgggtgttgcagggagaagggggggcggatatcacatgttacagtgaaagtgaagtcgctcagtcgtgtccaactctttgcgaccccgtggactgtagcccaccaggttccaccgtccatgggattctccaggcaagaatactggagtgggttgctagttccttctccaggggatcttcctgacccagggatcgaacccaggtctcccacatttcaggcagacgctttaacctctgagccacacatgttaagggggtaccaaatgccata

SEQ ID NO: 3864 - DNA, 600 bp, Bovine  MMBT20109
ctattcatgtgtatatatttgaaatctctcataatttaaaaaattaattctaggtttatgaattttttcttggagcatcctttctgcttttaagatcatcattaataaatataaagttgattaaacttatgttccatagacttgaatgcagagaagaatgaaattgcttaaaatgtgcaagttctatggacaaaggattgtcttcagaggctgagagcagacytgtctctatatcaccagagaacctccagagccagggagaaatactataggactgttccattcttgattcctgcccayagcctgattatttgtgaaattcactaggattcattcacactgacaattctgaaaaraaaagagaagaatcttgcagacatgcagagtgggtgttgcagggagaagggggggcggatatcacatgttacagtgaaagtgaagtcgctcagtcgtgtccaactctttgcgaccccgtggactgtagcccaccaggttccaccgtccatgggattctccaggcaagaatactggagtgggttgctagttccttctccaggggatcttcctgacccagggatcgaacccaggtctcccacattt

SEQ ID NO: 3865 - DNA, 598 bp, Bovine  MMBT20110
  misc_feature (1)..(20): n is a, c, g, or t
nnnnnnnnnnnnnnnnnnnnagttggacatgatgaccacacacctgttaggtatatatgtgttctttacggtaacttctattcatgtgtatatatttgaaatctctcataatttaaaaaattaattctaggtttatgaattttttcttggagcatcctttctgcttttaagatcatcattaataaatataaagttgattaaacttatgttccatagacttgaatgcagagaagaatgaaattgcttaaaatgtgcaagttctatggacaaaggattgtcttcagaggctgagagcagacytgtctctatatcaccagagaacctccagagccagggagaaatactataggactgttccattcttgattcctgcccayagcctgattatttgtgaaattcactaggattcattcacactgacaattctgaaaaraaaagagaagaatcttgcagacatgcagagtgggtgttgcagggagaagggggggcggatatcacatgttacagtgaaagtgaagtcgctcagtcgtgtccaactctttgcgaccccgtggactgtagcccaccaggttccaccgtccatgggattctccaggca

SEQ ID NO: 3866 - DNA, 598 bp, Bovine  MMBT20925
  misc_feature (1)..(145): n is a, c, g, or t
nnnnnnnnnnnnnnnnnnnnnnnnnnnnnnnnnnnnnnnnnnnnnnnnnnnnnnnnnnnnnnnnnnnnnnnnnnnnnnnnnnnnnnnnnnnnnnnnnnnnnnnnnnnnnnnnnnnnnnnnnnnnnnnnnnnnnnnnnnnnnnnnnagaccgcagttctggataaagcccttgaatgattaaaccgttccgtaggacatggtctttaaacatttttaaatttgtttcaagattcttttcccaagaaatgattttttttttccgtttcgtgtttgcaacacgttgatattttgattttgaaragttacagtttgatttaggttgcggttttgccaaagttgactaccttttataaggccacaaaaagcacaattctgccctgtagttttagatgtgaaatggatgggaggatcggaaacttagtgtaactgaacttcagccagaaattttcttttcttgccggcaagttctattgtggccccaaggttagacagagtattgctatgcacaactaatttgtgatctaataaggatgaaaaggagccatctgtccccttggctgaaaggtattaatggtttctatgggcttcactatggaat

SEQ ID NO: 3867 - DNA, 600 bp, Bovine  MMBT20927
cttctattggatgattctttcttgtatgcagaatgctactcacaagctacagacttagaaggtctaacggtttgcacagctccttagactgccatattgggactcatgtagaatttaaaccacactcttcagatctttaacctggtgatttgggctagtagaaatttgcagtttctgattttcagagatttccgaagatgtttgagttttctctggatgcagtactccttggttcataggaaaattaatttctcgcctatatgagatggagacaactttacacactcaaataaacatgcrgtagaagagatttcttccatatacttgcttttgcttatagagcctccaggattcataaacctcagctcactttttattgtagacaactaagaaaattttagcctctatctcttgaatgaaatgggtcttctgtgttataaatgatttagtgagaactaaaaaatatttatttattcttgactttgtgatatgatgcaagtgatggggagaaatgaaagaataaatgcttcttttaaaataaaataaccctcaataaaaagagttttgagttttccttcccacttttcacatgctagacat

SEQ ID NO: 3868 - DNA, 600 bp, Bovine  MMBT13818
tgtattttcacttatatctgagaccaatgactgatgaaaaatactttcatgaaaatagaagttcttttgctttatttcttgcacagtggtagtcataatattgtataacatataattaaattcacttttaaaacaaacagtagctgttattggggtaaatgtagcccatgctgctcttcttggtaaggggggtgtttaacggctgaaaaacttttgttttgaaatgtgcatgtgaaawgttaatccaaacctctgaataaggtgtttgcagatgtagctagacactataakacacatgcyacatacatgaagacctgtggtctccatttataggcttgcatgcatacttccaaaacactggtttgaagaacaygaggagcaaagaaaggaggtgaaagaaaaaaaaaagctcatacaaaattcttgagtttcctggaggcaacagcagctccttaaataaagcaacagatcatgggcagaagtttctacaacttcccagtgatagagagatacaatggcttagcagtaaaactcacaaattaaccgcatatgcagaaggggaacacatcctcaagagtattaggattaatgatccgcaag

SEQ ID NO: 3869 - DNA, 600 bp, Bovine  MMBT14352
agagaacagggtttctggggctgcccgggaaagatctgagatactcgggacaggcccctggggacggggggtgggggggtgtcacctggccctggagcaaaatctccaggtttggtttccagcagcagaagaggcctcctcaccctggcctggggctgtgggctttccaccctggagaagcttggaggacggggcattgtctccaaggggtcccatttgggggaggggctgggcaggacggcttgaagctgtaggccagactagggatctgcaaaaaaggtctgggatagagatgggcaytggggtgaagtgagagaggctgcagraaggaggggagcagggctgtcttttcccgtagggcctgtaatacagctggaattgagaggcctgtgggtgtaggcytcagcggagggagagcacatcctcggagagggtgggaaagacaggaagaaagccgtggagcttgcactgcccttctcccagcacagcaggcagcaagagagcaggcggagttcacttgagagggggagagagagagagagagagagagcgaaaacgacaaggagacaaaggagagcagggaggacccaggccactgtg

SEQ ID NO: 3870 - DNA, 600 bp, Bovine  MMBT09233
gtcagcaagtccatgtaccttcaaagatagtcaagtagcatatggaaagtgctaaaggaattcaagggaggaatgattactaaaggatgatgtatatagtaaaactttagagtgaaggtcgcctttgagctgtgctttgaagatagggtagcatttagataaaagatgaaggaaggagaagacattttaaataggagaaatgactaagagggtaggaaacacatgtgttatatggggaacctgagcttaaagaacagaaggctcctttgtggagtagtacaaggaaaggttgaaaataasattggtggtaagtctgtgagaagatagaatttcaggctgaagaatttgatcttattctgaaatcagaagacacctattaaaaaatcttgttgggtagtgttggtatgtaaatgatattttagaaaggttcrttagcrttgttgtggagtttcactgcaaggtggagggatccatatggttgtcatgcaagtgtatgtgcctcggtttttgtctcatcacaacaaagatttggagtgacrgacattaaagccccctcgacgtgtcacagctctcaggtcttggatagaccatgttatagct

SEQ ID NO: 3871 - DNA, 600 bp, Bovine  MMBT02520
cttgataggcgtgcagggctcggcttcttgtggcaggaaggcagatgtggaaggcagaacagctgcggactggtgccgycagcgggtattgttttcgtcacaatttagtcaggccactaaggctgtgaggaggcctttgtatattaggctctggttaatgaaaaggtgaactcactggsttgattccctggagggcgattaggagggagatggttctccttgcctttacgtagtcctgagggaacagaggaaccaggagcaaatccaagttcccatggagccaagggacttcctgttttrtaagtaagggaaagatgccctcctgcaaacagtgaattagaacattgaggataatgcagtttttgttctcctgttgattctctaaaatcccactaagaaactaggaatttccttgtggttccaggtaataacagtaacaacggttatattttattcagcaccagttgtgtagcaactgattggcaaacattatttttattttttaagattttatcgaagtatggttgatttacactttgtacagcaaagtgattcaatatatgtatatatatgtatattattttatatttgtttccatta

SEQ ID NO: 3872 - DNA, 600 bp, Bovine  MMBT21366
gaggttgcctctatgagaagtgttcaaaggaattgggagagttcacccagggaaaaaagcagatttgggagggtacaatccatatgttccagactccacagggatagagaaagagatttctatataatgtaagcctgactaaaatgtcccctttgaaccaggctggggacttccagagccttgctcctgcgatgcaggcaagcactcttttacagtcagacctcttgagattctttgggggaaatgccataatacattcctgtggccctggagaccgaactggtacaggtctcagctgcrtctcaagaaggaggttttccaggcagagtggcccctggagggagtgagctcctccatccctgtgactgtgcaaccaggtgctggctcccttccatcgaggaggccacagatgggattcttaccctgggaaggaattaataatagccaccatttatttcrcctcttccatgtttcaagctctgaactaagcatattattttcattgcttctaaccctcaccacaaaccctagcagtacatrtgacccatttcacagatttcacaatctgaggcccagaagtaaaatgacctacccaaggtc

SEQ ID NO: 3873 - DNA, 600 bp, Bovine  MMBT01018
tttttttctacatgacagcaccactcagtagggacctagtaattctagtcatgcagttcatcctcttgtaatatgaagttaaaatcaaattcaggcaatattttgatacagcaaatcttggtgtagttgtaaaaacagctgcaaaattagcctaccaagaatattttaactttatttctctttcaaattctcagttattcctttcttccattttattgaataaaactattccatttgagaaatacctgaatgcagatttaatgtttacacatgcactgccttgaatgatatattgacacrttttaaagatattttttcagtgttctaaaaactgcatatttgaaaatgtgattgaattttattcaactatttgagtttctaattgtggcatatttagtttgcatattatgcatttgctaatttctttttggggagttttctctactctattgtatacaatattggtaggaaaataactggtttatggggttcatttttcctccctccagaatccccagtacaggtgagctgaackgaccaatatttgcttgactaggcagactgtctcctaggacttcataacttgtgaaagtaacataa

SEQ ID NO: 3874 - DNA, 600 bp, Bovine  MMBT10721
tacatagaaatcctcaggctttcccttcctctccttcctcacactgtctcccagtccactaaatgtagtacaaacttgtattactctctcttccagactagggtggggagtgtggagggtggttgtacaaacatctatagaacatactgtcttcccttgtgttgtctaagaagaagactcccttccacacacacaagtcaagaatttgagtgccagtttatttgggaggtaaacctagaaaatatcagtgtgggtatgtggaagtgacaggaaggggcaggaagtcaataaagggtatgstcttgccaagaagttatcagggtcatttattcatttatttaaaataataaatgcttccyggagaaattccagaaaaaaatatatagtgacaaaatgtgaagggtctgaggttctgccctacttgtacgctaytaagttagcctgccacagattcatactcatggaagctggcagaagacagggctggaggcaaaggaatgtrtcatttgtggcacagctggcagcccctrtatctcacaggacaagggagaatggcccaggtggatgctgcttatacagtatttatcaccaagtcccatc

SEQ ID NO: 3875 - DNA, 600 bp, Bovine  MMBT14310
ctttcaagtacttttgtactgaaatttggacttggagactaaaattcacactgctgctgctgctgctaagtcacttcagtcgtgtccgactctgtgcgaccccatggatggcagcctaccaggctcccccgtccctgggattctccaggcaagaacactggagtgggttgccatttccttctccaaaattcacactagtgatacacatttgagctgacttccactgacatgggcttgggggtcattggaaagtgtccaggcaggggttgaatgcccttcctcagaaatgctgccaggagyttcctgtccagggtgaatgctggatgagatggcctcaaggtctccatccatctccaagttgctgataaatctctcctcatgtatcactggcttgtccgtcctgcggcacatatcttccagatgttgggagagaagaattgagtagtcattaataaaaccacagctgccaactctcagttttatttgatggatgacagagatatttccaactcatctttcttcccagttttaagagaagagggataatgaggtacaggctaatgtggggaggacaaagatgggaacagggtgagagccagg

SEQ ID NO: 3876 - DNA, 600 bp, Bovine  MMBT19726
agttaggagactgaggaaaagactaaggcaagaatacaaggatgttcaatcacaatgtacacacgtatctttgcttttctatgccttgtgttatatatctacaaaattagaaatgtagatgtgttggactgaggtcccatctcgtcaaatattggaagatttcagcattcagagaagggagaggatcaaaatataaaaaatgcagatactgttctggctatggcccaatgcctggatmtcctatgatagcatacttcttaaacctggccctttatgatcaggccaacctgtgttcaaatyatgactctattattctgttactaactgagtttgaaaaagttaccaatatctctcagctgggatttcctcatcatggagatgatagtagtccattccttatggtattttttgaatactcaattacataatacacttaagtgttagtcactcagtagtgtcagactctttcgaccccatgaactgtagcctgccaggctcctctgtccatggaattttccaaacaagaatactggagtggatttccatttcctcctccaggggattttcccaacacagggatagaacccaagtcccctgcat

SEQ ID NO: 3877 - DNA, 600 bp, Bovine  MMBT22450
tcctgtgtgactctggaccagttccttcaactctcaggacctcaatttccrtatctatagaatggggatattaaaagatagtcttcaagctcctttccatctcggggaaagctgtgaccctataattcaactctgcctactctgggtacccagaagcctcgcctggagataaacacacaaagaagtaaataagcactaggatgcctcyagctggaggcaggctagcraatgtaatttctctggccccagcttgtcctagtggtcccagtcatccctgtcctaaagaagggtaagagtaaycaggtgtggcagagaggtactgtccgatgcactgtcctctgagagctgacatccagccttttttccaggctctcgtgtcctagctctaggctcaggcagggtggggaggtgcacagctggcttgcttccctccagccagtccatggatagtggaccctatttcctgccctgtgtagcccccataccatctgatcttgccatccagagaagacagtgtcagatagcccaaacccaagtgggaaaggatgaggactgctggtggagagcaagcccacagaccaggcactgccctgtctcaga

SEQ ID NO: 3878 - DNA, 600 bp, Bovine  MMBT23202
agcacatcctcggagagggtgggaaagacaggaagaaagccgtggagcttgcactgcccttctcccagcacagcaggcagcaagagagcaggcggagttcacttgagagggggagagagagagagagagagagagcgaaaacgacaaggagacaaaggagagcagggaggacccaggccactgtggaccagataagacaccacggccaaagcatgggcttagcaccaacaccatgagggttagaggcctggtactcctgctcgttagccaagtggcgttggggtaaactgcttgarcctrcacctcagtttccccatctgtaaaatggagctaatgatgctggtgttaccagcctccccaggcagttgtgatctcataatatatgtgagagaggataaaaaccctaagcaggacatcaccattagatgttttattattcttacaaaatattatcagctacctcttcccacttcaatttcacaaaagtctcaggatgtgggcacagccagggttattatgcttgttttatgaatgagaaaacaaaagcttagagaagtgaagtgatgtgcccaaggtcacactacgaacaagtggtagaga

SEQ ID NO: 3879 - DNA, 600 bp, Bovine  MMBT07217
tctaaaccctactgttcattctaggtccttcctcaaattttagccttgtattttaaaccactcaattgtcattctataataagcacactgctataaaacttcttctcttggtggtctagatgttaagtttagccttccaccctgagatttcaagcccactgatgcccacttgaggtccctaccatggatattctcaagtcatctgcccatctcagtcaatcagtgcctgtatatgcccttaacagaaattatcagcatcctatcccggtgtattcagtgtaggaagagctgtattttagrtactgtcacaaaggaatgagtggaaacaaaagaagctaacattttatcaacccctaaactaacccacttgtgatctgagttcatatgtaagttgtagttcattttagttaagcccatcttcatggtaactggttaattttttgctaaagtgatttatatccatttcctcttataaaatcatctgcccctcccataagtccttttaggcaattttaatccccawtgttttctcttgggacctatttccttcggctttcatactttctggtatactgaaatagtaagtaaagcttccaaaag

SEQ ID NO: 3880 - DNA, 598 bp, Bovine  MMBT13972
  misc_feature (1)..(54): n is a, c, g, or t
nnnnnnnnnnnnnnnnnnnnnnnnnnnnnnnnnnnnnnnnnnnnnnnnnnnnnntcagaacggtatatacatcttgaaatgtatatacaccttgacctagcagattcctcttcaaggtttattctttggatagaaatttggtaatatcgatcaaagtttaaagtatacataagttttaacacagtaattctactttataggaatttatcctagaaaaaaatatatgtactcatacttgaatagaatgccatatgaataatactatttgttccagctggcttagtgaaagtttaaagattstaaacaccttaaatatccatcactgggagactggttgaataaattacttcccacagtattctgcaatagttaaagagaacttaaaagatccatatgacctgatatggaaagatgtttatgatgcaagttgtctgatttctttgtataaaaaaatacaaggtatatatgtgcttatatagtcagtagaagcttctgaaaagatacacaattaaccattaacagcagtttcttctctagggaatgtaactgaaccattgctatataaacattgcttccaaatgacaaatgtgctcattta

SEQ ID NO: 3881 - DNA, 600 bp, Bovine  MMBT18196
ttattcattgttatgctgcagcatcaagatctgtgctgrcacacaggaagagctcagtgaactcagtactggctgaatcattattagggttaatctttatcatctaatatagatcagaaactgtttgccagcctcctcatcaagtgtgtggtccagttggaactgatacagaccatcgacaacatcgtgttctaccccgcgacaagcaagagggaggacgcagagcacatggctgccgcccaggtgagggcgggccggagaagagcgtccttgcccgtggggaggttgtccgggtgcggygatgtgctggagccaccttgggttggccgccagagcccctcacgctcacttccccagccctgtgttcagcgacaagggtactggtcacttaatactggccgtgacgggagtgtgtaccccacagaaatcaccaagcactgaaaatcagcctttcccagagagccggtttaccagcattgcactgctgagattccaccccttgccttggtgcttcaaaaaaaatgtgttattaatcatagggactgctccttatcattgatacacagttaacccgtaactgagaaggaaaacttaagtggc

SEQ ID NO: 3882 - DNA, 598 bp, Bovine  MMBT20177
  misc_feature (1)..(112): n is a, c, g, or t
nnnnnnnnnnnnnnnnnnnnnnnnnnnnnnnnnnnnnnnnnnnnnnnnnnnnnnnnnnnnnnnnnnnnnnnnnnnnnnnnnnnnnnnnnnnnnnnnnnnnnnnnnnnnnnnntgaatgaataatggaatgcactaatgtgagagattgtgaaattttcttcagtagagatctaaaaaattaattgctaaactacttcctgggctcttccttaaagagtgtccaagttcatgaattggccaccaggggtcaccagaagaattgaaagggcttctgaggcaaagccataatttcctgttcasgaagaagagggcaatttgtaattctattgttaaagagacttctcacttaaatatttaggattcttttgtcccttcttttatatttaaartttccttgtcccttatttttgatcgtcagttcttgctgcactactctgacctatatgtcattggtagatatttttctttttaattaaatatataaatgcttttttgtaaggtattattcacatttcaaatattagcccatcaccaaaggctgcctttaagtattcagtctaacatcttcctgttgttcttttatattacccatttcttt

SEQ ID NO: 3883 - DNA, 600 bp, Bovine  MMBT20920
aactgcatctcygtagggtcagatgggatggggacggggagtrggggagaaagtgtgttgggtcagatatggggtcaatgcagaggaagtgagcatttcagaagcagtcccaaccagaacatttcctgccgattgatgccaagttatttggaagaaaggactccggctattttagtttataaacccttgataaaggtccttgaagggrgtggctaaatcttttagccattcctgagtagagttggaatttattaattcatgtatctaaaaactaaagtmcatacaaataatggaattgtyctaaaataatgtttaaataactgtttaactttgctcaaatatctaccttcccaagagcagtttgcttaactaagtaaattgaccctggtgccttatgaagagcctgagcagctcatcatctgattccaggaatagttttccagccactgaattatgcatatttatattcagaaaagccattcccagcccctctccgtggtgactcactatcttctgttctcagtcatccccagcttgttagaggagatggtgtttctgaatggtggaaacgtgggagattaagggtrgatgagtgaccgg

SEQ ID NO: 3884 - DNA, 600 bp, Bovine  MMBT22122
tgggacatatgaatctacctcacgggattctttgaaggatagatgatgtgacattttgaaagcatttggtaaactataaagcattatataaacgtaacttttccttgtactggtcaaatgacagaattaggcagggtgtctctccagcacaaatactatataacttagttatcatttgtgatcacctagaatgttccttgccagactaaaaagtttaattatacactaaatggtaaccagctgctttaattaygccatttccttacctctcagcagtgctccttctcatttatttccttkctttttaaaaattgttttattgtaaaagtagtgcatagtccattaaataagatttagcataatggagaaaaggaaatgtcagccagggtctcatcacccaaacgcaaatactgtgttaacattcctgtgcatttacttccagtttttttccccccaatgcagactttaaaaaattggtaattgcatttccaatatatatacaatttttatcctgatattttataatagttttaacattttatatatagcatgttatatttttattttacatataaaaattcaaatattgtatctgaaata

SEQ ID NO: 3885 - DNA, 600 bp, Bovine  MMBT22313
acaaaagatactttctaatttagatgaaggaagtaaaataaaacctactttcaccacgagcaataaatgccgcctcttgcgttttatcttcttttcacagcgaggcctgcctagtggcctctgaactggaaggaggtaaggaaaggaagttgatactttctgaggccacctatcttattatccatgtttgtcagaagctggactgaggagggggttgcttcctggaagaccttgacaggctaaggcagtgacaggcagattgccagggaggttgggaggccttgccccaaattgaccacstctctttctcctttgatcctagtttgagagcctagagaaaggttttgggaggtttcctactctttaactgctcatatctctggttaattgcacccatccccactccactcttttcttccagtgaatttgtatctatagtgcttaaaacttaatgaagaagaaaaatcataattcactaagaaattaattcaatttgwttttaaagctctggcagcttgtgatatgaccgtacttgcttttcttctttgaggattgaactttgctcttgggcatagctctatttagactcttctcaccact

SEQ ID NO: 3886 - DNA, 600 bp, Bovine  MMBT02165
tccactgagcttcaggttatactgtatgttagtgtgtttgaaggagaggagagggccagaaaaaatgctctcatgtgggatgtggagaaaggtaagtaaaaccgtatattcatccagctttcatgtaggcttgtaaataagtagcccacatttaccagcccacatatatcttacgacttgtcagatgctatgtaacaactttatagcaagattgaccacataagccagtttttctgttttcttagttatttcatgccctaagtatggatttcaaaggacttctttacataaccctggccrctgtaggattaaactgaaagggaagagtagaggatctgattcatgcttcagaaggtaaaaataaagaaaagtgcagcatagtacagtaaaaactctttcagacttgacagcaggaaatcttagtttgatcctaaatctccaataatttgcaagtttgagttatcttggtttctcacctgcaagatgagcacacgattattagctttgtgtaccttgcaggcttgtcaaaaaaaatgaaaaagaaaaaaatggacatgacatgatcctgtttgattatgcatgtctaacaaccagtaggca

SEQ ID NO: 3887 - DNA, 600 bp, Bovine  MMBT07468
aacctcaataatgatggtgaagcaatattaatcacagatacaatagaatttaggcaaatggcatttgggggtaatgggaattcactatcctaaaataattgtctgcaattatgagctggatgttcttgaatagcatagccctggagtatcaaaaccaatattgtatcaayatgcataaggcaaaagcgaacagaatgataaaaaattgcaaagctataaccataatgtaagattttaattcacttctatataaacagataagaaaattagtagacagagaatccaaacactatccccctkcataatctgataaataaatataccaccttggaatcattgttggggcagttctctgaaaactctggtgsacagccaggctggcacttctttctgatggagatggctttcttggtaacagaagacaaaartcactgtccttcaaaacctaagaagtaatggcactgacatgaagtaactagaaacctgtctgggtggcaggctaagtgtcatgttctgggttagtgctctgagcctcaggattcccatctggaaaatgggcatgggaaccgtgtgtggtctgctaactgggagtacasactg

SEQ ID NO: 3888 - DNA, 600 bp, Bovine  MMBT08283
aagctcttgccgcactacagcaaggaagaggggaaataaacagaagaccacagaatcagagttgaaaagacagtaataaaaatctgggaagtgtgaaatagctgtaatttgtaaaaccaaatagagaagaggggagagctacgctaaaaggaatatggagttatagggraaaayattccatcagtctacatacataggggtcccctaacgtctttgactgaaggctaagctgcacatgagtagagtcagatatacggccagaccaaaacacagctgtgagagtcaagttctgaccagtaragtagagaatagcatcaaacattcaagacattcagtaaaaacacaagagttgaagtctcaaaaagatgagctgaaccacaagtaacttacataactttaagtaaaacccactgtctttaaaggaataaaacagaatccagatactcaaaacacaacacaayagtgttcrgcattcaataaaatattatatgacataaaatcagaaaaaataagacctatatcataagaaaaatcaatcaatgcaacagatccagaaatcatatatgacagaattacttacacatggactgtgaattataa

SEQ ID NO: 3889 - DNA, 600 bp, Bovine  MMBT12536
ccaactctctgctgaccccacacaacaatatatgagttatgccaacagactttctactaagttatttacaaaatagattttaattttagtaactaattttatcaaaattgttagaaaaataaaagaatatatttcataacacaaggaaattatataaaattcaaacttcagtgtccataaataaagttctattgaaacacagtcacatccattcgtttacttattgtctatgactgcctctgtgctacaatggcagagttgatttgttccaacagaaacctatgatcatcaaaacctgartatttactatcgtgccctttatacaaaaaatttgctgatgcctggcctgaaagtaaaagtcagtcgtgtccaactctttgcaaccccgtgggctgtaacccgccaggctcctctgtctgtggaattctccaggcaagaatactagagtgggtagccattcccttctccaggggattttcccaaccaagggatcgaacccaggtctctcacattacaggcagattctttatgatctgagccatcagggaagcctggcttaataggtttaaatcttgtaaccaaaacaaataacaaacmaac

SEQ ID NO: 3890 - DNA, 532 bp, Bovine  MMBT14243
ctgttattcctaagcagctagtcttgctgatgggtggaaggtggaaataaccttgcctctgttgctaaggttattttgagctgacttgtgttaggctggcacccatcatttgctttgtctgcaagggacaactggaatcccagagagagagagagagagtgtgtgtgaatgtgagtgggaggaagcgaaacatttagttttggtattggcttgatttttctgtttcgctgttgacttggcatgcctggctttttcattctgcttttaagtatccagaaatcttcaggtctgtgtgaattrgaaggtttggatttaattgaatttcatttggcactgtgggaaattaactttaggtaagagttactttttrggttggcttaatgggaaatagatggggaaacaggggaaacagtgtcagactttattttggggggctccaaaatcactgcagatggtgattgcagccatgaaattaaaagacgcttactccttggaaggaaagttaggaccaatctgtgtgtgtgtgaagttg

SEQ ID NO: 3891 - DNA, 427 bp, Bovine  MMBT17069
aggagaagagaagactgtaaatgctaaaccattttgtttgtttcttaagttgttgattatcccacaaggttggtgtgacttggaaaaacaaaaggaaatctagaacaatgacttcttatagaagtgtccattgtatcatagatgtrgttcagaagaacagaacattttaaagtcttggcaagtgccatgggctttaattaaattggattactttaattaaataacataaagagacatgctgctcagttttcagagtagcacccctgttcattcttactgagtctagatgaatttgaagarcagatcaatttccttttatgcaactgagagtatgaaatatctgtggggaattcagtccatacacccaattcagaattttaggttttagagcagatcacaatgaaaaatggggacagactctttggga

SEQ ID NO: 3892 - DNA, 600 bp, Bovine  MMBT17801
tagagaaagacaaatttttacttaccttgataattctgtcttttgcttgtgctcggtttaatttagcctgcttcctggattccatggcaactctggggcttgcagcctatggctatggcatccgatatgaatatggaatcttcaatcagaagattcgagatggatggcaggtatgtgactcatatttttaattttgtcagtaaaattttgccttgatgttctggatgatttataatttacagaatttaacagagggcgttactaatgtctgtagcatttgattgacatctgtgaattctrtcagtcttcccactttgcgatataagctccrtaagagccgagagcctgccagtgtcaccagtatcattcaccaccagatctatagcatcttttacagtgccagactcataaggatgctagagagtcatgaagatactygtcaccgagtacctgaatgcagaccacctgtaatgggcagtgtcctatctctgcagcatgcaaaatggaggagcatgtcttttgactcatgatctttgccagtagcccttgcaggtaggaagcatgtcaccatttttgtaggtgagaaaactgaggctctta

SEQ ID NO: 3893 - DNA, 600 bp, Bovine  MMBT18514
caaacgtctctggtaaccagacaactgggcatatatacacagaaggcatgtctgggcttatacacatcgggcagctgagtggacgtagctcctgcccttttggaggtgacagtccgcctgtgtcctgaacggctccctccagctctccagccatcacctttccagtctagcccagccttcaccttgatcgccagtggcttcctgtctccaaccccacgaatgttcctcacgtgctcttctctacactgaaacaaggagcacagtttaaagatacaactctgcatttcttacgtctgagtygtcctgcggctgttcatgtctcggtcttgtgtttgtttcctctgtagcatcacagtctgtaattattatcttttaaatatttatttatttggctgcaccaggtcttcattgcagcaggcatactcttagttgaggcatgtgggatctagttccctgaccagggatgaaacttgggcccccttgtattgagagcacagagtcttagccactggaccaccacagaaatccctcagtctttattcatctgtttactggcttaggtaaaaacagaagctctgaaaattatggcaaattgaacat

SEQ ID NO: 3894 - DNA, 600 bp, Bovine  MMBT20948
tgtattatgataaatgcttcattatagtgtgataaatggtcttgtggatggatgcacagaatagggatacccaagggcacacagcagagagaactaatgcttgtcaagggttgaagatagcaggggcttataaactaagagaaggcaagttccctcaaaaagtgggacagtcatcttgaaaactatgaacgaatccattttcgagaggcattgcaggatcagtattaggaatatgggttttgaaatctggatgagtctgactctgtcacttgttgactgatgaatttcaaagcccctaamgtccttctactcccctttacaacgtgactttgcaactcctccagtcgagaggtaagagtctgcttctttactccttgcatctgattttgccatgtcgttttctttgtgacacaagcagaagcttgagcactgggctgtcctctccttgggttcctgggaccaccacaggcatgtcccagcagcctgttgttrgatcagagactattagatgcggcagagcgctcaggtttttttgtgagcccagcaagactcacggtagaatctcccagctcagtccacccagttgcttgcccacagact

SEQ ID NO: 3895 - DNA, 600 bp, Bovine  MMBT21668
ttcattatctctcctcctcccatcctgaacctccattccatccatcctgtatctactgcagctaacctgttcgtggttcaactacaaatgcactaaatgataacattgagggcatgaatctgccataccttctttaaattcccagttgttagaggttgtactataatactcattttrcatttcgctccagagaaaagaacatggaagctctccccttatgagatatcattgtcgtttcagagtgtggaaggagaacaccatgaaaaagccgtagaactgcttaaggctgccaaggacagygtcaagctggtggtgcgatacaccccraaagtcctagaagaaatggaggctcgctttgaaaagctacggacagcccggcgtcggcaacagcaacagttgctaattcagcagcagcaacagcagcagcagcaacaaacacagcaaaaccacatgtcataggtaagaggtgccctctacacaaggaagccccatatgcacagaatttggtttttttaaaagtatagtttcttagacagctggaatgtaatcattagatttaataatccaaaaaaattaatcaaacaaaaaacagtgacctca

SEQ ID NO: 3896 - DNA, 600 bp, Bovine  MMBT23126
aatttgagtgccagtttatttgggaggtaaacctagaaaatatcagtgtgggtatgtggaagtgacaggaaggggcaggaagtcaataaagggtatgstcttgccaagaagttatcagggtcatttattcatttatttaaaataataaatgcttccyggagaaattccagaaaaaaatatatagtgacaaaatgtgaagggtctgaggttctgccctacttgtacgctaytaagttagcctgccacagattcatactcatggaagctggcagaagacagggctggaggcaaaggaatgtrtcatttgtggcacagctggcagcccctrtatctcacaggacaagggagaatggcccaggtggatgctgcttatacagtatttatcaccaagtcccatcccccattggctggggctgttcctggggcattcattctgtggcatttccagcccactgatcatccaccatacttagttgccagagccagtcctgatcaaaatgtggagttggctttgattgacaacctccccttcctcaaactttccctaaggtgattctgtctccatcttccccaggagaagatgggtccacaccttcatgt

SEQ ID NO: 3897 - DNA, 600 bp, Bovine  MMBT03350
ggagaaatagtgactcaacaaaattaaatgacttacagaactcagaagtaattcccaataccttactttcccaacatataattaatttttctacaaaaatattacttaatccaaagtaatatagactttaaagacacctcaaatgggtttaattcctcaaggaccagtctgaaagggttccatcagatagtctgaacaatcttagttcaaccaaacagcaaaacaatttccaaaaccataggtaggtgatggatactgctttcatttcagttaattaaaaatatttgatccactatggtrcatctcagtgtaagatctttaaaagacaaaaattgattaatccatgcaagcttcagacaacacctaatccaaatgccagagcctgtgctcagatttaatcaagctctggatgttatttattgatctacccaaaaaaaggtgtttttttgttttccttctacaaaggtacttgagtaatgggtaagctatcaaaactagcattaattcctattatataatgcattgattttttgcaaacactaggtaggaagagactaagaatagtttatgctattcaaaatgtcaaattaaaagaattag

SEQ ID NO: 3898 - DNA, 601 bp, Bovine  MMBT05251
  misc_feature (1)..(1): n is a, c, g, or t
naatccagaaggattatcttctgaacattctagcttattcctccaagccctcctgtcaccctgctgtgctaaaaagcaagacatcagcacaggctttaagttgtgtgactgttgggatcaagtcagtgctatgtatttatttatttacgtaaggctgcrtcttacattttaagttcatgaaatcttcctatcttgcctagtaaatcaaatcaaaataaaattttcagcttgcaaaatacattcacaagatggcyctttttcacytgtctgatggggccagcctgaaattatttacatgtgygccactcacttcctgggtatctgtaacctgcttttaaataccaygctggctattcagttcaatatagcaaatttctggaccagctgcttcttctttcagtggctatttatttcaaagtaaacacattaacattctttgaggacaaggaatkaataagatgaaaattggaggaaaaaatcggtgcctttcaacaccagagtcagtcagtatgggttgaagtttatttctttacatatggcggtacagtagttgaagaatctagctttattctacttaattgcctttgtacctttgtggaaa

SEQ ID NO: 3899 - DNA, 600 bp, Bovine  MMBT01310
aaggatgtgtgggtccttccatggcctcttgacacccccccatagctgcatgcagcatcccttaccattctcgtcctcgatctcagagggccctgtgaagatgcggttggacaccttcactctcccggggggcccgaagtgggggccgtccactttgccctccttgcagaggcgggtcaggatctggctgggcttcatagggtcccgccagatattgtagccgtgtctgtgggaggagacgcatggcctgggtggggcttggggtgtggctggggcatccccaggtagtaagtggcccckgccagattccttaggttggctgttgccccatgtgagcaagtgagccctgcctyatgctccaggatcagctgagacacgagggctgctggaggctgatccctcctgccctgggctcgggccccacatgctccatgctcctcaaggacgagcatccagtctccccgagtgcagccgcaccatccccctgactatgtccactcctctggaacttcaaagactccctgaagaaactgacaaccagagaggttaaggggctggcccaggggtcacacagcctggaattggcaccagctggccaga

SEQ ID NO: 3900 - DNA, 600 bp, Bovine  MMBT11152
tttaagtattctttaacatctattccagtattcattcgatcatggagaaagcaaggtaattccaggaaaatatctacttctgcttcattgactaggttaaagcttttgactagcaaactgcagaaaactcttaaagagatggaggtaccaaaccacattacctttctcctgagaaacctgtattcaggtcaagaagcaacagttagtactggacatggaacatttgaatggttcaaaattgggaaaggagtatgacaagtctgaatattgccattctgcttatttaacttctatgcatastgcatgctaagtcgcttcagtcatgttcgattctgcgacactatggrctgcagcccaccaggcttccctggggttctccaggcaagaatattagagtgggttgccatgctctcttccaggtatcttcccagccagggatacatcatgtgaaatgccaggctggatgaagcacaagctggaatcaagattgctggagaaatatcaacarcctcagatatgtagatgataccattgtaatgacaaaatgaaaagagaacctaaagagyctcttgattagggtgaaaggggagagtgaaaaag

SEQ ID NO: 3901 - DNA, 600 bp, Bovine  MMBT19897
agaaagcctaagggaactgggcgtagtgcaggggctggcacaaccggaattcctatcctgcctttggaaggattaccataagcatctctcctcacactcacctccgaccttcatcctcactgttatctcatttcttccagaggcgccaaagaccagatcagcctcccaaaccagagcctcaggaactgggtcccctcaatggtgacacaggtgagtagtcagccctataaatgtcctctctgacatctgtgaggcttcctactttataatcaacaaacacgatatggctatttaattatytcctgrgattttacttcggttrctttaataggagtatcatttctaagatcagggaggtgatagttcttccctgatcctggctattgctaccacacctggagtgctgagtttatttctgaaaagtacattttcagaaaaatctggaaaaggagagactacagtgragaagaatcaggttgatgaggaatctggaaaccatgtcctttaaggaacaggtaaagaaacagaagatgttgcgataaaacacaacagttctctccaagtgactcacagagaagaaagatgagccttgttcagtgt

SEQ ID NO: 3902 - DNA, 598 bp, Bovine  MMBT04406
  misc_feature (1)..(210): n is a, c, g, or t
nnnnnnnnnnnnnnnnnnnnnnnnnnnnnnnnnnnnnnnnnnnnnnnnnnnnnnnnnnnnnnnnnnnnnnnnnnnnnnnnnnnnnnnnnnnnnnnnnnnnnnnnnnnnnnnnnnnnnnnnnnnnnnnnnnnnnnnnnnnnnnnnnnnnnnnnnnnnnnnnnnnnnnnnnnnnnnnnnnnnnnnnnnnnnnnnnnnnnnnnnnnnnnnnnnccctatgtgcatatcaaagctctttgctatgcgttttgtcactcggtcctcatgtcatgttgtaagggacacatttagaggacaaaatgygccccaaacttttagtagtttggtccatgtcccatggtggtgtctgagctgactgatggtggttcagaaagacagccctgactccctgttctctgagcagaagctcacagagtcgagatctgggcattcctcacacaygtgtgttatcatggacagatgtgttatcatggacagatacactgtatggggtgtttcctggaatgcacccaaaatggggtccagcatgatcaagacctggaccctgccaactcatcttccacacagaaaccagggtgactgttttcttccaaaaaactaa

SEQ ID NO: 3903 - DNA, 600 bp, Bovine  MMBT04525
cctaaaggactcacagactcaggtgcccagatagtgctaagttattattctcttttatttatgttcttttttattaatttgttaaatagatgtcagggaaacaggatggggtcctgccaaaacaggatgaggtccctcatgggtcattatgattttaaggacattctccgtgagtacacttctttttgcaataagcttctttttctttttataaaagtgggaagagacatcttctactgtttttcactatgaaggtagaatcttcacttaacatatggataygcacaattgacaatttayattctatccttcacaagagyrggttccttcaaatgagaaagtttactcmttcatcctatgccacagggaattgtgagccccactttacagatgaagaaacaagcagagaaatgttaagtgacttgctcaaggtagcatacttagctggaggtggaactatactgtctagatcttgtgatttctgtgytatcattttttaaatagagaattagagaggaaacaagatctcagagaagaagccagtggttctcaaagtttggtccctgccctagcagcatcagcatcacctgggaattcgtt

SEQ ID NO: 3904 - DNA, 600 bp, Bovine  MMBT03299
tgggcacatgcgtgcatgcatacgtgtgcacatgtgcatgtgtgcatgcagtatgtatatgtgtgcactaggtgcacacacatgtaacggaatgtgtatgtatgtgttcgtgcattcatgtatgtgttgtccatatgcatgtaaygtgagtgcacatgtgtgcatgcatgtaacataaacacgtgtgtttgtgacatatgtgtataatgcatgcatgcatgaacgtgtgtatatatgtgatgctcatgtgtaatggacatttaaactgtttcaggtttttactgctatactgttgtcctkaactcaccatcatctgtctctttgtatatatgtcagaggactgttagaagtgggatcctgggatgtaasgtcgtgagcctgaayggaggtgaatgtgtttatttcatttatgggaagtttggcttcctcttctgtgtcacctcatcttttggcccattactctctggagatttctatttttccttattaacatcagggaatttcttatgttttctgtacccaaatcttttctcaggaatgtgcattacaaaaatattttttcaatctgtgccttacccttcagtttgttttggtgtcttt

SEQ ID NO: 3905 - DNA, 600 bp, Bovine  MMBT09960
gttgaaagcaatggtggggaagcctatagaaggggaaaacgggtggagaagatgttagagagggacaaatgagaaataagtgaaaattaactagctattgcagcctgaactgtaagtcatttcagagtggtctgatttctatataaatctcagctttgcctcttgagtgagtgaataagcctgggcaagctgtttaatctcttgtgtgcatgctaagtcatttcagtcatgtccaactctttgcgaccctttggactgtagcccgccaggctcctcctgtccatgggattctccaggtamgaatactggagtgggttgtctcattttactcatcagtaagaatgggaataataagacttttcctctaaaatttcgatgagaagatacagaaaatgcacatggtagggtctctgttaatgtccacattctttctttccttctgtccttcttgtcctcctattgaaaccaagatgttggcaagatgaggttcttttcacctgcccagtaagaggagagattatggaaagacacagtaagattgccttcagggacactgattgctttgatttgattgatttattgagctattcagtacttttt

SEQ ID NO: 3906 - DNA, 600 bp, Bovine  MMBT18256
ataagatattgcatatagttccttatgatacatagtaggtccttgttggtaatccattttctatacagtagtgtgtatattttaatcccaaactcctgatttatccctgcccccttcccctttggtaaccataagtttgtgttctatgcctgygagtctgtttttgtgtgtgtgctgtacagtatcatgtgtgtggaattcaccrgtgttgacaagtgtagctgtaatctactcccattcattgctgagtcatatctcattatattaatatgctccaagttcttatcattcttctgatgmgaaaaatgcaagttgttcccagggttgtgttgtttcaagcactgctgttaggaacattctcatatacacctccttatgtatacaggcaagggcttcccaaggcgaatttctaagggaaattgctggggtttgggatatacacatactttgagactgtcaaataggcttttaaaatatttatttatttatttggctgtgccaagtcttagttgtagcacatgggatcgatcttcgatactcattgtttcaggtgggatctaattacccaaccagggatcaaacccaggcactctgcattgg

SEQ ID NO: 3907 - DNA, 600 bp, Bovine  MMBT20929
ttgtcatctaatgtgtcagaaatgactagacaagcagtaaacataagtgttatagcaaaacttgtttctttttcttaacagactatttcttactagttttaacttatatatgaattcaaaattatagtgaacaagtaaatgccaggatatttgctttagtgatttcaataatttctttggtcaaaacattaaaacaaatgtaatgtttaaagattttatgcagatgtatatattgataggctctctactgaaagtgttattrtaaaggaattaaggaggatgttttgcatgaaaatattrcaatctcataatatgcaggcccaattataataaagaaaattaagcagttttttaaaaagcataataaatggaaacccttttctagagacataattgattgtgagatgaatgagaaaaattaactgtcccaacttgtaagaatgaccttcaccagtcttccaacacctttctgttgccaagtctctagttatttcctctttcatagattacttgtcgtgccttatgcaaaagttctagtgcatggcttgtacaaaattaaactatgaggggagaatatgcaaaataaattgtctctgtgtc

SEQ ID NO: 3908 - DNA, 600 bp, Bovine  MMBT02004
atggactggggtctgtaaatacaataggaacaagagacaagccactgctagctgggaaggtaaacagcacgacagtggaaggatggggtaagtggtgggtgggagccacgagctcagcttaagtgaggggggaggaatagcaaagcctcagaaggcttctggaggaggatatgcctgagctgaggcttgaagagtaagagccaggggaagaggggaaagggcattccggaccaaggaaacagcatgtgcagagcccacagagcaagaggtatcctcccggataggactggaagttcctcrtttccctgagctcctctcagcatcgcccgccagcccagccagggtttggttaggactggaagttcctcgtttccctgagctcccctgggcattgccggccagcccagccagggtttggtttctttatttgctttgactccttagcacccctgctgccctgtgttcattgtaagtgagcagagctggaccctctggaccctttgctggttcctgggagcatcccactgtacagaactccttgtatctcatgagtaaacttactgcctggtgcctcagcctgttgactgcccccagccccct

SEQ ID NO: 3909 - DNA, 600 bp, Bovine  MMBT02223
tatctatgaaatagaaagagactcacagacatacaaaacaaacttgtggcggccagggttgcaggggagagggatggcttaggagtttgggattagcagatgccaactattatatggagaatggagaaacaacaaggtccgactgtgtaacacaaggaactatattcaacatcctgtgatgaaccataatggaaaagaaaacaagaaggaaaaccaaacatacattgtctcttaaaagactctcataagaaatgacacacacagttgaccartgaaatagacaaagcaagtcacaaggcyaagcccgaggtctcagcggcaggagtgggagaggatattatacacagctcccctctaaggaggggcagcgactgtgtgtgtactttgaattaacaacccaatctccaactttaagaaaggacttatgaacattatgttaactaatatccattattattgcccttgtgatacttcaacaccgcaaaaatagaaagaactcatatcattcttaatttctcttttcaccagaaatcagagagaactccccctcagatgggtagcagggtatgactggggaatcactgatttcgtaacaacatc

SEQ ID NO: 3910 - DNA, 600 bp, Bovine  MMBT02365
ctggcatgcaatgcagggtcgttcctatgaagccagtgagctgagctgctggcatcaccctgcctgcagagtagaatgagccctacatcgctcaayctctggggcagccccgggttctctatgattgctgtttccatccactcaggatatgaagaggcaaatgggaaaagacacaaaccccatcccctacattttgccagtatgtagtcttgcctttcagcttggtttactcctttcctgaaggctcggcccagagtactaaacagagaggttattagctcagttcaaacatcagtcagktgagtggaaacaccyagcaaaccacttggatttatgaagcaactggcagagtcactgatgacagtggaaaagccattggccttagacacagcctcactctcttctccactgtgactccctcggtgtctatgtttgtttatrcagatggggtcttcatgtactggcttctgggccccagcaaggacccacacaatgaagcttggggacactgtggacacggcacagtcccagaacagtctgtcctttcactggccgcggtggaatgagcacagctctgtgagcgggcatgcagggcatcct

SEQ ID NO: 3911 - DNA, 598 bp, Bovine  MMBT06047
  misc_feature (1)..(81): n is a, c, g, or t
nnnnnnnnnnnnnnnnnnnnnnnnnnnnnnnnnnnnnnnnnnnnnnnnnnnnnnnnnnnnnnnnnnnnnnnnnnnnnnnnnttgcgctcttgtctgctctgagagcttccaggttgccgtaaagccagactgtggctgcaagctatcgtgtagaattcccttttcttagcacaagcttaagtaaatctaaaatgtggaaaagttggggtattatatgttcataaaatattggaaatttcccaatcattgaatattgggtttagttgttttctctattctcagtgaaaatgtgttgctgaygtagataactactttcggtttctcaacactgtacaatggtgctgtacatactctggagttctttgaatgaagggaaatgagagagatctatgctggtattatggaatcatcatttacagtcactttatgattacaccattctgctgttttagggtctaccaatttccatgtatggaggcaccataataccctcccatcctcagcttgctgatgttccaggaggccctctgtttaatggacttcacaacccagatccttcttggaaccctatgataaaagttattcaaaattcaactga

SEQ ID NO: 3912 - DNA, 600 bp, Bovine  MMBT06361
ctacccccactttctttagaaactaactgactagtatattaaggagtatatataggagcaaactaaccaagtccattaaaagacagagctcatacacacatcttttatatgccaataaaattgattttaattagtgttctagatgtgctcaccgaaaacattgaactattgtatgatacatatatctccccactatgccatggtatttgaagcaaggaacaaaaatagccttgggtcttatcataattcatttccttattttactataggtttgaattcatttgccatagccaccttccktgtttgcttctttgccctagtagttcaaaatgcatgatattaaaataaattaatttgagactgaaattagaaagaataaaattgttttgttttcctcctaggagattcaggtatatatgtattataatttctttcccttccttttctttccaacagtctcctgtatatgcagcattttagtgattgttttattttgaactaataaacaaagacctaatttggcacaggttagtgtctccccggtggaaagagtgttagatcatgtcagtcatgatttcattttctgaaaacaactttaca

SEQ ID NO: 3913 - DNA, 600 bp, Bovine  MMBT06799
gatttgcaaaagcaggcagctgagtcttccagaaaattccgcatcctcaagcactaatgttcaattacagtgatcatatcatcctactaacttctggctcaattttttctgttttactattttgtgtcacattttctatttgttattgtaaaaaaaaaaaagctcacttttaagtactttatcaattttataggttttcctgggctggtttgtatccctaaacaccacagagaacatgatttcaacggaaaactaatgcatcaacttgcaaccatttgaggacacatttgaaaaaagggracttgttactgcacctaagactgaacaatgaggtaaataatctctcctctataaattatttgtaggtatgtacagtacaacagtctctcttccccttctacttcaaagtatctgaatagttttgtttttagcaaaaccttgctttggacaactctataaaaaaattaaaatctgttattatgtttgggactttaacaattaagtttagttacttaaaaccttctgaaataaacatttggtctgtaaatatctctgtytggcctcagtttcaagctaattaaaaaataacatgtactatta

SEQ ID NO: 3914 - DNA, 600 bp, Bovine  MMBT08016
gtccttcataggaaatagyttcattatttagctgggaagaccaaccacttagagaattatatcttagtataattattctgtaaatagtatacaaactagtgtttgtacaayctagtataacaacttagaggataacatcttcatatatcataaatagcattaaaaactagaatatatgacacgtaccttaacagaagggcaatggaaacctgcaaaaaaatgctttctcttaaaaacagtcactaagagataatgcacttattctaaaatcgaaatacaaattctaatgtagaaacataytcagaacttaagctaaactttaaaaaaaattgagtatgtgtatgtgtgtatgcatctcattcatgtgtgtgctcagtcatgtctgactctgcagccccatggactgtagcccatcaggctcctctgcccatggaattttccaggcaacaacactggggtgaggtgccatttcctactccaagggatcttccagacccagggatgcaatccacatstcctgtttcttctgcattagcaggggtattctttactactatcatctcctgggaagcaccattacaaagactttaaaaaccacaa

SEQ ID NO: 3915 - DNA, 600 bp, Bovine  MMBT10401
gacagagatgggtctgtgtagggagaagcaaggaggccagtggggctgaaactgagtgaaccagaggagacaagagatgagtctggagaggtcatggggccggatttgtggtgaagggtttggactttattctgtaatgggaaaactctctggagcattttgagcggatgaataatgtgatccaattacacctagaaaagctcactctggctgctgaatggggaatggattgcaggaggcaaaggtggaagcagggagactgggaaggagactacggtacttaatcactgtggaaagaasagtaattcaaaatcacacttgagtctgaatttctggctactctcatttgcctgctgtgtgatcttaggcaagttacttaacctctctgatcttccctctttttgaaaggtgggatataataataggtataaggctaaatgtgttttccatatacagtggatatgtgatcaatggcaggatttctatgctgagggccaatgagcctgcctgccacactatttcagccttggctgcaaatatcctagaccaaccatctgccaggactagccatcagccccagcccatgatcacagagaggtc

SEQ ID NO: 3916 - DNA, 600 bp, Bovine  MMBT12535
tgtctgtcacaatccccttgtcatactgaaacagtgcttgatccccctggagctgtgtgttccccatctgtcattcccaaagagtcctcctgagtggagacggaggaacttgctatgaggggagtggaatgtcttccttaaacacacggccgcgcctgcctttgacttgttccacatccatggaacaggaggctctgccactgcaaaagagaagccccccctgaattccctgagcctgggcacarctttgaaggagccacaggtcacctggggagcttattaaatgcaggttctaattcygagaactgacaggcttccagtgatccccacgctgctgccccgcactaggctccacggagctcaggtacttacgaatttgccagtcatgttctgctcggggccttcctgcacttcctttgactatcccctggtccaggctcttgtcggtggtcctctgctcacaccacatccccaccagacctgcttttctcctcactccagcagcttttaacttcctaggcctccccctcccgcctccaccaccaagtcaaggtccagggaggtaagctaagggctttgacttcattgccgcccccatcc

SEQ ID NO: 3917 - DNA, 600 bp, Bovine  MMBT13588
gcctgaatcaaacttaaagctcttacattcaataaataagcataaaatatgttcttaggatatttcttcaatctttgcacatctcaataatattaaatttttgcttccttttttggagctattaatatgaacagtaaaatttcactaattttttgaataaataaaaaagagaaaagtaccaagaatatattgtcrggtctagtggttaggattcagcactcccaccactgcggcccgggttcratcaccaggcaaggaactggccaatttagatccagaggctcatgccacagttgctaygggccttggtcagttacagagatttttattctgtgatcttggtacagggatccacactgtgaccttggtatagggctccacatacatgatcaaattatggacacaggtttgagacaaatattcatcttaatgatcccacaaagttcagctaaatacacttcctctttgaaccctcttcggatcatactactcaaagaatccgctttggtttcactgtgatctctgtttttaatcatcttcatttgaaaagaactgctttatgttgtagttattcaataccaatcttatctccatgactaa

SEQ ID NO: 3918 - DNA, 600 bp, Bovine  MMBT13871
tgcgtgaccaacacaattaaaatggttaggtgatgagaagtccttctaagaaaagacttttaaaagatcatgcccctttttaaaacatgtggatggtacataaattcatctgttcatcaaatttcacatatcagaaccaaaggtagtttcagaacaatcagaagccttctcttcaaggtctaactcaagaattattttcttcctttaggaagacttcctaattgtccagcacttggtcaccatttttccctttcctctcctgacacttgaattcaactgccttgtcagttagttaccatragatacagagtaacaatttcagttgctaaacataaacatcataaatatcctctctccagatggaaaggaagttttkttgttctagtaactctgaagccctgatacaagataggcaacatatctgatgatgatgatttctgtttaattcctcaacccaccttacaaayaatctgttaacattcaggaggaatttaagtgtaccgaagatatattcctaacctattcttaatggaagcctagaccgtgcctgcagtgtggatggractgttctgccgtatataacgagaacmccagcccaca

SEQ ID NO: 3919 - DNA, 602 bp, Bovine  MMBT15816
  misc_feature (1)..(2): n is a, c, g, or t
nngattatgcatattaactatgtttaatatgaactggaaaagaccctgatgctggggaagattgagggcaggagaagaaggggaccacagaggacgagatggttggatggcatcatcgactcaatggacatgggtttgagcaaactccaggagatggtgaaggacagggaagcctggcatgctgcagtccrtggggtcacagagagtcagacacgattgagcgaatgaacaacaatctgagtcgtctraagaaaagtgaagatttggagtctggctggataccctttccatgggctcttccygtrgacaactctgtctcatgaatcatattccatccagaacctatctcctcccctgtatcctctctcaagttgttgtctgcaaggaggcatggatcttagctatttgaaactacccaattaatgaagaatgttggactctactcaacactaaatctactttataactttttgatgttttttatctggtgtctcaaacttctttaaaaggaaaagaatttcaaccttgaaaatggcatcagtaactactgaggacttttcttgagaacacaaagccacctcttattcataattagtttttcc

SEQ ID NO: 3920 - DNA, 600 bp, Bovine  MMBT17107
acacacatcgaatttctaaagatactcatcaagtatctagatttgtgctgatcagacagcagccacattaaatacaaataaaaatccactcccccagccacatttcaaatgctcaggggtgacacgtggctcacggctatgacactggactcacatgctatataacawttccgccaccacctactggacagagctgatctggaatataccatttgatataggccagcagctttcagggatcactcacaaagcttattactattattgaagaaaagtcctatgttttgagagccatcctasgtgacaacagattcagtatgaggatatgaactrggggcgtgttcatatgtgaaacttgactcgctgccttgacagaattaattgcttggctcacacaaccgggcaattccrtgcagaaaaaaaatcagcaagactggctgttcgccttcaytggctagtgagttatatcatagaggcggcctaggccagtctggcaataaaaggttccttctatcagcctggggtggggaactgaaggctgaccagggccgtggttaactctaagccccggcaaagcatccctgacaagcagaatcatca

SEQ ID NO: 3921 - DNA, 600 bp, Bovine  MMBT17558
tgcatattgtacaaaagcacattttgtatctgtgattacaaaagatcaagaagaagcctatttccaaagaaaattctgtttgttagctaccaagaatttagctgactcacttcattccttttctccttttgggaaaacttgcccagccaaccacaaaatggctctgggagacacaggtcccagcaggacaagagacaagtattctcctcttcacaagaaagccccttccttcaaaggtatttatttgaaatttctctttgctattttcacatcaatcctgaagttattttccagcagagygtatatacattytaatcagcattatctcaagaggaaatgctatactgtaattaatggctcaagaattgtgataaatacaattgcctgacagtcatagttttgtgttaactgtatgattgctgttcgtgctttgtttattcaaaagtcatgttattatcatctgcagataattagcatttactgccagtattcagagcataagcaaggcagtgccatgctggccagtgattttgtttaacatgctgcattacagccctcactgcaaggaggtcgtgcctactcagtattactctgtgtgat

SEQ ID NO: 3922 - DNA, 600 bp, Bovine  MMBT17948
cccccgcggacccaccaacatttcctcccaaccacgcagcggaccagggtcaccaggaagcctgggacccgctgatcttgccttgtgacccccagggtgcgccaattgaaggcagaagcaccgccggacagaggcagagcatgcccccgcctccccgcggacctcgcggtcccctgagtcctcactcaccccatcccagcactccggcatcttgccgagggaggccacccgcctcgaccaggaagggcaaacaaaggcctgagtcacccgagtccagagggagactggacgtctgcgcargtgggagaccagcggctctatggtggggccccagctcacgggccatttatatgaggagctgcccggcctggactggcccctcctccctgcggggtttgtgagcagccactcgctcacccggagcccctgctcttggattggctttcaggagacaaatcttggttccgattggcttccaaggtcctcggtcaccccggcttctgctcctcccacccccagcaacacatcagtcaggatggtccccagctcctgcaacccactcacctcccccacccccgccccgccccactgcacagaggc

SEQ ID NO: 3923 - DNA, 602 bp, Bovine  MMBT18187
  misc_feature (1)..(2): n is a, c, g, or t
nngaggacttccctggtggtccagtggctaagactcagcgctcccagtgcagtggggaatgcagggggcccaggttcaattcctgatggaagaacagaccccacatgttgcaacttagagttcacatgctgcaactaaaaaaaaaaaaagaytccatatggccacaatgaagatggaagatcccacgtgccacaactaagaactggtgcagccaaataaataaataatattttttaaaaagaaacaaaactgtagatgggaagagcattaatacagcttcttaaggtcttttytcttcattkgctcacttggtgttcaagataatcttctgaggatgggcggcagtttccatgtgacttagagacgagcgtgtacgtgcactctctacaggacatgcttgtgggctccatagatgcacggatgttttcttcattttccaattaatgccacagatatttcccggtcctctaatttctagctggtcagtgaaaatactcatctttacttttccaaccttcagattcattgtctgaacttcttcatccaagctactttcagattctcttgcccttttaaagtttatctcctttttttttttaaga

SEQ ID NO: 3924 - DNA, 600 bp, Bovine  MMBT18529
tgtattcatctatagttagttcacagcttacctgaacaccatagaatcatttgccttcacactatagtgaggttcaaaatctttgagaacctaaaacttattctgcagagttacaggctatgtttacttagctgactgatactatgtctcaaaaagcacatcctgagagcacctgctgtagtcaattggtactacaggttatacagaggcaagtataatcagtaagaatccaagtggtcaaggcctcaagaggtggtggacactaagggaagagtaaggcatgaatggtagagagaaggsgaaaggcaaagccatgcaaggtaactgtgcgagcaaaggtatggtggcagaaatttgcagaggatttataaaaaggtagtttgactggaaccaaaggtttttttcatgagaatagctaaaagataaaactgaaaaaatagggaaggggctggccactgcaggttttatttttatcttttaaagatttgcttacttggccatactgggtcttagtggcacacgcaggatttttgattttcattgtggcatgcagggcttcccaggtggcgctagtgataaagaactcgcgtgccaacccag

SEQ ID NO: 3925 - DNA, 600 bp, Bovine  MMBT21874
ccagcatatggtgggtattaaaaagcaaatgtagtctatcgcaactttgtaaatttctgtttgttttgtcacagaaactctcacttaaagggaatttttctgcttcaatcttcttttaagagatgaattctctaaaacactacccaccgctttcaagatccttaaatccagagaaaagtggctcttaaaaagtattcagattaccgtggaaataacacagtaatttagccagctaagaattgagtgggttcggcttccctggtgatcaaatggttaatcctcctgctaatgcaaagaccsaggttcagtccttggtctgggaagatcccacgtgcggagcaactaagtctgtgagtgcagctactgagccagtgctctagagcccacatgccacaactaccgaagcctgaacgcttagagtccatgctcctcgatgagagaagccacctcaagaagcggcttgtgcacagcaatgaagagtagcccctgcctgctgcaactagaggaagtccacatgcagcaatgaagacccagcatagtcaaaaataaatgaataaatctttaaaaaaaaaaaagaccccaattgagtttttctggcta

SEQ ID NO: 3926 - DNA, 600 bp, Bovine  MMBT22344
agaaaagagctcagatgtaaatgaccttggagataagatagctagactgaaaagtcctcagggcagggatggcatctgtgtggtgtgtgtgtgtgtgtgtgtttagttctctctcattgtttgctcagtaagcgctcttgaatgaccagtgggagaactttctattatttctcctacccaaggaggcagaagtggaaacagagggagcagargtgggaagtggacagtgaatcccttacgtggctgctgttcatcatggcctcctccacacagagctgattctcctgcaaggtcttcccytgtctcttgcagacattgtgtagattcttgatgtcagcttgcaggctcaagagcttgctgttcagactgcttacgtctctgtctctctcccccacctcggcagtcagaaaaacaaaagcatcaattatgaactatcaagaaaatgcttactttcgttcactggttgacagagactttaaatttgctggaaatttgtccatcaacccttcactgttattacttattctgtgtaatgtttacacagtatccatttgcgaggtgtctgagtgctctgcattattcagacaattacttatttac

SEQ ID NO: 3927 - DNA, 600 bp, Bovine  MMBT04422
aggggaaatataatttgtataaataatttaccttgtttcacatttctctgaaatgttcatgttcctgaaaagcctgatgtctttaagggtaggcaccatattttttcatctttgtaatctaatcctaaagcccagaacaaagcttaacaaatagcaggttctagttaaattactgtggaatctgcaataccaatcagaattcttaaacagagtgccaagggttctaatctctgaaagatataattttattatgtaagatgtgagttcatgaaagaggccctaccccaaactaaacattgmttttcctcagtagagactgagaacatgcttttaacagactaacaaggagataatacacagtagtaagtacttttgataatgtatttttatattattcaaaattttgtgggggaaagggtggtaataggtcaaatccatgctcctgatttaagtatagccttaaataataatctcttcaaaccaaaagaaaataaacttttctttgttgtcagtcaagtcccaagcacatcaggtactaaaagatagtacacattctcactattcagagccaaactaactagtaaattaacataattgaga

SEQ ID NO: 3928 - DNA, 598 bp, Bovine  MMBT07366
  misc_feature (1)..(252): n is a, c, g, or t
nnnnnnnnnnnnnnnnnnnnnnnnnnnnnnnnnnnnnnnnnnnnnnnnnnnnnnnnnnnnnnnnnnnnnnnnnnnnnnnnnnnnnnnnnnnnnnnnnnnnnnnnnnnnnnnnnnnnnnnnnnnnnnnnnnnnnnnnnnnnnnnnnnnnnnnnnnnnnnnnnnnnnnnnnnnnnnnnnnnnnnnnnnnnnnnnnnnnnnnnnnnnnnnnnnnnnnnnnnnnnnnnnnnnnnnnnnnnnnnnnnnnnnnnnnnntgaagaactcggatgacatctgatagtttggtgtatcaggggagaacrtatttcattaatacattacctgctactgctgacacattttgtcccttgctccccccgacccccacaaagaaaggtaactctgagaagcaacccagaagagatgttaggaaaatagatactgttgcctggagagaactttgtgtttgttgcttaaacatatgaaaaaataaggcagctcatgtgaacaaaaacagtgtgaaatgtatatgtaactatgtccaatgtaaagacagatgtttataaaaccaaccccttcaaataaaagtgaaaggtttgagaagtgagaaggactgagtcc

SEQ ID NO: 3929 - DNA, 600 bp, Bovine  MMBT11023
gatgtacagcagttaggtactttgcccaaggttacacaggcaggacttaaacccacatctactaacccagagcattagctcttagttatcatgccattgagcctcttggcttggtgttctaatcagtcaatctaatggctcgtgatagaaacgctgagctgaggtgttccacggggcatggtttctgtctgtctaacatttcctattacaatgaacttcaagggatagtcttagttcttttgatacatgagactttggctgtaatgtgcatggtttgacagaaatgggactactgggctyggggcttcttttatgagaacttcttggtcaaaatacagtgttaatgtcagtcccttggtagctggaatgcaggtttcctgaactctaccctcccagatacttcttctttcaaaggagtcaagaggtctggatgagctgctgtgtgtatgggggtgacagagagatccgagggcgcttgatccggtcaaagagtaatgggagtattccctggggctactaaaggctggctgctgagcttcctggacaggactgactgatgggagrcccttttggcccgggttaggtggcggacccgccgct

SEQ ID NO: 3930 - DNA, 598 bp, Bovine  MMBT15122
  misc_feature (1)..(118): n is a, c, g, or t
nnnnnnnnnnnnnnnnnnnnnnnnnnnnnnnnnnnnnnnnnnnnnnnnnnnnnnnnnnnnnnnnnnnnnnnnnnnnnnnnnnnnnnnnnnnnnnnnnnnnnnnnnnnnnnnnnnnnnntggcaaccccattccagtattcttgcctggagaattccatggacagagcagcctcgcaggctacagttcatggggtcataaagtttgacatgactgaacaactaatatatctgtctaggtttttgccctttattttcctctttctcatctgaaacaacttttaagtaaccttaaactaatastttaggataaaattactctcctttttcttaaaaaagyatccttcatgtctcacatcctgctttatttttcttgcatactttgtacacaggggttttccctacatttttattattsttaatagctaatttacatatgtggattagaattcttaaccctttgtaaccttaatttccagggaaagcaaggaagtaagcaattgtgaacacatgtgaacacacacacgttttatgtatgtatgtatatattagcattctgtgttaaattagaaaatttatgaatatagcaattttataattt

SEQ ID NO: 3931 - DNA, 600 bp, Bovine  MMBT17208
tactggagatctacaaaaaaaaatctctgtcacagactaacataccattcctttgaaaatagaagggtgggtagaaacactctaaggaagaatggaatttgggagtggtaggttgagaggggrcatgtgagaagtggtagaagttaaataagtttatgagtggtcaagctctggcaaaatcctgcagtggtcatcgttttgtctgacttcatgataaaagtatgctgtggccttcaatraagttacattgttttcatcattaaaaagtaatactaatgcraaagcaaattttgcctgctrcagatattagacgtgcccctggggtacagctctgtcaagttstatgatcattctctgtctttcagctgatgcccccattggaatatgagctgagagtagggtctgtgtctttttaacccacaaccagtcaaaaaacaagtgattagttaactatcaatgtatctrcagcacacacacacacacacacagagttaagagcccttacttacataaggctttttagaaatcaataagacaggtgacccagtagatcaaaggaagtgcagatgccrtataaacataacaagttgctcaatcttg

SEQ ID NO: 3932 - DNA, 598 bp, Bovine  MMBT18834
  misc_feature (1)..(96): n is a, c, g, or t
nnnnnnnnnnnnnnnnnnnnnnnnnnnnnnnnnnnnnnnnnnnnnnnnnnnnnnnnnnnnnnnnnnnnnnnnnnnnnnnnnnnnnnnnnnnnnnnngaatacaacaggatgagcaagcctcccatgaagcaaaggggaaataagactagaatatagcattgtgtatgctaaaactgaaaaagtccaaagtattggaaataaatgacaccatggaaagaaattgccacagctcactaaaacagctaactgaaaatttgtcgatgaaaactgtcagttcatatacccagccatcattataarcactataaaggaaatagctagaggaggtgagaggtgggacaaaaaaaaactctgtcctttgattcttttttgaagccccctgtgactcactgagcttctatttaagcttgaagactcagttcaactttcaccttctgcatgaagacttctcactcctccaggaaaarctatttgctatcattctcccccaagaaggagrggattaagtatatcttctttgctgcttcatcatgcatacctggtagcatgccaggcatatagtygaagctcaataattataactgaattaattaaatca

SEQ ID NO: 3933 - DNA, 600 bp, Bovine  MMBT20097
ttagcttttgatwttttagaaacaatcctggtggctcagacaataaagtatctgtccacaatgcaggagatccgggttcaatccctgggttgggaagataccctggagaagggaatggctacccactccagtattcttgcctggagaatcccatggacagaagaacctggctggctacagtccatgggttcgcaaagagtgggacacaaccaagcgactaagcagataaacaaaacaagcattcatagctatgctctaacaacaagtatcaacatratgctgtaaaaactgtggtctaayacattgggagctaataggtaagggctgaccctcctggaagcgagggctgttcttggatgtggaactttcagtactaaaaaactgggaaagtcctgggtaaaccagaactagtttgtcacatgagtcatgaggagaagagatggctaaaagatgctcatatgctcactttgyggagcagaagtttgatagatgctttagaaaagagtaagttggtgaccactaacattaacacagcaactcttagcagtggctgccacttaaggaatgacgtgtctatgtttgacttcagccccttccaaa

SEQ ID NO: 3934 - DNA, 600 bp, Bovine  MMBT01021
cttctgtgtatatatttagaatattgtgagcctatttctctagttaattgggtatacattcagtgatcactggtatattcataaattattagaagggcaagagcacttggtttctttctcaagaggtagttcaggaactttggagatctataaacctccagcaagttaaattatcctacatactacccataggtactattagaacacaaatgttcaacctttmtgaagaatacacatttcactaaatctgtaggcagaattgttattttacatagtctactatgtgatttgcaagaattrctgttacaacaaccaagaaagcacttgaaaggtatctgaaattatttttcacacagggctatatatttctctatctaatatgacagcmtgycattcatataaacatatttatggctgtgtcagttcatatcaagcacattgggacagtgaaaaaaatgtaatctagatgaaaaagaatttcatctgattctcaagagtccccactcctctgtaatgcattagaaattatgatcagaatgatataacttggacaccatcacatctcaggaatcatccattattgtaacagaagtgcctgaa

SEQ ID NO: 3935 - DNA, 600 bp, Bovine  MMBT02964
aactgagacttattcatttttatcatcttcctgttgttgttcagtcaccaagtcgtgtctgactctttgagaccccaaggactgcagcacaccaggcttccttgtccctcattatcttctggaacctgaccaagttcatgtccattgaatcagtgatatcatccaaacatctcatcctctgttgccttcttctctgacttcgatctttcctgcatcaggggcttttccaatgaatcagctgttcacatcaggtgaccaaagtatggcagcttcagcctattcagtgttgtttcctttaarattgactggtttgatctccttgttttccaagggacgctcaagactcttcttcaacaccacagtttgtaagcatcagctcttcagtgctctgccttctttattgtccagctctcacaaccagacatgacactggaaagaccatagccttgactatatggaccttacaaatgtttgtagaaatgactggatggatgagtggatgctgctgctgctgctaagttgcttcagtcgtgtccgactctgtgcgaccccaaggacagcagcccaccaraccccytcrtccctgggagtctccaggca

SEQ ID NO: 3936 - DNA, 600 bp, Bovine  MMBT05164
tccaggtaagcataacacttacagtgccaaggtcaatgatgaagcagtcacccttgttgaaactgtcccagcttaggggaacttccgtggccctgacgactctccgacctttcacatgcaggagcctctgagcagtcaagtcatttgtaagcacatgattgagtccagaygccacaccgccagcctgatcagtgagagaaagaaaacaaaacaaaacagctgaggctttgacacggcagcttagaaaaccgctggtgttggtaccaaactgcttgctaggccaagagaaaacagccaagkgcgtgtgaaaaattaaatatgcagaagagaatttccaacaggcaaatcaataggtaattgttttgttgtgggctctttgtccttcctattttaaccattcctgttaataccgcaaatatttacagaaaaccctcagtatataaaacctgctacataaacagaaaagagttgttattcttttcctttggggaactaatgattctcaaagcactgaatgagaaggcagataaggatttcagaggaaaaggtgacaggaggttagagagtcagaggtcacaagcatacacgaaggagggcccg

SEQ ID NO: 3937 - DNA, 600 bp, Bovine  MMBT05412
aaatgtggggatatacattttcaygggaagaagtggttcacagtaatacaattgtctcgagtggcaggtcagctttggaaagttaagcacgcaagtgctctgtggtgtgtagcactcagaagtactgaccccctcagcaggaggctctagccattaagggcatgatggaaagtctggtggtcccagttctgccatgaccttgggccagtcacctcacctcataggcttgcagcaactcaaaagcacaggagttgaaatccagagcctggtatgacttatgactgtgggcagaactctttycagcagcagactcttctgtcagaaggatgacgtcagaccagaagttttctaaatgaaactccagcattagcattcttcatttcgagaattagttaacaccagagttattttccaggtggaagtttttttaaatttaattgttttgaatgacacctgtcccttcattcaccactccacttcatggtacttyttytgggatcattgaactgactatcccagcacagagaaagtaaaagtattagtctctctgtcgtgtccgactctttgcgactgcatggattggtagcccgccaggctcct

SEQ ID NO: 3938 - DNA, 600 bp, Bovine  MMBT07929
agaaaagctaatcggaggaaccggggattcctgtacaggattttgggactggcaggagagcacatgttgatctcttaacaacctttctgggttttcatggatcagattcctgtgggtgaaagaacacctttcagaggcatggttatacctaatttttttctctttatgtttaaaatgacagagaaattttgaaagtaagagacaaaagcatgaattgaggaaccataaatccagggattgtgcccccaagtgtatcttaagaatatcctagtggttacagatgggagctcattgatagcyttagatttgaatctcagctctgttacttattagctgagctatataatttcaggcaaattatctaacttctctgagtcttattttctgatctagctaggaaatgagaagtataatagtcctgtactaacctcataaggctgtttgagagatttaatgagtcactttctaccaaaccgctttagcagtgtgagtgcccggcacagaactggcactacacgagtgggattttctgttttccttaagccttcctcgttcatatcaccagggactcaactcccgtggtgctgactgctcatatty

SEQ ID NO: 3939 - DNA, 600 bp, Bovine  MMBT08354
tcctttctgctagctctgaaaaacaaaaatttccaacaaatctgtagcagatgtttttcctcacttctaattggtggggcagtccaatcctggaattaacctagtttcatacttagttttttttcctcccttgttcaatagtccctttttattgttgaattgaaatctctttccttgaaagccaattcacacctctaatgtcaaactgtgagtggtctatattaagcaagggcaaggtagttattctacagttgttcttatttatttaggagtatcatgcatgtaagaagaaacaccaaycttagacaataccattgcctcccccacagcccccaatccattattaccaatgagctattgtgcagattctactactgtaagcaatctgttctggttgtaataatgtgcattctgttcagtaacaggaatgttatgtccattaccttcactctagttattttttataatgcaatctcctgaaaatattgcttggttaaaataagaaaataaacagatctttaatttgtagattcttgtttgcagttgcatcatggattagaaataaaatcaatatgatattatatagaagcatctaacaaa

SEQ ID NO: 3940 - DNA, 600 bp, Bovine  MMBT09234
ccattaaaatctcttctacatgtttaataatattttaaactacccttggaataactattttctatctgcttttacttgcctttataactaaataaacactaaatctttgaaaagggggaagtgaaaataaagaattttctatactatgaaataaccattcttttctatggcctcaactaaataatacctgtgaatattccagcatcttataactatcaaattttatcttcttcccaaagcacaaaggctgacaacagctgaacaacaagagaggaccacacacaaaaagaagaaactctyctaaagacattttagactgtagttgtttatattcaatattgtgtaatactaacaagaagagttttattttatggaggcttttgattatcattttctttttaacaataaataaatcctgaagcactttcttctgaagattatcaacttggcaccatttaagcctccagttataagaacaaattttaacgatttctagagatattaaattcctcctgacaaaccgtactctggtgtagattagtatcagtgcaggtgcaactacaactgatcagtttgctacttctgaggggcaataagaaa

SEQ ID NO: 3941 - DNA, 600 bp, Bovine  MMBT10398
tcttctgggcgcctcagttccctgtagacaccccctctttgatctacggttctgggacttggcatttataccagtcacctctctagttaaccctgacctgacaaggggctttctgtctgctcaggactcaggggattcacccaatgataggtttttttggagtacttgctgtttttcttacccaaccccattccccaggccagaatggagctccaccgggcagcgcttttgtctgccttgtttattgctgtatccacaagggctagaatgtgactggtgctcatgttccgtggatctttrtrgactgaatgaatgtgaaggggataaacagcagtgacgttaacctgcagggtgtgggggtggggctgtcgcatttgagctgagacagraaagaccagaaaagaccacaggaaaaggtgtggggaacagcaggtgcagagagcctgggataggattgaacttggtgagttggaggaacagtaaagaggttagcatggctgcagtgccatgagccgggggagactggagggggatgtgttgcagaggtggccagacctctccagggccttggaggccatgatctggagtttaggttttatt

SEQ ID NO: 3942 - DNA, 546 bp, Bovine  MMBT16339
catttaatttcactgtagtttccttttttggatatcaggttctttctccacataaatcggaaaaagaggcaaactattttattctttagacactgttaaatactttgcagttgggcactggctgcttaatggagattaagacttttaaaaataggaaagttttttgaagatcacaaatcgaaggacatttaagtatttggggggtataattgccaaagtaactatcaaacatgaatttaaaatatataacaagtgtacttttaatcattatttcttgtgatcttaaggtggacatatatygcccatttaaaaccttggaaaagccaatgataaatttatacttaattctttaaataataaattatttaaaatagggatgcatgttctccttgttttctagagtgacttttcttatgtttattagctagatgtaccttttcttttgtgaattatgtacctacagtctttccccatgcttctgttggtctcctaggtttttttttttaagttatttctgtgagctctctatatttctgtcttaaatat

SEQ ID NO: 3943 - DNA, 600 bp, Bovine  MMBT19283
tgccccaaatgctcagtgtccaaagggggccagagccccagtcgtggccaccctgagatcttcaatgactagaggacatactagtcagcaggccagtagggcctgacttctggataactgacattatcaggtggcatttggcagagttatatcattagcaatttaatcaaaggttagtaaaattaactctatggttttgaaatgttcaatctgattttattaaaatgttttaactctattaaaattcttgacaaaaaataatgaggtatgaataaagcatctatatgtgcaggactcatrtttgagtgactcacatccgatatttgtgtcattcgctctcactgctgagaagtgtggggtaggggggcagttggcaggctcgggtggggggttgggggacttaatatgcagatttgtggtcctccaccagaactgcttttcgaccagggagcccatggggtcctggcttagtcagcttcctgatgctcagcactctttctcctttctttctttgtcctatagaaatatattgcagtaaaataaaatggaaatgggattacatgaaaggcattggagaaataaatcaagttgagtcgcaga

SEQ ID NO: 3944 - DNA, 600 bp, Bovine  MMBT20153
ttctcttatgtstcttattctaggtcttttctgcatatttggrtcatcactggaagaaatttatgtttcagacatccatttattgctcaaaaaaatagccttgggcatctaargcaaaacttagaatctgtaccacttctgttgccattcagtaaaatgaaagtttaaaaaataatttcaatgacaacaaataggaaacaagctagcagttaagcactaccaggagtgcttttaaatctatctttggaaaaatcatgtgtaacattcaggttccggtcttaaaamaattatgaaaaaaayagtctctaagagtttgcaatgtagctggtaaggagagccaagacataaaaagatgaataacaatacaaagaaacatctaccaaatgtcaaatgaacagtctagcaaaatgcaaaagaattttagtttagtcctaaagactacttggaaaatcaggatttagctgaatatatcactaaacaaacaaacaaacatgacactctgatgatctctgtaaaagggagagggaagggagtgggcagaggggagagagacagtgagacaggaacagatatatctggaatattagcatgaggccagat

SEQ ID NO: 3945 - DNA, 598 bp, Bovine  MMBT04048
  misc_feature (1)..(90): n is a, c, g, or t
nnnnnnnnnnnnnnnnnnnnnnnnnnnnnnnnnnnnnnnnnnnnnnnnnnnnnnnnnnnnnnnnnnnnnnnnnnnnnnnnnnnnnnnnnnaaaaataaaaaaataaaatgttaaaattcgggaattgtcaaaatataatagggcattgaattcagaattgttttcactttggtatcactcataatagaaaagtaatatctaagttttcatctgagctttctttctataggtattttgactcagagtatttaaaaggttagcaatttacagatcttatggaataattcagatatttttctscattttaaatggtagatctgccttaagtcagatggataatgactgattcaagccatatttctccatgaacatcataggtatgaaatcataatgttcactgtattttagaggaaaagcctcaagacagaaggaaatcatttaatactttaaaatatatgttaaagaaacaagataattttattcttcattaacttactcttttaagctatccttcagttacaagtaacaaattaaatcagtataagttaatracaaatgttggtgtttgtaacaacatatttgagtcaaactataacac

SEQ ID NO: 3946 - DNA, 600 bp, Bovine  MMBT21705
tcccctggattaccgtgcagttaaaaggaaatcacgcttttgtcccctgactttgaccacgatggtgccacttaacgcagacygaatgcttcccacgcaccccctagtttaagccttgcagtcccaggaggtgggttctctgatcatctcacttcctccagaggagcccaaggctccgagacggtggtgatgttcccgaggaygcctggggtgggagggggaggaccggggctggacgctggcccctccctactgtcctgtgatgccgtgagtttaagccccacgtgtggtctttgctgmgtccctgggatgggattcgaactcctgtccttttgacatgaatgctcctgtctttggaagggaacctctgggaggagatcaaggatgaaggcttcagcctggacacgctgggggccttcggagactccccgcttggctgtgagctgggggcctcgggcctgacccccgtctctggtggcagcgaccagtccttcccagaccttcaggtgaccggtctctacgctgcctactcgaccccggacagtgtggccacgtcagccaccacctcctcctctcagtacctgggcgccccagggaaca

SEQ ID NO: 3947 - DNA, 440 bp, Bovine  MMBT00761
actccccccttcttctcccttccccaacacacacagttggcccagaaggtaggaacacccattgctcccatgactttgtgagaagctttttgggttgtgtgaaaacaaagatcctaaatttttacagggaaacatgattgtttctgaaaaacaaacaaacaaacaaacctcatttgatgattaaatatgagaaaagcaagaggagaactatttactgttggcagttcatcagacttcatccatctggtggccaaggccggctctcgtccctagctgtgctgggggaacaattcaggccaytcagagccacctcgaggcctgccagcgagctctgcccggactgctggggaaggagtagtgggtgtggattatttatgttccctttcaaaacaaacccaacaaaagaacaaagctcctcttctgctggcaacgttagcagc

SEQ ID NO: 3948 - DNA, 600 bp, Bovine  MMBT20866
ccttaagcaaattgcttgactttcctgatccctaggttccccacctatagaacagtccaataatactgacatccagtggttctgaagatccaatgaactgacccacccaaagagctcagtgcattagatatgcacccaaagcacccaggagggccattttgtttaagctcagtggaagccggacagagagaacagtgaaggaatcatcccagagagtcacttctttagcatccttgttccatgaggactcaggatgcatagcaggtgagcccagagcaaaaggcagctcaagatgtcacrctgagacgcattcagatctgttctacaaggatctcttttctgatcccctcctcctgagattctgggtgctgtgggacctgaaaaagagatgggggtggggtagctgaattcactagacatattcctcggtgctatgttgccaggcaatgaaattcaayatggaattaaagatttgcctggccttggaaacaaagcctcatctgtagygtttcctcttatttttaggcttttgaaagaaatatacaaccaggtatggggggtaaaaagcaattgcagagaaatttccaatagaatgtagcc

SEQ ID NO: 3949 - DNA, 598 bp, Bovine  MMBT11652
  misc_feature (1)..(28): n is a, c, g, or t
nnnnnnnnnnnnnnnnnnnnnnnnnnnntggggcagcgtgggggtggggcggggtctggggaggcctggaggagccccccttcagtcaggggctgggcggtgggggctgagccaggagccttagcctagcccctgaactgcgggggccccctccacagcagtgagcttgcaatgcccccaccctgcatgacggcgcttgggctcccaggtggtgcctgtcsgctttggatgtgggcacgtgggatgggcggagggatcacaggaagtggacgaaagggaagactctgaccgcccggaagrcccctcyggaaccctagttgagtgctccccaaccctgctcccttgagtcctcgggatgagggagaagatgcccacacaggagccacctggggccttcwtccgggggcygtcccgactrttcatccattcgtcccgttctagcctggaggtgtagagtcattttttgaaaaaagaggaactttcctggtggtctggtggttgactctgcgcttscactgcgagggtcgtcatcttggtgtctggtccttgagccaagattccacagggcagcgtggccaaaaataaaagagcaaaaacc

SEQ ID NO: 3950 - DNA, 600 bp, Bovine  MMBT06937
tacgtttcaataacaggtaaaatatttccttctaccaccctgctcatcttgttctcatttcaacgcacaatccaacctggccagctttctgacaccccacctctcactaagcctcagaatcaagcctgatcatcatacagttagtttcagcctttctcctgagcattttgcaagtaccagctcctcacagtcctaactggttactatcagtgttcccattttacacataagaaagctaagtcttaacgaattaaattctccaggtcacacagcaagcaagggagcaatcaggattcaagygttagctggcttgaaagtgttagtcactcagtcgtgtctgactttttgccaccccatggactgtagcccaccaggttcctctgtcagtgggattctccaggcaagaatacaggcgtgggttgccattcccttctccaggggatcttcccgacccagggatcaaacctgggtctcctacacttcaggcaggttctttaccgtttgagccacaagggaagctcaaaactagcttaccagcactcttaaaactgatggtgctattstgctttcccaaagtaatcagattaatttactgttaaa

SEQ ID NO: 3951 - DNA, 579 bp, Bovine  MMBT09373
taactcacagggaatagccagatgtcctctgagacatttgtccgaaatgacggtaatattttatgaagggcactgacaagcaacctgtttctgaatttcatttagcatattgagctccagccatgagaactgccctccaaggtgacccaaggggaagggagaagagtgaccatacgttgaggacctactaagtgctagagaccttgatggacactttgaagatgccacrcactcattcatcccaaaaagcaagggcggacacagtggttttcaaacacaatgcccaggcactcatattgyctgcartgtcacggataaatgctacaatctgagaaaatgcaggccacttttgtccgtgaacactgaagagagatggagacaggaaaagcaattcagagtaaaagaaggagatggatacactccaggcaagaaattggaagcagagaaaagataaaagtaaaaatccatctatttttaaataaataaatgtctgttgtaattgaacaatttataaatatttacgcccttggacttcaaacactttccatagccacttctattcaaatattggtatttttt

SEQ ID NO: 3952 - DNA, 601 bp, Bovine  MMBT18827
  misc_feature (1)..(1): n is a, c, g, or t
nctctctactgctagtcagccactagtggttgtgaatataacaatacaaactttgtcctgctggaggtgtaaagactaaaaacagagagagagagagagaaaaggatatcagtaggtgtaatggaaggagctttttaaaaaatgacggtcgttaagacagtacagacatccgtgtcatggaggagctggtggagtaggtggagagcctgatcagatctggttaaaggcatagcttgagtttctccagttagagcaattgaacatccacactgtagtatctgtgtgaagatatatcctgagrgaaatggggagcaatcaggaggggattctgaaagcatacctcccatccacagccccctaacatacacactcactcctcactcgcaggtttctctttctcagagctgctcctgcagcaagtcaggcaaagagggaggaaaatatatttagatatttcattcatttcagaaaagaaaacaaagctgtaataggaatgattgcttttaggttcctctctgttacttggatttacctctatgggtttgctaaacttgcttaattttgaggttagcatgagaaaaaaaaaggaggaaggaagaga

SEQ ID NO: 3953 - DNA, 603 bp, Bovine  MMBT06595
  misc_feature (1)..(3): n is a, c, g, or t
nnnatagagaagaagtcataataagcctttagcttagagcrttaggcaaatttcatttcattttcccttgcctaaaatatgaaagcataatttttttccacactgtcagctgtagatagattaaaatataaacaaatcaagtggtcaaactttcttagaaaatgaaatcagagaaaactcagttgcttgtctayttctttgagagaaggggagtttgcttcctagttttattttattctgagctctcgccctctgaatgtctgaagcagtgaagaaactggggagaaaggcagtaatagaccrtygcacattcttaacagcctcctctggtaagtgtcctctgaaagaggacactttcagactccttttctgaaatccattatgattatagaatttagagatgaagggaccaaagagatcatgtggaayagktgttttccattcggagccagcagcacccagccagagactccacccattctcaggcagactgtgccttccagcccctatgtccatgcaggaagctgccagcattatgcaaatcatttatgtattctaaggagaggttttatcccaaaggacacaagggaagagtcaaagctt

SEQ ID NO: 3954 - DNA, 600 bp, Bovine  MMBT17297
tgttatattctcctggaatttttttggttttttatttaaccaataattttaaatagctattgtgcactcaaaggttgccactctgtggcagagaattagggcaagtattggggtttttcatggtgatttaaactacctcgtggtttctgtgtgtatgtaacacaccacatacacacatgcttagtataaatgtgcatatttagtgtttgggtggtttttaggatgwgtattaagtatatgatctttaaaatcatgttatttaacccaccaatcaaatgaaaaggggtcagggaaaagagkgttgcagattktctccctcaaagctagtgtcagaattcaacacctgtgttcaaaggctgtctgtccctgtcctgggcaagacttgtaaataatactgaacacccataagcagtttttctttctcggmcctgcaccagttcgagttcctctttcttgcctctggagcatgttagggttaggggtttccttggaggttcaagaaaaccccactcatcagcagggctgagactgggaggcccatggcggttcagctagctgcctgtgggtcgtgccgcgatggtggctggggtggaggcagct

SEQ ID NO: 3955 - DNA, 600 bp, Bovine  MMBT07168
cacaacaaatgagcaaaaagaacaggattctgacacaatgcagctgtgaagggggtggggcctgagggtggtgcagagctggaagagccccggtgggtggcagggccccttgcacagatagccacactgcaccacagtggcagagctgctattggaaaggggcaggcgtgtattttctatttccagaattgatcctttttccaagctggcctcagatttacccagaaaaaacacttgttttcgttcttgctgaagtataacaagttagactcctcccaggggttgctccctggaataagrgaatcggcagcaaaaggaacatttccaggatcagccacaaagaaggggctgctccattttcacagggacagcactggtgcctctgctggccgccaaaccttatgcccgattcccactaaccaggtcttggtatatttattcataaaacactgatgaagcgtctagtacagctcatattacactaggcattggggaaaccagtctgtcttctggagacagcagacgctggccaacaactgtgccggtgatagtacaattaaacgtgcagatggtgcttcaaagaaaggaaggactctgacc

SEQ ID NO: 3956 - DNA, 601 bp, Bovine  MMBT16304
  misc_feature (1)..(1): n is a, c, g, or t
ngagagayatttccccagagcttccctttcaagctctcacagctggaagggtcgcacagccaagttccaccctcttcaatgcaggttgtcacttggatgccggggtctgctgatctattagtcaaatacctaatgtgagaaaaagagccatcacacatctttctgcttatccatcattcaatgctscatttagcacaaaagaacctctctcccctttttctcttctgctgcagctaaaaggcccctcccaagagataaaaattacaaaggaaataaaagaaaaaaacacgatttctgagcygatgctcattcgtaattccgtacctgaggctgtttgtttccttgaatctgagaacaggaagggggcttggggaccctctcatgtaaccccttattttacagatggagaagcagttgcctggtgaggtcaagtgactcaccccaacaccatacaactagcaagggcacgggcagcatcagacccacatcacctgatcctaagctagactttacccgctgcaccactgatgatttcttatgaccacagtcacagactcttgtaagatttcatgattcaactagatgccgcccttgcagaagg

SEQ ID NO: 3957 - DNA, 600 bp, Bovine  MMBT20806
cctggaatttttttggttttttatttaaccaataattttaaatagctattgtgcactcaaaggttgccactctgtggcagagaattagggcaagtattggggtttttcatggtgatttaaactacctcgtggtttctgtgtgtatgtaacacaccacatacacacatgcttagtataaatgtgcatatttagtgtttgggtggtttttaggatgwgtattaagtatatgatctttaaaatcatgttatttaacccaccaatcaaatgaaaaggggtcagggaaaagagkgttgcagattktctccctcaaagctagtgtcagaattcaacacctgtgttcaaaggctgtctgtccctgtcctgggcaagacttgtaaataatactgaacacccataagcagtttttctttctcggmcctgcaccagttcgagttcctctttcttgcctctggagcatgttagggttaggggtttccttggaggttcaagaaaaccccactcatcagcagggctgagactgggaggcccatggcggttcagctagctgcctgtgggtcgtgccgcgatggtggctggggtggaggcagctgttaacagccc

SEQ ID NO: 3958 - DNA, 598 bp, Bovine  MMBT18823
  misc_feature (1)..(153): n is a, c, g, or t
nnnnnnnnnnnnnnnnnnnnnnnnnnnnnnnnnnnnnnnnnnnnnnnnnnnnnnnnnnnnnnnnnnnnnnnnnnnnnnnnnnnnnnnnnnnnnnnnnnnnnnnnnnnnnnnnnnnnnnnnnnnnnnnnnnnnnnnnnnnnnnnnnnnnnnnnntccatttcatgatgaggaaatttaagtcccaaaagagcttgagattcataatcctctgaaccaattaaattctaattttcaacagatgaaagcctttggggtcacttctttgggtgattatttggtgttgaaataaagagaacattstgtactcagacatggggactgaggtcttctcttgttgactgttaaaatgtgacagctgaggttgtaactccaaatacagtcagacacctcaaagtcaaaagagcaatgggcagagttaagaacattcagtgatgaactaatatcaacacccaatagaaaaaacttcagtaatggggaggcaaatcatttctggaacaagtttatcccaacttgaatgttgaaacaaaagactgtatgtcattctcacacaggttttggttcattgtacactctgaagatgttgagtctgaatccattt

SEQ ID NO: 3959 - DNA, 600 bp, Bovine  MMBT00578
tcttcctggccacccacaagggggcatgggtcggctgagctgcaatgaggctggctgtccacagagcacctgctgattcaacctgcctctctgcctgtgtgactcaagtgagttcctcaacctctctgagcctgtgtcctcatttctaaaatgggaaagattatcattgttgtgaggattggtgatggcacctatgaatcgcctggtctccagcacgtagtaggcattagtgataagaagtggatacaggaggtgctcctggaatgacagccactgccatgcctctagtctggcaytttstatgtgggatggtgtgtgctgctggcgggtcagcctcccccatctgaccatgacctcttcaagcatagaacattgctgagctttctttctgtatccagagccctgcacacagcccagtactctgggttgacatctgctgaatcattggaaactgacatcccaaaggagggaaggaagcggagggcacttccactttgtgttcattgtccaacagctgccaagccttgaaaccctctcaaaggtctgttttcagccacacacatctaggaagggcataaatttcttgacagcagaggggtt

SEQ ID NO: 3960 - DNA, 600 bp, Bovine  MMBT11757
ttgtaaaaagtatttgtcaggtccagtgaatatgcaaagcaattctgtgggttgaagtcaataaaatcaactgttagtaaataaaatatgttgctgtgacagaagatacaaaattaaaagaggattttggccttgctctaccatccttcattgcttgacaggagggattggaaggaaaccaatacagacatatctcttcagagctggccctgggaagacttttacagtgggtgaaatttgttttttagaattcttgtttcactatatggactgtcctgagcactttcttgtctctgggcyctaggtcagcccctgataggcaggaaatatcctcttcatctcttccwtaccccttcctcaccctttacrtgtatctgatttgcatataatatgtgcgatgccttccatctaaggatttgagtaccatatccatgactactgaaagaaccagaaaaaaatcaaccatatatcccttcccagatagactccattgtttagatgagactatgttttaatgtatctttaagagccttttaataacaaaagtactaaatacattctttgtaaatataataggaaatagtaataagcaaagaatgc

SEQ ID NO: 3961 - DNA, 600 bp, Bovine  MMBT08101
ccaggggatcttccagacccagagattgaaccctcggacccatgtctcctgcattgcaggtggattcttttactactaagtcaccagtgaagcccctacatttgtttacaatttgttaaatagtatcatgtgctccctgctcccacccacccccaaaacatcacttggtaccagacccccaatagatgtcatgaatacctgttaaaaagattcaaagagcagtctcagcttagatcttcaaatctcaatggactcgtccatcctgaataaaaaacaatcacttgggcctttcaagatgarttacatatcttaaccacaaattatctttttctgacctaagtaaacacagtggagcttgtgaggctgaagaaacattgctcaggagcagaaaccaactacttatcttcccccaaagaaatcaaagccaggagcatggggcacatgctgcaagagccaacatctactaggttggaggtggtcctggttccatcctcaatccctagggccagattgccagcccaggagactcaagtcctttgccaaccaacagagagaatccttggaaactcttgtacttgctgcccccacaccagcttacaa

SEQ ID NO: 3962 - DNA, 600 bp, Bovine  MMBT11008
cacacrgctccacccccaagaggctgaggtgtggggggtgctgtcagaagggccagcctgcagtcagatggttcatgaccgatgtgttttccagggtgatgaagatttggggctgaagaaaggccttcagtggaggatggtgggttaacatctagaactctgaaaaaggactcactgcctgaactgatgggtcctttctctgaactggcccccgtgtctgagcacagggccgggagccagggcctctgagtctggtgggaggactaggaggcccagtctgtggacccaccagaggtgggsagcaccccgaacgcccactcaccatctgtctgcagcgtccactcgatgtgaaccacggggagcaartgtccttgctgcgtgtgggcgaagcgcagctgggtctgcacgttttttgggkacgagggggtgaggttccgagggtggatccagctgtcgtccaggcaggtacctgggagcaggagaggcagaaatcagaggcttgcgggctctaagggacagagatgcagcccaaagaggatgcctggcggggtccaggagccttcacagtcaggccatgaccccaagaccaaaactgggctc

SEQ ID NO: 3963 - DNA, 600 bp, Bovine  MMBT18828
actgttagtaaataaaatatgttgctgtgacagaagatacaaaattaaaagaggattttggccttgctctaccatccttcattgcttgacaggagggattggaaggaaaccaatacagacatatctcttcagagctggccctgggaagacttttacagtgggtgaaatttgttttttagaattcttgtttcactatatggactgtcctgagcactttcttgtctctgggcyctaggtcagcccctgataggcaggaaatatcctcttcatctcttccwtaccccttcctcaccctttacrtgtatctgatttgcatataatatgtgcgatgccttccatctaaggatttgagtaccatatccatgactactgaaagaaccagaaaaaaatcaaccatatatcccttcccagatagactccattgtttagatgagactatgttttaatgtatctttaagagccttttaataacaaaagtactaaatacattctttgtaaatataataggaaatagtaataagcaaagaatgcaaaagaagtataatcccaacattcatttgcattcttgtatctatctttcaagttttagtatgttacatt

SEQ ID NO: 3964 - DNA, 600 bp, Bovine  MMBT20874
gcgtatgaaacaggtggaagaactgtgagtaggccggaagccctgccgagcaccacccgccgcccctgtccatcctcccttccctgcttctcttgaaggcrctcactggtcaaggaaggcgaggtggcgggagggcccgtctctggcagcagctttggctcacgagggaaggggttcgggtgaagcygtgtcagctgtggccgcttctctcgttggtgcttctgtgcagccgtgcgttcagagcctggtcrgttcgcctgctgttagctttcttactggactagccactgtcagcagacygggcggccggtaccctagtgctcctctcttggcaggaaaccaaatgcctcttaaagtctctgattcttggtaacacgttcctgttttatttcgcttttggagacttagattctattytagatctttttttaactttcaactcagttgtattaagtttgctattttcacatctgcaaggataccaggagttcagcctgttgtattttggttcccaagggttcaagtgttgttggattcttcataagaaatcctcagctaatgaaatgtgctttacgtgatttctccttccaaagtggccaa

SEQ ID NO: 3965 - DNA, 600 bp, Bovine  MMBT07276
agctggttttaatagttcagcttcccaactgttgatgtcagcacctgtgcagcgcctcccccagggagaggctgccctggtgctgactctgctggggacttggaggccgtggccaagctccatccccatggagtagtgggagaggctcccctgacttcgtgggctgcactgactgagtcagccccacggttgaacattttaggttgctgttaacgttttgttatttctttttttttaaattcgaacatgccagctcttagttgtgattaagtgggatctcatttgctgtatgtgggattyagttccctgaccagggattgaacccaggtcccctgcattgggaactcagaatcttacccactggaccaccagggaagtccccatgttttgcactttcaaattaggctttgctgaatacatgtaagccatgcttgttatgagacttgtctaaaaggagaatggctggagcagtgggcctgtgtatttttaaagcatttggtatatactcttgcatcgtcctccagaaaggctctggtggggatgcagcctctgcaggaatgaggaggccccctttcccactgactcccaactccagacttt

SEQ ID NO: 3966 - DNA, 600 bp, Bovine  MMBT07031
ctttagaactgaagacaaaagtaacccttacacctatttccaatcaagaaacctcccgggttcttccaaggattagtgaagggagaaggcaggaacggttggtagccaactcttccccaaacctacctgaccttcccacgagccctttctcacccattaattcaccgtggctcctctgtagcccgagcacctccaagctgctgcaactaccttccttactcaattcccaccgcatttcctggtgcctgaactggcagtacaaatgctggcaccgacccccggggctgtcaaaagggcacrgaaaacggcaaaagtaacccacggagcgtagcatggactactgctcgaggttcacctcacctggctccgaaaacgcgcctgcactgttgcggtgacagtaccgggaaaaggcgaaccccccagcccactgctacttctgccttatatagtctgcggctactcggaggcggcgtcttgtagcttttccagccaatgggcaggctggagctgatgtcagggragaaaatggggagagaaggatgattctgagaatggatggtagggtagtggcatatgagtgtagtgtgtgtgtgcgtctat

SEQ ID NO: 3967 - DNA, 598 bp, Bovine  MMBT00809
  misc_feature (1)..(10): n is a, c, g, or t
nnnnnnnnnnatgtatggttatgattacaatgccatcttctcttaaaagaatggctacttaacccagatgaaaggccattcacaagcatgccccaaataagtggacacaactgttttgaagctgttttggctattgacgctaaattatattctcttgcatgttttagattcagaaatatttgaggaaaataacacacagacaaaaaagggaatacaagcttaacaagtttctatattttttaatttcctgaatcatttatctagcaattatttatattagactaaggaggcaaagctgayccatatgtatgtatgtcctcaagtaatctaccasctaatgagaagtaccagtatgcatataaaaaacaacaatgaaatagatgctggagtaaaccatgaaataaataccaatgcaatgggaagagaagggggagagtggcaaaccataaacttaagacaaattgtccatggattcttctttctttctttgtgtagatgatgcaatgggcagaaagtagtcaactgtacaattctaatcaggatatagaatatgctatgaagaatgtcctctgcagttatgcatcacggcagccctaga

SEQ ID NO: 3968 - DNA, 598 bp, Bovine  MMBT11135
  misc_feature (1)..(128): n is a, c, g, or t
nnnnnnnnnnnnnnnnnnnnnnnnnnnnnnnnnnnnnnnnnnnnnnnnnnnnnnnnnnnnnnnnnnnnnnnnnnnnnnnnnnnnnnnnnnnnnnnnnnnnnnnnnnnnnnnnnnnnnnnnnnnnnnnncttgggaggcttataatctagctgttcttctaaactgatttttacagaacacctgggaagcaggcccagagcaaatgagacatctgagaagttcataagtattattttcaaggggttaatagcatagaagctctctaagtcttccttagaaagaaatatgtgacaccagatrscaggtcacagagctggctcataaggaacaggagtttggggacactttcacagtgccaagttaagaagatacaagagaagaaaaaaaggaatttgctcttttctttttatttctaagctcgtttacagtttaaacctgcatgaaatctctacttagatcttcagaggaaagataataagtagctcagttaatagtttgggatgtgtcatgtaagatgctaccccaaattgtgctggccttgatgacaaacttccatgaagaaactttgcaataaycacaacaacttaaagcaaaggtg

SEQ ID NO: 3969 - DNA, 598 bp, Bovine  MMBT13694
  misc_feature (1)..(19): n is a, c, g, or t
nnnnnnnnnnnnnnnnnnntccctttctggtgtccgattcagagaaagaccatgtccccacaagccagcagcctccacggcccctggaatcccagcttcctggggcactggctcacatgctgccaagtacagtgtttgtgcggatggcaacccagctcactcatccctgtgggtgtgcaggatgcctggacacagaggacaccggggaacacccactctgcctatggaaacccataggcgacgcaaccctcagaggagagaatcacacaccacataggtaaatccttttgtgacccacamgagagacaactagaagacaaagtccatgggatagtcccatcactctgatctggaccacatttccaacaacacacaactaacatcttgaaatacataggctttaactgtgttctgaaaagaaaatcaaaagcctgcttcctttacacaaggtgggcacatgagcaaaacaaataaaccratatgcaaatgagaacgacgtccaggctcatacsagaaagaaaccaacctaagtatttcatagttctgaagggaaatacataggaaatgtaataccaaattgagcgaagcctttggaacc

SEQ ID NO: 3970 - DNA, 556 bp, Bovine  MMBT18247
acccagcaacaagcagctggcaacctcatcagagtaaatcctttctcttccaagacctcartttttctcacatgtaaaatgggagaatacaaggacaaaacgaaagattcagagaaaaacacaccgaagggaaacaacagcacagcatctggaaccaaggagatgcctgaccacatcacttctgtcccctcaccctcccaccccacatgaattcacagggtcagcagaggatgaccaaggaaaagactcaaggtcagggaccgacgctggtcacagaccccaccgatcataccgctgggyatccgsaacaggtccactgtccctccatctgtgtcgggcgggactgggggctgggacagagaggctgacgagcgtgcctttaaagaatgtggaaaagaagcacatttccagcagaggggctgggtgatgaggagggtttcccagggctgtggtgtgggagaggggcgcgggtgaagctgacagggaggaggtggtgggccgtggagggctttttgcttcagggtgttttgttgttgttctgcatcttgtttcattt

SEQ ID NO: 3971 - DNA, 600 bp, Bovine  MMBT01239
agggaagcccaagaatactggagtgggtagccttttccttctccaggggatcttcccgacccagggaatcaaactggggtctcctgcattgcaggcggattttttttaccaactgagctatcagggaagctctctcttgtgggacatatactattaacagtagcttctgtgttttgtagcattatataattcaaaataatgtttttgtattttctattttcctgtgtttaatttataagagaagcagaacgacttttatttataaaaacacaaactccctcacgtgcttcctatgcagarcttttccatgttagcctgacccagctcatccagtctatataaagtttacttataaagtaaaattttcacagtattatagaattaaaactgtactttgatattgaaacagatcacggcactggaaggtgagttcatgttaatacataatagtgggtccttgggagcgaaaaatggttcccatagggtgtctttcaaaatattattaaaataaagcaatgctgcagagacatggttttcatcattgcagtggaggtttagtacatctaactgggatttgagtgagcttgaaacacttaaccc

SEQ ID NO: 3972 - DNA, 598 bp, Bovine  MMBT18995
  misc_feature (1)..(15): n is a, c, g, or t
nnnnnnnnnnnnnnngttttcctttgtgctagtccagagcttctcaaatcttggtcacataaaagctttagaggaaactcatattcagttatcagaaattgcttccccttgatttatgatctggtcaggctccttggtaagctatatgaactctcccgaacagaaaaagagaaactgcagatggattcggcacatataaatgcatgttggcagtggatatataacttcagacagttcagagataataaattgagttccctgtcaatgccagctgaataaacacatttgttgtaaatgatytgacaatagcattattgattataaatccacaatttgacattcggaatcacatctcccattttactcctaaggaagggagcgacttggtcctttttataggggcgacttagcaacatctctggcaactcagcttcttcccgctgtgattaattaaccctgagtccctctgatgtctctctcagggggattgcattaaccttgctttgcttatctggaataatatgtatggctagtgcctttcaacaggagcttggttttgcctgcctgttttagtgttttctactttgaagttagagag

SEQ ID NO: 3973 - DNA, 598 bp, Bovine  MMBT02478
  misc_feature (1)..(188): n is a, c, g, or t
nnnnnnnnnnnnnnnnnnnnnnnnnnnnnnnnnnnnnnnnnnnnnnnnnnnnnnnnnnnnnnnnnnnnnnnnnnnnnnnnnnnnnnnnnnnnnnnnnnnnnnnnnnnnnnnnnnnnnnnnnnnnnnnnnnnnnnnnnnnnnnnnnnnnnnnnnnnnnnnnnnnnnnnnnnnnnnnnnnnnnnnnnnnngtcttaaaaccagcaagcaaactttgagtaaaatttccaaaacagcagaaattatttaaaaaataataaagataattattttctcctgattaaacttctaaacattcagagycaataaaagtttatacttaccaaatgtgtcatagttttcaaacacgttgttacccacattaatttccayagctcctcaatattatccgggagaggtgtgtaaacataatatgccccaaggacccccacgatcagaagcaaaatcgtctttcttcccatcatgttttccaactgcacattctacttggcagcaaagcaaatacacttctgaaatatttgaatgttgaaatttcataacagtttttggatttatcaaaaagtgttatcttacttcttagacacaaattccattggtccar

SEQ ID NO: 3974 - DNA, 599 bp, Bovine  MMBT05697
  misc_feature (1)..(10): n is a, c, g, or t
nnnnnnnnnnatgaaaatggtaaatgtccatatgcaaagcctcagacaaagcctgtaaatatttgtgaaattacacttactctggcttttcccagggttacactttgataatctttttgatggattatatgcagatgtgtgattatatagatagatgggaaaaggaaaagagaaaaatgcacagggtgggtatagttttttgtaactcttctgaaatgtcaaactcagattgtgacaatagaagcagaataagaaatgctaagattttccaaaaaggaactttttaaaaaaaattttttcrtagccataactctgaaaatgatataattgatcctgtagaagcttttaaaaatgtagtcaattaaaaacatactccctactaagtaggaaaactagatatcattaccagtgggggttggtcaggtcaatctggtactggttaggttatctcgtatggaagccctggatgtgatatccttttcagatggagagatgaactgcagatggatataatgtattccttaccatagtacctcactcactcatcttagactattatgtatatgcatatgtatatatatataaagtagctaagtctg

SEQ ID NO: 3975 - DNA, 600 bp, Bovine  MMBT14209
gagcagcacgcgcgcaaacagcagcaggaagaggaggtagctgaccacgttgcccatgaaggccgtcaccggcgccccccagaactgcggccagcggcgcaggcgcggcaggcaccccccacagcagtccctgcgtctgggcggcctcagtacccccaagggcatcttctcagggggctctgtggccctgtgcgggagaaagggggagaagggaggagggctcaccctgatctctgcacctgactttcaccaccatcaagactcagctttctgaccctcctcatcctgctttccagtcartccccaccttcacgccttcggacrccctccatctyctcgagttttgacccctgatctaacctytgaaatctaccttcaacactgctgagcttccacccctgactttccccacccttctgacctctggcctctggcctctggcctgacttctgactcttktctggcttttggctccaagtccctcttctttccccctcacaatctctggctctctttctgaccttggaccatctacctgacctctggccctcatatataacctctgacctcctcatttcgcgacctcggttccccaggttt

SEQ ID NO: 3976 - DNA, 600 bp, Bovine  MMBT15849
ctatactratattctggagtttagtgtagctccaaagaaacaaatgtaaaatgggttaaagaaaaaaaaaatctggatgtttccttaaagacaactgtcaggtttattaatgtgttcatttatcagggggaactgtgacgttataggaggtaaaaatagaaccagtatttgtctgctctccattgtgccttctcctcctgtccctctccctccgtcactttccattccttccctgtatgtggtcttttctggacctctcccacctcccatagacaatttagaatgctaatgagttaagtsagagaaagacaaatatcatcttgtgtgtgtcttgtgtgtatcacttgtgtgtgtctaaaaaatggacacaaatgaatttatttacaaaacagactcacagacaaacttatggttaccaaagaggaaaggttgagggaggaataaattaggaatttgggattaacagatacatactgttatatatacaatagataaccaataaggtcctattgtataatacagattacttggctcaatatcttataataacctgtaatgggaaataatctgaaaaagagtagatttgtgtacatatatatg

SEQ ID NO: 3977 - DNA, 600 bp, Bovine  MMBT07280
aaaggctaaacaaaaacaaacactttcagaacttccccggtggcccagtggttaagaatccaccttccaatgcaggggacttgcgtgtgatccctggttgggaaactaagattccacatgccatggtaagcccgtacgccacaactagcgagaagccagcatgtcacaatgaaaagatccagaatgctgcaacttagacccgaagcagccaaataaataaataaatataaaagaaaaaacagaaagaaagtatccctctactttataaaataaatacttttgtttttggtggtgacagtmcctagggtctttaactcctctgatcaacccaaagaaactctgggcagcaaccatgtcagcaggccagagagggtaagtttgtatctgtggatttccaaggagacaggttaagaaacagcccccttaactgttacctggaaagcagagagctagcccttctgcctagaggcgggagagaggcgcaactgtgggtctgaaactcactcgatgccgaggtccacctcggggatgccgctcagcatctggttagacagcatctcctccgtcttctttgccgaggaaacccggatgttttctggc

SEQ ID NO: 3978 - DNA, 600 bp, Bovine  MMBT10112
ctttaaatgtgctagtggatgtttcatttaactcaataataggtttataaaccattaattttataattcattcaagtcttataagatggtcaaaattttcaaagcaggtattaactctgctttttggctrtatcgaatcccacctctgctaygaatctggctacctgcctttgttgttttgcrggggggcggattctcaatttcctcaccttaaatraargattatgaaagaaatttcattttttaaaattttgccttcttttggattttactagaaccaactgtactagcaaattattsactaaagaattccctggagcacagcctccaggctggagggttttaggtcctgcctttgtacttagaagtcctgagtgaaatctatgcaccctgccgtttctctcccaccatattatgtggactacactctccccrttgtggggtatttctatcaatgagcaacatttctcctttttgttactcaactagaattgtttgattctttgcactgaagtttcaaatgacaatctggatagaaaagtttactgggtagaaatgtttacttatgtatctctctacttagaaaacttatccttcgag

SEQ ID NO: 3979 - DNA, 600 bp, Bovine  MMBT12212
actatttttaatttggggatgctaaatattgctgtaataggaggtaactcaaagagcaaaagtgaataaatggcaggatatataattattgtgtatttaagaaattaaccaaataatggataactcaaccagtgtctcttaacccaagagccagttttattttctttcatacattttctcctaagataatgggcatcttaaaaaaatgcttttaaaatgtattgcttacagcaaagagttagtagtctctgcagttaattttgctgcgtaacagagagagagggagagagaaggaaggcrtcactataattagacacctgggtttgcggggactggatgtcatttaaagcattttattccttgctgcagaactctttcagttgagtaaatgagtaggaattaatcaatgaaaacatgacagtgttctggaaattttataattgatgtaatgtttttgtttattgggccagttccacctgattgacttgcagattgcagcarctctgacaaggyacccgtcgctcacatttcaggtctctgcaccctgcactgcagatctacagccagatcratgggccccaagatcatgtctgagattgc

SEQ ID NO: 3980 - DNA, 600 bp, Bovine  MMBT12597
aatatactttaccttatttctgtccttttaaatgtattgagatttgcttaatgctgtggcacatggtctatcctggagaatgttccatgtttatttgaatgtatattctgctggtggtggggggagtgttctacaggtgtcaggtctagttggcttacagttaattcagaccctctatttccatgttaatcttctgcctagttgttctagctattattagaagtggattactgaagttttcaaatattattgctgaattgtctctcttttcagttgtgtcagttttgcttcgtatatttyagtgccttattgttaggtacataaatatttacagtattcacttattttttacagtcttgatctaaaaaggatttaagtggttatggtatagcaagaactcatagattagagtagatgagaaagaaaaagcaagacaagagtagcaacatgaaatagaatttgccttcttgttctctgatgtctctgtgtgaacagagcctgatgcatagtaggcccttgtaggattgaaataacatcaagaacgaggatgtcccaaaaatgaagtaatacacattttataggtgaaccattaatttggca

SEQ ID NO: 3981 - DNA, 600 bp, Bovine  MMBT04112
ctttatatctttgataaaatatttaaataaataggtcgccgacgccgtccccgcttcgaataccctggatcagccgaggcaggaccccggcaggttgccatccctcctccaggggatcatcccaattcagggatcgaatccaggtctcctgcattgccagaagattttttttaatcatttgagctaccagggaagcctgagaatactagagtgggtagcctatgccatcccaggagatcttccagacccaggaatcgaaccagggtctcctgcactgcaggtggattttttacctcccarctaccagggaagcccaatatacttcatagctaaaagccattcccagtggaaaatagaggcagtatatttgaaattaaaaggtggtgctctatttacttgttttgtatagtaattttcttgggttgtcaaattgattactaaaaataataccacctattatagaagtgaattgaaataaaattggtacaattattaaagtggatgaagtattattacttacagagaaaaaaaattactaaacagaaagatgtcatatattaagctgcttttttctcttaaacactagaaattttaaatctc

SEQ ID NO: 3982 - DNA, 600 bp, Bovine  MMBT07162
taaacaggactgtaggtcacaacaaccaggcttgtgatgggaaggccaagggcagagttgttaccaaagcaagtataagaaaccagtggcatgacatgggggcccattctgctaaaattaaaaaatacaaacctacacacaccaagaataatcccttccatgataagtcacaaagagaaatggaaaaaaatctctgagatcaaagaaatctattcttttaccaccactgagtagaaggcacagacagacccttgggaagaggtcttaggaaaatgtttccacttttcgtttttcaagagytatggcaaatatgatatagktttaatcagcttgatttatggagtaaatgataaaagtggagtgctacctctctttcataaactggttttcctttttagaatagttaacactattatgactgaagatttactgtattcttacagtgagcaagaacacacagaatgatgaccccactccatcagtcagggtccgggaaggaaaacacaaaccattgtaggtcttaataaacagaggtaatttaatttaggggattggtcctagaagtaatagaagtactgagaagccaaacagcagatagcg

SEQ ID NO: 3983 - DNA, 600 bp, Bovine  MMBT10327
cactttttgataatttgtaaattattttaaagaaactgagtcgccttttcctctaattaacgctggtttgtttcgcttttccccgtgaatagatcactgtcctggatgagacgtggaccgtgttcaggcgttacagtcgtttccgggaaatgcataaaacactgaagctgaagcatgcagaggtgagttatgacatagttattttcaattaagaacatctgttttcaaaagtaaatgccattggctgccctgtcagtgccccctccttcctctttgggtattagcttatgcgtgtcaccragttttcctccagtcactcatctctcaaagacagctttttaatttttgttctctgttccgtttgtactttacacaattcagacatctttctgaacacaaaattttgagtgatagtaaggaacagtaagtcatttctatccttttcattaattttatgatgtattttaaataaatattttgatcaatttataacttctcaaccataagtgagacctattaaaatgaaatagtaatacatttttcaatatgaatttgcccctgtttcctgtaaaaaaaaaaaagactgcattaatgcttaga

SEQ ID NO: 3984 - DNA, 601 bp, Bovine  MMBT16488
  misc_feature (1)..(1): n is a, c, g, or t
nctaggaccttatgacatccttttgacactaacttgtcagcaactgtgatctcagtggaggctgtaattgccccatgaggagagtcaccatgtggattctgtcttctactttgtgagactgatcaccagaaattccagtcttctgatgatgaaacttgcagaaaagtatacttcaaactagttgactatttactggttttcacgtttgcttacatttttagtagttctgaagtttctaagtcttataaaaaaaaaaaccaacgcaatatttcctctaaaaacatctatttggaatgtagcrcaagtactgagtccagcagtggcccattaaattcagtgaacaatttcagaatacctcaagttgtaggtaattagaaatgggttcaggatatgattataagtcaaaatagctggctatataagtaacattagccagactctgtaaatctgctcaattgtctgattttccccattcagaatacacccccaaatgaactgaaacagttttagtttgggctttactcccttttccactcagatcctactcttgaactgttatctgtaagagaaatgggagggctctgtcagctgaaggggtctt

SEQ ID NO: 3985 - DNA, 600 bp, Bovine  MMBT15504
gctctggccactcttggctcrgggactatggcaaaaggccgcttccccatcgcaacccaaagtgagcagctgctggaggattacaaagcattggacctcctcgtgctcattttaaatgttatctcagctgggcagttcttgcaaatgagcccttcaccctcccctgcctccccgtccccaccactaccacccaacgctctaccccaktgggcatgggccagaaccagggcctgtgaggggaggctgtaaactggctgcggctttctggccatggaggtgatgttcccagattgactcctytggcttaatgctcagatgctcatggcagaagctggttggtcagatgcggcagagggatggccttcgatttggaggtggcaggagttaccagccagagctcagtgttaggctgtttcctggactgataaacgagtgtgggagagccttttttgttttttccctgaacaatggaaacatctttctttctgctgcagaaaaacttgtactccataactgtccacagccgtgccctgcaggtttcagaaacacaaagccaaacctttcatcgattctgctgaaaaataactgcctcttctttct

SEQ ID NO: 3986 - DNA, 600 bp, Bovine  MMBT08973
ttagttttgaaatgcttttagaatatcacagtagactaagcgttaactaattctacttttctcccattggcagaagtcctttaaaccatatctgtgacagtggtcaactaacttttatgtgaatacttgaatgggtgtcagtgagcttactgtttcacagggcaaatggcttcattgttgaacaactctaattggtactgtttcccctcatgtttcattcaaatctcagaacttctggcctttccattcatagctctttagagaaaaagagaatgattacttctctcacaatgttagacstccaaatgtgttcttttaaagttatctcttttccagaataatcatctccagtaaagtttggttgtcactcacattactgtcatatttccaatacttcaatacccagtcatcttttggacatgacttcagtgtataactgcagctcttaaaatgttcaactctgaaatttaacacatctatggaataacaatatgggatatgaaacaactatagcctcttttgattttgacatatacttctattaataatatctaaacttgcatatattttaaaaaatatgcctctgtacattactgattc

SEQ ID NO: 3987 - DNA, 600 bp, Bovine  MMBT19018
aaaccaagtatttccttataaagttctagaaaacaatagatacttacttcgatttattatgtttctgactctggcatgaaacaagaatcaggtttgttttcacatcctrtaatatctttgccagtttactagccagagcctcacaaatatatttccttattaayaccaataygaattttcctcatactgcagaaattmttttcttaatgtttaaaacttgtttgttaagatttaaaaatctaaagtatttagatttttaatgctaagagtagaacactctcattgttctaartagttaarcaaaattattttccccaatatggagataatcttttcccccaagattgtaagcaaactcttactgttgtaaaaatttggatagtacagagaattataaagaaaaattaatgaccctaaaaaaattaatcacattaatctcactacccactgatgatcactgtcaacatttaacatctagtatattcaaatatatgtaaattttacaatataggattatattatttgttcttattttccatctaatgtgattatttttctcatgggtaaatataggactatatcatcttttcactgggctca

SEQ ID NO: 3988 - DNA, 598 bp, Bovine  MMBT21742
  misc_feature (1)..(178): n is a, c, g, or t
nnnnnnnnnnnnnnnnnnnnnnnnnnnnnnnnnnnnnnnnnnnnnnnnnnnnnnnnnnnnnnnnnnnnnnnnnnnnnnnnnnnnnnnnnnnnnnnnnnnnnnnnnnnnnnnnnnnnnnnnnnnnnnnnnnnnnnnnnnnnnnnnnnnnnnnnnnnnnnnnnnnnnnnnnnnnnnnnnntgtaggaggactccgggagccggggtgccaccagcccagggtggttgcagatccgctgtagcctcaggaggatgctcagcacgtccacaaagtgcccgctcttcagcgcttcctgggtcctrcgcacatgcrggaagagayaggagcattgccaggggtgcaaacatgtgccagctgggcttctccccgtctgctatccccactctatgaacgcacarctggtgcatccccttgacctggtgagtaaatctgccacatgccaacccacctccatgaggttgtggttctgagactggctcaccaccccatgagagaggacgggaggccagagagccagggtacgggttagacrtcggggcaccctccatkgcatgcccccaaagagcaacagggcaggtgtcccaaagagcccaggggtct

SEQ ID NO: 3989 - DNA, 600 bp, Bovine  MMBT01900
gtcatttaaggaaagtgaacagatggaggaaggaaaattaataactaaatttccccacctcattgattgagcccatcacaaagaatattagaatgcttgagattccttctcatgctttagaatatgatcctagaaactaccaagcagtttgcagaattcttaaagcaaagctattccattatcagtgtaacaagcatgaaccacatcttcagtttgagaatcaagacaatcaatcctttgtgtttttgcccaaatttacttgctccacctctactccttccctcacccctgaagtctagwacctcctatgagtctccattcattgctcaaataaccaagaatcacactactttcttaattcaacataaagacctatctctaaacacatcctgaaaaggggacagggatgccccataagtctacaagtcagagacttctaacattttcttttaatgaagtttattttatttgcacattgcaccttaaagtcttttattatattctgtgaaagtgaaagagcgttagttgctcagtcatgtccgactctttgtgaccccatgaactgtagtcctctcccctcctctgtccatggaattcccc

SEQ ID NO: 3990 - DNA, 600 bp, Bovine  MMBT05194
cttttctgtagtaaccctgcctcccctgcatctcttccttggctggatttcttgagcacctcaagacccccttcccccgctcctaagatgggccagccagcacttgcagagatgggagtgcagtaaacccacatgtatgggaaagagccaaggctcagatcatgttgggccaggttaagataagtctaaagatggagtcagagagccaagaagtcagaccctgggagctaagatcagaccaaagcaaattgcaggttaagaggaggaagttaaacttgagcagttgtctcatatactcaytcttctttgaatcatgtctttctagatggttagcttggctcaaattgtgttatttattatcttgctatgaaatgtggtttaataaatattttattgatggtagtattatttttgagatgtggaagctgtaataaagttatattttctgctggcaaaatcgttcctagcttgtataattttatgttggaattaaacacatcagtgattcatggtgctatgtaaagggcaacatggctttgaagtatctgggtaccataacaagtttggaaaaccactgttgaagaaaacagtataaaggca

SEQ ID NO: 3991 - DNA, 600 bp, Bovine  MMBT10329
tcacctctctaagaaattacttctactcctatccttgtttctgggtctatttctcgggaaaccgaaaccaagacaaaaaggatagacaactagttccatccttaacaggcagaccctctccagagaagctggaagcaaaactgaatgtaagaaagcctggtgtgcaaagatgcaggaggtgaaaaagaaggagctggcagagccatatgtcttataagcccagcggtcctcatgcagaagtagggcttggcgcagtgagtgtcttggcatctgacagtaatatttacaattccttctccrctcaaggrgagatggcagaagacagggtagtagaaggttgggattcttcccttcaggttccagcccagcccactcctaaatagagaaaagccaaaatagcttcccctccccacagctcaggtttgtcccaagcttttcccacttcagaagggcaagcattccaagctgtccatggtcagaactccccataagctcccatccctgcagggaagacagaatactatttgacttccagaccccgaatcactttcagattcatcatggtaggccttactattcaaacaagatagttctttaatt

SEQ ID NO: 3992 - DNA, 600 bp, Bovine  MMBT14969
aatccacagatctggggctctgagtcagctgtgtctgtctcattcagtgattcctgcatccagtctgagccgcacccaggtacccaaatgcccagtacgctgatgagcataccgctcgtcaggaacagaaacccaaagatgagacactggacaaactggcggctctccccacagaggaagggtcggtcggagtcygcctggttgttgcctcgcaggcgctcctcagtttgctgaagtcgtgcccgggagcgggccaggatcacagcccccagcccaaccacggcacacgcgggcccagcratcttcagcatcatgctgcagtctgggaaggttttgtattggcatgcctggaacccaaagatggagagcagaactcccacgcacagcaggatggcaccgatgacaaaaaggaagaaaatgagcttgctgacatgcctgtctccccggaccccgtctggctcagcagcggctgcaggagacatggccaggagaggccccttgcccgaggtgggtgggatgtatggattcccttcgatggttttagcagctctgcagacataaccaaacaccaaattataaaagggctacaggtgttcctga

SEQ ID NO: 3993 - DNA, 600 bp, Bovine  MMBT18092
ggggtggtgcctccggcaggtcacaacagatcttctgctgagagctgtgccctcccagagggcgggggtgggccggggagcagaggtgccatcatacgtgtggagagggagcatgtggacaggccactgtggacacagcagtggtctgtggactaatgacaaggcaggaaggaagagaggaggaagaggagggagaagggggtaataaggagaggggagggtgggcagaacgctactcagcaatagtgtttgacggtgcctcgtcactcccaggtcagcgytgtccagcaagttcccaasatggtacaagagttcgaggaagctggacgggactctcacttttggcatctctctgttcaaaatgccctggagctccaggaatttggcagggtagatctggctgtcatcttgtacatatttcgttataacaagtgatgcaagaagaattgaggcatctcctccagcaaattcactatttccctaacagtgtgtcccccagggctggaggctcagaaccaacagagggagcaatagagccagcactctggcaggacggggcaggaccaacagccagaccccaacgggcatgtattctttgct

SEQ ID NO: 3994 - DNA, 600 bp, Bovine  MMBT03735
agctgaaattccaatactttggtcagctgatgtgagcagctgactcattagaaaagaccctgatgctgggaaagactgaaggcaaaagaaggaggtggcagaggatgagatggctaaatagcatcaccaactcactggacatgaatttgagcaaactccaggagatggtgaagaacagagaaacctggtgtgctgcagtccctgggatctcaaacagtcacatgctacactccatgaaaccgcaaagagacatgactttgcaaatgaacaacaacaacacatatacatatgtataaaagraaaacaattagaatttaattgaggtagttgagttgacaaccatgtaggataagtactttaagagatatttaaatgcattatgctaagtcacttcagtcgtgtctgactctgtgcgaccccagagatggcagcccaccaggctcccccgtccctgggattctccagacaagaacactggagtgggttgccattyccttctccaatgcgtgaaagtgaagtcgctcagtcgtgttcaactctttgggaccccatggactgcagcctaccaggctcctccatccatgggattttccaggcaag

SEQ ID NO: 3995 - DNA, 598 bp, Bovine  MMBT03826
  misc_feature (1)..(1): n is a, c, g, or t
nccctttgagaaagccctgtagatgcctttccatgcagcatgagattagatttttctttctttctttttttttttttagaaattacactgcatttcagttatgtattagagcaatctgtcatcttcacattagaagccgtggatgcgctccagcagctggttctctaggacttatatttcagaaagtgtggcaaagggtgttaggagagcagtgtcagcaggccgttattcttaatatgatgttctaaattataaatattaccagacgtccccgtgcagcatgaggagatgattctgtgkttacaacaggagaaccttcacacaacgaccaggcagaagcaaatggaaagagtaaaaatatattgcttctattagttttaaaagctgacttggatagcagcagcaacttggtcgtatatagccayagtttagggctctgtttagtattttctccttccatttgcccctcaaggtgggtcggtgttcagcttgcgcagttaccagaatggaagttgataattcttgctagacctttgctaaaggtgggagcccagtggtggctttacaatagtatctattattaacgcacatccatttt

SEQ ID NO: 3996 - DNA, 600 bp, Bovine  MMBT09651
actcaaatgtggccacgttacttcccgtgcccgaaagtctttccatggctcctggccacacctagaggcaagcccggccagccacacagccctcccacactcctggacttggcccagtctgtccccgaaccggtgcccggtgatccrtctggtgcaataacagcactcaggtccctcccagcccacgccattcacacctcactgcccgcaggctggtgctgctgcctggggagctgacctcactcaccgtcggagatggctgaggcaccaccaagctccagaaagccccctccatcctcyaaggaatctctgctagcacttgtcatatcccatcgcaactgtctgtctgtctccctatgagactatacgttttcatgagcagagactgtcattctctttttttggcagggggcggggcccttgctgcacagcatgtgagatcttagttccctgaccagggatcgaaccctagttccctgcagtggaagggaggagtctttttcatctttacttccccaccagccccagggcccagcactgggctttgattataggtgcccagtaaatgtgagctgaactgatttagcttttctaaccccc

SEQ ID NO: 3997 - DNA, 600 bp, Bovine  MMBT10801
cagcaagggaattccagaaaaatatctgctttattgactacactaaagcctttgactgtgtggatcataacaaactgtggaaaattcttaaagacatgggaataccagaccaccttacctgccttctgagaaacctgtatgcaggtcaagaagcaacagttaggagctttcaagatggaggtggttgggtggttgaccgaaaagcagaggtgaaggcccctacgaagtcaaacgggccgagaatcatcccctccccacttctcccagccccaggagcccagcaggagcccagcagaagcstgagtgttttaggctttattttttaaacaagcaagtaaatcaaacaacttgtcaacktggggcggagatccacrtcatccaccaaaagtggaaaatttatgaaccctacagaccaagccagaaaagaagctcrgaaaagagaattaaagaagaacaaaaaacagcgcatgayggtacgagctgcagttttaaagatgaaggatcccaaaccaattatcccgggtgccgggagccrgcgagagacactccactcgtgacaaaggtcatgaggaaggaggctcggcatacacaaagggcggg

SEQ ID NO: 3998 - DNA, 601 bp, Bovine  MMBT13477
  misc_feature (1)..(1): n is a, c, g, or t
nacagcaaaatscatgataaattaacttctactcagacatgatgaagaatatgaagagtgtgaaggcaaagagaaaagtaaagaggaatcttgcacttttctaaatgcaaatatcttattcttccactagcctcatttgaaaataagaggatacttagtgtggcaaatatgcagcatataattggaagagctgattatagagaaagtagaattcctgcacataatgttcagggttttttttgttaggcttattcatatatacattatgtacaaaaattttatattttaagtgtacagttcygtgaattttgacaaatacgtaaacttgggtaaccaccacgataatcaggatgagaatggttctgtcacccccagaagttccttctggtcgctagtgaactgacttctgttcctatagttttggtttttccagatgtcgtatgagtggaatcagacagtatgtagcctttgtgtctgacatctttcacttagcatatgcttttaaaattcatccatgttgcacgtaccttaatttgtttataatcaccagttgattgttcttgttcagtcgctcagtcgtgtccgactctttgtgaccaca

SEQ ID NO: 3999 - DNA, 598 bp, Bovine  MMBT20985
  misc_feature (1)..(64): n is a, c, g, or t
nnnnnnnnnnnnnnnnnnnnnnnnnnnnnnnnnnnnnnnnnnnnnnnnnnnnnnnnnnnnnnnntccctggtggctaggggtacagaatctgcctgccgtgtaggagacatgagtttgatctctgggtcgggaaaatcccctggaaaaggaaatggcagtcractccagtactcttgcctggaaaaccccatggacacaggacctgggtaggttatagtccaaggggttgccaaagagtcagacatgacagtgactgaacaacaacataaattggtcaactggcttgccaggacaaaagycctggtctgcaggaatttctgactcctgggtgtgtatactcccaccatgggcagtttcaatggatcaatgtggtgtcacaaactcagagctgggaaaagatgtattgtaccccacaccattgtatgatattccactgcctagatacaactgatataaacaacctcaagagcatacataacagtaaaatgtggcaaaataactaggaagtgatgagttttgagtattttttacctttgtttttcatgtaacttatttcactataaattgattaatttaatttttaataacaaatatata

SEQ ID NO: 4000 - DNA, 600 bp, Bovine  MMBT21334
gtgggacccgagagtccgcctcgctagagggtcccaggtgatacgggtaaagatctgtagcaatgatcaagaatgaaatcagcagaggctctcaacgtcccgatgccaccttctcgattacaaaatgacaatcccatctgccagactttcttttggcaaagaagatggcgcccccggggagtcagggagtgaaatatttgtgctgtttctcaccccctgactgcccttccaccyctcggccagtccccaggaaagggctcaaaatcaggccaactgggagagatgaagcaagtatcacartgcgagtgcagctttccattaactgcctgaaactgctccctgcaataatgttggtgtaatccataagattcaattatggttatcaggcaatcaggcacactgcggcgaggttctcacataattaatgctcagcccccatccagcagcttccgaaagtggcacaggtaacatgactcacccaccctcagctctgggagagaaacaggggacccagaaatgaagcctgccctccccctcgggttccagaacattcctaggagataagccctggatgtgttgtgaggggacagggtgcagctc

SEQ ID NO: 4001 - DNA, 600 bp, Bovine  MMBT22362
cgcctgaagtgttctattccatatgtgtacatggctgatatacttcctcatttcttttaaatgtcaccatctcatcaaatgtcaccttctaagggaggccctctctgaccacccaagctaaacacattctccagtcaccctctctctccttactctgctacactatttttcacatgccgctaagcattgtgttacraacrtatcagcttgttgtctgctccccaactagaatgtaagcttaatgaaggcaggsactttgactctttagtcctttgctgtatcccactgctggagcagtgyccagtacatcataggaactcggttaatttgttgtgtaagtgagtgaacaatgagtgattttcactcatccatccatttagtgcataccggttgagtgcctacagtatgcaaagacaaagacatcatagtccctgccttctaggacatagcagtcttgaggagatagacataaatagatacagatatataaacagatatttatgaagaagatttgcaggtrcagtgatagagttatggcccggatgttttctcaaatacagtgtcagagaagcagcagataatatgctgacattaagtata

SEQ ID NO: 4002 - DNA, 600 bp, Bovine  MMBT10435
gaaacaccatgtaattaaatgctgcattataagtataaagcccaacttctacaataattctcagaaggaatttcaaaaaaataatacaataggagcacaaaatgtgagagtcaaacataaaagtcccagcttttaaatttaccagctatgtaatctcagacaagtcctttaaacccagtttcttctcctataaaataaactgcttgttactttcactcatcatttgaaaataaaaggtgacaacccagttaacattattagcgcagtggcaggcacaaaatagatggtcaatagtaagcrttatcactaagaacatgattgtggtttgtggtttaatggtacaagttcagtggagatggtaaaatttaagctgggcttgaaaaggaagagctagggttaaaaaatggtgaagggataagtaatagattaatgctgcaccctgtcttaacatcttccacaaaaggccttaaaaagcacttagaactgagtgtcttataaatggatacatgaacacaccgaaatgtgacatgtcatcttagaataggtgagtaatgaagtcaaaataggtaactcccaggttggtattctaaccattcaact

SEQ ID NO: 4003 - DNA, 600 bp, Bovine  MMBT22557
tctttttattctgtagcccaagaatacgtcgtggccctggataatccatagtaggtaaggtacacacaaatcaagagtctatgcctgtgatgaagccagaggataatttaagttgcaccatttaccaccagccaaagacamgtgtatcttttggaacaataccttttctgagcccataagtggctgcactgttttccttcaaaccagtcagttaagtgagaatcaatggctggatggcctgttggtgacttcacctcatcttgtgagaacgacttgaatgtaagcaataatacaggaagmaagataatttaagaataccaaagaaacaacaagggaaccacaatgctaattgtctcaagaagccacctcaccttcagtttaaagggtgtccaccagtgcaaggcaaatggtacctgaagagaagtttcaggacccttgattcaacccaggtccgctcttgggaatgaaaaccaaaactcaacgctaaaagcatttgaaaattctataattgagctagagatttggaaatagaactatctagacaaactggggttaagaggagagatggctggaggtttcacaaatcgagaagcagggaag

SEQ ID NO: 4004 - DNA, 600 bp, Bovine  MMBT22959
acaatcagccagccctgacggtcgtccggccgggggacacggcccgggataccctggagctgatctgcaaggtatgaggccacttggggttgtttgygttggaggactcyacggacactcagatgcgggtggcagaggaggaktcttgaaagaacacctttatttcataacagagcagtgttggatcctcttgtgatataygcataatggatggatgtgatttcttccacactaggaggagagggawtctcttagtagcttcttgcaacatgtgttcttgatagatttgtgcaaagcctmttatgtgctcattgcacaagttgtaragaatttaggtaaagaacaaagccgaaaattaaggcacccttgctcacaaaattcagaagtcacctcggtgaacattttggtgtttgtccctggtctctgtttgccacaagcacacatacgtgtattcagtggcatcatatyatgtgcacggagcttcccaggtgtctcagatggtaaacaatctgcctgcaacgtggagacccaggttcaatccctgggtcaggaagatcccctgggggagagaatggctaccctctccagtattcttgcctg

SEQ ID NO: 4005 - DNA, 600 bp, Bovine  MMBT03040
ataaggaaaccttaatggtttaataaatattccaaaaccaaacattctgaaaccagatctgtaatcaacataaaatgtctttgttttgatggtggtgggactgactgttctctccacagaaatgatgatggttaattagagctagaatacagatcttaatttaatcagagatattaaatgtgcttgttcctatcaaacattggctttaatttttgtataacaataataatgaccaattttagaactgtactgaagttgaaatagttatcattattatcaatatttatagaagactaaaawtttggatttccaagggcagtgaagaattaagtaactaatattcatatgggcacaccactttcctaagtatcataacaaaatcttatcttgcaagactcagatattatttactctagaaagccttctcagaattcttagccttatgtctaggttagacattcttcctctgtacactgatggcctgatttatcactccattataatacttttgtgaatttatttatctgcctctgtatggtaagctctctggtagtagaaacatatagtacttgatcatgatatgttccagttattgattgc

SEQ ID NO: 4006 - DNA, 598 bp, Bovine  MMBT18573
  misc_feature (1)..(134): n is a, c, g, or t
nnnnnnnnnnnnnnnnnnnnnnnnnnnnnnnnnnnnnnnnnnnnnnnnnnnnnnnnnnnnnnnnnnnnnnnnnnnnnnnnnnnnnnnnnnnnnnnnnnnnnnnnnnnnnnnnnnnnnnnnnnnnnnnnnnnnnnaaaagtgcccctgatatactgttggtgggaatgtaaattggtccagtcactttggacgcaatatgaagttcctttaaaagttaaaatgctcaggaatgagaaatgggaagaagaataaatactaggtcccacatctcctaatcccttgtgttagaagaacattctygtggcagtatactactagagaaattcactcagtgggagaaacaaaagatgcttccacagtcttttctctttacttgttttaaattatgacacatctatatcttatgaaaatagatcttcgatacatcaagaaagaaagtgtagtgaagtggttaataggctttagaaccagatagacagatttactgggcgaagtggccatyagcaaattacttgacttctctagcttttagttttctctgataaaaacaaacattaagtttgctgtgattagtaagggaaggcagttgttataaaac

SEQ ID NO: 4007 - DNA, 600 bp, Bovine  MMBT10324
tcacttaaacctttcacaatcctcattttactcataaaggagctgaggcccagagaagtcaggccctttcccccagttcacatagctatgaaatggcagggataagaatccgaattcaagtttttgacgcattcatctatattctgaaccctaaacccatcacataccacckactgaaataatcagtgagtctrtagttgttatattgcaaatgagcgaaagtgataaagtaagaacctaaagcatatgttaacctgggtttgcagtttggctatttytctaacaccattgtctctgagrcaaagacaggaaagtaatgtataattgtgtgtgtgtgcacctgtgtgtgcttgtatgtgtgtgcacatacaatgagtgtgtgcatgtgtgtgtgtgcatgggcctgcatgcatgtgtgtgtgtagaccagtaaatcaatcctaatttatttgcaccctttcttctgctgtttctaactcccaattttgaaactatttctcaaaaatcattatctagggacacagctactcacagaacaagatagttagggtcatttaaattctctcaggcagagagcatttaagttttctcgtctctggc

SEQ ID NO: 4008 - DNA, 600 bp, Bovine  MMBT06726
taatctgactagactgaatttatcttacaaccacataaatgatcttagtggtaagtagataagcttctgttttctataaagctgagtattggtcacatgtaatgagtgatatagctctgcatgttgtagaactgaataatccaatttttgacttaaaatctcatctagagtgtttctcagtcatatttttttgatggagctaaagctatagctgaataagaactcaggagtgaaaacaagagtaacaagttacaggaaaaatttggttaggaaggacgtactttgggagagacgtacttytaatcttagagaattgatgagttatctgttatcaatgtatagagaggaatagttccaatagaacttttcacagtgatgagaatactctgtgtgtgctgtctggtatggcaactaatagacggatgtgcctttgagctcttgaaatgtgactagtatacactgaggaactgaatttgtaattttagttaattttaattaaatttttatttcagtttaaaaagccgcatgtggctagcgctgccacgctgggtgtagcgtaggtgtgtagcattccaaaggctacagcaaattgactgtcac

SEQ ID NO: 4009 - DNA, 598 bp, Bovine  MMBT00713
  misc_feature (1)..(38): n is a, c, g, or t
nnnnnnnnnnnnnnnnnnnnnnnnnnnnnnnnnnnnnntgagtaggggtgggcggtaaaggctgctgttaattggttgaaacccagaaatgtgtttgttggagtgggttcttattggctgactttcaaaagcaaagggctgtccctgattggttggtttataaagcacattcactacagcagttgttgatcaagggactggatttaaaaccagttctgttgattccttgttgccatggctacagaacaattaatcttttcttacgtatgtgaaaacttaacctttcaagatttcagtttyttatctataaacttcatagaggtttataagaagtttaaaagataacactcaaagaattcacactgtgcttactgtgcagcattcaataaaaattatgtttatgtttttaagatacacatgaagcatttcatttgtaagatgaatagggttcctatgaaccatggtctgaatgtttttgtcagcataccatgaaacactgtcacttacttctcttccttttccccacttttggttgggaaaaaaaaaaaaaaaaaacaactaatatggtattttgttcacaaggcctaatattgagttt

SEQ ID NO: 4010 - DNA, 600 bp, Bovine  MMBT19366
caatgaggaatttaaccagaaggtgacagggtacactcaattcctcctctgttgtcataaaaaaagctttccttgaaaagatgttttaatccactcagttgctcaccctagggtcacaggagttaaatctgatctaatcagtagtaagaaggtgttttttttttttttttatagtaatccatgaggaaaacgagctgaattgtaggcactttttaaaaagtcagccacagaagtacagatatgggctaacaccaaaacggacgcacaaaagtggaaaaattactttaaacgtggcaaagygcttcttagtgtgactttctttccctggaaacaagatgcagttcagtgtccacgttgctttgtgtgaccctttaaggtattagactctgctactcttactggtcaaacccattgcttgattttctctctaaacctcaccagccaggcacgacaatctttcttaatccacaaagaaatttttttttttttaacttgagtatgggttgtattttccatgttcatgggctgctgtcagcttagttttatccatcatagatatttaattccttcacttggggcacacataatctactgaatgct

SEQ ID NO: 4011 - DNA, 598 bp, Bovine  MMBT23445
  misc_feature (1)..(218): n is a, c, g, or t
nnnnnnnnnnnnnnnnnnnnnnnnnnnnnnnnnnnnnnnnnnnnnnnnnnnnnnnnnnnnnnnnnnnnnnnnnnnnnnnnnnnnnnnnnnnnnnnnnnnnnnnnnnnnnnnnnnnnnnnnnnnnnnnnnnnnnnnnnnnnnnnnnnnnnnnnnnnnnnnnnnnnnnnnnnnnnnnnnnnnnnnnnnnnnnnnnnnnnnnnnnnnnnnnnnnnnnnnnngtttcattactatataacattatagaatccttgcccagaagaatattagtctctatttctgcaaaaacatgtggtttattwwtttttttccagccccagatttagataagggaggaatgttttmagttgttactcaaagaaaagatatttaacttttctaaatcctggtgtgagtttatgtatgtatttccttcgaagttttatgatgctatagcttcttttaaatgtttgcacctctaaccttttcataaactctgtctatgattcatttaaacaacgtaatcaaaattgccattcttatgaggttcctgagagtggatagaatttgtaatattaatcagacaatttggggcccttatatacataaattgcactcatag

SEQ ID NO: 4012 - DNA, 600 bp, Bovine  MMBT16419
ttaagagagaaaaggctttcttttaaagacagactttttgaggcgattaagatcagcaatgtttaaagaattcttctatcatattcttagtttagtctaaatcatgtctcctagtcaaaaggagtatcataagcaagttggtttatatttgttttgtacggctaaaacatggccctagagattatgatcatgaaagacttcaatatatactgtattacagtatgtaagatatactgcattagcactattttagccaaaagcyrcagaaatctaaactcctatagctaaaaggagagtatrtaggtttatatatcttgaaccacttgactctgcatatcaaaattaagggacatatatcatattattgacattttctttgtcatctgtctctcctgtttccatctttcagctcttcttccttctacatgtaggttcaattctaagcctttctatctaagaaaaaaagaagcaggtttccccctcatcagtctccaaagagcaattatctggaaggcttatacttctttaggccatgtgtccattcttaacccaatcactgtaactagagacatggagtcctctgattgactggccttaatc

SEQ ID NO: 4013 - DNA, 600 bp, Bovine  MMBT22125
ctctaggttatttattttgtgaacaggagtcatctgggccgattcatattttttcggttctcctagaatttgaaattctaagcataaataatttcagtaaacattgtaaaatacagatgcaattgatcttatgcatgacataaatttgtgtgggagtccagatgttgaaatgtgaacacaggttgcttctcccttatgtcctatgtgaatctaggactttttaacatttcattttcaaatttctccttttccttacacacttttaaaaattcttatagaaattctgtttagttttttggrttgatgtatcttttaataaaatcttattaggaactagatggaagttaacacacctctaaccttgtgtgtattgtactagacccatcttcatatagaaaattataagattagttgcatttgtccccaaatatcgcttttgaagtcagtcacgtgttcttttggatacctgccctgagcaaggtactgcacttggcagtgtcagaggtgtaacaccaacattccgggccttgggagtactgttctgtgggttctgttgctggcatacgttctgtaccttctcatctcctttactggtttctt

SEQ ID NO: 4014 - DNA, 600 bp, Bovine  MMBT01733
tctgttctttctcctttccactgattcccaaagttatttaagtgttttctcccttaatacctttaaattcaaagttctgcttctttagcagaatttagcaaatctgttctaagactctggcaatctttttacaataagcaagtaagcaactcaaacctatttagcagaagttccttgaggtcccaggggctgtgtacctctttcatatatttcacaaatctttattatatcatttcatgtgtactttggttgacattattttttacctttgtgcagatagtcacaaatgcctccaccgcyggacatataggaaacccacttatggagatayttccttgaggccacaagcgtgttgtcctgcttcacctggaccaggtactggagtgggcctgtgatcgtcttcttgttacagtgccacttcaaggaaacgtgggtggaatcacactcgtatatgctcagcggctgctctggactagacacgttcaggcccaggcagccactgccttccgatgttaaataggcggtggtttgaaacccacttccacagcatgtacttgttgggtggtttgcagttctccagggtcagtgtagatttgctgg

SEQ ID NO: 4015 - DNA, 601 bp, Bovine  MMBT13307
  misc_feature (1)..(1): n is a, c, g, or t
ntggagtaggaggtgggcaggaggttcaagagggaggggacatatgtatacctatgactgattcatgtcaatgtatggcagaaaccaacacaatattgtaaagcaattatccttcaattaaaaaattaaagttttttcaaagtcttattcagattgcctttaggttttttagttaaatgtagaaatgattcttcctttttctctttactttgttttggtcaaakaaaatgtcagtgtcgattctgtctaaacgtaaaatcatgtcattggattcctggggggaaaaaaccctacatgaaaygtatattcagatgctacgggtgaaagcctggtttagaaaagcctttgttctgtggtggaggctgccatagttcttccattgcatcagtttttacttacacattttaatgaataaaaacatgcagactgacaatccaccagaatcatcaaatagcaattaccaaggaacagaacagcttcagtgagaagtgaagaaggacaaaaagtatcatcaaatgagtttaaaatttttttaggtagagcaccaaattgaccgtttcatttccccgtaactgatttcttttgcttcaagagaaaccca

SEQ ID NO: 4016 - DNA, 600 bp, Bovine  MMBT13508
aacgtcagatgagccgatgacaccacttttatggcagaaagtgaagcagaactagaggctcttgatgaaaatgaaagaggagtgaaaaaagatgacaggatgagatggttggaatgcatcactgacttgatggacatgaggttgcgtaaactccagggcttggtgatggacagggaagcctggcatgcttcagtccatggggtcgcaaagagtcggacatgactgggcaactgaactgaactttcactctctgccagtatagtgaatactgttccattatcaaaaccaaggtgctatttygtgcgtgctataattaaacagtaataatactaatactttctatttacccagagtcttgccctccaaaatataaccaatttatttactaaattaaaaaatatttattaaggttcattggtaaaccagagtctctatcctcatagaccttacagccgtgagatattatagagctacaacatgtgacaaataaacctttactcatttamgataggtcttaacaaccaaattatgtctttagtcataattttaagaaaaaatgttaacctgaaacagtgctgattattttagtgaatttatgta

SEQ ID NO: 4017 - DNA, 600 bp, Bovine  MMBT09419
ctccccactgtgtcaagtaacatcaaacattttctttatctagaatattcaaggtcacctgggtgaagccctaatccaggatttaatcaactactgtctgagctacatcgcgaaaatcaagctcccgaagaagaggtaggtttgctcttagcaacgaggtgctgctggagtacagcgtcacatcatctggcgggttggggctcagttaactccacagtgcagtgcttacaaggggccaccggaaaccttctgcaaggcccgcagtggactaaaggaaagtgaaaggagaagtgagagtgmagtcgctcagctgtgtctgactctttgcgaccccatggactgtagcctaccaggctcctctgtccatgggattttccaggcaagagtactggagtggggtgccattgccttctctagtggatcttcccaactcagggatcgaacctgggtctcccgcattgtagacagatgctttaccgtctgagccgccagagaagtcctagcagtggacaaatgattatataaatgatggcatgtccacatgacaggaattgaaagctcgatgctttcaaagactgccagtcaaggcccctgcctgtg

SEQ ID NO: 4018 - DNA, 600 bp, Bovine  MMBT05021
gtagtgaaatattttatggcttacaattttgctttataagattctacagtcaagctttctttcacacatctataattggacctggcacacagagttctaactcttaatatgatttcttgcatcattttgcacctttttaaacttcctcaatgactcaaatcctttggcctttgaaatgtgtttgttaactggaaagatgtaaacagctcatttaacttgaccttcaaatgtgccttcctttctcattcctttagtgtgaatatagcagagagtgttagtctccattgtagctgtgaagasgcatccaccttccctcagctcttcccagttgttatgccggtcatgccctgtcaatactgacaagcgattattagtctttgtttgctttgcactgtatattggcaaaataatcattgaaaggaactgtagacatagaaaccattattgttgcactattgtggtaacatagctcttaggcttgctgagaagatccattagatttgtcctcttatctaaaaatgatttcttctttgctttgtattgctccaggagttgactgtttcaccaacgtctgccacattagagatggatacctttatt

SEQ ID NO: 4019 - DNA, 600 bp, Bovine  MMBT10806
acttgcaggagcaacttcaggcttgtgaatgggccagacaagaagctggttcccttgtctagaggcacaagagctcctccattcatcctcattcaggctttctctaattccttctcatttcctcattgggaacctggggctaaagagggcttgtgactagatcctgagaggaataactaagtactttacatacttaattgcaccaaaggtaaattaataacatacttgaagagggtgaaatgagctctttcacagtagctagattcagaaggactcaagaaagacagtgatgaggtcttstgcctgcttrrgtctgtttgaattcagcttttgctcgtggtctaccaggcccattggagaactctctgtgagctgagggagcctcctcaaacatggcctcccacaaagttcatcccaggggctgtggatgagcttttaactgtggagttaaaaaatactgacccaggtataggttttcagtgtgtaagagcaccacagctatccacctggaaagaacctttccaaaarcctagggcaggagatgatagccttccaaggagcctaaatatcagggaaaaggatgaaatgaagcagcaagat

SEQ ID NO: 4020 - DNA, 600 bp, Bovine  MMBT03494
tttcagtgcagagatgtactcttgcttcaattctgccttgcttttcctgcttccaggccactttgctcctctccatctgatagatttgccccagtttactggggtgcatttggacagcttctctcaagcttccccaagactcctgttttgtgagatatatggcatcttagtctggagtaaaaagccactccaagaacatgtaagtaaattcaaagtgcagcatacatacagtgggatactatacacctataaaatgaataagaaatgctttgtgtgaaaataagaaaygatgcccaactygtattaatgaaaacagaaaggagaagattatataagtgagcttttacataaagagcataaaaatacacactagtctgcttatattttcaaatggatgaatgaaagggaaacaaaagaatagtaaaagtgatcattatgttagggaacaagatgatcatgggatacaatgaggatttcaatgtttcactgaatatcttttaatattattttactttgtttttttttaactacgtgaatatatcaccttttaagtgtcagattttggtgatggtcatgaatctgtgtcctatttttgtggtt

SEQ ID NO: 4021 - DNA, 600 bp, Bovine  MMBT10685
aaccttaagaccaccaaatttgacttttgatgtaagccatttacaatatgatggtttctttactcttacgcacttcctataaatgtttgcttatatgtgacttacatattgatcacacaatccagatagctctgggcctaactgatagaaaagaagttaagaaaatcatgaattcaaaatctaagaagcaaatacatggcttgggatctcaaagactggtaacttcaactgaaactaagtatttattaggagcccatttgaggcatcacccttttctcaggaccaggaactgagagagakaagccaggcagcatggcaatgaagcaggaaagacaggagaattttaatcaaatatacttaaattattactcaattcctcccactaagcaaacacttcttgagtgcgctatgccttaacaacacttgcctaggctcaggtttgggctcccctggtagctcagctgataaagaatctgcctacaatacaggagaccccagttcaattcctgggttgggaagagcccttggagagggataggctacccactccaatattcttgggtttccctggtggctcagtcagtaaagaatctgccctgc

SEQ ID NO: 4022 - DNA, 601 bp, Bovine  MMBT08892
  misc_feature (1)..(1): n is a, c, g, or t
ngggatgggattgtttttagttagtagggatgaaattcctggctcccaacttggccttctctgatatcatccctgcagaggtgaaagtcagctgcctattccatctttgcaggcatgggtagggttggggccacaggtttcctgtagctggagtagggcatttattgttgtagatgttgtaaatgtaaaaattgtaaaagttttctgtctccctaggctgtcctttttctggtcctctgagtaaagtaagcaggcttttgttgggactttaaaaaaaaaaaaaaaaacctgttcccatgakcatttccagtttccagctacttcagctccaagtctgagaaagatgaagcaaaaaagaaaacccactggactcagcaccgagtcattcctagtcccaaggagcccagctggtctgaattattctctccaccttgcagagtgctcttatgcttattttatatataattgccaagggttttagttgtacttrgtgagaggaatggggaaaagtacatctactccatctcctcaaaagcaggaaaatccattttttaaacttcaaatacaaatttctcctttacagcaaaagctcctcataatt

SEQ ID NO: 4023 - DNA, 600 bp, Bovine  MMBT12065
gctgactaccttaccgacttttaaaaataaattcctttaggactactaggtccataatcaaattatttgtgaagcactgacagaattatatcctcctttctggtatttctcatttgtttctctcaccttattgctttggtgggaacttccacagtgatgttaaataatagtggtgtttctggttcctgattgtagttagacatccaccctccaacctttcaaagtccccaaaggacaaaaaagatattattaatttgaaatctgttttattctaaaactttactaaagtggaaaastgcyatgcctgtgatgaagagtgctgatccttgacagtagtgggagtttggttgaactcagtcatgtctgaaaaagggccacgtgctgaatgatatcccagtttagtaacatcagtaatctggtgtgtgtgtgtgtgtgtgtgtgtgtgtgtgtgtgtatttaagtgttgagtctttctgaggaggatcagcctctcaggtgaacttgatgaatcttctraagtatatataacagcaggggaaggagagggtgggacgatttgagagagtagcactgagatatgtacactagggtgagtgaaac

SEQ ID NO: 4024 - DNA, 600 bp, Bovine  MMBT16543
agaacttgttctaaattgctattgtaacaatgttcttactgggattttgttactaggaagtttaagaagtactttgccaataaattcaaatatacctaataagtttacttcttaaattatctaattcaataaagattacttcatcttgagacatatgccttcctggaatccccataatgctaatgacccctcattcatcgtctttaatttcttatgagaaacatattacattttcttcttagaaatctttatcctgatcagagagtcaattaaagagtgattaatcttatttcaaggtargaaaatttctcaatttgaattgcagttgtagttctactttcaaattctttagtatatgaaaggggacatagcttacataagcctcattatcaacactgccattttayaatgatgtctgcatttaccttagtaacatggactgaaaaaaattcatatattctctttctttctctatttgtttaatgcaaatctcagtgtttcttttccccaaaaatatttatattcattgaataaaaagtggctgaggtttcttaactaaatttataaatatctttattctctgaatttggctttctatta

SEQ ID NO: 4025 - DNA, 600 bp, Bovine  MMBT15563
atcacttgctgggaaatggggttccttttgagccaactgagaaggcaaggactcaggaccccatgccataccatgatgacccttcatgatccacaccctgtgatgacccatgcccccctcacatccagaacctgtgacctggggctcctgcagagacaaggccaggcycaggagaggccccagctcacggcactcaatggagtttgtgtttcaggacaagacatcctggacacagctctacagtgacacactcatccatgygcccctcccacacacagatacagacacagggcctccacrgctcccggttcccacctgtgagtctgctgcaccctatgtggttctaggacgtgaaatcagtrttttggctcccatgtggcccctacacttcacctggtgagccgtgatggggggttaccatctcaagggttctcaagcgccacggtgacctctcaccactcttgccacctgtgccagctttggatctccaccctcctgctcctctaccccatcctggggaggtgccagcgccccagtctcttagtagtgagtgtaaagaggcactggggttacagaagacaacatttactctctctagtt

SEQ ID NO: 4026 - DNA, 600 bp, Bovine  MMBT15080
gctcacattctatacaaaacacaacacttaagaaaagttaggtttaattgcccttaaaccaatggcacctacaactcaagtatttccttcatcacacattggaatttaatgtcaataactactaatttaaatcaataattgaatgaaactttgtaaaaagtttgaaatacaatttcactgttccacagaacattttaatatctcaaactgggtcaaccatagtttatccttcaagggggattcaacaatttcaaacaatcatataggtccagaatatgaggtcactcatgatttacagasgcaagggtctgacctcagacaggcaagagtgagctgtttgaatggcaagtaaacctagatctcagtgtccaatttttttgctcttgacttactcatacaagtagagtaacacttaagagtgagtaagtgagtgattttaactttgcttctttgtgtatattggccatcaggaaatctttaactgctagaaaatagaatgaaaattcaaattcttagaatatgactgttgtctgaaaataaaagtttagaataaattaaagggtagagtgtagaacgcaacaggccaacagggagcctgaa

SEQ ID NO: 4027 - DNA, 600 bp, Bovine  MMBT21881
atttcttggctgtgagaaacatgtgggatcttaactccccagccagggggcaaaccctcaccctgtgcattggaaggcaaagccttaaccactggaccttcaaggaagtccctaggcacaccattgtcttaaaggactttccttggttacttctcyctgggtgatcataaacttatttcccagtaattcctgttcatttgctgaagactttagcatttgttctttttactctctatccctgctcttaacatcattcttgataataggaataaatatggtaaatccaccaaacaattamayctaacactttaataatgcttacaatatgatgggcacagttaagaagtctgttaataaagtcatttaatcattgcagtaatttatatagtagaaactatcattatctccattgataactccaatgataactatcattatctccayggatatggaaattgaaacacaagatgtcaagttactcacttggatcctttaataagaaggagagatagggtttgaatccataagttctgtcaccagagtctgtgaacttaacaatcaacatctaggtgaggatcacagcttttgcgatttaaaata

SEQ ID NO: 4028 - DNA, 600 bp, Bovine  MMBT21550
ggtttttccactcaacactttacamagagaggtaggtacaaatggcaagttgctgtatctgtgtaatactcagacgtggtcctcacccattccccagagcccactcttcattcctgtataaacagagtggtttcaacaggatcttagagtatgcctcagtatttaccatttgcaaatatggaatctattaaatcacgtcttcagttcaataaacatctactttgtgtacatcactgtgttaagctaaagaagagttagacagctgagggtaatggccctgttccctaacacagtaaggargacataatttagaarcttttgtttaacatgaaaaactaaccataaatccataaaaaaatagaatatcagggatgaagtgtcatgactgctaattttttaatggcttaggaaaagacaacaraaggatgaagtattaatagatgtgataaaatgtcagtggctgattctagatcatatttgggtatatagtttttcttttctgtatatttgaaagtttatgtaataaaatttaaaaaagggaaaaaagacttaaccataaagagcattataaaactctacaaaagatcatttcaagggtat

SEQ ID NO: 4029 - DNA, 588 bp, Bovine  MMBT23417
tctctctgctacatctttgtcttatttctcatcgttgtcaatatggtccgtataactcataataatagtggtatagggaactggtaaacttaaaagttatttccaagttgagagacattcctacatttccagctgcttttatttctaaaggtggaaacttttcttgagtgggttatgtagatgcaaagcaaatatgtacccattactccaggggaggaacatagcagatatgtttggagatagataaaagctttttctctttatattccttgttgaatrgaccttgttgacttatggagrggggtggattctagagatggatatgctaataagtcaaagggtatatcagtcagcataggtaagatargctgcaataatgaacaactctaaaatattaaaacaacaaaggcttatttcctattcaccttatatattcagctgggttatgcttatgtattcactcactgggaccaaggctgataaaaaaacatccaccatttcaatcattgatagtctctgtggaagaagaaaacagttctttaggtgttgcattgacaatttagtgttctggtctagaaagtggtaaaa

SEQ ID NO: 4030 - DNA, 600 bp, Bovine  MMBT02343
aatatttgttcatccaatatgtcatgctgtcaagaaacataccaatgaagaagaccaagttcctattctcctggagtatataatcttgttggaaagcaaatgtctcaatcataaatgccttttctccatacacagagaatactagtttaaagaactagatgttcaaaaaaggtaagggaagtgaaatcaagttgaaggggagtacactttcccttttaagctactctttgttttttctttttagctactcttaagccaagaagaatctttaccaattaccttcaggcccttaaataagakccattgacctgtcaactgtatggatgactcaggtctactttatataaaacactcctttgtaccctatagttgtgtaatcctcctattcatgcacatactttcttgactctagagcaggaacatggacacaaaagtcatttctcagctgagtctatctttttcttttggtgaggaaagttccatatgctcagatattcctccctttaacttagtacaggtatctttcttcactaacttggcaggtactttcctgctccttctggagatttctgctcttagaacaattatactcttcctctt

SEQ ID NO: 4031 - DNA, 600 bp, Bovine  MMBT01068
tcctaaaagatggccaacagagcaatatacaaaaaaatcaaagacccaacccacgraaagtccttcaggactcactgtccttgtctcattgttctacttaatagggattaggtaattcacaaaagagagggaaaattaattttataaaatatttaaacaatgrtattagtctttaaaggagggatcataaataaaatgaggagggagaaagatgagaattcttggttagtgatacctgaatagaactggatgtccaaggtagcagagtaatttaaataatgttttaaagaaagaaaataygggtggaagtgttatactaagagtctggtatttctttgagacagtaatctccccttcccctgtttgttagttgaaaaaacaagctcggtggttggtagtgatagtgtatttgtgggaacatgggaaaattartacatgtacacacactgtactgagtaggttataaaagatgtgaatgatgactttttggcatagttaatgaagtctaaagtccccaaagttccagaagtaatttgaagtacattccctcttttgtcgttatttaaaaagagacttagggagtttcctagtggcaaagta

SEQ ID NO: 4032 - DNA, 600 bp, Bovine  MMBT01315
atgccaaactgttgactctctagttgtggttattctttaaaataagccatattaaatataattcacctttcctgatgaaccaaggtcatttttatgagagcgtattatactgacagtatgtttttaaaaaacaatgatatcattagaggtttttaagtgaataggctgtccttaaaatgaactcatccaggatactttaccttaataatccttctgttgcttttgatagttcttttctatctactatacaaacatttgtctcattttgctatatccagtgacattgtaaattttaatctycagtcatacattatacacaattatctaaatgaaaactaaagatgcttctatagctcatatataaaatacagcatgtagtccctatyataaaattcagaacctctttctctgggagggtggggttatttttggtttgtgactatgtaccaggtggttgaaggtgcacaaaatctgggacatacttccacctaccaattcataggaaatgcagaggaacatgttaaactgtgccacgggaatataatcaacagaatctagtctgtggtaattttataagacaaatagatctgcttcttccat

SEQ ID NO: 4033 - DNA, 598 bp, Bovine  MMBT19623
  misc_feature (1)..(32): n is a, c, g, or t
nnnnnnnnnnnnnnnnnnnnnnnnnnnnnnnncaagtgcatctgttaatcttttttaccttgaagacagcaggcgtaaatggtctagaagagaatcacgtcagatggacccttgccagagccatcaggtgacttactgaggtgcctgatgactgcctgccaaacgcagaagcatttgcctctggtgcaaagcacagatggttgctgttctctaaaacacgaagttggacacagttccaagggtagagatgtcctgaaaataattgcytgtctctattgttattagagacctagttaaagyacactcttgagagacaagaaaagttcagaataaccttgttccagtcattcttctgggaatgaattgtaacaaaataatctgaggtatagaaaacaacaacagagatgctttttataaaaaggcattggtaaagaatttttaataacatggggaagggattattagaaagttttttgaaagcagagaataattgtacttatagaatgatttcaactatgtaaaacaaaagcttttttaaaaagactagaagatatatatgaagctcctaacagtcattggaaaaagtaaactgacttgt

SEQ ID NO: 4034 - DNA, 602 bp, Bovine  MMBT20483
  misc_feature (1)..(2): n is a, c, g, or t
nntttttatctgtaagtgtattattccctggaaatataattattttgttcatttaaaattgcttttgatcaaacaggttggtataaaccagatttttttggttgcctgcagatggcagtgattattaacttgtcattctaaataaaaggtgttggttttacttagcagttctaaagtgctatattaatggcagtttattgkgttctaataaaaattagtaagatttacatgctgcctttgaagaagagagttgatttatatatttaacgtgatgtcatttaaaatattaggtgactagacaygaaacacaaagacattaaattaacatacttcactggattatgcaaaacattgaacagtgacaaaagcgtttcagagcaggatttgattattgtggccaaatccagtaatgtatcctggaaaatttgattccaaagatatgcaaaacatgataaactttgcactctgttttatctccagaacaagatatagcagtaayagttgattgtaccttgaygatattggcaagtcacattctggaatgcagacagcagtgctgtccaaatagaaggaattaccaaaaggcaayggaaaaaaatctg

SEQ ID NO: 4035 - DNA, 346 bp, Bovine  MMBT20978
cagacacgacactcagggttttctgtttattaastcatttaagcctcaaaacaagtctatatggatggtgctataattactttaatttaactttgggaaagkctaagtaatctgctcaaggtcacacagccaggaagaaaaggagccaggatttagaaccccggccatttggcctcagagctcatgacactttggctgattaaatatattctagcaagggaggtggcaataaagatggatgattaaatataattttaatatgtactgcaactgggaagtacaggatgccatgtgttatayggcgggtggagtaactccagtcttgaggggtgatcaggaaaactta

SEQ ID NO: 4036 - DNA, 600 bp, Bovine  MMBT21650
gataactaaagaggctacctgacggacaagggagtccaagcagtgagaggtatgggatccaaggctgatgggactttggagaagtccttcaggagcccatctcccgtgtcagggatgatacgggtgggtattctaccatagagcccgtgaagaacaaacacatacatactatagagaagccaggctttggctgccacttatacagaagccgtcaattataaagggggaaccaaaacagtgctatttaattctgcmtttccccctccttctggacagacctgaacactccaaaggatatasagtaacccagaaaagggagtaaggcagaagggaggctcctcccctttcccttgcaaggctcaattcctgatcaaggacaaattagagaataggtagtgctttgaactggatataagatataagccataaagtgaactgtgtatacctagaagagactagaagacaatggratctyccaattrtagatatgggatgaaaaagggcgattcaactgagtatgtttgaagttaattattggagaaaattaagatattttatatctatatcttactgagttcatttttctgaatatattgattc

SEQ ID NO: 4037 - DNA, 600 bp, Bovine  MMBT16171
gtgtttcatcgggaagcagatgtgctccagtgataggagatgggaaggggatgttttgttattaattrcttagctttgaataaacaaagactttgtatttttgaaagatgtcttcttctggtttatagaaattaatcctatttttaaagcttttcattagttgatctaagaagtatgtactctgttgttccagtaacctaactcctgaactcttggttaattgtattatgtcatatcttctattacataagagcatgtgagatttataggatagaatttcggtagagaaaaggtgtgtcktaaaagataggaagtggtggcagactagtatttgtaatctgagaaagctcargttttgccttttcatctctgcttgcttcccttmgttgaaagaaatcagaaaagccattttaatgagaaaytgatatcctattttaatgtttaaaaaataaagaatttagcatttaaactagataacaataaaatatcttgactcaatgtcacaattatgccccgtaaacctaaatttatcaactgtattctgtgaaccatagttggaaaatgctaatttaaagaggttatatagaatcctgaattagg

SEQ ID NO: 4038 - DNA, 600 bp, Bovine  MMBT21415
ccatcctactctattattgcatgttgcattttataaagggcactagtcatgcactcctttacaacaatactattgctggcaaaaaagttcctggatatcaaataattaaaaagttacttcaaaccagttgaagtttcatttgaatgttttacaacttaaaaaatgctgtatatcaattacaaaagtgaataggaaacacgccaattcatttggtgtgcaaaaatattttttcactacacagaatttaagggcttcacagaatttttttcaaattttacattttcagcagaaacacttaasgaataagcactttctcaaggggatgttaatatgcttccacttttgtcaaactttttaccctttgacaacgctgcaacctgtttgagtagctctctgtttttggcctgtgggagacaaaaacatttaccattaaaaatatttcaaatattaagtcatgctgaagaatacacactatcagaatgaaagaggtatttaggctcatctctttgatatgtaaaaggaaaactttagattggtttgtcagccccctttgtaaatgtccatattaatgcrattgttgtccagattcaactggttaca

SEQ ID NO: 4039 - DNA, 600 bp, Bovine  MMBT09985
aatatgaagagccaaatttttcatgagatttagctgtggcattatattttgcacctgtacttttacagacatagaatttaattgctcctttatttggctgataatttttacatttggctgtttctgccactacactgagattcaattatgcacttattgatccccttgggaaattttgcttcatcatgacaattcatagtcataatttaattgcagaaatgatgcatggaaataaaaaaggtgtctactaaatgtgttgagaagagtgaggaactacagttgcacttagaagtaaatttsaaaatgagagctgttattggaaataatttcagatcaattcactactacattcttagggagacaggtctgattatattttctattttcaattttatatgtgctcttgctttcagggagaaataagtaacaacatatattattgttatatatataacaatatattaatgtatataatattatatatatattatcataaatacatcaattggtaaatctactacacctacattatatctactactgtgggcaaggatctattagaagaaatggagtagccatcagagtcaacaagagtccgaa

SEQ ID NO: 4040 - DNA, 600 bp, Bovine  MMBT04890
attggtagacaaagaagcatatgagaatagatttgggcaacataatgatgtctggaagctaagtcagggcaaacttgagtggttaagcttgaggaagatagaagtgaaagaaagaggaaggtgaagatgcagagaaacaaagtattgtttgaacatcaacagactttcaaaatcaggaaaagcttgaaatagttattttagagaacatgatggggagctaaaaacaaggaaacaaaagggaaaaaaggaagaaaagtcaagagaatgagaagataagccacagacagaaaatatttgcaraagacacatctgagagagaactgctttccaaatcatacaaagaactaatatatcttaaaaataagcaggcaaccaaattttaagaagggccactccagtkttcttgcctgtagaatcccaaggacaggggagcctgttgggctgccatctctggggttgcacagacttggacatgactgaagcgacttagcagcagcagcgacagcagcagcagcagcagagaccttaagaggcaccttaccaaataaaacatacakataacaagaatgaaaaaaatctgtcacataacttgacattagg

SEQ ID NO: 4041 - DNA, 582 bp, Bovine  MMBT20052
ttttcataagggagcagcaccttgatttacattctggtgtaagctcttttcctcattgttacagacaagggttttgaatagctgatattctggtctgggttggcagagggggttgattaccttgacatgcaacagaatatcatgttggggcaccaggaagaaactaacaaacagatgccttaggaagacagcacagttgagggagggcagaacccacgtaaaaggctcccagacctctgatgttatgaagttcctagtaggacaatggtacaaaaacgccaatacactccctcttaaatragagacaagttgcttcactttgcagagcccacagcagaaggagcccgaggacttagtttacctaaggctttatatttgggtatacggctctgatccatctactcggtaacccataaggctcctgtttaaagagatatgtggagcaagagaagatctgcagtagatccaggcttttgcacaggtaacctgtcacttagacctgtgacccaacagattgagtggtacttgacaaaatatatggaggaactgaatgaagtatgtgccagcaatagtaacatcaca

SEQ ID NO: 4042 - DNA, 600 bp, Bovine  MMBT11505
tatcctacttgaagttcactgagctctttggagggctatgtgcatgtttttcatcacatttgagatgttttcacccattattttttcaagcagtctctctgctcctctctctctatctcttctaggattcccacaatgcatatgttgatctgcttgatgttgtcccacaggtcatttaggcgttcatttcagttttcttcaatctttttttttcttcctgttcctcaacttgacaatttcaattgttctatcttcaaagtagctgattcttctgcctactcaaatctgcttttgaatccytttagtcagttttattttagttatattttwaactccaaaattttttagtttatttttaggttttctctctattaaaattaccattttgttcgtacatcagttttttgactttgttcacatcttcttttagctctttgagcatctttaagacagacagttgttttaaattctttgtgtaggaagttcaccatctggtctttcttagacatttattttttcccctttgaatgggtcataacattcctgcccttttatgactcatgatatttttgttgttgaagcaggacatttgaatcttat

SEQ ID NO: 4043 - DNA, 600 bp, Bovine  MMBT12518
cttctcccaagtcttttagcatttcactcaccttttgccctggtctgcttcttttagctactgctttctctttttcacttctgaatctctcttttggttgagatggttatctacagagaaacagaatttcttctaaagaaagcaaaaatctaacttgcagttgtgaaaactatcttacactatttttgtataattactttcattttctatagtggagcagctgagaaaaattgctctaattgtgtaattttctgcaactactctgggacaaaaatcttggtaattggatttttttaaackaacaagttgtcacaattggatagttcttaaactatttgtgcttatgcttcagaaattttcagtggatgtacagtgtattttaaatgttttgcatcagcttgtggtctcaaatttgatttaactttgaattttaaaatagattgacaactctgattatacattgtcttcactaaatggacctttgctaagttttgagtgtrttcatccctaccccactctctgctgttgtcatgsgagctaaaatcctggcggattcagctccacccccaagtggttctgtctcccagagtgctttgctgt

SEQ ID NO: 4044 - DNA, 600 bp, Bovine  MMBT06436
tagaaattattattacatgtaaatatttaaaataatgtctttattactctttgaacacttaaagcaagataacaagcatgcaaatgaatcacatagtcagtatatactcaagaataaaatagagaaatatgtctgtttattttcttagcctctagtgggaaaaatttacctgttctaaaaccaactcaaaaagtattacaatttttcctaaagagaagctcacataggcacggaaacatgtggagaagagaacagtgagtgatttttgaaatcagaagagtctgtttcaaattcaaatgytcaaatctgctttctgttagctgtagccatgggcaagaatataaactttcttgaatttaagttttcttatacataaaacagagctgtattcctgctaaattctttcctagggttttttgtcaggccccaaggagataatgtgtgcatgccaacaactgtttctatctgtgagtatttcttctgtgctaggcacaattgtagatgctagagatggtagggcttgtgttccattcacatccagcttcatggactcagagaaataaggctactatccaaaactgtttactaagttctgagata

SEQ ID NO: 4045 - DNA, 600 bp, Bovine  MMBT09242
cattccctggcatgcattcatcttttaaccccaaaaccaaagtacgtgagccaagtggacataattacataaatatctggctccaaaataatctacagtttgttgtacatatatagtgtataactttttttaattctctccctttttctcactttccccaccctatacccagaaaaactcatatttagagaaagccacacctatcactaagggtgaccaacctttcaaaaaaacattaagagcaaacatttagagccatttaaaccccaaggaaatgccagggcactggaaagttctaaycctcaatgcaaatgaagctactggaatttgtaaggagcaaaataaacaaaacaattaagctattagcatatctcctaggagacaatctggccttcggagaagagcaaagcctgatcccacttgggcaaggtgagtggttagtttgactaccgaaaaacaaaggcattaaatactcctctttcaaccaggatagataaaacctttctcaagaaattttacatagctgaacaagaaaaaccttcttactgtatgttaatctggcagtgatcctttacatcaccaaaacctgcctaaccactc

SEQ ID NO: 4046 - DNA, 600 bp, Bovine  MMBT02807
gtccattttatttcactgattcctaaaatgtcgatgttcactcttgccatcacctgtctgaccagttccaattgccttgattcatggatgtaatattccagtttcctatgcaatattgctctttacagcatcaaactttacttctatcaccaatcacatccacaagtgggtgttgtttttctttgggtccatctcttcatttattctcttcattctatctcctctgatctcagtagcatatagagcacctactgacatctttcagtgtcctatctttttgctttttcatactgttcatgrggttctcaagggaagaatgctgaagtggtttccctttctgttttccagtggaccacgttttgtcagaagtctccaccatgatcctttccccactggacagctaaaagaagtatacacaaagtgctatcaaaatttaagaaatcagctatttctcaaagtgaatagattagatagaaaaacaagctactattcaatgatcaaccagataagataataatgaatattttgctgtttcctggtttgtgaatggcattttattaggtcttatgaaaaatattaagagtaactaaaatttataca

SEQ ID NO: 4047 - DNA, 600 bp, Bovine  MMBT06527
gtagggcaagtttgcgagtgacaaactcagtttttgcgtatttgtaaatgtcttaatttctccatcgttgaaagagattttagcaacataacagaatttctggttaacagtcgttttttcccttcaacactttgaaaatgtcttctagtatccatggtttttgatgtcagctatcaatatttttcttttgttgcttttaagatttctctttcactctcataaatttgactatgatgtctaaatttgattttgatgtctatgatttgtctatatttgggtttattctacttggagtatacraagtttctttaatgcataaattaatatttttctagcaagtgtgtgatgttttctgtcattatttcttttaatattctttttgcccttttttttttccactcttctccttctaagattcccattatgtgtatgttgatacacttgcaatgtcccataggtctcctgaacttgtgttcactttcaattcctttctactcctcacactggataattagtcaactacattcaagttgactaatactttcttctaccaactcatatcagttacttgagcccctttagtaaatttttcatttttgt

SEQ ID NO: 4048 - DNA, 600 bp, Bovine  MMBT10483
tgctacaacattgttaagtagaacaacttcccttaattaaaaaaactcacatataaacataatgaaaagcagaaatgagcataactgtagttgcttgacattgaaacaatacaagatcagggtcttctcaccctgaaccctgttcgcctttgcctaaacaaaaatcccttccatcgtatactgctggttatgctgaaattttatcttctgatcttttattccatttggaagagttcttcctttcttcccaaggggaaaaaacaaaacaaaatatgctatgctttatgaggaagatcacamtataaaatcaccttcacaaagatatatttttcatgcaggttttctttgtagaatgtttgctttgtaacaatcattcatattctgactaaatataaaatccttgcttccctcctctaccaagttcatggttcaaaaacctgggagtcatctaactcatccttcttccccaaccatacatacaggtcaccagatacatttgaattttagttaaacaatgaataatttgcatgtgataaacatgtataatttgtatgtgatccaactattgcttggaatgcacttatgttaaaaaagttattg

SEQ ID NO: 4049 - DNA, 600 bp, Bovine  MMBT11906
tttgtgtgttgcttccttataaagagagaagcagctgcagtccttggccgagttgctgaaatttatccctttgtgtatattacaatatcctccattttttttccctctgccctctaaacaacaagcgtttcgccatcttgggcaatttttattctcaagtctctctctctttttttaatttttatttttcaaagactgggaagaaacctcagaaagtcaaaaagtgtgtctggttaagattcaaagtttagggaatgttcagggggcccggtgacgtcatgtaaactttatgaagaaatyttaccaggagtaaatttttcgcttaattttttccctgttttaagcgaccatgtgaaggaccatgtaacttacaggttaacgataagctgttctgcttatttttgtgtcctgctctcaaaatgagccctcggcgtctgcacattttatgttttggtaacaggtggaaaactgtgcgaaaaaaaggtggaaacagtggtctttggtatttagcaggcttttgtgtatatgttttttatactttaaaggatttgaatatttgcatgtttccttttttatttactccagtcctgtggatttttc

SEQ ID NO: 4050 - DNA, 600 bp, Bovine  MMBT11588
aagtatagtatttcagtgtattgacaactggtactttcctcctaaagctctagaagctgaagttcagacagttaaaagacttgcccaagttattcccatgaacaaggagtagagggaagacagaaaccctattttcttgctctagtatactttccactgtaacacactcccagtcaatatagccatgccttagggttaagagagatagcaaaaacattgcaatttggggtggtgaaaagacaggttaaaagagtattgaaggtcctcactgaagctgccctccctgggctctgggtttgkggtgaggaagacaatttctgagttttgagagggctagatcctcaggaagaacctgaggattctgatagaataaaactttgacccttgacctctgatccctcagatgtggaacgttactcagacaaatatcagatgtcagggccgattgacaatgccatcgattggaaccctggtaggtgatgggcccttacattgacttcttttctttcaaatgcttgagctgcctcaagccaccaccctatccaccctcctctgtccccaacctccaccctattcagaaggcttagatgtgctccagca

SEQ ID NO: 4051 - DNA, 600 bp, Bovine  MMBT00092
cgaatactcaaaaggtttttactgccagggggaagcacgtgtatttcttcacaaagtatttcaaagataatcacaacaaatggcacatgagacaggctactggaaaaagtggcgagccctattttccttctttttctttacctttttagaattcatctattttccctaaacctaattcagttgtatacttatattattgtcttagctccatcagatatagcaaaatataactatgtccacttggagggcttctcagcagtgaaccacagcccgtttcatttccgtagattagtatgtccrtttctcatggacatctgaagctttctgccctgtgctttctactttcgatctcttcaaatgttcaatttttgctaagtctacaaaaaaaaatttgaatttttctatatcgtttcttaggattgaaaacaagcattttctaatgggacctctggtcttcttaaccaccttactaggtagcttctagcttgctacttttatttctgtccaaatcttcttctggaaatacctgtaatttcttcttatagctttttgcttctttcttacgtaatttatcctttctctaactgaagacactgtact

SEQ ID NO: 4052 - DNA, 600 bp, Bovine  MMBT04486
attgaagtgtcatgagccgtgcttctgtgggtttcaggagcagccattgacaacaggaactctggtctgaagtgctgagtgcaaggcctctgcatgcagtactctgtgagcaactgcacctagattaagcacacacacacacacacacacacatacatacatgtacacacacacagattagactagtacatggattttgtttttattcctttgggaattgttaatgggctttgccagtcacacctggacaaatgtacccatgcctccctctaccctgcctacaagtgtcttttccaacakaacttgttatgttttcacttccctttttatgtttcttcaaatgccaccaataaaagattcarttacgttgacatattcctctggaaggcttgaggggtgatcagttggttcattagttttgtaacacgacattttggttgaatctgggactcattacccactcctccattagtatgaagaggccttgatttgttctggggtgagatggctgagctatttgcccttatatagttgggagcacagtcactccctgagaggaaagaggtaggaactccagcttaatctcttggaggctcagag

SEQ ID NO: 4053 - DNA, 600 bp, Bovine  MMBT06245
tgggaatgttgctaaagacagtttaaaatgaatagcagccacaggatttaggaatccaacttaagacagtccacacactggtgatcttttcatgaaagcttggatttcagttctgtatcctacccttgacaaacgctctcaccttcttaaatggtcttgttgagtgggaagtaataatgttgactgatattttttgtataaatgatataatgatgtttcacagcagaggtttaaatagtgaaaggccatgaaaaccctcattgatgaggcctgtactttagtgggtagaatcaccaaacyggaaagatcacccatgcaaacagtggcctgaagactgacaggggatggaaacrtacactgtcctcccaaataagaatttgggcctaaggaagaagggcctgggatttcccagcctgcccttactctggtgaagtaggaaagccagacgtctcggtagtcagtcagagtttgaattctgactctgccctctttctagctgtgtgactgcagccagtctccacgttctctgattgaaatggagactactcacaggaaacgtacagtcgacagttggtgctcggcaaatttcagcacgtaaca

SEQ ID NO: 4054 - DNA, 598 bp, Bovine  MMBT07456
  misc_feature (1)..(162): n is a, c, g, or t
nnnnnnnnnnnnnnnnnnnnnnnnnnnnnnnnnnnnnnnnnnnnnnnnnnnnnnnnnnnnnnnnnnnnnnnnnnnnnnnnnnnnnnnnnnnnnnnnnnnnnnnnnnnnnnnnnnnnnnnnnnnnnnnnnnnnnnnnnnnnnnnnnnnnnnnnnnnnnnnnnnatattaagtaaaatacccaccaaattacagtatgctttggatgaagaatttactccaggctattccccatctcagattctgcttagctgtgctgtccttccaagctcacctgatacaataatgtatgggtcagctatyacggagtaacaaacaactacaaaatctcagtgacacacaaacataatttcaggtcaactggtggttagctgagctaggctgggctcaggggggcagctcttctttgagctgtgggttcaactggactagctcctcaccaaggtgtatcactgtgggcccaggctgaaagggacgttcaaaagaagttctactcatggagatggcacaagtacaagaggacaaatcccgctgtagaggctaatttccagtcctacttgagtcacaactgctaacatctattggccaaagcaagctacat

SEQ ID NO: 4055 - DNA, 600 bp, Bovine  MMBT23034
tgtcatgcctgaggacactgctgtggaccttcacagttccasctggtagaagggaaacttgacagagaaacacttcaagcagagctaaacggacacacaagggttttctgaagcaccagaggtaatataagttggatgcaaagtataactgctactgcattaaaagaattgaaagtggaagattttaatttcgccctgaataggaaacccactttggaatagctgcttaaaaataataamatttaaatttmctaaaatatgaaactgaaatatgattttggctgaactcacatttttttkataccatctatgatctgtaaatcttgttaaagataatagctagcaaaggttgcygtgaacattaaaatctgtaaattatcaaaatttcctacttgtggcttcttactaaagtgttcccccatttcgccattttctttttcccttcttttggatgcaatgttagaaatagtgaaatggacttagggttaccagagaggaaaagaccttgtctgagggtctctgagtggactttkcatgtatatgtgaaaattcttcctgttccaagatctctgggacctgtgtgacaagtggggcaagttg

SEQ ID NO: 4056 - DNA, 600 bp, Bovine  MMBT23031
atgcaatgttagaaatagtgaaatggacttagggttaccagagaggaaaagaccttgtctgagggtctctgagtggactttkcatgtatatgtgaaaattcttcctgttccaagatctctgggacctgtgtgacaagtggggcaagttgatctaagttttctgtgatttggatatcattctgctgttaagtgccaactccctggggagtttttaatgtttccttgtggtccccaattaatctataagttaagtatgtgagaaggttaaaaccagttttcctttgacttttttagcgaacycttgaaagccatttgatgtcccctgctgagattccaggccagcctrtccctaagaacatcttgcaggtacttaacaatcttataccgaggccttggagtcctgaacagtagtcctccaaactggttttgtgtagtgggccagctttgggccgtagagaatgatccatgttgcctggcaatgaaggatacggttttgctgcctgacatagttctctgtagctataaatgtggggtgggttggtgggtaaaaaagatgatcgagtaaagcyttggtttcccgtttgcaggtttgcaatttct

SEQ ID NO: 4057 - DNA, 600 bp, Bovine  MMBT21489
ttcctttcctatctagctataacaatatcattgtcttgtagcccctwatttttgtacttgtgtatgctttctgctgctgtctaattgtgcctttggtttacattttgcttccactaagaggctgaatttcttgaccacgtaggttatactttagactttcttattactaccagaaagatttgcacatctctggggatatcatagcctccgttttgttcagttgaattgaattgtttaaaagggaagctgctggagaagctcagatgttcttctgaagctcaggtgggaggacggccgtgygttatgctagagaaggtgctagagaaacacaaagaggcagagtgagcacaggagtgctggctctggctgcaatccaagtgcagtaattacatcctacctcctgaaagccccctgcaggttcaatccgttgtggtacccagcttcattccttttctacagtctgtgctctgataaatagaggccgctcgcaaggagtgggtgaagggcccagaagcagagcgcgcaagatggagagcctcagcgtagcctggaagctatatgccatggcatgtcttctcttcaaggagaatgtcaggcatc

SEQ ID NO: 4058 - DNA, 600 bp, Bovine  MMBT14690
caaagaaagattatatcagaattttaatctttgtagacttccttggcattttagcattcataacatgaaacaaaataattaagaattattttattcttataaaaattttattcttataaaatttttmttatataaaaattttrttattaaaatttaagaatttaatttttagttattaaattttattcagctttgagtctttcaaaaaaaggcctatttgggaattcttcacagcttgtgagaatgacttacaaggagaacatcaacttggccatcataaaagtttgtaagaaggaaaaytcgaaaatcctgtaaagcaatatctatgctgaaataaatctgacccagatagaacaaagaatatagactatgagaaaggagaaagtttcagagaaaactgtgatatcccacacccattcttccttaactaatcaaatttcaaaacaacagactttataaaaacatttcaagaaaataggtccttcttcttttgagtctatgcaaaaatttaaacagaaagcttgaaaaatattgctatagactacaaactatttttagtgctagaagatgaaggaattttgatgtttgatgaagaaataa

SEQ ID NO: 4059 - DNA, 600 bp, Bovine  MMBT17295
aatatttacaaattgacctggatgcttgctgagccttgcaggtgcagggacaccccccaatcaagcccctggcccytggcctctgtgttctctctggcctggctctagcttagagagtggactcttggggacaccacaggccttgcagcttgagctgtccctctcctacaaataaatggaagcagcagagggacagagggacagccctctggggacactcacgagagagaaaaacatctcagtttttaaagyagaggtgcagtatatactaggaaggaaaataaacccataagcatggtmtattcactggtgtttgcagacgtcaaacctcatttaaattctgcaaagctctggtttggtggttttagttgttaagtcatgtctgactcttgcgaccccatggactgtagcccaccaggyttctctgtccatgggatttcccagayaagaatactggagtgttttgccagttccttctccaggggctctttctgaactatcagtcaaatccacatctcatgcactgcagtctcctgaattgcaggcagatttttcactgactgagccaccagggaagcccaaacaattctatttacagta

SEQ ID NO: 4060 - DNA, 589 bp, Bovine  MMBT20446
ggaaagagtcccactgaactttttctgtgttaaggccttaagttgctcaccattgtgttgccttagaagtgggacatcagtaggggtctttgttccctacttatcagytgagatgtcacttgtcacctcccatcctcatttcattcaactgtaaagtgggggcaaataggtccgtcttaaagtgtggctgtcaagtttaaaggtgagaaagtgcctggcttcgcagaagtgctgggtaaacgtcccccttgcgttcgtttgtatcttcctttcagccctattctgcgggagacttgctcrattgggtctcttaatgcgggtcaattcgccttaattccgaggtgacggagacgccaccgccttggtgcgcagcttcctcctaaaggggttgcaaacggctggcttaccccagcacagcctcaaacccgggcttgacgcaaacgccaccctatccacccaggaaatcgggtccccaggtgcgcgtggaggccgcaacaggcacttctttctctgtggaccacctgttccccaacacacacacacaccgtggaccctgctccgacgtcgcgctccaaacgtccaaacgcgt

SEQ ID NO: 4061 - DNA, 600 bp, Bovine  MMBT05968
tcaggttctatccctgggtcaggaagatcccctggaggagggcacagcgacccactccagtattgttgcctggagaatccaatggacggaggagcctggcaggcctcagttcatcaggtcacagagagttggacatgattgaagtgacttagcatacaaagtggaagcaatttgaaatactacccttaccatattcgatttgggtacatccagagatatttgctgtatttggcaaaaataattattctgaaacaattgttgagctgaaattttctgttgccagcaaaaattcacattgcyaagtcctctttgcctttatcttctaaatccaagagtatttcaagggaaattcaatataaacatgtcatataccttcaacttcttgatccaattagcagttctttctagttgcagtgggttatccatggggtctttttaaaaaatcttacagcttgaaggggagaataaatggaactgatcccccctaagtactgaggacagatgtgcattgctcaaagactctcagcttagaaaagactttctcccctcttggcaaatcaggcagcatggaatcaccaatggcccagctcccatggtatt

SEQ ID NO: 4062 - DNA, 600 bp, Bovine  MMBT07153
gcaggattcacgcattatctatgattatggaacagataatcttgaagaaaccttttttagccaagattatgaggataaatacctggatggaaaaagtactaaggtattttatttctactctaaatttaatttataaaatagtcacccatttaaatgcatgtttttgtttttttctgaatgtgtctgataaggtaagaggaaaggaaaagcacttgaaatgattcaaaacaattcaaaataactgtccctaaattatatttttaaagtatgcatgcttcccaaattaataaatagactctrtgataaccaaatagtatctgtaacaaccaaaacataaaatttaaggaaarctaaaatttgaaatatamaatttaaggaaaattcaatttaaagatgatctcttatcagcagagatttacatttaagtcatgatacatagtgccttttatttgcatattaaaataaaayaggagaaatgtgtattaggagaaataawgatggattaccagctttaaggtttattattttaggaagaagtagttcaagtacataaatagaagagtactgsttattttgtatctacaggatttcataataatt

SEQ ID NO: 4063 - DNA, 598 bp, Bovine  MMBT07154
  misc_feature (1)..(107): n is a, c, g, or t
nnnnnnnnnnnnnnnnnnnnnnnnnnnnnnnnnnnnnnnnnnnnnnnnnnnnnnnnnnnnnnnnnnnnnnnnnnnnnnnnnnnnnnnnnnnnnnnnnnnnnnnnnnnccccacccctacaacaaggctgggaagtcaagaaggattgagataggaattggtgtttaaaatcttctaagagaactacttcagggaaggactgcctagttttaccactgcaagatttcttggtagcccagtggtccaacctgttcatcccagagtaaaaatatcacaggagagataaggcttcacctgtgamaaaaatccacagacgtgtccctcaactttgggaaagggcctggatgggcawctagggcaggaagtggacagaacactgtatcccagagaagtaaccagcggggtggtcagagagcagagcatggrgaaggcctgtgggatagataccccggccagctgtgatcgccacatgcaaggcaagtccccaacttgaccctttcctggtgtcccggcgctcacaaaagacgctgaaaccgctgaaggcagctgcgcccagagacaggagatgatatacatagaaatgatggatacacacgcct

SEQ ID NO: 4064 - DNA, 600 bp, Bovine  MMBT09346
actaatcaaacaagaaagcatggtcacagagtctgctgcactggaacaggaggatgccaatactgcaacactcaagttctgaaagagaattgttaatcactaataaaacatttagtctactatacaaaagctaagtgctgataattttttctaccccaagtcacaaagcctgtttggtttcatcaattcctaggaaacgcctccagagagtaaggaaggaagagattctaggtaagatggggtatgcatgcatcatctccttgtctgtgttagcgggtgtggtggctcttaacaggtcartgggtaggaggaccctcactgacaggggaagggaaaaccgtctgaatcattttgcccagagccagtctctagttcccgtattatccattttaaaaagaaatgaaaaaggggaagagggcataaaaacaccttccagaaacgtggcatcctctgctaaagaaaacaggtaaacaaagcaatctgtttaataaagttctgtttttctcttttccttgctattagtgtctcctgaactccttatgaacttccttggtctttggactttttccacagttttcttcagatgacttgtcatgaaat

SEQ ID NO: 4065 - DNA, 600 bp, Bovine  MMBT13227
ctttaaaatattctgagtgcaacctatttttaaaaatggcattataagaagagtggcataatatttgaaataattttctagaaacaagctttacttccaaaagagcgtttgatcaaacmcttcatgatgaataagactaattacacttayggtccttgtgagctgtttttaaaaattcatgtgcaaaccttcttcaagcactttaatctcctgcattccactgcaaaaccytcttcaaaatgctaaatggtttactgcccctgcacagtaattatttattttagtactctactggcttcycttgtagctcagatggtaaagaatatgcttgcaatgccaaagaccagggtttgatccctgggtcaggaggactcctggagragagaatggcaacccactccaatattcttgcctgggaaatcccatagacacaggagcctggtgggctacagtccacggggtcacaaagagttggacacgactacctcaaattatcctattttttkttkttkttgttaccttgatattctccctgttctacctagatatattctgaatgcttaaaggcagaaattctgctttatctgtcccttaagtctc

SEQ ID NO: 4066 - DNA, 600 bp, Bovine  MMBT20261
tttaggggagaaggcaacaggagtcagggtcaagggcaactaatatctcatgatcaacttgagcaactaatatctcatgatcagaggaagaggcaagagaaggagaaggaaaagccgaaccccggacgaaagcctaggggtcgggaggacatagagctggggcaagaacccaaggtggagagtggtcatgaaggccacggagccaaggtggggaaagagctggggaggctggggckcaggtgaaggggagaatgcaccttgaccctcacgtctgcctcctctcccaccccccaggtttgygagctggacatcatcttcaattttgagaaggcctacttcatcttggatgagtttctgatggggggagatgtccaggacacctccaagaagagtgtgctgaaggccatcgagcaggcggacctactgcaggaggtacgggtccgggacagtgaggaggaggaagaggaccgtggccgagggcaccctccctaccctggagccctcacctgtggaccccagctgccctcttcccgccgataccgaaacggcccccctccatgtggcgtctggcccccacgctgccaggttggccagctggcc

SEQ ID NO: 4067 - DNA, 600 bp, Bovine  MMBT22205
ggaacctgaagcactaaaaggatcatttgcccaaggtcactcagctcacaaatagtggagctgaaatttacacacagtctgacttcatgcagcatcaccttgccttgagtgtagccaggccctcctgccactggtcctgggggacatctgtgtcttgacacactgaaatgtggcctcacccgggaggtgggtgatccacggggcggaggcgttcattgcgcatcaggtgccagtgtcgtgtctggcctctctgctgctgcaggagagcccacagggtttgctctggggccacagcctcamaaccacaaggggctctgacccttctcacttctgcttcccctgcaggtacactacatccttcaggaggtggtgatgggtgggatggtcctggaaacaaacatgaatgagatcgtggctcagattgaagcccagaacaggctggagaagtccgaggtgagacactgctggaattttgccgtggctggttagagaagacctgggcagagggaggaatggctgctgtgtggagttggattattgtggaaccttaggagtattttctgctccatcttctttttttccctgactcaattgacactc

SEQ ID NO: 4068 - DNA, 600 bp, Bovine  MMBT10578
taataamatttaaatttmctaaaatatgaaactgaaatatgattttggctgaactcacatttttttkataccatctatgatctgtaaatcttgttaaagataatagctagcaaaggttgcygtgaacattaaaatctgtaaattatcaaaatttcctacttgtggcttcttactaaagtgttcccccatttcgccattttctttttcccttcttttggatgcaatgttagaaatagtgaaatggacttagggttaccagagaggaaaagaccttgtctgagggtctctgagtggactttkcatgtatatgtgaaaattcttcctgttccaagatctctgggacctgtgtgacaagtggggcaagttgatctaagttttctgtgatttggatatcattctgctgttaagtgccaactccctggggagtttttaatgtttccttgtggtccccaattaatctataagttaagtatgtgagaaggttaaaaccagttttcctttgacttttttagcgaacycttgaaagccatttgatgtcccctgctgagattccaggccagcctrtccctaagaacatcttgcaggtacttaacaatctta

SEQ ID NO: 4069 - DNA, 600 bp, Bovine  MMBT07169
atgtcagtgattacaggctgctctcrgagtgaagttaaataacagagctggaattatttctaaagaaatctttaaaatattctgagtgcaacctatttttaaaaatggcattataagaagagtggcataatatttgaaataattttctagaaacaagctttacttccaaaagagcgtttgatcaaacmcttcatgatgaataagactaattacacttayggtccttgtgagctgtttttaaaaattcatgtgcaaaccttcttcaagcactttaatctcctgcattccactgcaaaaccytcttcaaaatgctaaatggtttactgcccctgcacagtaattatttattttagtactctactggcttcycttgtagctcagatggtaaagaatatgcttgcaatgccaaagaccagggtttgatccctgggtcaggaggactcctggagragagaatggcaacccactccaatattcttgcctgggaaatcccatagacacaggagcctggtgggctacagtccacggggtcacaaagagttggacacgactacctcaaattatcctattttttkttkttkttgttaccttgatattctc

SEQ ID NO: 4070 - DNA, 600 bp, Bovine  MMBT17145
acacttaggacgcaaatctgagtgcgccttgactcccgacgagatcccttaggtgtagctgatcgctcacagttgaactgcgagagtttgccgctagaggacacagcacctttgcaactcgtttgcctgggaggacaggaagctcgcacttttcagaaatgccgctctcctgagaaagctatggatctgcgcctccacgctacgcccagagcaaacagcgacctgactgagtggaccgaacgcactctggaagcgcaagggactctactgcgaagattcgcttgaaaaccgacgcggagkgggagagggtgcgcgsaacctcattacacaaacccggatcccgggattggggtggttgatggtgtgggtagggggaccataaagcttgtgaaatccccacctctggtttttgtcgactgtggcacctccaccccagggctctggattggtgtccttggacgagaagggcaggggtgaagggcgattgggcataaaaatatggaactatggaacgggactgttgtaaaagccaagtaagatgtccaaagaagaaaggagggtgggcggaaaattttgtaggatgaaacttacttcttgttt

SEQ ID NO: 4071 - DNA, 543 bp, Bovine  MMBT00797
gagaacctgcaaaagatgaaggcagaaatgaatctggtatattatgttaagtgaaagaacccaaacacaaaagaccacacattttatgattctatttatattaaatgtccagagaagtcaagtctgtggagacagagaatgggatgcagatgggaatggkgttaactaaatgagcatgaaggatcyttttggggtgatgaaaattttctaagatcacattatggtgatggttgcacaactagggaaacttactgaacaatgaataataaaagtaggtgaattttatgttatgcatattaygctttaaaatgttaaaaaaaaaaaaaaaacagaaagaaatgagtctagtatgagtaaagggtggcaaggaaattgacattattgtagtataataataagaacagtctcagagcagggaaataaattgatcaaagtcacacagctgataaaatgtggaacttgttaagaggtaaaactgtccgactacaagtaagactagaaaagtgaagtgatgccaattaggacataatactggattaattg

SEQ ID NO: 4072 - DNA, 600 bp, Bovine  MMBT01354
ctgaactgattggccctttaagaagctaattaatcactaaatatagaccacgagttgttcttttcaaccccctgcgtgtctcttccccccattgtgtgatgccatctggtgctatgatctcatgctttttgtgttcctttccagagaaccagattcatygctctctaagccyggamagccagttaatttcagtttgcatgcatggatttgaaaaaatttgcatctaatgcctccttgtggattttcatagtattgctcttcagtatatctcacggaacttctatcttgaccaccccttakgtatatacrtattcttgtctttttatcagaagaactttgtctttagcaaaccatcaagcaactgcaggccttttcctrtgtgattttcrtgaagtttcattttgtcagttttatgtgcatgccataggaaattagaacttaataatatactttccttttcaaatcgatttgactttctgctatgatggtgggacaaatgtttaaaggatataaaagagctaatggcaggcctctgaccctactgcgatctgtcctatctccatctttacccccacttctgcctgaaatctcgaataatct

SEQ ID NO: 4073 - DNA, 600 bp, Bovine  MMBT12666
ccacctgccctttcccagtcccaaactctaatccgttctttgggcaagggttttgaaccaaattcttgttcaagtgcatgcactgattcaaagttttttttgagtaaagtctggctttgcacagttaccctgttatcaagtgtgtacaccaataaggtagcgccccccccagtctgggctagcgtacaagtcaggttgctaaatttacacaacagaatgttggctttgccatctgcacacctgttatctaaagcatatggctctctctttaatcaacaacacaaaacataggctcttcakgcgctcctgggagatttcagtcctgcctctgatccagcccttggcaaaagctcacttgaaacatctgatatttgaaggagagtctttaaggcatgctaactacacattcctttaggtacctaagtgaaaacatttccctcttacatgtaaatatttcgaaaataatgtatctggacactctgtgagcctcacacagaagttgtccctctgtgatatggattataatggaggtaaacacatatttacttgtagtttatttggcatcatctgcaattctgtatctgatgagcatatttgaga

SEQ ID NO: 4074 - DNA, 600 bp, Bovine  MMBT22158
ctgggcctctctggggctgatgcggctctcccaggggacacctgaacaggctctctgaggttctcgttctctctggggtgagcttgcagggtgtggccacttctcggggacaatgccagaggcactcctgctcaggtctgccagctccatcctgaggaccgtgtaaggaacaaggatcctaccccctcccacctcctggctcccacactgccttccaggaaggagagttcttgggcttggcagggtacctggacacccagacttggattgggacttttcacctcatttagtaaccctcckaatctcaccaaagaatttcctcctacttattcaccaaaagattcgtgagagcctaagcactacatgtatcctgttatcctcacaatagccatgggattwaggcagaaaacttgaggctcagagaggtgcatgactttccaaaggttgtacagcaagtaaagtgactyaaacacaggcaggccractctgggtaaatctgagtactctattgtttcaagaaagcrtttatggagtacttaatgcayacagaccagagtgctgaatgggaagaaagggcaacagaaataaataggagctaga

SEQ ID NO: 4075 - DNA, 600 bp, Bovine  MMBT23025
agaggcaatggttactcacagaaaatgacttgtgagcaggagcatgatgccaactggccttctaagaccctccagataccagcacacggatcctttgttttcccgtgaaagtktggagccaccaccacagagaaacataggaaatagacaagtagcagccttggtggtgtttctccctgtggtatatgctcttgggggtgagggtccatcttgttccctgctggtccccaacatccagccctgggtttggcctggagtaaaaactagggatatatatcaactcaaagaatgaaagagccrgaaccctgcmtgcctcgcaggtgaagtctctcaagaacacgcagcacagagcagccacccttgtcttatggggaggaagggaagaaggcagactggtggcacagcccgaaaggtgagatgccatctcctggacacctggcagagtgccaggacgccaygccaacggtgggggggggcctcggcaacagggctcccctgagaactcccctcacccaactctcccaccagcagtgctctgcccacactgtcagcttctacaaaaagcaagkaccgtctgattccctgtccctcctctccaat

SEQ ID NO: 4076 - DNA, 600 bp, Bovine  MMBT01698
cctggtgggctactcttcatagggttgcagagtcggacatgactgaagtgacttagcatgcatgcatgcatagcagatttgaatggataaaaatatatgtaagactttactatatattttcccctctttcctatgaattcttgcccagattagccaatggaataggcctaagctattttgcaactcaggataaaggtgtactggggagttttgacaccctgagttggtgtctatattttactttgaattggatgctttagtcacagttatgttttctcagagtgcagtgtttatataccrgttccttctatttctaggcctctgaagttgacccttaggcaccagcatcttctgtttagagatgacattatacccaagggctcatagaatgacctcactccttttagctctggcaaaattaaccttctgtctgcaacataatctcactcaattaaaataacaacaacagccagaatgtaaataacaacaacagcaggctttactctccagtatgtctctttcaccctggatggaaatgacccaacccagagcccccgtttgacttactttggcactagctgggtgaagctgggcctggca

SEQ ID NO: 4077 - DNA, 600 bp, Bovine  MMBT22107
aatctggcatatatttactgattcatgtggtgcaaagaacctagaaatgtatcttttttaaaaatgcaaatttttattttatttatttttggccatactgtgtgggttgtgggctccctcttccctgaccaggaatcaaactctggcccttgacagtaaaagcatgaagtcctaaccactggactgccagggaattcccctatgtaaattatttttaacttgaaatctaaataattaaaccatatgcgcaataccaagcttaagaaatagaaccgtatcaatatctttgaagcccaatgygggccactcccctcccacattctcctttcagacatatctttaaaggaatatgaaatcttgaccaggaaactgtttgagacttgtgactgtggatagtgttttcactatattttcttgctctagatagaacttcagggaggacaatctgggaggtaaataaatggctgagattctgttggatttgtgtttctggaccatggtttctgataccasaaagaagggcctttgctagggctgaagtatttaagaggcctgggaaggttaagattgccctgagctaaccggccttgtgaagaggac

SEQ ID NO: 4078 - DNA, 598 bp, Bovine  MMBT13462
  misc_feature (1)..(22): n is a, c, g, or t
nnnnnnnnnnnnnnnnnnnnnnctgttttaatgttttgtataattttgcataaaaatagcaggtaaccattatttttcagcattggtgtgtactttatcaattctaccttgctttgactgagtttacttataaacctgatgaggcaataagcaaaagtgtctcatacttgattttttactctttgtttaaaatatattgtacttaaaaaatgaaagcaggaagtggcaacttaccaaattaaatatttttgaaccaatcacagtgggaacacatagcccaagttccaaagtaaacgattkgtgtttaaacacaggttcatgtgttactgtttctttgaaccgcgcagcacagaaacatagtagggatatcttaaaatagacagaggacggtggccagaaattgttgactgctatagatggtgaggctgtctagctcttgtagtgatataagccagaagtacatgctaagggcattgatttgctcaaggtcagcatgttctaaattcagctgcttgagtatggtttctgtcaagaacacgtagggctcctcaatgcataaaaggttttagcagcagaaggggctgtatttatgaggtgt

SEQ ID NO: 4079 - DNA, 600 bp, Bovine  MMBT17713
agagctccagcttcacgaccccatctaagcttaataatctcccaaagactccacctccaaaaacaatcacactgaggtttagggcttcaagatatgagtttgtgtgggtgggtggggggaggagatattcagtgacaacactactaggtttagaaacagtactgttttctcactcagtccctgtcataattctgaagctgtactagtttccttgtgcatacactttatttcctaaccttattaacagccatccattcgacatgaatttgttctattttaatgatgctgctgtcataatgrtaacagtcgagacctagaagccaaggtagataactcatggaaataagcttggctgggggtttgaaacttcagctctacttgttcaaaaagtatgtgggaaaatacaaagaaagatcctacttggattacagccagagtgtaactgacagacacataggaaaattatgtacatttattaatatattgagaaatccaatatgtttttttggtcttttgccttgtctaaatcaatgaaactaaaaattataggattccaaggctacacatgaaatcacaagacttttatacactccaaggtag

SEQ ID NO: 4080 - DNA, 598 bp, Bovine  MMBT17061
  misc_feature (1)..(78): n is a, c, g, or t
nnnnnnnnnnnnnnnnnnnnnnnnnnnnnnnnnnnnnnnnnnnnnnnnnnnnnnnnnnnnnnnnnnnnnnnnnnnnnngaaatggagaaatacgcagagagggaagatatggtcatcatgtttgtggacaggtaaaggggagggggcagacagaaggggagaggatagggagattcctagtggtcgtcctcctcatcgtcccccgcctccctcagctacgacgtagttctggctggcagcccctcagagctgctgaagaagttcgtccagagtggcagccgcctgctcttctctgcagaragcttctgctggcccgagtgggggttagcagagcagtaccctgaggtgggcacggggaagcgcttcctcaactctggtggtgagtggcagagggtccagcagtggtggggaatggagtgtcccaggtgcttgagggcgggcaaaggaacggggaccggccctgggacactgaagaagtctgggagtcagtgcatcctctccccctgccaggattcatcggcttcgcccccaccatccaccaaatcgtccgccagtggaagtacaaagatgatgatgatgatcagctcttctacactcg

SEQ ID NO: 4081 - DNA, 600 bp, Bovine  MMBT00600
tctttctctagacgctctacatgtatttgacctccatgaaaagtatcactattatctgcattttgcagatggtcaaactgagtcagagaggycacctcacyraagsacatgcacccactaagtggcagagccaggatgcaccccagcccacccagttctggacctgtgtccctaaccactggactgagcccgtggtttgcctccattatcctatttagttcttacactggcccttgcagggataggttagttattattccatcttccagaagaggaagccaagccaaacttctgctggcrggagggagcacatttataaacctcttccttcaccatgcccccagygggcccagctgatggatcatggcacagactcaagaccygccccttgtaggcagttgtcattaatcaattaaggtcagtccacactttaaaacctgtttaccacccctcagcctaaacaacctccacttctgcaggccctagtkgtcctcccagcccttctgtctgaaagacctctgccccctcctcagctgtggaccacacctgactgccactggggcactccggaccygagaggttggtcttcccaccatccag

SEQ ID NO: 4082 - DNA, 600 bp, Bovine  MMBT08161
sgatagccgcctaggctctagtgttaaggtcaacctgtggctccctggagtgtgggtgtacagtgaccatgtggggcttgcctgattagatgagatgaggatcaaaagaaaggtccacatcccaggagcccaaaggttcatgtagggtrcatagggacaggtgggcattccaggtmagtctcccttataagacggagaaagccttctgaacgtttctctcttggaaattcgcagaaactggctttgattgggtttgtcagcttcatcaagtccaggagatgagaacatgcttttgctccygaaatgacaggattctgttgcacacrtcatgtcctggaggatggtgcctgcatctctgggaaggggttatttcctgccacaccratgctgatgggggttcttgctgtttgggatggagtcaccctgatctttgccttcattctccttcttctcatttcttcgccctccctttgcctcccttttccattctcaacaactcatatgtgggttttctttctatttttagtgtcaaaatattcacttcagtgggatgttgtgttgtgctgtcttcgcatctaggggggaaccgggataaggtaa

SEQ ID NO: 4083 - DNA, 600 bp, Bovine  MMBT11495
gaagccaagccaaacttctgctggcrggagggagcacatttataaacctcttccttcaccatgcccccagygggcccagctgatggatcatggcacagactcaagaccygccccttgtaggcagttgtcattaatcaattaaggtcagtccacactttaaaacctgtttaccacccctcagcctaaacaacctccacttctgcaggccctagtkgtcctcccagcccttctgtctgaaagacctctgccccctcctcagctgtggaccacacctgactgccactggggcactccggaccygagaggttggtcttcccaccatccagtgttccacgtctgttacagatcgaaactgcccttgaacaagcctctgacgccccttgcctcggtttccccaaatgtgacttgggcaaaaggttgcatgacctgtaccgaccctaaagcaacatctgtgtctctgctttctgcctgtcttggagggagggtgagttaaagaccaggaccactggggaccccatttctggagaatcaagactttgggggccctgctggcctcacccctccccaagccctggattatactccaagccgctcctagca

SEQ ID NO: 4084 - DNA, 600 bp, Bovine  MMBT12153
tatgacccaactatatagagcttaacacacaactgtttctccttcaacccaccctagtcttcctgtctacggttgcatcccattcggcagttttcaataagggccagatttccatcagatgccacagggaaaatggtaagtaagccaagcctatgcttgtagtaaaagaataagagaccctttctcaagacaatggcttgactygattccacttccatcccaaaatgaatttggccccagtttcctacttggatttatrataaataatgaacctgagaacctatctaatttgagcttcaraataggcattatcaagtgatattccagaagcatgtgactcttgggatagatcccaatgactggagccagtgactcttggatgtgttgtggagtttactatccagaaccacctgcattagagggaaaggacaccactgaaacagacatgggcagagccaagaaaagtagaaaaaggaggctaatgggagaatttcgtgtgcccaattgccatcaaatatggggaaagccaagacattttcatagttgccctaattcttatccttcccattcaaaccagccctgactccccaagcaagccaa

SEQ ID NO: 4085 - DNA, 600 bp, Bovine  MMBT02351
gcatatgataagagccttatgttttctttgaaatattatttcagtaaatattcggtatttataatttattgcttgtcctgctgtattttccaactgctgtccaccaaaggatcacaataggaatgttgtttggaaaatgttaattgttgaaaatgtgttttgaaaaataacacttaaggaaaatatattttaaaaaattgtatgcttcctgacctaaatattgacatttaaggtctgggattattgcagacctttcttgcattgatctttctctggtggctctagaaaaaaatcccttcrggcaatattatttaacataattggttttttagcatattgagagataaggaacaatgtaatctagtgttccaatttggaactggaatgtcatacagaccaaggccaaactgtgattttctctacaatagggactggtatatttttctgctgctgctactgctgctgctgctgccaagtcgcttcagtcgtgtcccactctgtgagaccccatagatggcagcccaccaggctcccccgtccctgggattctccaggctagaacaccggagtgggttgccatttccttcttcaatgcatgaa

SEQ ID NO: 4086 - DNA, 600 bp, Bovine  MMBT03055
acttctctcactttcttctgggagaatggtgttgatggtgcagtcattaataaaagcaaagatatgaaaaggaggaaattcatatattcttcatatgaattcatatttctgtatttcatatgacaggatttgacatgatactcatggagttggcttaaagaggtggagaaaactccaattttgatattggaaattagccagcttcatagtgttgtgattggaataaatgagattaccacagaaggggcaaaatgtgagagagaagatgaagagcagagtcttgaggaaagtcttcatttraaagaaaaataggcctcagagagggagtaggcacaactgctatgatttctgaagagctgagaatgcccccttgggccagacttctgcttaggccagttgctctaatggacagcattcaatttctgacccatccaacaccctctgcaaggctttgtatctggcatataggaaattttcaaaaacatttcaaaaatgttttcaagttaaattgcaaagaactaacattttctgtatgtatttgctatgggtattaggttttcataaccctacctcatcaactacttagtctcttttcatgac

SEQ ID NO: 4087 - DNA, 600 bp, Bovine  MMBT21466
ctcagaacccctggcaggagtgtggcttcagagccgagactgcccttcttcccatcaggttgccaggaccatgtgcacccttaagagatgctggttcactgttcttcttcaagcatgttttgatttgtttcagaaacacgcaaaataataccacaaagcaatcaggcggccttttgtctgagctaaagaataggtcactggaggcctagcttgcctgctcccgagcagctgacctccggtgccagggctacagggccttctgttgaccccagagactgaaaggtgagagatgyygagggyctgagggcttgtaaaaggcagtgatgaggaatggctgcaacctgcagccacgtggggagasaggcaaccctcccagactgttcactygcatgatgagctcagtggggtttctagacctcagctgggaagaatgcgccctgctctgggcccgtggtggccccgccaccagcaccaactgctgggcacctttcatctctgggctgggcactctgctctgaagctttgccactccaagtgcaagttcaatgatattggattagcactaggacagccagaacaggcccaawtagcacagaggac

SEQ ID NO: 4088 - DNA, 600 bp, Bovine  MMBT02297
ccatggactatagactgccaggttcctctgtccgtggaattctccaggcaagaatactgaaatggttatccattcccttctccaggcgatcttcccaacccagggatggaaattgggtctcctgcattgcagacagcttctttaccatctgagccaccagagaagccccaaagctctgggaggaaagtaaaaattgttcttgaattcatgtattgttttctcatgtatttctcctgtaagcttacatttaaccaaagttttatggcagtacaacccctctatccaaaacaatgtattcamtaccagtgagttctgataggctggaatggatagggtacatttatgatatcaggtgctctgaaatcagactacacagggaaacccctacctgagggatattacattgtgttagtcagggttccctagagaaacaagaccaatggagtaaatatttacaacaagatttattataggaagttagcttgtgtgatgatgaagactgagtagtccccagatctggatatagcaagctgaagactctgaagagttggggggtatagttccagtctgagagcctgcaggtgcaagattctagaagag

SEQ ID NO: 4089 - DNA, 600 bp, Bovine  MMBT06545
cgcatgtgaaaatacatcttcaggctgaaagataagcatatagtcataaatgctgagcagatcttctcattgcagggacgcatacattgtagcataattaagaaggaaggcccrtccttgggaaagatttgcagaaaaggtttataattgcaaggacagagatttagttttaaggcttcttgacttctgtgataatctctagggcttctttatcaatttgtgcccagatgatgttgctcgccagtcaaaagcaattggcttatcagttcctgctggcatctcatggctgagcacaacccygggtggggttaggtggagcattgctggtcagaaatggtgaattctgtttattataatatcccatgtggacttagagctccataattaattgacattcctggaagcatccccaagatggtgagtccaataccatggacatcttcttaattataggagttacactggttttgtgactgttgttttttaaggaaggaaaacatcctagagatgtgtttgcctcaggaaggctggaagctgttctttagttttgaaaatgagcagatcgtggatagtgaggtcgctgcctggtrgcgggagagg

SEQ ID NO: 4090 - DNA, 598 bp, Bovine  MMBT16464
  misc_feature (1)..(135): n is a, c, g, or t
nnnnnnnnnnnnnnnnnnnnnnnnnnnnnnnnnnnnnnnnnnnnnnnnnnnnnnnnnnnnnnnnnnnnnnnnnnnnnnnnnnnnnnnnnnnnnnnnnnnnnnnnnnnnnnnnnnnnnnnnnnnnnnnnnnnnnnntaatgaattttcttttggactgggatccagcagatttgtacaatttagccacaaaagctcaaaacaatcttctgaaatgttttctgaaccttggttcaaaaatagatttttccctccctaacctttaaaaatggtttgaaatgtaaaaggacaaagcgattcttraacacagtcacaatgacattcggcaaaagctaaaaatacctcattggtttcacaggacaaatttgtggccactatgaagtcctaatgttattgtaaatgccctatgatgggctacacaggcagagtaatgtgttagtagaattatatggcaacccaaagagacactgataagctatattttacacttttgttccagaggcaggaaggaaacattcagtccatctgatttgatctagaaaactctcctaatgacatttgcagggacttaatgacattttccctggttccagccctacta

SEQ ID NO: 4091 - DNA, 600 bp, Bovine  MMBT04128
tgtatattcctttactgatttactgagtttctgggaagaccttgtattgaaaatatgcgttatcatagataaatgtagcacagtaagtattaatttattacactattaatttaaacatagcacattatcctctgagacacattaatgtgaaacctcaattttagtcttatataggaatataaggaatttttgcttatccattcctaratgataagagcaaatgactcttcctgttcccctcaaaaagaggtggtggtcatgggtgtatgtgtatgtcacacacactcatgcgagaaagaktgatccagctttgtaacctgtgsaataggtarataygagatactcatttacctgtcctgagcctcagttttctgctgtatgaaagactagatattctctaagaatattttcagtacatatgctgtatgattacaaatgtaataaattaaaacctagactaccgaaattctggtttgtctttgcatatttagtcccagtatttccatacccaacataggactagttcaatttgacaaatatctattgagtctccactgtatgtcaagtgcgagattctagaggttagacagtatcctgagc

SEQ ID NO: 4092 - DNA, 598 bp, Bovine  MMBT08545
  misc_feature (1)..(81): n is a, c, g, or t
nnnnnnnnnnnnnnnnnnnnnnnnnnnnnnnnnnnnnnnnnnnnnnnnnnnnnnnnnnnnnnnnnnnnnnnnnnnnnnnnnacaggtgagaaaccctatgtatgtaatgaatgtggaaaagctttctctcaaagaacttcccttattgtacacatgagaggtcatacaggtgagaaaccttatgaatgtaacaaatgtggaaaagccttctcccaaagttcctcccttacaatacatatacgaggtcatacaggtgagaaaccctttgactgtagtaaatgtggaaaagccttttcccaratctcatctcttacacttcatatgagaaaacatacaggtgagaagccttatcattgtaatgagtgtggtaaggccttcagccaaaagtcacaccttgttagacaccagagaattcatacttattagaaatagraactttatgaatcttgtgartatggaaaaagacttcagaaggaatttgcatttccttgcacattacataatgggatctagagcagaaaactgtgaatgtgggaaagcctttttaagaagccacacatttgtgaaacagaattcttaccaaggggacaaaatgtat

SEQ ID NO: 4093 - DNA, 598 bp, Bovine  MMBT10361
  misc_feature (1)..(80): n is a, c, g, or t
nnnnnnnnnnnnnnnnnnnnnnnnnnnnnnnnnnnnnnnnnnnnnnnnnnnnnnnnnnnnnnnnnnnnnnnnnnnnnnnncagggctttggtcctttgggactgcagtcctatgaaccatcgtttgcttgtccctgctgctgttgactgactcctgggtgggcagtctccatagtgttgccatcctgaacagtgactctgagcacaggcttgtctgtgtctgggacacagtaggctgttttttggggtcccagctggcagaagagccatcggcgaggagcggagcacacatgcacagtgygtgctgagtgtgttgctgtgcagtccgttctgaccacagggtaaaggggctcaagagaccatgcacatgtctctgtgagcacttggtgttgtcaggctgcttcatttctgtcagcctggagggtgtgcgagatggcttgtcttgagcacacacatcatagcaggtgaatcttcagcttgtacctctgcatgccaccctgtgcttagaggagcatctatctattaatagactgctgctgggcctggagggccttcatctgacctggactgacctcttgacctcctggtcctcagactcc

SEQ ID NO: 4094 - DNA, 600 bp, Bovine  MMBT12577
cttgcctggagaatttcatggacagaggagcctggcgggctatatagggtcacaaaaagttttatactactaatgctttcactttcaactagttctaacctatattagctgtatttttccacaactcaaaaccctgatttaaaatacaatcatactataagttatctgaagatgaaaaaggacagtgatttttagaaatatttttataagagacttctgcactaggatatattaatagataagctagttacaggtgatcaagctctacagagaccagatttcctggcatccatcttggamctctgttatttaggtgaacaaaggtggagtctgccaccaaagaagccaagtcaaattcatgtaacacagcaagacacgcctccatgatgctgagtactgggtgctaactcctgatttactggtaactgtaagaatgattctcaggccaagcagtaaattaagggcaaccctgcacttaccacactgcattttatggcttctcaagagtgataggataaatatatcacataacaacgattattcagaaagccaggcactgtgtaaagtgtgctacaaaaattttcttttatgaaacccccc

SEQ ID NO: 4095 - DNA, 600 bp, Bovine  MMBT14812
aagaatgtgagaatcctaacactctgctatgtatgaatatagatccactcactaaaactcaaagtggttaactttaggacaaattagaagcaccgctttacacaatattgagtgaatttaaagtacttgttatctcattaaaatagtaaacatataagagttataagaaacacttaaataatttcatgagccctggatccttaatgattcagtggaggaactcagaagatttggggttgggggtgcaaaaagaaccccataatgctcagttcccacagcccttccctgatcctctgccasaggcagaattctgggtggactgaccttcaccttgccctagtttagcattttttatactcrcttgcttgmttctgggasaagtaatatgctgctgtggcaaaatttgtcctcacagggctctggagtcaatttccaaacactgaaaataatcccatttttttctcccttaaagacagaatggtgtggtgtaggggcaggagtggtccaagagaagctgagcccctccctgaactcccagarcagcttccctaaaagtctgaagcctcctacttgagttcaactcctagatttcttgagtac

SEQ ID NO: 4096 - DNA, 600 bp, Bovine  MMBT19288
aggttgaggcccaactgcagggtctgagatgtttgggttaggatacattgtgaccagatttacatgcttggtgacactctgwagaggtcacgctttctggaggagacatggaagcttaggctgagatggcgcgtggctgtgccttattgccagctcctctggttgggaggccgtccttggaggacggtgttgagggtgattctgaggctaatcccaggctccctggcagagactcccctgattagacggtaggatctgcgtgrgagtgaaggagggcaaggtgcgtgcgccccgcgtgcrcccctctctgctgtagcttctttccactgtcttgggaggcagtggatcacctgacggacaaactggggccatccagggagtccctgaggacagcccttaggcggattcagccactccaccaagcgtggcttctctctagtgtgacttgctgggactttgcattggaactggcaactgttagaagccgaagagccccatggatgaggactttccagtcctgtggcctctgtgcctcccacctgctgcccccactaatggcacagctcttgtgtcctcactcacaggctctttgcacagcgt

SEQ ID NO: 4097 - DNA, 598 bp, Bovine  MMBT20644
  misc_feature (1)..(8): n is a, c, g, or t
nnnnnnnntttccggaatatcgaagattaaaggaaagctttgtttcaaggattacccttacatatcacctctccctgtagaaaagggatctttgagacaaaaggaaagcataacccatgttttgtgatgacgtttggaagatctgaaggtgttagttctagaagtgaaggaagagtaacttccctcttactcttcttttccccgatttccaatggttttctcaaataagggaactacaagtttgtaggttcaccacacaagtagtacttcatgaggttgttgcctcacacactgcttcaragttgcttttttctttttttaatttctctaatawgcaatttttaagttttaagaatgtgggaaataggagacatagtttttgactgacttgtgattaaacccrtttactaaagcacatgttaatgggtgcaacaagaggaagttcctgaaatagtctactttaagtaaagtaaagctcatggtaagtcatgactcacttttgtgacgtggattaagaagtgagcgggccgaagctgcaggaggactcagccagctagctgaagagaaggggcttgtctcggttcccggcaagtaaagc

SEQ ID NO: 4098 - DNA, 600 bp, Bovine  MMBT21265
tcatgactgtgcacccttagtttttaaatgcttagtagatatagaacaatattttgttttattttcaartaaaattttatacagaatcttaatatctaagacagataagaatggagctgctctgaatgaattgggcttagggataggaacaggagaatgaggcctttcaacttggctgcctgctggcaggctggttcttcctgtgagctccacgggtttgtctaagaaacacaaggtctctctcagacacagtttgaaaattctttctctagattaagtcagaaatgggaagtggccatrtatctgcataaaattctgttygtgtgkagatatggatttgatggagatgttgaataatgaaaraaagatgtggtttagatgatggaattgtagaytgagttttctttctgcaaataattttatctattgttatacaaaaataaaattaggataaattatttttggttctgtgattttattagaaacttatttgattgaggttgcttaatacagcttggtctctagttccttcttcttccatggctacaaatctcatgtagcctgaggcctagagctctgtttgttttggaatctccagag

SEQ ID NO: 4099 - DNA, 600 bp, Bovine  MMBT21266
ttttaaatgcttagtagatatagaacaatattttgttttattttcaartaaaattttatacagaatcttaatatctaagacagataagaatggagctgctctgaatgaattgggcttagggataggaacaggagaatgaggcctttcaacttggctgcctgctggcaggctggttcttcctgtgagctccacgggtttgtctaagaaacacaaggtctctctcagacacagtttgaaaattctttctctagattaagtcagaaatgggaagtggccatrtatctgcataaaattctgttygtgtgkagatatggatttgatggagatgttgaataatgaaaraaagatgtggtttagatgatggaattgtagaytgagttttctttctgcaaataattttatctattgttatacaaaaataaaattaggataaattatttttggttctgtgattttattagaaacttatttgattgaggttgcttaatacagcttggtctctagttccttcttcttccatggctacaaatctcatgtagcctgaggcctagagctctgtttgttttggaatctccagagaagtaagggtctttatgaagt

SEQ ID NO: 4100 - DNA, 595 bp, Bovine  MMBT02300
gcacttagatcaattgtaaaaattcgacaagcctctaaaggttccattttttaaatgatgttatctctaaaagtgtactgtgaagatcaactatttcaaaaataggagattttcccagagagtaacaacactaggtgactaaagcctaccaaaaattgtcagaagtcctccccacaaccctgactgtaaatcaggtaagcgcgcaaagccttgaggacagcaacagcggtgtcctacgtcgcatccaacgctctgaaatagagttgtgagcaaaatagcaggaaggaaaaagatgtgtgraagagacgaaaggtggaaactgttggaacgcgaaatgagaaatgaaaactaggactaaaaatgtctcagttatgtgggagggagtcatccctaggtgtaccggtcaacctctgaaccaagcaaaggctacrgcagtcatttcaaggggtctcttcttcaaagagtattccagtgcctaagatctgcatccgcgaaacttccttcctaaccagcagcctactctgactccccgggccagggactccggccaaacccagccccgaagccacccttctccagcacatttggaagccgg

SEQ ID NO: 4101 - DNA, 600 bp, Bovine  MMBT03923
ggaagatttttcttatgactatcaaccccgctgccaaaattgaaaaccctgttccctaattccggattaggctttcaagatccttaaaagagcagcccaaatacctatattcttcaacagggatcrgcaaatgttttctctaaagcaccagatagtaaatatttttggctttgcaggccatgggatctctatagcaactattcagctctgccataggggcatgaaagctgttacagatcagatataaatgagtgaacatagctgtgttccaacaaaattttattcacggacaccaaaatytgaatttcctataatttttacaggtcaggaaatatctttttcctccaccatttaaaaatgtagaatccattcttatctcatggactgtacaaaaaacaggcagcaggctgcatttagcacacaaaccctagtttgccaacctctgttctggaagatgctgttgtaaggatgcttcatccacctatattattataggggagagagttaattttagttcactttcttttatcaatcagcaacacatttcataagatactttctgtaaccaggcccagaggacaaagaaaatgaaaaccaggt

SEQ ID NO: 4102 - DNA, 600 bp, Bovine  MMBT07198
actggagtgggtagtacactctaataaacattacagaggaaatacaccagtgtagttaaagatgtatacagcgtatacagccaataagcactaaaaaagcagggatgtgaagcaggtagttgagccctaaggcccatgatcactcgactctgccctgtttattgtggttactgtatcctgtatggacataaggaacagacttgtggttgccaaaggataggtggggtggactgggagtttgggattagcagatgcaaagtactacatatagattggataaacaacaaggtcctaccgtayagcacagggaactatattcaatattctgtaataaaccttaatagaaaagaatataaaaaaaacacatgtatttataactgagtcactttgctgaacataagaaattaacaaaacattgtaaattatcttcaatacaaattttaattaaaaaaaaaaaacatatctcgtatggacactgtggatggttggatgtggaaaggaagggaggaggaaataagaggcaagaattacagtttaccattgaacaatgcaaaggttaggggcgtctaaccccgtgcagtcaaaaatctgcatatgact

SEQ ID NO: 4103 - DNA, 600 bp, Bovine  MMBT06559
gggcagctcctggcggtctcgtctccctcctcacccagtcaggaagaaaccattacaatcagacatgtttgttttggttttgaccaagtattaggaaaacaaactttgccaactgcaaagttcagctctgtcagtggcctcagctgagggattgagggttccctgcctgagtagttgggtgaggtgtgggtaagcagatcggtactccgttatcccagggttccttgataggtacattcagaaagaaaatacaattccaaggtgaacttgcatgtgatacctaggttaaatagtcagaaygttttgatttggttggctaattgaagggtgggtttttctcttttaaattcttttttctactttcaaacatctttgtcaggagagattatcttcttacaaaaaaagaaaacaaaacccaagtctggcccattgtctgacgaattatacctatcactttaaataatacttgcacaccccatccagctgtagttcaggctgacatttttatttttaagcccaatcaaatccacctcattttatgctgtttaagtagcagcatcaatttttaaagcctctagtttagtctgcattagtaacaca

SEQ ID NO: 4104 - DNA, 533 bp, Bovine  MMBT18994
atttgtggacatggaaactagttttgcttttctcttttcagtagctgttgccaatgcagttcctctgtttactgagttgtagctttatagacaagaatgcaggaagtctctatagtattctgatgataggttagtcrtcaggcttattatagtccctaaatccagcaaggagagcagagagaagcctggatgatgaagtcactaggggaagaaaatggtatggaagaaatgataagatattcagaaggctgctcaaatgctgcctcctaataaattgtcaattcctcccaaagagagtgmtgtctttttatgctgatgtgcmttatgtgcagagcttatattccttactcccgtgtgcacgtttgtcttcataggtcataagaaaggaaaattgtctcacgtttgacatctccattcgattttactactttagcatcttgatggcttttaaataaaaatggggaaaggattatagttggcagcaaagtgaatttcagggacagctagaaaataggagggaagacagcctctta

SEQ ID NO: 4105 - DNA, 600 bp, Bovine  MMBT20642
tgtgggaatggtgtatgtaacctcagtttcccagagaggatccaggaaaattttacattgtggaagaaagaagaattgcatacctagcgaggtacttttgcacatgcaaattatttatttcatttagttcttgtcgcagtttcatgacgtgggaattgttacctgtatttgatggatgagaatatggaaaccaaaacagatagaaccatttgtccagggtcacatggttgagtttctggagctcacatttgaatgctgggggtcatctcttgtttctaagctgggatcccagttatgacyctctgccaacaatttcaggactctgggtatttcacgaggcatccctgggtgccccttgcccccttggtaacagacgactctgtcatgtctctgcctccccttcctagctcatggttggcaaatggctggaaakggatctggaatcgaaggaggggctgctcaaagcccagggaattgcagtgttggggagacagaacgtggcctgtgtggtgccagggttggaattctgattaatcgggcattccacaggaaaaccctgtcgggtcgggtttgggctcctgacacttgaatttcaactca

SEQ ID NO: 4106 - DNA, 600 bp, Bovine  MMBT05339
gttttcatctttccagaaccaataatgataaatgtcttggagtcaagaaaagtattaggtttaaccatgaatcaaagagtcacagtcccacccactttctatcaaccttctccaaagggtaaatcagaatcctttaacagaaaatggaagaggattgtcaatctaacctgagtgactgttagattgctcgggtgtttaaaccatgacttcctctgagataaaaacaagatgattaatttcagagtctctctcggtgtctcatttaactttccccactctccaccgattcataaagctccygcaaagggagatgaagggcccagctatcaaaaaataaaaaatataaatgttcctggctcgccgtgtctgcattgctaagttcaatcaagactttgaattgaaataacagaatcataaaatttccagacacccgtgtctgccggctttgccttgctggctgctcctcccccayagcataacacagtcaccccagccatcgcaaaaagggttcttttctgctactgaaaagccagagatgcagactgctcactctacacgttccagattgggggctttcagtgaaactgccagctctaggat

SEQ ID NO: 4107 - DNA, 600 bp, Bovine  MMBT13150
ataagcattgttcaactcatttaaagatagattccaaacacctgtttccaaatcaaaatagaaatctattttccaagacactagtatatgtgcaagcttattaatacasgcaaaacgttattttcatcagttgatctgcacctgtacatttattacattggatcggaactgtaaaaacaccatggccactttggaatctgtaataaatttgttaattactatcctgaaatatccccttgatatttctaacatgtcattaagatacatgtatctttaacaataatagtcatttctaaaatytgtatagtagttctttacctttgaaagcaccttcaaataaattctcaaatgcattttagcatagattaacttaacaccactttaggaactgagaaatagaggctgagagatgatacattcagaaggcacagttaggggtgatacacagaagttcttttgactctaagtgcagtcttcttgtcattgcatggtagatgaaggcacctgccaaactttcaagggaggaattactcaggcaaggttatatgggggaaaggaaataccccaaataatgccagctaaaacctgtgtgacctttta

SEQ ID NO: 4108 - DNA, 600 bp, Bovine  MMBT16193
tttttttcttttttttctataggtaagaagtagatttattcaaagagaaacacactccatagatacagtgtgggccactacagagggcgagtgctgtggtcttgaaatgcggccatggttagtttttctgggccggacaatttcataggctaatgaatgggaggattagtctatctatttgcggggaggggaggagatttccaggaattgggccactgcccactttttggtctttaaaaaaaaaaaaaattatatttatttttaattgaaagataattgctttacaatactggtttgatktctgccatacattaacatgaattagccatagtctatatcccctccttcttgaacctccctccctcaggtgaggttcttaaagctgttktgttyactaatacagctccaagtttaagtgcctaacacaatgcaggtgattagtaaatatttattaaatgaattaatgactattatatgaatgattattgtcctgtgttactaactacatcctaaacaaacggacttcagtcggctttaaaagagcatccatttattcctagagagatcagaaataaataccttactgccatgcttgctcaa

SEQ ID NO: 4109 - DNA, 600 bp, Bovine  MMBT16450
tttcatacatgtatgatttatctcactaaccagaccagaactcccagaactggaggcccatgggttgaattcagcccaccaacatgttttgtttggcccacacaatgtttttgaagaatctgaattagttgccttgatggcatatcataaaaatttgattttgtgagtctcgtgacaagccagaggctctgaccatgctgggctggcattctaggatggctccaatcagctggagctgctgactggagtaatgatggtcccttcagagtgacgtgtcctttccaacttggcagggtccaratcacacctctgacctgcgccggccccttcctgatctcacagaccttcctgtctcctgcagtcatttaaacttgcaacctctgaactacaccctatgtcctcggaggacatggtctttgtcttcatttcctcacctccttaagtgtctgaacactgctatttacataacaggtgctgaaaaaatacttcctgaatgaaaggaagaaaggccagaattgaagaagcagatgaaagtgatagggagatgagggttaaaggaggccaaggctaaggacaaatgatgaagtgttttccagtgcc

SEQ ID NO: 4110 - DNA, 600 bp, Bovine  MMBT22797
aattatcttcatctctggacaagtgaagaaggattaatagccctttaggggcatgtctgcttttaaacaaacaaacaaaaaaaaatggacaatagtcatttaaactaccaaacccattatwtgcatgtaaaaaccttcaaagtgctttcatatctttatattaggaaggttgtggcaacatcctaccccaataaaattttattcatgctttcagttacatagaaaattattctctyttttcaaaatatgtgaattctcactactttctgaaggatcataaattcagaattattttgatcrgtagaggaattgttgttaacacaagttagtgtttcttgaggtgattatcacctggacattctccttttgccactccagacccttttccattctgctctgagttcctaaacctgacctctataaactgcaactgaaacctttgccagctggtttccaatggrtttggccaaagcggagaactaaataagcaggagatacctggagaaaggaaggaggcagggagaaaaggggagagaggacagagtggaaacagggtgttttccaccagctccctcatttcagactttggtggccagtggc

SEQ ID NO: 4111 - DNA, 600 bp, Bovine  MMBT01228
tggctgttctcagacccgccagacactgggacgatcctgcccactgcagattcaagggcaggagcccctcctacctgctggcaaaatacccagaaagcttaagacacaaacctcgctgtgtgggactttgcaggatcccagggcacaaaaggtgaccttcgtgggacgtgtgttgggctggcggtgcacagcggggcagccagcgtgtgggagcagccagggcaggtgtgtgtcgccaaggaaggcaggtgaccccccaggacgaggaggaagcaaggcaggcggaggcatcaaggcccygaggaccccacctccctctcagggaaccacttcacgacctccagaaatgtgggttgtattgaacaatttgctcacagttgaacacagactagcgtttctgtgctgggctcagtaagaacaacacagtgaaacggacaccagaaaatctctccagtgattgctggacgaggacctagcaagagggacttcgttttcgcttctgtcaccaaggacacgcacgggcaaatgtcccgagtcggtcttgttcagggtggctgtctcccccacgaaggcagggccggacgcctcagcccttacctt

SEQ ID NO: 4112 - DNA, 600 bp, Bovine  MMBT03400
tgtgaggtgttctcattcccattttatagatgaggaaactgtggctctgagaatgatttttcaaagatttcttgtgatgaagcctagtgcataccccattctatttgtcctttggaaatcaggtttttttgtggggctagagggaagggactaaattcagacagaatataaatgagtttagttgtttagtaaagtaaatggcctaatacttaccatccttcttgtctcacacatatgagagatgaagttgttatcttggatccaatatgacaaagttagaatagttaagaaaactgaatkattgtctcatctagtcctatatttggtcttgattgaacttaacgatctttgatcttggttttggggtgttttttttttctattttaagaaataaagctagttttgaagaacccaacaaatgcaaggcattgattctcgagatgatagcccagtactaatacacttacatatttaagaaaagttgaggagagaaataaatcataaataggaacttctctccaatcccttaaaagaatgcaccttagcagtcctctttccttactaaactggaaaatccaagtggaggtgccttagagaaga

SEQ ID NO: 4113 - DNA, 598 bp, Bovine  MMBT04477
  misc_feature (1)..(16): n is a, c, g, or t
nnnnnnnnnnnnnnnnctgattctcttgttctatggcagaaaccaacacaacattgtaaagcaattatcctccaattaaaaaaatgaaggcaagatcactggatcctcacagccacccagtgaaacaggtatattattctcgagaaaacagaaaaacaaaaagagctgaaagactttgctcatagtcctacccctgtgacagagctggtctggaaccrggcctgaaggactccatgctctaaccrctaccccatccttcaccatgacagcccttgtaagatttcacacatttaaaactgmggcattgaccggagttggtctgaattagaytttagttgactcagatccagggcaacctgagagttatgatggttctccagtgccaacccctttatagctcagtcttccccagtccccatattatttactcagagtctatttgcatttgyggaggaagctgctagtggagaagctggcaggaaccttaatgaagccaggtgggacccattgaaatgggaatgtgtygaactaagttatgaagaaatgaagccagctgtcagcaggcttaatgaaaggttaacagaaatcctgcaayggg

SEQ ID NO: 4114 - DNA, 600 bp, Bovine  MMBT06907
gaatttgaaacatattttctcccagaaataagtgtaggttgacaaactgcaaagatccctagacttgaatactgaaggaagactgggtttaaactcaagttctgtaaagacatgcgttgtgattgtggacaaggtggtcattgcttcattccatcagtagccattcacttagcatcaattttggcttggctcaagtgtaaactccttcaggaagtcttggatgtcttcacctcccccttggcccttagctgctctgtctttgaaatcccattatacctcatgcatgtctccatcaacaamctttccacactgaattaaaattrttgttttatttctctatgtttccccrtcagactattgacaatagctggcatctatttgctgttcttcagcagcagtgcccatattttccttgagaagtcccctctcccttcctcctagtgtgtggttccagtgaacagactgatttccctcccrgcctttgatgcgctccaatccacttggagcttcacatgcatgcatgtgtgctatgtcactccagtcatgtccgactctttgcagccctatggaccatagataggcctgccaggctcctctgtc

SEQ ID NO: 4115 - DNA, 600 bp, Bovine  MMBT07457
cgtgggatgaatattcagagaggattggaggaaaaatctaattgaattcaaaacataataaattgaagccaactcattcgattcatggcaatgtcttctggcatcttttaattttgcgtcatattcatttggagccaatcaaattagggtgctcattagtggctgaggtgggcagtgaggctggagccctgctctggtggtaatgaggtcagtgcagcaggataattcagaaggcagttggagtggagcagacagtaagagctcaacaatcactgtctcattatcaggaaaatggactcrgggaggggtgagtgtgyaycccaaatctgctgcttgcttacaggctggccttgaccttcactttctgcagctttggttctactgggataggagtagggcccacctctaaggatgagtgagtatgagatgaaatcatatgtaacaagcatctcstcctccagtttctcagagtccgcctctgctctctgtccccaccaagggtgagtgagtatgaaatgaaatcatatgtgacaagcatctcgtcctccagtttctcagagcccacctctgctctctgtccccaccacaccacacagcccc

SEQ ID NO: 4116 - DNA, 601 bp, Bovine  MMBT11661
  misc_feature (1)..(1): n is a, c, g, or t
naatgattatacccttaacctatttgtaggaacgaacattgaggaccatttataatatataatattaggtttctatataatcttctgggtgtttaaagtacagtgttgttgttcttttcttatagttggttagaaaaaaactattatttgaagggaatagaatggaaaagcaaaatgaggaaagttgaggagggtgggatatattagttttagagggcttccataacyaagtgccacaaactgggggacaaaacaacaggaatttattatctcatagttcagggttagaagtctgaaactmaagtgttggcagggatgtcctgtctgacggctccagtgggaaggatccttccttgcctcttgctcacttttgatggttgtctgcagtccttggcttatggacgcatcactccagtttctgtctccrtcgtcacatgacattctccttgtgtatctctgtccaaatttccctcattttataaggacaccagtcatattggatataggtttagagcccaccctaatcaactctaacctcatcttaacttgattacatctacaaagcccctgtttccaaataaggtcacattcatagattttg

SEQ ID NO: 4117 - DNA, 598 bp, Bovine  MMBT13041
  misc_feature (1)..(186): n is a, c, g, or t
nnnnnnnnnnnnnnnnnnnnnnnnnnnnnnnnnnnnnnnnnnnnnnnnnnnnnnnnnnnnnnnnnnnnnnnnnnnnnnnnnnnnnnnnnnnnnnnnnnnnnnnnnnnnnnnnnnnnnnnnnnnnnnnnnnnnnnnnnnnnnnnnnnnnnnnnnnnnnnnnnnnnnnnnnnnnnnnnnnnnnnnnnnctaggtatctgaagaccttctaacgagactcttctttgacatcaccagcaggtcaacccaacctgaatctgtgtgtgagtctaagtacaatctaattacaagagaacacattcrgaatgtgccaatctatttagtttgagaaggagtgattctgaggaagccaagtaagtttgcaaaattgctcagctgaattcagctgctctccgtggggactttctctggaggaaaagaaaaatagataaaaatgtaagcctggtgccagcgaaatacaatgtggggaatccactcagggaaggaaatgatattccaagaaaaatgcagagaaactttasggtccaatcttccactttccaacagtaacatatttaaggacaatctctaatgttaacactcagaaaagatgcaacaagca

SEQ ID NO: 4118 - DNA, 600 bp, Bovine  MMBT15645
cgggagacggccggaagctggctcacgcactcggcggacgcagtgtactctgggaagggggcgggcctccagctgccttcgggttgtccacgcccaccattcttcttcggcgcttcccgcttccccagttagaaaacgttaattaaatgctcgggttcccttagagccgcggagtctctgccaaagtaacatgggttccatatttagagggaaatttaaaaatcaagttgtcagggactccaggaaaaagttgagacttaactcttctttccttcctgcgtctgcagattgcggtgttcrcagggttatccccgtttccgaaaaacacgttgcccagcagctttgcawgagaaagctgacaattcttggtttaaaggaatgcactcaggcagagttctaagttcaaacttctggtccatctggtcctctttacagatattgattgaagccctaaattccgccgcctaacttccctttgtcctctctccattacaaattttcagtcatagccctctctccctgaaaaaaaaaaaaaaaaatccatggacttttctacttgtatttcttttttaatataacaaaygtttactgactacctac

SEQ ID NO: 4119 - DNA, 600 bp, Bovine  MMBT17389
gagaggattggaggaaaaatctaattgaattcaaaacataataaattgaagccaactcattcgattcatggcaatgtcttctggcatcttttaattttgcgtcatattcatttggagccaatcaaattagggtgctcattagtggctgaggtgggcagtgaggctggagccctgctctggtggtaatgaggtcagtgcagcaggataattcagaaggcagttggagtggagcagacagtaagagctcaacaatcactgtctcattatcaggaaaatggactcrgggaggggtgagtgtgyaycccaaatctgctgcttgcttacaggctggccttgaccttcactttctgcagctttggttctactgggataggagtagggcccacctctaaggatgagtgagtatgagatgaaatcatatgtaacaagcatctcstcctccagtttctcagagtccgcctctgctctctgtccccaccaagggtgagtgagtatgaaatgaaatcatatgtgacaagcatctcgtcctccagtttctcagagcccacctctgctctctgtccccaccacaccacacagccccagtggtggcgctccttg

SEQ ID NO: 4120 - DNA, 600 bp, Bovine  MMBT17926
agaaagtgtgaatcagatctaaagtccagccacagcagaaacaccggggatgagcttaaagtagggagaaacaacaaaaaactgtaggacaagcttgaatagatcaaaggttcaatcagagtgtccacctcagacttgaatgtgcgtgaggttatttggggatcttaaatgcagatttaaggtctgggtggggcctgagactctgcgtttctracaagcttcccaggcgatgttgaagctgcttggctggtgactgtgcttggaatagagaggaaataaaagaactcaaatctggttctrctagtgtcatgtcccttccccaggctctgccctcagagattctcaagttattggtctggggtttggcctgggtatggtaggtcttcaaagctactcagatgattccgatgtagccaggggggttactgaattcctagaccaagattttgggcaaattgggacatggggactatctcatttccctcctgactccatctctttctctcctttcttcccttgaagtcttaattctgcctggctcctctcacttcttcctttttttaaaaagattttatttgtttatggccatgctgggtcttt

SEQ ID NO: 4121 - DNA, 600 bp, Bovine  MMBT20438
tctttgacatcaccagcaggtcaacccaacctgaatctgtgtgtgagtctaagtacaatctaattacaagagaacacattcrgaatgtgccaatctatttagtttgagaaggagtgattctgaggaagccaagtaagtttgcaaaattgctcagctgaattcagctgctctccgtggggactttctctggaggaaaagaaaaatagataaaaatgtaagcctggtgccagcgaaatacaatgtggggaatccactcagggaaggaaatgatattccaagaaaaatgcagagaaactttasggtccaatcttccactttccaacagtaacatatttaaggacaatctctaatgttaacactcagaaaagatgcaacaagcactcagctgttggactataatagtgaaggtaaaaaaaattataggagtggactgtattcaccccatctgagaccttcatcaaatttctctgggttagccaaagctaattctttttttttttttttttaagaaaacggctcatcaagatgtcctggtttttctttatttggtttcttaaatgacattcagtcctcaaaccagcaacagtaacataagcaaag

SEQ ID NO: 4122 - DNA, 598 bp, Bovine  MMBT21125
  misc_feature (1)..(62): n is a, c, g, or t
nnnnnnnnnnnnnnnnnnnnnnnnnnnnnnnnnnnnnnnnnnnnnnnnnnnnnnnnnnnnnnacttacttggggttagaggctaaattcatcttgtatgggtgacgtttcccttcctctgtcaccagaggagaccagattttctgttcagatctgcaacagattgacaaagctaagctgtttcatgcatgccaataaataatacacactaaaaatggagtcgggttttgtcccctcttacccagctactagcattctgctccccagcctcccctctgttttaccactgatgtgattttcrgaagcatcaacctcatgacatcatgtctgattgctactctgacagctgcccactcagccctgagggatttcccaggctgctggcccttcgtccagcctcagccctcccccaatacattctgtgttgctgacccagctgcaccagcctcctccaggctcctgaacctgcctgatgccaccccacctctgctcaggacagaatgagcttctctgtctcatccagtgttcttgatgcagaccagacaaccagcttgatcatggtgcctctcctgaacttggraaaacagctctgtaccatt

SEQ ID NO: 4123 - DNA, 600 bp, Bovine  MMBT01100
gtcacatctccattcaaagccaggcactcggtaccacttggcaatgtctccatgtgtccctttcctccgtcattccctatggtggctattcaagacctctcttagaaggcggccttggggcttcccaggtgggtccagtggttaagaattcaccttgcaatgcaggggacatgggtttgatccctgktctggaaactaagatcccatgtgccacggagctactaagcctgcacacccaactagaagttcatgtgccacaacaaaagatccacatgaggacataaagatcctgggtgctgyaactaagacccaacagagccaaatgaatacacatttaaaaaaatagacgaatacagccttgctggctgtaaatagacaccaagactatcagtcatgaactttctccatctcctctctctctctgcacctacaaattattgcatttatacttactgaacacttctctccttccccagtcacaggaagacatgtcctgtccaaggcaattcctcacactgctctcatactcaattcccttctccctctcggaaacatttgccgccattctcacccacaaaccctttcagactctttcccaaa

SEQ ID NO: 4124 - DNA, 600 bp, Bovine  MMBT03521
ctcttttggggaatagtgttctagagatgtactgtttaacagcttaccactgaacatgttccccaaagagattatacaaatgaaaaactgagcttgattctgtgaaggtcacaaagaagagggctccaaattcaattccatctcaacattttatcccagactggatttaataactgtttccctgaacagctatggagccatcttttagccgcaaaagactggcagatagtagtgattttaagccaaaagcagggattatgcagtgttggtgtgtgtaggagcgtgtacatgtattcatayaagttctgtagacatgaacttcaagaatttcaatttcaagaagatgtactttgtcaaaccagacatattttagtgtcaacaatctgtgactgtacttaaaagccatcagatagactatcttatgtttacagcaaacctagagtgttctcttgtgtcctcacttgtgatatggggaggctaatatctggtagtgtttagtaatgtgctcagagttacataggtaaatagtcacagagctaagatgaaactccaggctcttgatgttcagtttagtgtttatttataataccaactaatcta

SEQ ID NO: 4125 - DNA, 601 bp, Bovine  MMBT06890
  misc_feature (1)..(1): n is a, c, g, or t
ntgttttattcatcttcaggtgccttgaacccaacccattgtagtacctagtgagtgctctgtaaytayacaaatgaatactattgttcaacagagtcctggaacttcatatttctacagcactttcctgatgcaaaatgcatctttgtgcttctcaataactctgcaagtcaagcaaggcaggttgtattccactttttcagagaagaaatcaagccttcaagatgtcaagtgactcggccaagataagtcagcaaggtgtacagctgaaaaccaggtcttgttaaacacacagcaggarcataataaatacttattggggagataaggaagagaagaggaaaaatcaacagaaagaggaaacacaggggtgatttggatccaactccagtgcaatagtctgaccatctgcccatgataatctggcaatatccatgttgagagactgaatcaatgattgtttttatagccggagataagtggacacattttcactttgatggattatcaaacggcaattttagtaatgtcgttagactgcagtagagatagaatgcaatttagatatgcatatcctctttctaatcatcatttatccatc

SEQ ID NO: 4126 - DNA, 600 bp, Bovine  MMBT10202
ctgcccgctcgtgcggaacccagaccagcgaaatacggatggcgacaagtggggcgatgcgtgcgacaactgtcggtcccagaagaacgacgaccagaaggacacagataaggacggccgaggcgacgcctgcgacgacgacatagacggcgaccgtaagttctgggcaggggaggagaggagaggaaagggcgggcaccaaggggtggggtttggctggaggcggggctcagcctcttctggaagccggggagcgggtgagctygcctagggcgccatggaccgctgatcctgctccgygggcagaaatgcaagctgggatgccgagggaaagagggaagaccttctggaggagggaaagggggaccgtgcgttagatgctgcaggggaaagaggacagagccgtgagcatgggggacagggccccatggaggaggtaccatttttacagccrggagagactcaaggtggtgcacatactgagccagtccctgcaccgctccatttagtctctaggaggctgggcactgggcacgaatacttggtttaactttgtagttattgggagccagccaaaggtggagtggggactctgtccca

SEQ ID NO: 4127 - DNA, 531 bp, Bovine  MMBT12582
ctctagaatttccaattagttctttttaatttcctcatcaggtttagttttcctctatcttcttgtaaagttacagagtatctataatagctgtgttaatgattgtgttggctcattctattacttctgtcatgtctggatctgtttttactaattgattttcttccctgttatgggaaacatttttgtgctttatgcatgcctggaatttttttattggccgcaaaagaatgagaattttacatccttaccgcttattattattattcctttaaatacaatggactttattctagcagscaattaagttacttggaatcagatggatcattttgaggctaacttttaaggctggtaggaatgggctcagatgaactttagttattagtctaatttagccccactactaagtggatcattttatcagagtactatcaaatgcccctggcattttgaagttcttccactccagctggtgggaatacacagaacttgcagcattgtttatgctagtaaagctttttgcttccc

SEQ ID NO: 4128 - DNA, 600 bp, Bovine  MMBT17025
gagttcttcaaaggtgagcgaagagtctctttctatcttgaatcaattgcctaatctgcatataggtaggcagaaaagcaggcctaccagaggtgaaagattttgctgataagacaaaaagaagctgaactttaagtggcagtgtgaactggtatgatgaattcaatctagaagaggcccagatgtaaaaataaatctcttggtctaataactataacccaagggacttctgctgagtaagcagcagaggaagcagagaaaggagagagatctcccaaacttgtgtggtccttagattcyagggccctgctgcagctgcaatccagaggtgaaacaaattaatttaagcttcaacccactccctgccagctgctagttttaaaaagccaaagaaatcagcctttcatcctcagaacacaggaaactgcgggttgggctaaaggtcaaatctccataatttcatttaaatctagaagtaaatggactaaaactgctgctcagatccagctcagtctgactcaatgaaatrtgaatgatcagccaaataccccagctgcctgagagaggaaagaatatgccccatctgggaaaaataaagga

SEQ ID NO: 4129 - DNA, 600 bp, Bovine  MMBT19849
ttagagattattgtcgactttcccttggaaaaggaggtggtatattttaaaccaccaggaagcaatgtcagtgaggttaaccaaaatattgaaaagcaagaaatggacacagaaattatgaggactcatcacaggaaaacttgccaagacttattgccatagcacaactttcattcctcttgctttctttcccccactgtgctgagaaacattctaattgctattgacatttattgaaaaagtcaccaaagagcctgatgtaaccttgtgtaccatatagaaaatacactgatgcactarctgtgtaagcagtagtcttgcagataagaaaatgagataattccaaattagatgaattctaagatacaaaatgttttccttcactacacaatgtgttacatatttttgttcttatttttcagcagttttccaaggaatgaaaaaaagtgaatttttatcgttgcactatgggtttctaaaacttactttatttaaaaaaattgagatttcatgaaattgtaaatacttctcttttcagtactgtcttctgtagttccatggttggttccctagtttaggggcaagacacatagatgggtt

SEQ ID NO: 4130 - DNA, 485 bp, Bovine  MMBT20879
aatgtggtgtagatatctcagagaagacagaggaattgctctccagtcactcgcctgtgcttggaatgcagccacagggccacctccacgcaggactcagaacaaattgctcccttttcccgcttggtttcatgcccaaccccaaccccaccctcgatcaacctgtgactagaacccatcaatgtgatagcgtttccccaggcgacgacctgccgttgggcagaaagaacaggtcctctgtctgccgtgggacagactgactaagctgagccctgccaggcacacgacacagctctcccygcagagccctggcaagcgccagacgccgctgtcctttggcttcacgtgctcaacgacccttaagatgagagctgtcaactcaggcgtgtggggaggagactcggactcaaaggttgaaggttttgctccatgtggaggcacagctcctgcccagcggggttgaacagtcccgttatgcttctggc

SEQ ID NO: 4131 - DNA, 600 bp, Bovine  MMBT20994
gaggattggaggaaaaatctaattgaattcaaaacataataaattgaagccaactcattcgattcatggcaatgtcttctggcatcttttaattttgcgtcatattcatttggagccaatcaaattagggtgctcattagtggctgaggtgggcagtgaggctggagccctgctctggtggtaatgaggtcagtgcagcaggataattcagaaggcagttggagtggagcagacagtaagagctcaacaatcactgtctcattatcaggaaaatggactcrgggaggggtgagtgtgyaycccaaatctgctgcttgcttacaggctggccttgaccttcactttctgcagctttggttctactgggataggagtagggcccacctctaaggatgagtgagtatgagatgaaatcatatgtaacaagcatctcstcctccagtttctcagagtccgcctctgctctctgtccccaccaagggtgagtgagtatgaaatgaaatcatatgtgacaagcatctcgtcctccagtttctcagagcccacctctgctctctgtccccaccacaccacacagccccagtggtggcgctccttggt

SEQ ID NO: 4132 - DNA, 598 bp, Bovine  MMBT22798
  misc_feature (1)..(22): n is a, c, g, or t
nnnnnnnnnnnnnnnnnnnnnngatagtaaaaagtgcattcaagaatattttttaaagcaggtgaattatcttcatctctggacaagtgaagaaggattaatagccctttaggggcatgtctgcttttaaacaaacaaacaaaaaaaaatggacaatagtcatttaaactaccaaacccattatwtgcatgtaaaaaccttcaaagtgctttcatatctttatattaggaaggttgtggcaacatcctaccccaataaaattttattcatgctttcagttacatagaaaattattctctyttttcaaaatatgtgaattctcactactttctgaaggatcataaattcagaattattttgatcrgtagaggaattgttgttaacacaagttagtgtttcttgaggtgattatcacctggacattctccttttgccactccagacccttttccattctgctctgagttcctaaacctgacctctataaactgcaactgaaacctttgccagctggtttccaatggrtttggccaaagcggagaactaaataagcaggagatacctggagaaaggaaggaggcagggagaaaaggggaga

SEQ ID NO: 4133 - DNA, 449 bp, Bovine  MMBT23271
  misc_feature (1)..(22): n is a, c, g, or t
nnnnnnnnnnnnnnnnnnnnnngatagtaaaaagtgcattcaagaatattttttaaagcaggtgaattatcttcatctctggacaagtgaagaaggattaatagccctttaggggcatgtctgcttttaaacaaacaaacaaaaaaaaatggacaatagtcatttaaactaccaaacccattatwtgcatgtaaaaaccttcaaagtgctttcatatctttatattaggaaggttgtggcaacatcctaccccaataaaattttattcatgctttcagttacatagaaaattattctctraaggggaaggaaactttttcctgacaccttcacttctgtcaatttttcagtgtctcaggggaagaagggggtttcctcaactgttagaccctggatgggtgagggacttttgaggtgtcccctcaggagtccaagccatctcttctcat

SEQ ID NO: 4134 - DNA, 600 bp, Bovine  MMBT09214
agagagtttcccacccacgaggcagaagcagagaagaactgtgctcaccctgctcctgcaggacaggccttccccatctaaggggcaccatcaaagaggcacagggaaggtttatcccagcatgcacaggagagttggcctgaatgaacccctgtctgtctttcttggtctttcacagtcattttgtgctgtttattctggtttgttaataaattggaattatccttcaaacaagatgtttttgagttgtgattcaaaagtcaaattccttggagtttgatacggtgttaagaatgatgsgattgaaaggaggaagaaaataaagagtaagagctttccactcagacccgaagggaaagtagcccctgggggagcaggtataggctgagacctgtgcccttgctcagtggggagctattgtgacctccttccccgtgtgtcttaaatcctcacattcacacaaagtatttaatgccttataatgttgtctggaggccatcaccttaagagacttgcccatccagcatcacctctgtcctgttatgcttctctgatatctgataataatgcaaaaatactaccattagctcaagccccatg

SEQ ID NO: 4135 - DNA, 598 bp, Bovine  MMBT20976
  misc_feature (1)..(159): n is a, c, g, or t
nnnnnnnnnnnnnnnnnnnnnnnnnnnnnnnnnnnnnnnnnnnnnnnnnnnnnnnnnnnnnnnnnnnnnnnnnnnnnnnnnnnnnnnnnnnnnnnnnnnnnnnnnnnnnnnnnnnnnnnnnnnnnnnnnnnnnnnnnnnnnnnnnnnnnnnnnnnnnnnttgcatttgcttcaacagtacataccagaatttcttcagctgcctctgtatttcaaggcacaaatgccattccaagaccgttataattaattgcccccagataaatgtacagcaagaatatccctatcatgtcatctgtcrgcactgatttacacatctgacacagggaatgtgtagtttaccagttaggcggttaaatttggttaattgacctgccaccagtctgctacagaggtcagtagactctttgtgacctgcccgcctgtcttcccgagcgcagcatactcatgccagattctggctgaaatcaggcataaagcccacggctggggtccctaccccctcaacctcctgtcagtctagttcacagggtttctcccgagcctggcacacagtaggtgctcattaaatttgttaactacacagtggaataaatgtt

SEQ ID NO: 4136 - DNA, 600 bp, Bovine  MMBT01730
atttaatttggatacttaaggtatggttggctatggcttttattatagtcattactttagagctatacattgtatatatgaatagctaaagttgtattcagacttgtaaatataactatttcaagtaatctggaagtcatgtatttgcatgtgctttttaagcttcacccatgctgtttattgcactgagcgatatatagggcatgttaacagtatccaagtaacggcactttatctcatttatatgaacacctctgaggtgctacaagtccaaactgatgtattattcatttgtaaagrtaaggtacaggaatgatccttgagttaaaggtatttttatatgaaaatgatatgctattggaggatgttaaaatgctagttttcagagaggtgggagtgctttgttttatatgttgggatgtgaaattattttctagaattggagagaaggaagttctatatttacagaatgttttaaaaatgaagagttgtaatgaagtcctgtaagcaccattgtggtcttgtacgaacaggaatcttctggcgtcattcttcagcattggttcctgtgtgcagtgtactctgtatagtttcattgtg

SEQ ID NO: 4137 - DNA, 600 bp, Bovine  MMBT05016
acccatgtccatcgagtcggtgatgccatccaaccatctcatcctctgtcttccccttctcctcctgccttcaatctttcccagcatcagggtcttttcaaatgagtcarttctttgcatcaggtggccaaagtattrgagtttcagcttcagcatcagtccttccaatgaacattcagggctgaacattttaggaatatgctttacatacatgtaggataaggcaatcatacaagaaatgagtacaggaaattctttttaatattaaaagattcaaaggcatataaaacattttagatycacacttctcctgctacttggaaaagtttcatactagcataagaactggtggatcacctccaagtctagttcaacaataagaggctctgagtccatggaactttccaaataaagattcagaaactacattacctttaactgttgctgcaattcactattcaatctggccaaaactgtgttggtttccttattgcgtctaattgatgcctgaatagctttcttatctttcccaacagacctgagaagataaagagagcaaaaaacgtgaccttcattcttattattaaatttgctccattc

SEQ ID NO: 4138 - DNA, 600 bp, Bovine  MMBT13252
ataagacccaagccataccgagtagacaggtggagcgaggttcagagcaacattcttagtgcccttgctttatccttagcctttgagagaaccctacttataagctgtcccttccgctgcaaaaagcaggacacgatgcctaaaaccttgctctcatagacccttgcagaccctgggtccttaactcttctcttccttccaaaacccaggcattgtgtccgttacagactttattatgggttgttagtgctcttcctgtttggcctggtgttgttgatgggtatgggaaagggaaaaayrttcagatcctaaggagaagagcatgggacaataaggcctttgtggatttaccaccaagtaggaagtagggggagggggggaaacacctaaaataaaagaaactccaagaatgaatacttaaatgattgagatgaaattcttttcaatgaattattttatattttatgcttatataagtatttgtcttccttcctgctttgagtcaaaatagggaaaaacatttcctagtgccttggtcttagaaggttgaggctccagggaacaggaaaatgaagagagaaagtgagaaagagagaaaat

SEQ ID NO: 4139 - DNA, 600 bp, Bovine  MMBT19605
cagatgtagctgactgctcatttctttcccctccccatcctgttagatgcttttgccaaccatgattcatggaatgatttttttgagctgagtaatttgtggcttttcagtttccttactttctttccttagctaaacttgttttggttttagcaaagtgtttaaaacagcaaagatctttgaaaatgaaataatacgtgtaatgatatattttctaagtagatgatttttaacaaactgtaaaaactttatatgcctgtccttctttgtatctttcataactcctctgtcagacaaatyctctcaactctgaaggagagccttatgtaggggaagacacagcaacctttgaacagccctttgtgaaatctgatggtatggcagctggtatttaagaacttcttttctaagactcctaaagagcattttaaaatgtgactttcttctttctttacagatcgaaacgaacgaaataaaccagagcatcgttcttcaaggtatgaatttatagttatttaataactctktataaagcttctcttttaggaaatattatttggaagaagtgcaagtgtccctttttgaaacactgtatacttg

SEQ ID NO: 4140 - DNA, 574 bp, Bovine  MMBT06893
gaattgtgtctcctccaactagaaaccattcctgtacgcaaaagatgaaacacgtcaggatgcatttaagtcacagggagcgagatgttgctgttctatccagggagccataaattctcatcggggtgggacgccaagagattctgtaggcaaagtgaaagtgggaacaaagtgatgactctgccttagaataataacacgaggtcttttgcataacactgtgcaacaattatcttgatagagccttacaaaacccataaacgtaggcgagcaagcaacataattgtcctcatttcacayagaagaaaaatgaggcttgaagactgtgaatgaatttcccaaagtcatgcaaaggagaatcagggctggaaacagtccccagtctgacccttttccactccactaagcagccttctacccaggggcttttgtgccccatcaaacagagaaatcagaaccactgagcttctataaaagaaaatggaaagttctttcattccaaaggaaaccagttgtttccgaggctatcaggtgataataagagctattcatagttagtaatactaataacaaa

SEQ ID NO: 4141 - DNA, 600 bp, Bovine  MMBT11221
ataaagataaagagaagtaagatttttaacatagtagattggtaaagatgaaaatgagaaaaattaaattttatattagccaagatttgtacactttcataaacttatgtaggaaattaaattgcataagttttccagaaactgccaattatcacaaaatccctaaaaatatatctattctttaaccaagaattccacttttagaaatttatcctagagaaaaagctgaacaactttgcaaaaatagattttcatcactgcaatgcttatataataagaaattaggagataaaagtctamcaataggatattggtaaaatatgtcatggtaatccacatayraagacactatgtcttcattataaataatgatgtggatcaaggatcacmacttaagatgaccacaggggcaagatgtaacataaatgagtgaagagactctttggcagacttagacagcatgtgccccttttgaagagggcaactccaattaattgatgccaagtaagaagtrggggagggtctagtrttgtcagtatagccaatattttaagtgaagtaaaaaattgaaattttatgtgaaatctcctcatgtttaaa

SEQ ID NO: 4142 - DNA, 600 bp, Bovine  MMBT16086
actgggaagcagctctcatcaccactttagccaaggggacagtgagtgactcagatggacaagccaccaaatacccagacccraaagaggggaaggagaggaggtcgtccttgagcaggatctcctggcaccctgccctggctccctgcctgtgccagggcgtcaatctcagcatctaaatccgtcagacacttgtccagcatctccttccatcggctgacagtatcgatcctctctgccagccgcgtcctattgtcatgttcatcccaaatggtctggaagagacagacacagataaaraggctgtcgggggctgggagctatcccttcaccacccagctggactctggacccccaacctggttgttggtctcgttgcggaggacccgggcctcctggcggatctggtgtgaggcatctcgctggcgctcggcgttggtggacaacaggtagcttgttggtctgccagtccggcaaccggaagcgtggactgggcttgacactcagcgtggccatggtgcaggtcctgaagggtcaggcccccaggcctgttccaggacacctaactctgcaggagggggcaaacaggtggcaggagac

SEQ ID NO: 4143 - DNA, 545 bp, Bovine  MMBT17157
tgattgagtccttactatgtgccagacacagttttaaatgctttatgtggactaagtcattctctcataacgttgttacaatataagtactattattatcatctctctacacgaaatattattttggaaatttgcataagaggatctagctgatctggggcagagcaaggatttgaggccagggagtctggttacagagctggctcttgcccaccgaaccgtatcccctctcctaagagaggtgacgtttcccagggacacagtttgcacaagaatcccgactctccatgttcacagcamcacccttcctccgtagaatgttctgtcctcgycccatttctcccagcctattctcaggggcatcccttaccaaaaacgygaaagaaacaccctactaacaacaatgtccttctcacctctgtcaaagggggctgcaaaaatatgcaaggcagggtggctcagacttgggggaggggctccaagtccaacctcagcgttaacggctgggcaccctagtcaagtcacaccacatcttcacccacaca

SEQ ID NO: 4144 - DNA, 600 bp, Bovine  MMBT20630
cagcaaactgcagatgtcttctcctcatctgccactcttccagaaaagttcaccttctgcaaagtccaacttgcagagtggtagaaacagggagattcacagccagttcctagctttggaaggatctgatggagcctgaggagatggttgggctcttttttcttccttaaatagaattttttttgtctgaggccagaagtctccagctgggccctggtttagtcaggcatctcccagatttcctcttgtcccagggcccctttgagatttcacatgcagtctgcatatacastcctggaraacttcagtcgaaacgaagcaaactggagagtccttccaaggtggtggtggtttagtctctcagtcatgtcctactctttgcaaccccatagactgtagcctgccaggctcctctgtccatgggatttcccaagcaagaatactggagtgggctgccatttccttctccaggggttccttcctacccagggattgaacccacatctcctgcatttcagggggattctttaccaactgagccaccagggaagcctgttcttccaattggcttagccaaataattagaaaagttggtctggg

SEQ ID NO: 4145 - DNA, 598 bp, Bovine  MMBT22240
  misc_feature (1)..(44): n is a, c, g, or t
nnnnnnnnnnnnnnnnnnnnnnnnnnnnnnnnnnnnnnnnnnnnccgcacggggctgggctcctctgggggtgcagggtagactgcccaagccgcggggacaggaaacggcgagccaagcagaacagccgcccgtgagtcaccgttccagaacaaccacaaatggcccgcacctgctygtccaccccctcccgcacctgccagcctcaccaggggcttttggctgctggacagagtgggactggtgcacactgaccacctccagaagacagtgacagatgttagcgccagcaggtcctgyccctcccgtcagcagatgtcaagacatgaaaaattggggtaaatgaagggtgcacgattagattcgggcgcaagctgggttcttgtgggtgccagagacagctgcaaaggcacgtcggggacaggtgccctgatgcagtgggggctgctcggcccgggtgcccggggacagctggacgaggtgccgacgtggcccttcctccgtggagccaccccgcagctgctgggagcaccgccagccatgagccgtgcgccccagctccgggcccaccccggggttcccaggaccccagcctatc

SEQ ID NO: 4146 - DNA, 600 bp, Bovine  MMBT00015
ctgggccctgcatcccaggaagcaaaagtggccgtcttccaaccatagtgtgaatactgaggacccctaattcccatgaggatgtggaggcaggcgagctgtggatggctgggaggatgggtgtcatcagtcagactttgaggtcccaggctgagacattcagttctgggggtctctggacaggycctcagagccttctgagcctagagttttcgaggcatgaaacaagtaatgatacccacccctcatctacttcccatgacacagagctgatgggggctctgcagccagcccacccarggtcagcacttggtgccaccactcacagctgtgtggccctrcacacrtcccttcccatctgcgccttcacaactcrtctggaaagtggggacccccagacytagcctttctcacctcagggctgcagtccagctgctgatggaggcagctgggggccgctgagtggaggccaaagtcctcatcctcctcactggggaagacgggcctccccagcatctctgggctgaactctgagccttgccctgggatccctggggctgcgggagggaccaggcgtctggacgcccgggacagttatca

SEQ ID NO: 4147 - DNA, 523 bp, Bovine  MMBT03561
gacactttgcaaataaatggaaaacctaattccatatacaattatataattctcaagttaaaacacaaatattatcagcctcaaggtttcaagattttctctcctctagtcctttagcctttactcatccagtaaatgatctgaatccttataccccagatacactgtaagaaagatccagaggcaaatgagaaaggctagaaaggctaggtaaaaatcttgaccaaggtaaaggttaaaaagaaattctgttacaatgtactataactataactatagtttgtactattcctatttaarttctagaaatcttacagactattagcattttctatatcacaaggaaaactataaatttccctttctaaaaggcattaaatcaaaatttgtctagggaggcaaataagtactgtatatacaagggaaagcaattatacgattcagaatcttcattaaaaaactaaaataccagccctaatacaaaacagaagaaaaaacaaagaggaaccccaaaaaaaaacaa

SEQ ID NO: 4148 - DNA, 600 bp, Bovine  MMBT03976
tcctgcagatcagcaggtgttcccggagggagaccaactcgcaaagctgggctcacctgtctggttctcatcgtctctcctgtctcgtcccacagacgctttcataaggcctggttctcaccaccatttcagagcaccagtgtcttcaagcaaaatatctttcccagctttccaagttgctctcaatgagcacatctagtctcttctttaaaagatgattttattgcagttgtcatatttaaccaatagcggatgtcagggatttgcttcttaagagatgtaattgaaaacacccaaggktaagatttttgctttcttagagggaagatcattatcatcayaaccttttcctttccaaatctcctcttctctttctattttgtaagtcaacgctgacatctcaacatggagtttattttgttgggtttatagctctggcatctagtgtggttgtcttgcttacatgccaccctctgtttttactctggcttcactgtgatcactaagctccgatgtgggtgtgtgagctaaggagaagagcatattacaaagctgcaacgctttgtactcaccactgtttatattgtatgggttttgaac

SEQ ID NO: 4149 - DNA, 598 bp, Bovine  MMBT10365
  misc_feature (1)..(52): n is a, c, g, or t
nnnnnnnnnnnnnnnnnnnnnnnnnnnnnnnnnnnnnnnnnnnnnnnnnnnngtgctcggcagaatgaatggcacagctgtcagctcgtcgacgtgagctcccagtgtgagagcagcccgcacgcatcctgcagccctctccattttgtgctctttgaataatttatctgcaggaaatccaaattgccaaggcccgctttaacccagcagaatgcttgccaatttccttgggaaaactgacaaaaaaagaggtgtagattgcatttcggctgagagtggctgggcaatcagagctcggcmcctttgtgccgctgcatcggaagccactgcgccgggctcgcgcagacgacatttgaaggctcataaatgtaatgaagtccctttgacacctgctcctctcttcactttaaatgtgagccattggtccatggggaacctccgctttaaaaatagaaattatagtaattgtcttccgtgctgtcgggaggctgtaaatgcatggctctcagctctactgcctgcaatygacggctgcaagaattaccccaagttgagattttttgtccttaacaaatcacatgtatgctcgtgctgcgtg

SEQ ID NO: 4150 - DNA, 600 bp, Bovine  MMBT12851
ggagtcgtggagataccccagttgcttccaataaactttcttctagctctcaggccagtgagagtaggactttgtaaattgtaagtaatagagttttagtgagtgaagtgaagtcgctcagtcatgtccgactctttgcaaccccatggactatagcccaccaggctccttccatccatggaattttctaggtaagagtactggagtgggttgctatttccttctccaggggatcggcagaaatgatcttcaaggtgttgtgkttttttttgtttttttttttagctctaatattacacyagtggttatctaagtatggtcttcccaccagcagcatcaacatcacttgggaatttatcagaaatgccccaccccagacctattaaatcagaaactctaaggggggcgtccagcaatttgtgattttacaagccttccaggtaattctgacatgtgatcaagttttgcaaactgctgtatttactattttaaagggttatgttttatgtaagaaagggattttcataacaagtgccactatctttcttttctaattaagttactagattgaaggtcaaaagatgatttttattagtaaaa

SEQ ID NO: 4151 - DNA, 600 bp, Bovine  MMBT19541
ctaaaatgtgtattagttggccctttacagaaaaagtttgcagaccctaatacacagtagacttaagtctgtaggaaatactatttcctcagggagataatattgtttcaggggtttagagcaggtttcatagggaaggtaacattgaaggataagtaaaagctcaccaagaacaggaaaagaagaaaaatatcacatacagaaaggcacaagaagagagaacactgcatgttaggaaaatagaaacaggcagagtccatttggtatacagggtacttggcatacgccaagcgaaagaayggtagagaatcctttcactgacttcccctgcctatgctgccctgttcatgtcaacaaggaataaaacctacaattttaatgctgtactctaagggaactataaatagaaaatgtaattaggctggtaaaatagatgaaggttatcttgtcaggwstctgaacttcatcctactctgaattggaaggttatcatttatcataaaaagttaaaatactaaggtttatgaatgagttaaagttttctgagattagaatagtcaatgttttccttttaatgttattttgatttgtattctgaca

SEQ ID NO: 4152 - DNA, 530 bp, Bovine  MMBT21674
cttcccttcttcaactcccacaccagtttctgtaatgytttccaacatctcaagtgtataatcagcatgttcagatgcttttctaaatgcagattaccagcacaatgccccagatatgcataccccttaagtcaagcagcattgsattccacatttttaaggagcatagggattcttacactggtggtcagcaatacacatctttaaaaacactgagttagtgtgatccagtcattgaaatccgaaacagaagaaacatcctctctagggaagcagaatagaagaaagcatgtcattcayagcatacatacatgagaaaaatatttttctgtattttaatttatttaagccctcatctgtgagcaacaaataaaaattgtaacttcatgaagataatgtacatcacttctgcctcaaaactaactcgagtggcttcatagatatttctttcctgcctgtgctcctttctctctaagcaaaggtatctatcaagagagatggcttagaatttagtgtgattaaatgttcag

SEQ ID NO: 4153 - DNA, 600 bp, Bovine  MMBT21682
tttttagagaactttatcttgtggtaaaatggcttatcatcaaaggacccttatcaactatcattatctggcagactgatgtatgccatgaatattgttttgttgtttagtagctaagtcctggacgattctttgcagccccatggactgtagcccaccaggctcctctgtccatggaattttccaagcaagaataccagagtgggttgccatttccttctccagggtatcttcccaacccagagacaggtatattatgtagttcttaaagtggttgacaaggactaaattaaacacgamgtgacatttcttatggaagcatctgaagactagttagatccggtttggggacaggcggctcccctttctagaagccaaaccccatctctcyagagcagagctggaggagggaagatactgtttcatgcattgtgacagccttagggaggaaaagatattggagactctttatttgctcttctcccttcccttcttcaactcccacaccagtttctgtaatgytttccaacatctcaagtgtataatcagcatgttcagatgcttttctaaatgcagattaccagcacaatgccccagata

SEQ ID NO: 4154 - DNA, 600 bp, Bovine  MMBT01814
ttaggacataaccctggtagaagcagaggagattgactggagtaaggagagctgctaaccagacattttgtttgttgtctggcttgaatgaactagtgaaccacagtacagagtgaagatgaagagacatattccagttctgtgatgcttgaagctttttacaaatttcaaggctctcaaaataaaaaaaagttcaaaattataagcacaaatttaggtacaaaaacaaacactttataataaggaaaagaatctgaaaacattactaaatttaaagggttgatgaatgctaaaaatttyataaaatttgggaaaataacayartatttctatgacataccttcctgacagttctacctattaaagatatagaaactttttagattcatgctctttaatatcttcatatgaataatgttcattatattaatacatatacaaaatatgaattataatagyattctgtaaggagagattagaaggaaattaaagcttttttcatattacagttgatcattttttttaattgatggttcagatgcaaaagcatgtggcttcacacagctgaatctgctgcttatatgcaacaggaggtgccct

SEQ ID NO: 4155 - DNA, 600 bp, Bovine  MMBT02665
tatccctcagagttgctcaaattcaggtccattgagttggtgatgctatctaaccatctcgtcctctttgagtataggcataattattaactaactcaatcctacctaatccttttatggaaaaaagattaggagctcacaactgatttactaagtttgaggcacacygtcttctggcggagtgagttaacagtttcaaaatgaacatctttaagcaatctgtgcagttctattcaaaattaaacaatgaggagaagtctcaaataactgtgacatctaaattaaggttgctgggctgcstagttgttcctcattaatgcctcatcctttcccacgatcttgggcctttatatactttctcaggtggtacaacccaatgatttatcaacctgattatccctcttaacatttgagatttattaggtgcaggccagtctttcagctacactttaattgtgttaactgcaaatgcaattaattgtgtcacctttggggaagaatttcacagctacatttgggggagggtggtaagtcccttattaaagtcgtatgtgttgaaattctcaagagaaagccctggttctatgatttttgtgagcc

SEQ ID NO: 4156 - DNA, 593 bp, Bovine  MMBT02943
cgcacgtttgtccatcaccctttttacttgtctgtggggaatctcctccccctcgtgcgattcgacaaatcttaaccctttgcaagagacagcgagacctctctagccccgggggcagttttgtttatgcaaaggtgactaggggagagaaggaagggctaggagggggaggaagtagctttgaggtcatctacaacgccctgtcccgacctcgtgggccgcctcgccaggcctttgaatgaagtttctgaaaaccaagcgaagccccagggcgaaaatagcacgtaggctataagtaartaataaaacctgcccgcttcctcgccaacaattccaggcaaatttgcgctgagatgccacgtgaaacgaacgcattttctgcctccttgcccctgccgcaccctccaggtcactcaccgccgagctctggctttgactcaaggtaacttggggccgggtctgcggagccccccagtcacgtgcccgctggggatgctgagggcgaaggtggcagaaagtcgagagtgactaaaagccagaagaggagggaggttaggtggagggttggataggaaaagggtagaggtagtgca

SEQ ID NO: 4157 - DNA, 600 bp, Bovine  MMBT03591
ttcttagtaaaatccaaatataggacctgaatctgtgttgtttcttattattctaaagcatcaatatctctagaactggttctacagaggaaattggatatgtgtatgatattcaaaaatagttacacattttcagctttttaatatatgaatatacctctaacaatattttatttcttgaaatcctctaggtttctcccagaaagtctcactagagtaaaagtcaaaacttcatagttctttcaagacaagagtggtttttctttttcagtgtcttaagatggttttatattcctgaayaatgtgcaagctctttcttgagtgtactatataagtgtgtttttatttttagtatcaagattatctttttcatacatataatcatctctgtatacattactcagtgcccagcccatggtaatcaaggacagcatgtttgcaacatcatgtgtaatcattctttctgtcttgtctcattagagaattgcactgaagagtcaagaacagagactcagcaggaatcaaagagatatgaaagtcctaatttctgtagctataatatcaagcaaaattatcatcccacacaagttcataaatttt

SEQ ID NO: 4158 - DNA, 600 bp, Bovine  MMBT10341
aaaaaaatagtaattccacaaaatgatgacattttaagtagtaaaaccttaattagacagcagtgaggacttgtagcgtgaagaagggactgtcacggtgtcttcctgtggttaaggaaagggcttcccagctgccacagggaaggaagggggcttcagccttgactctcagagaggctggctggtgggaccctcatccttaccacgagatccttcggatccttagacagtgcaggtcacatgttcctgaccttccttgggagtgaccacccacactttatctactgtcatatctgcagrtgggaggggtgcttttaygatgactgtgacrtcttagatgtaactgtgtaacccttatagcgactgaaggggaatgtccacacccagtggaaaattccacaggaaacaaccatgtcttcattgcactcagtacctatgtatgacatacacgttaagtgaatgttttcttgggttttccaggtctacaatatttagtccatgtaaatgatagaatttgataaatatggtaaattaagttataaggtgtcatttgatttctcttttgctgtctcacgttatttaatgttcctgatgctccat

SEQ ID NO: 4159 - DNA, 600 bp, Bovine  MMBT14152
aaaaaaaaaaaaaagaaagaaagaaagaaaagaaagaaaaagaaaaaagggggataaagaaaaggaagaatgaaggaaaaaaaaaaatctcggcctggagaatgagcaggaatagttaccctcccttgagcaacaaacggtttatcaaaaatgccctccccatcccccaccttctctgtgccggtcctacaaactctttgctccattatcttacatttgaacagaaaatcgttagaaatatttggaaacgaaataatgtggcagtatcttgcaaaaaaagagaaatctaaaaatagtgcrtgaactgaaccagagggagtcggagtctttctccctttattttcttctcttttctgaggagggaagcgggatttcctcggatgttagaaagccgaaggccagaagtggataaaggaaaggcgtgggcacgttctagaaggattctaggcccccttctcacacctttcctaaatgataaacttgattatgctaaatcgatgtcttaaaaagcacctctatcactgtgaataaagaatttgtattttctgttaaaatggaaagacacgtgtaaaaggttccgctgaaagacaaagtcagacg

SEQ ID NO: 4160 - DNA, 600 bp, Bovine  MMBT14849
tttttcatgtatgtcttacttctcccaccttattataagttgagtatttgcttttgttgttcaggcgataagttgtgtctgactcattgcgaccctatggactgtagcacgccaggttcctctgtcctccactatccctcagagttgctcaaattcaggtccattgagttggtgatgctatctaaccatctcgtcctctttgagtataggcataattattaactaactcaatcctacctaatccttttatggaaaaaagattaggagctcacaactgatttactaagtttgaggcacacygtcttctggcggagtgagttaacagtttcaaaatgaacatctttaagcaatctgtgcagttctattcaaaattaaacaatgaggagaagtctcaaataactgtgacatctaaattaaggttgctgggctgcstagttgttcctcattaatgcctcatcctttcccacgatcttgggcctttatatactttctcaggtggtacaacccaatgatttatcaacctgattatccctcttaacatttgagatttattaggtgcaggccagtctttcagctacactttaattgtgttaactgcaa

SEQ ID NO: 4161 - DNA, 600 bp, Bovine  MMBT15958
cagggtatcttcccaacccagagacaggtatattatgtagttcttaaagtggttgacaaggactaaattaaacacgamgtgacatttcttatggaagcatctgaagactagttagatccggtttggggacaggcggctcccctttctagaagccaaaccccatctctcyagagcagagctggaggagggaagatactgtttcatgcattgtgacagccttagggaggaaaagatattggagactctttatttgctcttctcccttcccttcttcaactcccacaccagtttctgtaatgytttccaacatctcaagtgtataatcagcatgttcagatgcttttctaaatgcagattaccagcacaatgccccagatatgcataccccttaagtcaagcagcattgsattccacatttttaaggagcatagggattcttacactggtggtcagcaatacacatctttaaaaacactgagttagtgtgatccagtcattgaaatccgaaacagaagaaacatcctctctagggaagcagaatagaagaaagcatgtcattcayagcatacatacatgagaaaaatatttttctgtatttta

SEQ ID NO: 4162 - DNA, 600 bp, Bovine  MMBT16361
gaacaaccaatgtcttccaggaagttagactacttatttctttatgaggtactttgaatagaagagttcactgggctgaagtaaagccagtgaattggcaggtgagtagaattctgccttacacgcaagccccattttctctgactaatctccctaccctccccgttctgtccaccccatttctcacttgttcttacatctgctggaactgttttcagaatttattgtttgggcgacttattttgacataactggcaggttgactcatgtgaatgagttaaattaatcatgggttaaaartgtgtcattatggtagcacgttagagctatcataactccaatgttgtctttgcatgaattttcctgccttgtcctcagctgaacatctcattttcaatttaaatgagaggattctgaatctgtctttcctatcttgttcactggttctggtttaattcactatcttcattgctaagctaattgcagttagaatgttatttcctctgttttagaagagatagaaagtggctagactatgattcagaattaaataagatagtttctgtatctattttacagtaaacacaattataatctttt

SEQ ID NO: 4163 - DNA, 600 bp, Bovine  MMBT17233
gcctggtaggctgcagtccatggggttgctaagagtcagactcgaatgagcaacttcactttcacttttcactttcatgcattggaaaaggaaatggcaacccactccagtgttcttgcctggagaatcccagggacgggggagcctggtaggctgctgtctatggggtcgcacagagttggacacaactgaagtgacttagcagcagcagcagctcaatcaattaatctatctacctatctacagtccatggaatcacaagagtcagacgtgacttagagactaaaccaccaccaaccrtctatctatccagctttgatatacttgttgctgaagaaytcagcaaacacaatgcaaaggattcctgaagccagccactgtgtaaggcatggagacctttctgtctctagaagtattcattctccctaggtccactgcaggctgtttttaaattaaggtggatcatacacatacaagacctacctcaaagttcattattggattaccgcccttrgcatcaagggaggaaccacactggttaaaatgatctggtttgctccacctaagaatctccggggttttatagttgacctccaggta

SEQ ID NO: 4164 - DNA, 598 bp, Bovine  MMBT18950
  misc_feature (1)..(143): n is a, c, g, or t
nnnnnnnnnnnnnnnnnnnnnnnnnnnnnnnnnnnnnnnnnnnnnnnnnnnnnnnnnnnnnnnnnnnnnnnnnnnnnnnnnnnnnnnnnnnnnnnnnnnnnnnnnnnnnnnnnnnnnnnnnnnnnnnnnnnnnnnnnnnnnnngaaagaaagaaagcaagcagagtactttctattcacaaaaatcttcctgagacaaatgagaattgtgcatctaaagaatagcacccaacttaaaagamaatggatcgaggaagttcagcataaccagtgttgaatgtattctgctcattctagcccrgaagtcccagaaacagtcatcaactacaagtgacattcaaataccttatgaactcagtgtgttggtatttgaacggtttccctctaaagtcactacaaagtattactgtgttatagccaaatgttttctaacagtttgcacaattctgtcatctacccagggaagcaaatatagatagtattcagtctgcagagtaccaaaatctagatggaaagggtcaagcttccatcacggcattatacyacgttayayggctatttcagccataatgtcagttattatatattggcgacgtgcc

SEQ ID NO: 4165 - DNA, 598 bp, Bovine  MMBT21254
  misc_feature (1)..(49): n is a, c, g, or t
nnnnnnnnnnnnnnnnnnnnnnnnnnnnnnnnnnnnnnnnnnnnnnnnncccagggcagctgctaggttcgtgcatttacgtatcacgctcactctctcctcaggactttttttctttcttaattaatttttattggagtatagttgatttacaatgttgtgttagtttctgctgtacagcaaagagagtcagttctacacatacatatgtmcactctgttttagagtcttttcccatataggccattacagagtatagagtagagttccctgtgctatrcagttcctcaggactttccygcacaactctctgattttttgctcaactgaaagttcaatgatgacagatgctgtatctgctttgttcgcaatctttattcccggggactagcaaagtgtttactatacagttagtgcccaatacatgtttatggaacgaattcatgagtcaacacatcaatggaaacaaaacagtttcaaagaactttccacccaaccatggtgagcacctgtgaaacattctgacctayaacaggaaggcttctctagatcaagaggctctgtctgcctgattttcaggccctcttccctagatgat

SEQ ID NO: 4166 - DNA, 600 bp, Bovine  MMBT01553
tggatcgaggaagttcagcataaccagtgttgaatgtattctgctcattctagcccrgaagtcccagaaacagtcatcaactacaagtgacattcaaataccttatgaactcagtgtgttggtatttgaacggtttccctctaaagtcactacaaagtattactgtgttatagccaaatgttttctaacagtttgcacaattctgtcatctacccagggaagcaaatatagatagtattcagtctgcagagtaccaaaatctagatggaaagggtcaagcttccatcacggcattatacyacgttayayggctatttcagccataatgtcagttattatatattggcgacgtgcctaaaggctggttcaaatctataatttaagcacatatcatgctaaatagtgttgtgccatagccaagaggcatttggtacgtgatgcctttccccttcctgagacacaaagaagcttattctgttctccagtcataggtgtgacgtaggaaaatgcctcgaaaattccacccacgcatttgcctgggaaaataactgatttttctgagctataaaaatgtactgtcttttccttctgagtgggttc

SEQ ID NO: 4167 - DNA, 600 bp, Bovine  MMBT03005
ctgttgcaaggccttcttggtggcctcaatgacctccacctctttgtgcagctcctcctccacagggtccttcaccacatcaatgtcacgccgactctcccgcagggtcaggcattcaattgccacatccagaggtaggttcttggcctgcaggttttgctccgctgactctttcatctagaagagagagggcacagggggctggtggggccatcctactgggaagcagctctcatcaccactttagccaaggggacagtgagtgactcagatggacaagccaccaaatacccagacccraaagaggggaaggagaggaggtcgtccttgagcaggatctcctggcaccctgccctggctccctgcctgtgccagggcgtcaatctcagcatctaaatccgtcagacacttgtccagcatctccttccatcggctgacagtatcgatcctctctgccagccgcgtcctattgtcatgttcatcccaaatggtctggaagagacagacacagataaaraggctgtcgggggctgggagctatcccttcaccacccagctggactctggacccccaacctggttgttggtctcgttgcggag

SEQ ID NO: 4168 - DNA, 601 bp, Bovine  MMBT08413
  misc_feature (1)..(1): n is a, c, g, or t
ntgttaacatcaaagaagcaatccagatctaaagaaagagctggacgctttcctcgcattatctccaaagctgtcagtgatgtaaaatgtgatcgtgagcttctgctattgtggcagtgttataagtaggaggggtcccagatgaaatgtgtgtgactggcacttacatccttgattttgatttataaaaacaagaacagaatcatgaagggagtgtaagatttaccctacctaatctgtcatgttgttgggttacatccaattttataacttctttcagtacagtttttscccccttccrtcttactagaaaaataaatgcaatgctaycatttttagaaagaaaattccagtgtttattgtatttagagggaatcatgaatgatttatttatattaagtatgagagtttccagaacagtgattaaaaatgcttacaaattctagattagaagtgtgggaatttccttttgggataataaccctttagaaagttaatattataatataactcacaggaaccaattaaaatcaggtcatttgcatttattctcttcagagcagtgtatacctgttgcgatttttaattctaaaaaattttt

SEQ ID NO: 4169 - DNA, 600 bp, Bovine  MMBT08915
actatgtgcctttttgttagaaggaagataccataaatcagtctgtcagcttacaccatggggctcataatagattcataacaaaaagaattatgaaaaattaacacgcagtatgtcatttataatcaacttgagcctgaagaattgaggattatctgacatttctaggttccataaaggtttattttactttagatacagggataggaggaataagaattaggaatcaatatgcataaattagagatactccaagttgaaaccagcaagttggtataaatgcatggatctgagcagagrgattcacgagttttctggagaaggtgttgtaaagatagatgtgctttcttttggaaggtggaaatcagagaatttcagcaaatagaaaccagttggggatcttttttttttttcttttttttaaaattttattttatttttaaactttacataattgtattagttttgccaaatatcaaaatgaatccgccacaggtatacatgtgttccccatcatgaaccctcctccctcctccctccccataccatcctctgggtcatcccagtgcactagccccaagcatccagtatcgtgcatcg

SEQ ID NO: 4170 - DNA, 600 bp, Bovine  MMBT08954
ccccaggatgaagtacttactgtgggctgttttattttatgatctgacatcggaatggaaagggagactatgctttttaaactccttaaaatgcagttctattgaaaatagctgttgagacccacccacaaagtaagctgttgagtgataagagagatggtwgagttataaaacatgatatggtattctatctagaaatattgtrcaatgtraatatcaatttattccttaagaatgtaaccaaaatgtatataatcctctgtgacttttgctttataatttaattcactaaagttttcratgtctgcatgtagccatttgattcagtgatattgagctggaaatattttgatgtattctaaaaagtaaaccctaaaattatatccatttaaattatgaataatacatgaatcagatttatctcctctttgaactaaacttcatcttcaacctatactacctggggtagtagattcatgctggtcttctgacttcaaaattaaagtttatttwtgcagaataatatattctatatttaaataatgcagaaagaggaaaattctccatgatcaagtttaaggttgggggtggagtataagt

SEQ ID NO: 4171 - DNA, 600 bp, Bovine  MMBT10138
tttatatttacatgacacttttttttttctattatggttcttacagctaataatgctggaataaatattgattaaatacagttcagcctataacaaaggcatggctcccaccctgaagatggagaggtttccgactggccatctcataaatcctgaaacgtctctgttagaagacggccctgtgcttacgattcttggcacacagggaaaatctctcgtccttcagagactggtttcctcacccaccgggaagctttctgcctttggtgttggtctctccactgggctggttctgaggaytttattttatgtcgctcttattggggggttccacagttttctctgttgctgaatcctatcaaggtcctgttgcatgtgcccacctcacggggatccacggccctggctggagtcccctggggtctggctgcagaatgtgcacgaggctctgagctgctcgtctcctattccatctttggtgactggttctttaccactagtgctggcctgggtctaggtctctgcatgcagcttccgatctcccaactgcacccactgtctgtttcacaaggatgagaatagtaacaacagcaaaggccg

SEQ ID NO: 4172 - DNA, 600 bp, Bovine  MMBT12615
ccatcctgtgatcacaggaactgattttcacagcctctcgtgagctgcccaaggacttctcttcctccccagggaatctgccctctggtttgsggacacctccgcttaggtttggaaggaggcatctaccctggtgagaagaggaaatkagtttctcaaagccccagccagttcagagacctaggggctcctttccaatgcacctttgactcacaaactctcatgggtgcatacttctcaagtctccctgcccatagaagcctggaggaactggactttctctgcacagccctggtggayagaactagggccagtaggtggagtttatacagaggcagattccagctccacataaaacagaactttgtataatcagaactgttcccaaatggaatgggctgtctcctgaggtggtgagctccccaacactagaggcaaccaacctgctagggratcctactaatagaatagagttcctcaaagtgtagcccacctgtatcagaatgaattatctgggattattcttaaaagggcaaagtcctgggacccactcaacaatcactgaatcaggctgagtgtgggctaggatctacctttcta

SEQ ID NO: 4173 - DNA, 600 bp, Bovine  MMBT13138
ccttaaagcagagccaccaaaggctctgagtaggaaagccactcggtttggtttgcattttggaaacaacactccccatggtcatgatccaggtgaagcccgcaagcaactggacactggaggcatttaaaacatgttttcaaaagggctactgagtgcccagcataatataaccttttacatatttgagaaatctccaagctggggcaagcaccagccaggatcagcatcagcctctggacacatcctctgagcagtgatgggtcgccctggtgggacaccccagagccactttttcargggaatcggtacccactggttgttcaccggcttctccccctgtatcagcagttctgacctgtgggagcctgggtgggagggaggcacccacccagattcaggaagctgaggagtggattcttcggccagggcagatcccttcaaggagaattttcctccttttgctctccataaactccgtgccattggagggcmtgggctcaggcttgcrgctggrgaytgggtatgtgaggggcttttaggcatggcagttctctccaycctccaccctgagtggggctgcggttactactgcttttc

SEQ ID NO: 4174 - DNA, 600 bp, Bovine  MMBT14222
gaggtgactgtgaacagctagcccccagccaagccaccagttgaccacaaacatgccaactaaggccagaggaactgcccaaataagccaagaatcctgtgctaaataaatatgctttgctacagagtagaacacaggagatgcttgtttgatactgcctgtaaatcaaacccagcaatgtacttagtatcataacagaggaagaaggaaagagttgtaaggagttagcttccttcttcctcaactacttttgatcttaacactacagtctaaagtaatgagtgctgtgtccttaaagaygcacctttctacaaaggagttaaaacattctgataaaggagaaagatcagtgtgtgtgtgtgtgtgtgtttcttaaacaatattaattccctctatgtaccttccctaggctgagttgcaaggctacccaagttggattgagcaacaagtcctcttcgtttctggatctggtgatgggtggtcactgatgctgccaggaaagtaactgtataggcattctgaccctgagaggtaatattctgtgaactgcctgatgtgcccaagttaacagtgttatccaacgagctattttctgctcta

SEQ ID NO: 4175 - DNA, 600 bp, Bovine  MMBT21256
tttcccatataggccattacagagtatagagtagagttccctgtgctatrcagttcctcaggactttccygcacaactctctgattttttgctcaactgaaagttcaatgatgacagatgctgtatctgctttgttcgcaatctttattcccggggactagcaaagtgtttactatacagttagtgcccaatacatgtttatggaacgaattcatgagtcaacacatcaatggaaacaaaacagtttcaaagaactttccacccaaccatggtgagcacctgtgaaacattctgacctayaacaggaaggcttctctagatcaagaggctctgtctgcctgattttcaggccctcttccctagatgatggtgggcactgagtaacaaacctagtcataaggggctccmccctgaaagttcatcrcagaccagctttctctattagcaaggctccttcaagcatygagttgccgttagattccagctgcagccaaggtaatgcacataaagaaatgagattttccagcctggctgaggcctgatagacttggtactctgaaactcctttttactgcctgccttttactaactgcccatttt

SEQ ID NO: 4176 - DNA, 561 bp, Bovine  MMBT21261
tgatgacagatgctgtatctgctttgttcgcaatctttattcccggggactagcaaagtgtttactatacagttagtgcccaatacatgtttatggaacgaattcatgagtcaacacatcaatggaaacaaaacagtttcaaagaactttccacccaaccatggtgagcacctgtgaaacattctgacctayaacaggaaggcttctctagatcaagaggctctgtctgcctgattttcaggccctcttccctagatgatggtgggcactgagtaacaaacctagtcataaggggctccmccctgaaagttcatcrcagaccagctttctctattagcaaggctccttcaagcatygagttgccgttagattccagctgcagccaaggtaatgcacataaagaaatgagattttccagcctggctgaggcctgatagacttggtactctgaaactcctttttactgcctgccttttactaactgcccattttatgaactctcaggacatttctagagagcacagctctcattccatgatattttcattcttcttaatttca

SEQ ID NO: 4177 - DNA, 600 bp, Bovine  MMBT22834
ttttaagtagtaaaaccttaattagacagcagtgaggacttgtagcgtgaagaagggactgtcacggtgtcttcctgtggttaaggaaagggcttcccagctgccacagggaaggaagggggcttcagccttgactctcagagaggctggctggtgggaccctcatccttaccacgagatccttcggatccttagacagtgcaggtcacatgttcctgaccttccttgggagtgaccacccacactttatctactgtcatatctgcagrtgggaggggtgcttttaygatgactgtgacrtcttagatgtaactgtgtaacccttatagcgactgaaggggaatgtccacacccagtggaaaattccacaggaaacaaccatgtcttcattgcactcagtacctatgtatgacatacacgttaagtgaatgttttcttgggttttccaggtctacaatatttagtccatgtaaatgatagaatttgataaatatggtaaattaagttataaggtgtcatttgatttctcttttgctgtctcacgttatttaatgttcctgatgctccatacctggtttgtgcctacgttggtgtagaccr

SEQ ID NO: 4178 - DNA, 600 bp, Bovine  MMBT07141
aaagatacaccaatgtggttaattctatgtgtcagctttgttgggctaacaagctgatcccagtgtttgttaaaaccccagtccacatatcactgtgaaggtatttggtagatgagatcaacatttaaatcagtaggctctgagcaaagcagattacctaatataatgtgagtgggcctcatccaatcagctgaagactttaagagaaaagactgacctcttaggaagaaggaattctgcagcatcaactattcctgagtccctggcctgcccttcagaattgccagcccccataatcaygtgtgtgcgttcagtcactcagtcgtgtccaactctttgagaytctatggattctagccctccaggctcctctgtccatgggattgtccaggtaagaatactggagtgggttgctacttcttcctccaggggatcttcccaacccagggatcgaactcacgtctcctatgtctcctacattgcaagcagaatctttacccactgagccatcagggaagcctctgtttctctgaaacagcctaatgcaagaataaatttagttctattaaaaagcatctattgacaacctacttttcattg

SEQ ID NO: 4179 - DNA, 537 bp, Bovine  MMBT05865
gctgccccttttaaygatgaggrtgcaatattgcagacaatattttaggatagtcttctcagaatcaagatggtctacaaacatattcactcatatgctttacttttgcatagtaaacaaagtatgrgaaataaattgtgattttgttctaatatttcctgtaagatctcacaattcctatgaaagtttagaatatctcatttattatgtcaactctaaattctacattttaataattaaatgatttatatatattcatatgtaagcattctatagattttaacactaccaattttaacrtaatagaaaactctattaaaagttttcttcaaagttattaagcagttaaattcctaaaggtgtacctataaactcatgaaactgaaaataatatagttttatgctgctgacatttmtattttgtttrtatgcatagycttccaggttttgatggctatataactaatctattgtattttgagtaaactacygtgtaacaaatgttgttattgttcagccactcagtcctgtccaact

SEQ ID NO: 4180 - DNA, 600 bp, Bovine  MMBT00933
cattagtccagtgtttgacaaatatatgtggaaggaaggaaagaaggacagaaagttatatttttgttgcatgattttccaatgtttttgaaagagttacaatatataaaacttttaataaaagataaaatgtaaagaaagccataaacataagtggatattttgatgataatgaaatattggagatagaacattcttagtaagaatcacatttttataagaagtaatatttattttagaagatcttattcttagctcactctgcttaaccttatgctaaattccctaagatggaagtgrwtagcatatctgyatgttttttkaatrataaacaggaatattttacttatctttattcaaataaaacattgatttgargaatctgatttgcctattgagaaactgagtcctggttatctaatcaactgatatactggcaaaggtaatagaaacaatatccactgaagtacagctttcttttctcaagttgttttgtctgttctgagctttatctcaactaaacaraaccaaagatctgaagagagccagaacagtgctaataatagcrcaagtcacatttatattgacttctttctggaa

SEQ ID NO: 4181 - DNA, 600 bp, Bovine  MMBT14398
cataatatacgtacaccctttttcatattcttttccattatagtttatcacaggactttgattatagttccccgtgatatatacttgtcatttatccattctatacacaatagtatccatctgataatcccaaactcccaatccatccctcccctacctcctctctaccatggtaaccacaagtctgttctctatgtctatgagtctgtttcttttttgtagataagttaatttgtgtcatattttagattccacctataagtaatatcatatggtatttgtttttctctgtctgacttrcttcatttagtatgataatctctaggtccattcatgttgctgcaaatggcattatttcattcatttttatggctgtatacatttgtattcatcttctttttccattcacatgttgatggacaattgggttgtttcctggtcttgactttgtcaatagtgctggtataaatataggggtgcatgtatctctttcaattatagttttgtctggtgatatgcccaggagtgggtttgctggatcgtaaggcaactctattttttagttttttgaggaacctccatactgttttccatagtggc

SEQ ID NO: 4182 - DNA, 600 bp, Bovine  MMBT00841
tttgtttacatttaatttatactttttcccctttccccatctttccatccttccacccaccttcccaaatgctgaggctgaggatctcattgactatttgaggttccgtagttaaataagtttacattaatgatcaaagtaaacactttagttctccggcacttttccaggactgtatgatttttcttttaagcagtctatgaagggcaccctgcctgaacacastctgcctgtctctatttccaccccttcatccaccttttcttttaactgaaacttctggggaatttgaatagaacytcccttatgccttgcaactacacacacacatacacacacctggagtcagcagcccactcagccttgaccgggatgcttctctcagtcttagagaaatctgtacccccatgacactgggaagtctccacattcctcattctgcttgsagaagaacactcttgggtgggcacagttctcagggccctgtgggcagtaggggcagaaccaatatcaagttcatctgtctctggtaacgggagtctgaagtggggcatcttcttttctcttgtcctgtccattcaggttggagaactgggctct

SEQ ID NO: 4183 - DNA, 600 bp, Bovine  MMBT13514
tggaaaacctagttcagacattagtaataattctcaagcttaccaaaggcaaacagcccaatgaaaacccctagtctcccttcacacatcaaaccattcaccaattaagctaaatctttgctcaaaaattgaatcatttgtactcaagagaaattccaatgtgaaccatcttgaaatttggtcacctgtggatgtttagcagacagggaagcaaagcaagctggctgaatactaatasagaatttggtctgagtggaagttggattatctctctcattttagatgccttaaagaatcaaygaaagagtgacttaaagacctagtgtatccgttctggaggcctgtgattggccataacagctgcaggagatggggaaatcccattgacctagtttgctacagactcatagcrctacgggattagcccagccattgcttacgtgttgataggatgaggtgaattgggttccagcctagttcccacacagcattaaagacagaaatgtcttcgacaaccacccacagactatggaataaacccaagcttcctaatcaaaatttggcaccaaatcactgcctctsttccaatctcctgttatt

SEQ ID NO: 4184 - DNA, 600 bp, Bovine  MMBT21841
gtgtgtaatagtccttgttaattaaatatattgattaaaatataaacatttttggaaattataaatgtattgatatactcagtcatgaaagtaaatgtagttcactttttaataatgtgaaaatatggacaatttggaaggctagtttagtcccaagtaacaggatggattaagattagtaacagatatatttaaataaagtttggtgtggaaatcacatgaggacaactgtggtaaccaacttctacataaaaccagaaatgtggcaatctcagcattattcctgatgacagtaccatktaacttggtattgttatgtagttttaattccttgcctattatgatttttataagtaactatgaattactttggagaaggcaatggcaccccactccaatactgttgcctggaaaatcccatggacggaggagcctggtaggctgcagtccatggggtcactaagagtcaggcacgactgagcaacttcactttcactttccactttcatgcattggagaaggaaatggcaacccactccagtgttcttgcctggagaatcccaggaatggaaaagcctggtgggctgcagtccatggggt

SEQ ID NO: 4185 - DNA, 600 bp, Bovine  MMBT03332
cctgtccaagttcaacctactgtcttctcttactggactagagaaatagcctcttaatgagctgacctgcttccactctgcccattctctagttttctatctgcaaccaaaatgaacaagtataaataccatcacctcctcttcctgccttccacaatgttttttcatgtgtattcagataaggcaaaatgtcctcactagaatccacaatacctgggatgcttcagtgctcatcgatgtgtactcttcatttaaacattgcactcttctaacagctagctctgttctggaaaataaaartacccctctttgtttctattcttctcaaatatgtcaagttctctcccactacaaagtctttgtaatatcatcctctctgcttggtatgatttcctttactcttcccattttagtcaagtrgtctcttttttttttttttcatatctcagtttaagcatcactttctgagaagggatttaccttatggatccctccttactaccacctcagatggtaaagaatccatctgcagaatgagagacccggctagataccttggttgggaggatctcttgaagaagggaatggcaatccattaca

SEQ ID NO: 4186 - DNA, 600 bp, Bovine  MMBT00802
tattttttctgtcccacccatctgtttattttagcttgtttgttctctcctctgctggcctctttatagattcctctgttcaatagtttaaactccatgacaatgctttgtttatcctctcagctagcacagtatattattccccatctgctatagagagggccccagtgccccacaaagttaactaagcccctcttgtctgaacaagtttttcagccatgcattcaagtttctaatctacccccatcttccctggttatgagtgtgacaatattatttctaagcaagccatgctcaatrgatctcatcttttgttcttctttttctttcaaatacctcagataagaagtaatggtctgctgctacagacgtaggcagtttcaatatcagtcactcagtaaatatttattgagtatttgctatgtgactggcagtgtgctaaggactgggtctatttccagagacatacaaggtacacagtccaaggcaccacaattttcctgatctcggaggacatgtagtrctaacatatatttattatgcagtcgctgcaatccaggaattgtgctagaaactgggaatacaacatgaattttaaaa

SEQ ID NO: 4187 - DNA, 600 bp, Bovine  MMBT00080
tatacacacattgagaggaaaaaatacatttccttcgtgttaaagtcaccaagtaaagaaatctctctaaacaaaaatcctctcaaattcctttccactgatgacttcctagcagcttccctttcatttaaaccaaacgtagctttatatctgcatttcattccccttctctctaattagataaatctgctcgctcttctctctagaaagattaaaaggttggggtgttttgtttttccagtatttcagcattctaacgctcacagcgctgggatgacagaaaggatcctttgatttagrgcaggcaggctccaaggaaatatatctgaaggaaaaatataacacaagcaaggaggactacggaaaataaacacacagattcctgtcaaagatagtgggtcactccagcaacttccagtccacggccctgaccctggtcccgcaaggaagcctgtacttacccagattggaagacgctcgcccctctgcagcccggtccttgagatcctcagcaatgcccagctgctgctcgtggtactgtttggccctctccaaatcctgcatgcacctggcagcgtggcccaggccagcgtaggcccg

SEQ ID NO: 4188 - DNA, 521 bp, Bovine  MMBT12521
gcctgcgtgttgcctggctccctctgctccgaaataaccacagggcttgctcactcagtagcaatgctgacagcattctcagcgactggaaggtagaaaacttgcctctgtggttcccgaggctaggatcagactagagcaattatgcagtgtttggcccaccttggggactttggctctcaaatggcagggctacgcagactaaactgaaggttgttttacaagagaccatcaaaatcctcatttgcatgtgtgacattcctgtggagaggctgattttcaatcaagctggctgggccygattacaaatccagtctgctagtgtgaatgtaaatggcatcagctggatctcatccctcccagttagcctttgccttctctgacccaatgcgtgctaagcacttcagttgtgtcctactctttgtgactctatggactgtagcccattaagctcctctgtccatgggggattctccaggtaagaatactggagtgggttgccatgatctcctccagggagt

SEQ ID NO: 4189 - DNA, 598 bp, Bovine  MMBT00893
  misc_feature (1)..(39): n is a, c, g, or t
nnnnnnnnnnnnnnnnnnnnnnnnnnnnnnnnnnnnnnnctagtggggcgctctttttgagcgcggggaggaaaatgagtgagtgcttagccgctcccttgtgttatgtaatcccgcctatagtacatccgaagccttagtgcgctgcagttagtttacaaagtctcctcccctggctctaaaatttcttcgggatggcgccgtgatttataaaatgggatggggcggaaaaagcttattttcgtatggttatatcctgccgcggtgggcgccatgtttatcccagggactattttctcyagattcttagcaccttctgaaaaggagggatattgttgatccacctgctttttctgytttcgcaagttgtcctgctttctytcccgtcagacgcgggattccttcaaactgttaataatactgagcgtttctttgcttgtctaggacattttcagctcagaaaaaggtagagctggaaggagtcttgttagacatttagtccaaatttctttttcgagatggaaactgagatacaggtgttctgtctcggaatagccgtcattctattgcagactgtggcccagccctctgcactcct

SEQ ID NO: 4190 - DNA, 593 bp, Bovine  MMBT04153
gtgaccctgggctgagctccctaacacccagctgcctggtgacctgcacacggtgtgctcttcagcgtgttgacatggtcgtagggactggccaatctaatactcatctttacatccttccatggaaaagtggattcagattaggatcaggcttactaatagtagacttactaataaacccagaaatataattagccgccttccccaaagcgacatttctcatgcaatgtcctcattcagggcatgtgactaatcagaaatctctgataagtagtgtgcattcaacatagcttgtaaackgggtgtcacgttgacattttggcctgatagtgctgaaacaggtatttccagctttgtcgaatcaaacttacaccctaatggatacttttggagaatgacagctgattcctcatctgcttaaatttccgtagcttctcttctctacagtagcaataaatgacaaacttcaggtagtcatttggttatccttgttgccttaggtaagtgagggataaactgctcagagactcatgttttccatatctcgtccttctctaaaggcacagactctcatcctttagtggccttttagt

SEQ ID NO: 4191 - DNA, 600 bp, Bovine  MMBT08554
ccaaatatttattactttttaaaatgtaacttttaagttcatatactgctacaattgatggcttcggatatgtttgtgcactggtacaattaataaagctccaaaacttacagtagcaaaagcattaatttgaacacattatctaccagaacacatgcttcatagaatgagagtaaatagtaattttttacttccaggttcagctaaataaacataactgcaaaatgacagattaaaaatgcttctgcttttacaatttgttttccttcctttcttgccttctctgtccccatctcccckaaaagcacctccaaagagttacagtaggatacagggacagtgtccacgaggaaggaaggaaagacagcttctcattcgtgcaggacaaatagctttgcccaaagcacaaactacatctaatcacagggtataactctgtcatctctcttttcataatctggccacttacacactttgatttctgacttccatttgggtttattaacatcaaagctgtgtcatcactttatctgtttccagacacatttttacctgaggcaataaagtataaaaacttctttgcattcttgctttactgtt

SEQ ID NO: 4192 - DNA, 601 bp, Bovine  MMBT03869
  misc_feature (1)..(1): n is a, c, g, or t
naggaacttgtgctgtcttcagtctactctctctgccccaccttgggttctagtctgcatgcatgcattaacagtgtccaggcttcctacagtagtcctgttagtcccaccatccctccaaccagccaagggggctctacttccctgtgttgtacaatatgcgattggaattgctcacttcccrgggagctactctgtccatgtaatctcccttttcttctgaatcccctctcaggggcacaggtcttgacctggtcacttctctttcctttctactcacttttatgtgaatctttcttayagccttggttgtataagagactttctgtcagtctccagttagtttccagtaagaattttccacatgtagatgtatctttgatgtgttcatggcagggaggtgagttccatgtcctcttgctcgaccatcttggtcacactcatctattgatttaaatgttaatatccaaaaaattccctcacagatacacccaaataatgtttgaccaaatatctgggtgcctggtagcccaatcaagttgatacataatgttaactatcacaaagaggtttaaattataaacaaaagaattgtcaaaca

SEQ ID NO: 4193 - DNA, 598 bp, Bovine  MMBT20998
  misc_feature (1)..(112): n is a, c, g, or t
nnnnnnnnnnnnnnnnnnnnnnnnnnnnnnnnnnnnnnnnnnnnnnnnnnnnnnnnnnnnnnnnnnnnnnnnnnnnnnnnnnnnnnnnnnnnnnnnnnnnnnnnnnnnnnnncggagggagttctctgggcccgcccctgggctgggcccgcctgcagcgcggggagggtggctcgtccgggccgctgtttgagtcccagaagagcctcaccctgtcccgcgcggaaactggggtctcagagctctttttctccacccacatccatagacttcccctactgtccttttataaatacttgrgaatataaawgtttttactccaccatagtggctcaaaaaaaaagatggccttttagaaagattggtttaatcagatactcatttcttctcccttcctaggtttttgaacatgaatccttcactcctcctgacagccctttgcttgggaatagcctcagctgctccaaaatttgaccacagtttagatacacaatggaaattgtggaaggcagcacacaggaaaccatacgacttggttggtaacatctgaaactgtccatctgaaaccctgcagagaatggtccatgctgttgggagt

SEQ ID NO: 4194 - DNA, 600 bp, Bovine  MMBT03244
caatagtctgtccctgtcccctctgttctcccagcacaatgcagacttctgcccacttttcatgagttactgccagaaaattagatttcaaacaggtgcagcctgctgattagcattataatagattgtaattacttaacaagcccgtatatacccagagggacttggagagaaacacaatgttttgccaaatgtagcttttatttatgtaaaatactgcaggcctgctccagagttccaagtgaagactctggaagctttgtctgcatgtgtttcaatgagctctgagttcaaccacgrgaacgtaaaatttcacttctcttctcgttgctgccaattacaaaaggtgttgtctctaaagcccttaggagaatttgaacttgattttaaactctgcaaagggagaacaagtggatcttttctttctccccctatcacagcactctgcaggggtcctcagtacccagagggtacacaattccgtccttcagaaacctcagaccatcattttgctctgtaatgggttatttggcatttggaacctttattttttttggtgacagttcccacttgtaaaaatggtttgacaaagacctactg

SEQ ID NO: 4195 - DNA, 600 bp, Bovine  MMBT08721
gaggggtgaggggacagtggaggagggtttgtggttycagggtgtggctgctggttggggacccagaccctcgggccctggtcggaagttctgcatggcttgaaattcttcaccttcctgccaggaaagcccctcacctgggtgatggctgtggttaagattacccaagagcaagccgttttaggactgcgaactgggtcagaggtatgaggaagggaagggctttttctaatccggggacagacagggtgtcaggagcatctgggtcccaggatttcagtggaggttgcctccgctccycttttgagcatcctccttttctctgctcctcygtgagactctcttaggaggatttttgctttcagttttgtgcaagttcctcatgcggttgcccgttgtgattggaacgattgtctttataaaagacacttgaaagtcaggttggaacaaggcacggtctctgcagaggatgttaagcatgttgactggaagcctgcctgccaggacaagatccctctgagaacaccgcacacaatctgctattgtctccggggatgagacagtgccaacaaaaaatgcgaagttccagccaagaggagg

SEQ ID NO: 4196 - DNA, 600 bp, Bovine  MMBT10762
agccagggaaaagcagagaatgcttcctggaggagaatgcctcaaagaggccaaagagaggtttacatggtagtcaacaaagcttcagggtcccttatttgcacaggtcttttccaaggccctgcttaacaatcagggaaaaatcaaagtgtactgaagatatgtactcttcactctacaaaaaaactgaaaatgccctgacatcttacagttcatatttgaaagaaattaaacagaggttttcccacatttgatcatagtcctaaaaatgtacattattgtaaagctgaaacttttctraactatcaatagtgaaaaacagatttctatcaaccatgctattaagaaagactgactaatatttctagtctctctacagaaaattgatcttatctcgtgcttcagtgataaaagccatcagacattgttccaagaccctcctcttcccaccactgactctctaaacctcccagtatctgtgttcatcttttgtctcattcctttctattacagtgaagggcctgaggacctctcctcctctctgaggcccagtaccccagatcccagccccccctttcctttccattctttgctttctct

SEQ ID NO: 4197 - DNA, 600 bp, Bovine  MMBT17014
gacattagcaataagcatcttgtgcaataacatcatacttaatgtaatattaacattatatgtagcaggctttaactgctcactggtttccccactggagtttaacatttttaacactctgtgctctgccacagtattcagttctatatctaatttacaagctgtaaaacacaatattcacagattacaataaatacaaagaagttctaaagatatatctggtggtgacaaggctgagagagaccactttttctaaaagtagaaacaaaagaaaatataaaacaacttatggttaccaartgggaaagggctaggggagggataaattaggagtttgggattaaatgatacacagtactgtatataaaataaacaacaaggaccaattgtatggcacagggaactatactcaatattttgtaataacctataagagaaaataatctgaaaaagaatatatatttatatatacatatatatgtgcataactgaatcactttgctataagcctgaaatcaacataacattgtaaatcaactataattcaataaaagaaaatctaggactaagtccttcatatgcaataactaatttgaaaag

SEQ ID NO: 4198 - DNA, 576 bp, Bovine  MMBT19862
agagagagcagagagaaagggagagagaagggaaagaaaaagaatatcacaggatttagagatggatttgatatagtcagtgaaaaggtccagaaccccctgaggcctctggcttgggcaaaggtattcgtttttctacgttttgtacaggttttcagcagtgagattatcagaaagaatgtgcatgcatagggagccgtagtcctttctgcacagtgcctagattccataaagacattttcccaaacccttgggggcaggaagggtgacagtcattcgcaatctgatgtcctgactgtygagctcggcttttctactgcatgaatcccgagactgaagtgcgcatcctgagcattcgttgcgcaagaagctgaaggctggtccctggcccgggaaggccgcctggccggacgcgcgggtcccgccctgtatgccgccctggctcggaccggagcatcaggtggggcccagggacccgtcattcgaggctgaggctcctctcctgcaccccacgggccacaggcagtccgtcgacattctggccggtggtcccagtgcactgcaggctccagctga

SEQ ID NO: 4199 - DNA, 600 bp, Bovine  MMBT01815
gtgattgtcaaaatgttgaccccaaaccagagattgtagaaaataataattgcagcttgtgtttagtttccatcaatgatcttaaaatctagagtggaaactcttgaaaaaaaaatcaagtttgactaagaagactaatatttgcataggtccaaatagttattttctcataaaagtaataaaactttaaaaatgagtacaatgatccagcaattattttctggagaactttttcctgaattttaactttttaaaacatttagagttcctttagtatttaaaaagaggctggtgatgtgrcatttacaacagtttggagatgatggtaaatttaaaacaaaaagacaagaagcctgtagtacagaaataatgaaaggctgtccttaaaagttcagacaataaaaaccatgagaaccatagataacacatgtccagccattcaacatagcccattaaaaagtgattacagagtcataggaaaggatgcacttcgactaaatgcgagctttgtaatgatccaagctactgtcttcctaatctttgcagtggcctactagaacaggagagaagtgatcttttgcatatcacaaacatctattg

SEQ ID NO: 4200 - DNA, 600 bp, Bovine  MMBT02410
accctcccttctggattcttatcaggatgrtatttctgggcaagtctgaagtaagcttttctaattttgctctcatcatgcctgcaaaataggaaaactgtttcatgaattgagtaacrtgcaagaaaaatgtttacacaatcatctaaaatgattattttaagaaccttacttttattgtgtatgatcatatattaggcacctaattaaaccagtaagactaagtaaggttattcttttttaaaaaatatcttttaaatttatctattttaattgaaggataattacaatattgtgatrgtttctgttatgaatcagctattggtatacatgtgtcccctccaycctgaaactccctcacaattcctcctcaccctatctccccaggtctacacagagcaccagctttggatgccctgcttcacgcatcaaactctcactggttatctattttacatatggtaatgtatatgtttcaatgctattctctcaaattatcccaccctcttcttctgctgagtccaaaagtctgttctttacatctgtgtagtttgttgccctatatgtagggtcatcgataaagattattcttatgtatta

SEQ ID NO: 4201 - DNA, 598 bp, Bovine  MMBT03411
  misc_feature (1)..(116): n is a, c, g, or t
nnnnnnnnnnnnnnnnnnnnnnnnnnnnnnnnnnnnnnnnnnnnnnnnnnnnnnnnnnnnnnnnnnnnnnnnnnnnnnnnnnnnnnnnnnnnnnnnnnnnnnnnnnnnnnnnnnnnaagaaaaaaggctatgtttttggcttaggagagttcagcttcacttcaaatcagagttgaagctattttctctgtactgaatccaaatcactcaaattcctgaaattcgtccatggttattgtctacctggtgccaaaatatcctgatgaaaagtgcaacattcagccagttgtgtggattttytgtcctgaaatctcaaagctcagctatttggcaggatagcacaacagctgagcagtcaaccaatgcttctgctrtggacagaggagctgaagaattgtgcacataaggccttatgcaaaaatcaaaatgcaaaagctcaatgccaatgtcccttatggctgaccaagggatccacagcattcgaatcatggaagtttggatcataatgaatcctgtccaactgcctctgtttacagattgagaaattgaggcaactcttattcatcctttaaaactttgatcaaatgccatctcgtct

SEQ ID NO: 4202 - DNA, 600 bp, Bovine  MMBT07017
ctgctcttcagaaggcagcttgctgctgccccaggccctccatgtctttataattaggttgatgcccacaatgatttgggtacaatgtttctccaaatgccttaccttccaggatacttagaggattctaatcgttcccttttatcacacctaaaatttcctttccatgggcacaactccaggtttctccctaataaatgatagcatgactgtgccagcaatcactacagcaggtgacgtgaaaagcaaagggagggggttgttttgatgaggggtgaagggttgaacacttgctgtcartgtaaggcagtgtgatcctggcagctaggaaaaagaatctggatgttttaaaagcaaaaagagtaatgttggcccctcttttgtctagatagatgctgcctgttaaagccgagacgtgcaggtataaacagacacatgtagacacccacagtcaccaccactgaacatcccacatgccctgtttctgcctaagtggargaaatttataaaacagagactaataaattattcattccctatactttggagtccagtttagagatactgtaacctcatctttcacatttagtttattttttc

SEQ ID NO: 4203 - DNA, 600 bp, Bovine  MMBT19280
ataggaggagaaacatatcctaaggtttcaacatttattttctacagctatagccaaattcatttcataactggccatgtatcatgaaaacacttaaaaaatcaggaatttgaggctccatttcagaccaggaggagggagcccaggctatacatatcttttttaaaagtatatcagctgattgtgcrgcaaactacatatagatgctagggaaaaggatttactgaaacaacacaaagtgataaacacagctcccacttttcacatattccaatggacttatttcctccttcaagagtrtcacaactctgaaaaagctaaaatgagtaccaagtggattttttaacagaaaaatcaaatgtgtctgaattctcataaaactctacaaaaggcttccttgcttaaatagctatttctcccagttgtttctgattgatggataacttgctcttatrttcttacagatgtcttagctatttctgtcaccagtaacataaaatcatctgcatataaaacctttagcaatatgatgcaataatgaatccactgmaatttctgctggactgtgttaaaaaaaaaagcctcaagaaaacaaggtca

SEQ ID NO: 4204 - DNA, 600 bp, Bovine  MMBT16634
gcaccagatggtttgtctattaaccatcctcactgacaaatatttataggtgcctaagagattcgtgcttctgtaatagattttggttggacaattccatcccacaaggatttcacaaaccaatgaccctctaaagacagcatttgtttctgttccttgcttgtgatcactttttttttaaatatgtcattctttaaggactcattgtcatcctttttctttgtaccttatacattcattgtactcctcaccagaggagttgcgttccagtatttttttaaatgtgcgtattaatttttstgttacctaaattagattttctttccagtatgaattttccaatgttccaaggctttagagcagttttccacgtataatcatgcagtaaacttttaatcatgcartagacctttaaaaagatgttgggaggaaagatacagtgactccattctgatttacactgcatattcttctttattttgtttgagtcacatgggactgccctagagtgcttggctgatgtttggagacactgggaggaaatcaaaggagccttgcggaaagcaaacttcactgcctctttgcagagataaagggaat

SEQ ID NO: 4205 - DNA, 600 bp, Bovine  MMBT17640
tcagctgagggtaaagcagggagaccagcttgaataaaggcagagacagtgggattagaaaagaggtaacagagaagcataaacagaggcaaagtctttgccactactgatgtcttttgaggaaaagaccaacagaactttggggatgaaagtcaagaaattcttcagaggcaggaggatggtgaaatagcgacttactgggtaaaaagagctgaatggccctctgctaagagtgcagcagaaatcgatggagaaaagttacacagcagctcaggagagctgatgggtgctcccaggctrgaaggtggaactcatgctccttttccatgactgggctccagagaagcagttgcagcagtgatgcttaaaatttcaagcctattggctgctaccaattaattacaaaaatacaaactgtaaggttccctctactttacaaaccctctttatagtctcaggggcctcagaatcatccttattttagtacacaacctgaaccggggttgacacggctgtcccgccttggtcagaaatcacgtaataatctaatcccaatcagtttttttttttcaattaggaaaaaaggttagaaaggaaatc

SEQ ID NO: 4206 - DNA, 600 bp, Bovine  MMBT22291
ctatcgtttttcaccagttaatttccagttccttgttcattattgcttttaatttctgatytccttgaagatgagcaaaacctggtgaaagtcatggaactggtggatgctgtgtatggtccgtacaagccctaccagctgaagtatggagacatggaagagaagtaccttctcatccagttcagcgaggtgcctctggtaaggkcacagcactgccggggccaactgggcatcactgtatctgccaggctagggtcrgggtggctgggatgcttcagagaaggtgggagccagcatacrgaatgcagagagtgggaacaggtgtgtaaaacatgggctttcagcgcttcctgggctcttgtaatccaaattaaaacgagaccacaggtctgctacctggtttttatttaaaatccccagtaaggacctcgcacccctcagaggcttaaatcttctcaagattaagttggttttctccctgagtcagtcatgattatgcagtcttttgttcaaggcagatatgcaaacagacactggagcggagcactcaaggatagtgctctcaggccaggttcaccaggtggacacaccagaggggaa

SEQ ID NO: 4207 - DNA, 598 bp, Bovine  MMBT01816
  misc_feature (1)..(96): n is a, c, g, or t
nnnnnnnnnnnnnnnnnnnnnnnnnnnnnnnnnnnnnnnnnnnnnnnnnnnnnnnnnnnnnnnnnnnnnnnnnnnnnnnnnnnnnnnnnnnnnnnnttttctcgttatattgtatatttgatttttttaattttagtcacattatgggacttcactttcagatagaatttctgatagattttgtgttgttgcatttctaaatactgacttctattttttgctctttttgatgttacttaacataaccatgaaaaaaacctggctgttaataatttttctgttccagtgtttccatctatrgttccaaattcaatatttattcatgattttgggtttcagcctctgttaaattacttgaagaatcttggactcagttttgacaactaaatcccagactccacccaagctacactctttttgggcggctaacgcactgttgatacgggtatggctagtatgccctcagccacctgtgactcatgcaagaagcacctaatttaattgtcttctgcttcctagataacctcagacaaatatctcaagaacttctccctctaacacccatctcataaattttacacaaagttacatacctttg

SEQ ID NO: 4208 - DNA, 598 bp, Bovine  MMBT08968
  misc_feature (1)..(17): n is a, c, g, or t
nnnnnnnnnnnnnnnnncttggtctcgtcctcgcctctggtgacctcgagggtggcaacctgctgctcctgcgtcaccaaagacaccgtggcttctgctgcttgaacagctgttgtcatctcttgagtgatgatgtcttaaaagcgaagaaacaacatttttaaatagactaaatccctatacctgaaaaagtcactatataactaataatttaaagaaaagcagactgtcatttcagggaatgagaaggcagagggatggctcagaaatgaactgccagtaaataaaagtttccagtgytgctgttttcaggagtggtgaatcaatctaagaagtggtgaatcaatacaagacagagataaagacaataatacaaaacacataaaataaaatwtaaaataagaaatcaagttaagtttccctttatgaatatcaacataatcagtttatttagaaagacattatacagaactaagttcaaaaactctccgaagcatttatatatatcaatattcacatttgcatccctgaaggggacagaaagttggcattttgaattaaaggaatactagttacaataactaatgtttactgagtt

SEQ ID NO: 4209 - DNA, 600 bp, Bovine  MMBT13003
gaagaacactggatgctaagtgtgttctaagcaggaagaagtgcttacctcttccctaagaggtacaggttgattgtaagatctccttgtctgagaccaagtattattttttaattaaaaagaaaaagaagccccacctctgctccggtcttggcttcctctttaggctgacccacagggctaagcggcttggctctcccttcggccttcccctgtgtgttcctgggccccaccccgggcctcggggcgggagacgtgctcatgatgggtttcacttgagccgcgggtgtggaggagcakcgactggtactcatctctataacgtgagacggcgcgatcggtaattcacgcaaattactgtttctcggagcagttggctgcatttgctgcattggtcgcttggtcacattctgagaagtagtgttctgtcacaggaagaaagaaattctaatcacaactggagactcgggagaagaaactgggcacatgagattaatctgactgagtgagtgacttctcttttgggaggcggacactgtccccgctggtaaaccttttcttcctacataaatgtctcttgttctatgtagcagcatagcc

SEQ ID NO: 4210 - DNA, 600 bp, Bovine  MMBT17961
gcagaggcgggcatggacgatgccagaactgtccacagggtgcaggaccaaggatgcaactgactttggtcagttttggggcctcctgcacttggctcctttgggggtttcagggttctcagggctgatgggtcccgcatgaagagagtcatgactgcattctgtccacctgtgggttttcacacaggcccggcgcccagctgcctcttggcccagtcttcatcttgggctacccgcggtaccctgaaaacacacaagacagggaagatgcgttaactcggcttctccccacagaacacsgctcgccattgcagccgtgattaaatacaggacattatctcaccataatgccctcctggccgtgttcccaggaaaattctaactaatcataaaaatagaaagaaaaacgcaacctaaattccattcctcttcttaaatgagtgatgtgttcacttttatttatttttctggaagcgaggcgggaaaagaaaatgaattttagggcttagaaaaacaagctactaatagtactaagtagagsagggtggtggtgcagacagcgggatgtagcggacaggccaggggcaggtccggccctac

SEQ ID NO: 4211 - DNA, 598 bp, Bovine  MMBT19861
  misc_feature (1)..(106): n is a, c, g, or t
nnnnnnnnnnnnnnnnnnnnnnnnnnnnnnnnnnnnnnnnnnnnnnnnnnnnnnnnnnnnnnnnnnnnnnnnnnnnnnnnnnnnnnnnnnnnnnnnnnnnnnnnnncaaaataataccaaaaaagtaaaataatttacaattaatccttatttaaaaaagattatgtcacaaatatcattttatcatgcttttaatttcatgtgaaatatcagtgtccaacttggtgcttttaatataataattaaaaaaatgtttttgatwaatatataataaacaaaatcttactttatcttgtgctrttctgtggcttgtattytttttgttgattaattcttctttctcctgctgaaatttttccagtgttgtttccaaagggcttagctgctctttagcatcctaaagatataaaaaatataagaccttatataatagcattacattatcatatttcacacttcatagttataataaaaccactttctatgtaccaggctttaaaaatcatttaaaagattaaatcattcatttgctcctttcaacaaccctatgagaaaagtaccattattttcatgctaaatttcagatgagcacagaaat

SEQ ID NO: 4212 - DNA, 600 bp, Bovine  MMBT18482
gctcctcttccttctgccaaccactgtgtgggagtctgggggctgtgaaggcaccctgaccaccccgcccgcccccaggtgatgaaggccatcaatgacggcttccggctgcccacgcccatggactgcccctccgccatctaccagctcatgatgcagtgctggcagcaggaacgcacccgccgccccaagttcgccgacatcgtcagcatcctggacaagctcatccgtgcccccgactccctcaagaccctggctgattttgacccccggtgagttctgtactttcggtccagggcrgtcccccaggcatcctcctgagccgcttcagcgtggtgggcagcgaagggtgggggtgagggctcagaagtgacacgtgggcgttacttagcctggaccagggtggctcaggcggtactaacggaagcaatcagcatgcgtggtaaatgggttggcccggcgcttagtgtgttttaactcatctagacggcttaggagatggccctgtaaccccctttgtagatgaggaatcagacacggggcacttaagtgtcttacatgctggcaagtggtcaggctgggaccacggctctgaagacc

SEQ ID NO: 4213 - DNA, 600 bp, Bovine  MMBT04986
cttttaattgatcttagaatttctattgattttctatactcttaaaagtgagaactaaatctgtaaattagctgcatatttaaatattattccagttactacaacggtataacagataaccacaaaatttaatggcataaaataatgagttattatgctcacaaattctaggtcagtaattcaagaaagacacagttggttagttctcacttaggactcttttgtaatgggagtcagattagggtgacattcatctgaaagtttgactgtggcttgagggcctacttccgaagtggctcyctcagaggtgtgacaagttgaccaggtgctccagttctctccataggggcctcttcaaagtatggctttggtgtcctcataatatgtgcctggcttctcccagagtgagtgattcaagagatcagaaaaccttgagagtcatacactgttgctcctatattctgttggtgacacgcagccagtctgaattcatgagagacaatgacgcaaggatgtggataacaagggatgtggatggttgtgggccatttcggaggcttgctattcggaggcttgctaaagcaaatttcattaaatatt

SEQ ID NO: 4214 - DNA, 600 bp, Bovine  MMBT20916
aaccaacatgcaagaaaataactacttggcaaatcatttctgggttatccagataccattcctccagggaggggattaaaaaccctctggctcctctcctgcctcttccatccccttgatgtctatagaacttgctgtctttggcagtggagactgagtacagtgaaggagtaaagccccatgagtttgtctgctttcttcagcttttgctaaaggctcagagacgaggctgaaccaagaaactgaaatgaaactttttgattatctgtgtttttccaattaatcctgctccccactaarggatcatgagttggctgcatcactgtgtccctaagtgatgaatccccatttgccagctggccatgcatgaaccggatggcctggcatttcatttcttcctatccagtaaaatgagaaaactcaaaccagacactgaaatgtctttttcttttattaaaaacatttctcaattgtgtagctgggyactctgagagtgaacttcaatatttctgaacctctgaatgytggaaacagggaaaaaactaccattcaaagaagtgccagacaattacataatctgtctctgatctatggttctca

SEQ ID NO: 4215 - DNA, 600 bp, Bovine  MMBT02526
cctttgagttccgttgaggtgtgaaattttttttgagataattacatttaggaacattagaaagctgaactgttagtgtgaacttaaagatttgaaactgagggctaacagaaaacccaacttctgtggcctgtcgtaactgcttgtccaagcagaagtaaattgcttaaaaaaaaaaamaaaaaaactcaagcactaggaggtttgaaactgcagtgcatacttttacattcctgagaggatcagtgaagatagcaaactttcaaaatgcctcccttgttttgatttcaaagaaaatayaagctcctatgtgtcttactgatttgataaaaggatttattattttgtttgctgcagtgaagcctcggactctgtttattagcttgactgtattcaggagtagttaaaggagttattttggacagtaaccgtggttttgcttaaattgatcaaggaagtcttgatttgaaaacagtagctctgtactttgcactggaaaaaaattgctttgtttcctttaccttatctttgacagatgagatatttcactttagaatctgctctcttttataaagttgacagcctgtgagttgttaggta

SEQ ID NO: 4216 - DNA, 600 bp, Bovine  MMBT19687
gcctgtgacttgctctcttctgaacttgaaatgactgctgatgagctcacagtaaatcaaccacagcaacgtgtgcgataattagtaaaataaatgtgtgcttaagtattaatgaaataaatatttagcagattatttgggatctttgttctagcctcaagtgcttaaaaaataatgagaggcttattaaaactttaaactatgactggttttcttttcacaatgtccccgtctccctaaattcagaaaagaaaggacctgtgttctaaagagygtggcttgaccgacagaactgaatcygaagacggtgatcctggacaaggtgggggctgccttgatccgtaagaatcattatccagccagggtttggtcctggtggggaaagcactccagctaccaaaaagaagggcttggaacagggattctgggccccacaagatcactgggtcggaactgaatccartcccagaaccacgcggcacgctgtgccctgaggggtggctgctgctgcatggctgggaactccaggatacccctctcmagccctgcaggagggctcggggggcgcctggaaatgagaacagcagccgtgggccagtg

SEQ ID NO: 4217 - DNA, 600 bp, Bovine  MMBT12187
gtgttgccctctctgcattttcttctccctggtactgagcacaggccttccacatagacacatgcattggctgcctggaggtggtggcacayrcgcaggccttgaaggataggcaaaagctgacgcagaaatgggagggtgaggcaaagggaaaagagtgccccaagcctcggaragaacaggaacagcacttgtctggggaacttggaaggagaggygacctggcagtagaggctgcccggcacacacagcattcatggggccacagcaggaagtgggctggagtactcaggtgtgtcygactgtatacatggggccaaatggatctccartcyctgccttcatgggcccagtgccagcagtaacagcctgtgcagagggaacacttagctgtgtcatacagtcgcatcactcttagtgacacttgctgaaattgatgaacgctgcaggcaccatgacatagacgagactgtaacttccagtgctattaagctgctcaggcagtagcagcagcaagcctagaacacatcaatcagcagggaagttgttaaagatgcagggtcagggtcaggggcacttagccttggtggaatggggaga

SEQ ID NO: 4218 - DNA, 600 bp, Bovine  MMBT19229
ttacttcaggataagaataattttttcttatggctgaaataagactttaactggggaaacacttattttcacatgaagataaaagtgagaaagaaacaacattacaatatattgctggattagatcaccgtttcagccttatgtcaaagtatctagagttgagactattttcaaaagttctattctccctccaatagttgatttatttgcaatctccaaagtaatttcatctttaatatctccctatactatcacatcccttgttccttttmcccttacttcctcaataagtggtacttktccagtaattccatttactagtagctccttctttaaatccatatactctgtcttcagccatcactttttctctatgcctgtgtctttaaaaataataaattatccaccttctaaaattatctatggcatctggaattgctgactatccgttcctttaaatgcttagaatcttggtggtggtggtggtttagtcgctaagttgtgtctgactcttgcaaacccacggactgtagcctgccaaactcctctaaccaggctccaagaatactggagtgggttgctgtttccttctccagctta

SEQ ID NO: 4219 - DNA, 600 bp, Bovine  MMBT08764
ctctcatcacctctaattgtttgattcttaaaagctctgacctcttacctttgcagcttcttgctcaactctgccctcttcaattgccatgttgtccattgcttgtaactctaattttctatttttattttatattctgtagcttggtgttcccacccatgtttaattaatcatcagttcctattgattgctcatcagtaactgattctcccctggaacattgcaatagcctcctaactagtttctctgtacccactattggtaaatattactaataacgatgccaaatgatgccttacytatgtgagtatactgctgaagactctgccatttcttctcattgcttttatgtgaaatttctaagtcctaacaaatggaaagtttgtcaccactttgttactccagcttagttaagtattcagacatcatcttcagggaatttttttaagccartgagtgggtttttgttatcatattgctttacacacattttttgtacttcactttcatatattacaacaattagtatatcattttctcattccatctagaacacaatatttatatattgaatattttaattaaaaatttaatagctaa

SEQ ID NO: 4220 - DNA, 600 bp, Bovine  MMBT15372
cattcaaagggtttctccccagtgtgtgttctctgatgctcaacaagagaagactttgactgaatgttttcccacatgctatatattcataggacttctctcctgtgtgttttatctgacatccaaygaggtgtgagttaccactaaggttttcctacattccgtacattcataacatatctcttcagtgtgtgttctctgatgtataatcagttttgactttccatagagggttttcccacattcagaacacacaaagggtctctcctgtgtgtgatctctgatgttcagtcagtgtcyacttgtcactgagttatcccacattcagtacattcataaggtttctctcctgtgtgtgttctctgatgcacagtaagtgctgacttcacactgaaagttccaatatttttggaacattcatagggattcttccctgtgtgtatcctctgatgtgttgtgaagtatgtatgttttttgttgaagagtctgaaacatcgattacattcatagaatttctctcctatgtgcgttctctgagtatgggtgaggtgagtcttgttgtataaggcatcctacactcagtgaactcataacgattct

SEQ ID NO: 4221 - DNA, 600 bp, Bovine  MMBT17353
ttttaccccctttcatatggaaattatttccacaatatgcaccatcaatattcatcaagtatcacaccaattaacaaaccgtgaataatctggaacaaaaatttaatgcatgaaaacccacaaacatctaggtggctgttaataaggctatgtttgaggtaatcacacacaaatttaattttaaatatacttcccttaaggaaggggtatcaatgttaatttaagaatttaatttgtatgttgttttaacaaaatgtctttcaaggaatatgcaaaagcatcacgccagaaactttgctyatgaacccaatattgaattttcttttatggaatggaaatagactattcctgttatatttatataacttaatacaactcctttgtgaagttcacttaaccctatagtatcaaagtatgagacaagcaatacaaattctttgaatagatacttcataaaatgagtaatttcgagattagcagtaaaasagcactttgttttcatggaatattaatatttagttaaggcactttgagactgatcatttctagaagtgagcttacactgatttttaaatttatatatagtctaatcagctttcc

SEQ ID NO: 4222 - DNA, 600 bp, Bovine  MMBT19306
ggttgctagggttatggggaggaagagataaaaagggagagcaaaaaggatttttagcacaatgaaaatacttttcatgatagtataatgatacatacatgtcattgtacatgtttcaaaacccatacaatatataacaccaagggtgaaccctgatgtaaactatgcactttgacaggcatcatgatgattcaatgcaagctgatcaatcgtaacaaatgtatcacgctggaaagggataccaggggtggctgtgtgtatccaggaacagctatgcaagtgtaggggcagaggggacaygggagttctgtatgatgtctcacttagtttttctgggaacctaaaactactctaagaaacaaagtctattaaaaaagtgaaaacctcaatggttaccatcacaatttcctaattaccaaactttaaaatattagtgtttacatcttatattcaaaagttatattaaaaagtagaggcattaygttaatgtgttatggtttatgaaaatcagcataacaggctatcagactatgcaaacttggcctctatctgctaagaatgtacactatgtagaagttaaggcttgaaggcctgactaga

SEQ ID NO: 4223 - DNA, 598 bp, Bovine  MMBT02623
  misc_feature (1)..(163): n is a, c, g, or t
nnnnnnnnnnnnnnnnnnnnnnnnnnnnnnnnnnnnnnnnnnnnnnnnnnnnnnnnnnnnnnnnnnnnnnnnnnnnnnnnnnnnnnnnnnnnnnnnnnnnnnnnnnnnnnnnnnnnnnnnnnnnnnnnnnnnnnnnnnnnnnnnnnnnnnnnnnnnnnnnnnnctttggaaatggcaagagaaagtgcatagagagagcgagaatgataagatggttacagctctgcatggcaacagagaggattgtggtgatcttgggaaaccgctaagaacaggggtaatttatgccgtcacctttcygagggtctcacccggacatgattgagcagcttgaccttcctatagagggcactgttgatgtcctgcacgttgaagagagggtcgttccagatcttaatgagcaggtccttggagaaattgctgacgtagtacttgctgaaatcccacttgcgcagaatgcggctggggataaccatctgggcattctcgtggcagcactgacagaagtacttgcccaagtactcacagtaccgcagccgcttgatgtagtctgaaaaaacagaaggtcaasaggtcagaggcggctttcccaattata

SEQ ID NO: 4224 - DNA, 600 bp, Bovine  MMBT04224
acctgtgagacaattagaaaagattgatgtctacatttgtttatttaagtgggctgtttttacatcattcttggtaagaaaacctgttgcaggtaaaaagtttacataaacacagaaaggttggaatgagtgtgggatgtttgccaggtggagtggcccttgatcttgagcaggaatgtgaagaccagtgatgaaacgtgctgcccagaggaggtgctgcttgtctcttaggcattggtccttctcttgagagctggaaagcttaggaagtgttataccagtgggttcaagaatgagttrtacgcaaatgtgtttcatgatatgatattataacaaatttccagatattaaatattaacaacgttttgaaaacaaggggcaaaggcaacttatgttaagtaccgttaagattgaacgatgaggccagtatagacctagttagttatttgtcagttcattcatccaaccagtatctttctttttctttttaatatttaggtatgggtgtgtagggtcttagttgtggtgtgcgggtaagtgtgtgggctctatagttgtggctcgtgggctgtctagttgtcacatgagagttcagttgcc

SEQ ID NO: 4225 - DNA, 487 bp, Bovine  MMBT05033
gtgagatacacaaatagtgtctggtatccacaaactcagaaggagtaaccagcaaacttactctgacagatggtttcatagtcagcaaaagtcacagaatagttagaactcagaggaggctgagagacctacaagagcccttaactctggcaattctctgcactcagggaaaccacagtggaaatgaggaggctagacaaacccacatgaaatattaaccaaaacccttccttgcttgttctctgaacactgaatgagtaacaggcaggcatataggaatttagagcaaggggtaaacaygtggactggattatctcagaaggctttatgtcagtttcatatmatggaaaactataaatatcgagatttcctggtaaatctaaagaaacgctgaatgaaacattttgttcatgcgtggagaaaacatttcaaaacttcaagtgttagatatttgagcattttataatttcaaacttaagtgagtttg

SEQ ID NO: 4226 - DNA, 600 bp, Bovine  MMBT17086
tcccaatgcagggatcgaacccaggtctcctgcattgcaggcagattctttaccagctgaaccaaaagggaagggactaaaagcatttgtcttaagtgttttcttgtgaaaagaaacattaccaaaattwaaaaaaatacattgttgtaatattgactatagaaagcatagcaataattaattaaactccaaccacattttctatcagttctgtttttcctttcaatagtaattacaagacatggatggcaaagacagggaaaattcctgaagctgtagcagctgggtctttgttgaatrcctgttggcttctaaattgcttctaggtctgtccctgctggtggagtgcctaagtttagttgttcttcagaaaactctgctcaagatgtctacagggaattttttgtaaatttaaagaacagtgtccttctttggaaacatgcaataattttagaatcttgtgatattatattgtaagacataagccaacagtttacacatccctgtccaggaagctgaataataagtaatcctgggaatttaaacttctattttaagcctctgtaaaggtactctcatttcttttgtataaattcaaaa

SEQ ID NO: 4227 - DNA, 600 bp, Bovine  MMBT17645
agagggttcggtttcttatcttcttcttcctgctcaagctgcctacgtggaatttgtggcttacaagatacccgttggactggctttaggctgataatatcacttccttcatgttttcttccacatctttttttaaaaagaatatatttatttttggctgcgctacacaacatgtgggatcttaatttcccgaccagagatcgaacttgctttccctgaattggaagtgcggagttttaaccactggatcaccagagaagtccttccatgtcttattttttagaactttttggtaactcytttcagtgagatcctaaaactttcctgttatggtttagttgtttctccaagtatttatttcttctggcaggaatcaataagagaggtacttctcatgactcttggctgcaagttgtgatgtgtcattattgacagcaaccttttgagcagcatggatgatccgttatttttgtgatgaagaaatgaggggtaaactttgtatttatggatttaatgtaaatttcggctgatttcatctgagtcttttgagagccttttatattctcctccactgtcttgctggttgggacttggaacttt

SEQ ID NO: 4228 - DNA, 600 bp, Bovine  MMBT19857
tggacagatgtgtcacagctaggtgctgcgcaggggcataacagggatgtggaggctcagacctgcccactgccgtcttgggccttttgtgtggccacctggactactgagagacaggttcagtccatttgccatcctgcccattaaacagcaacataacaggttggccgcacttcagttgggaaggattcctgctgcctaccacctggccactgcttcagtttgaatctcagctctaccaatttattaattgcattgcttaagacaaactacttagtttataaaagtttcagtttcctycttgtataaaatggcaacaatagtgcctactaaagatcattaggagggtcaaaagagacaatgagtgtaatatctgctccctgttctgtgaccttataaataaagcagcgtgcccagagagaggatgaacgtccccagttcctctacttggcattaggtaacatccgctcttggctctgccacttttcctacatcatcagttctcccctcttactaggtcattcccactggtgtattgacatgctccgtatagacctcatctaaaagaacttccttcacttcatacctgccttcagctat

SEQ ID NO: 4229 - DNA, 600 bp, Bovine  MMBT20161
gtgagtaaaccagagatagaataagagaaattatccagtgtaaacaacagaaagaaaataggctggacaaaaaaatgagaaagcctcagggacctgctggattacatataacagaagatctacctctcattaatggaactcttgaaaggagatgataaagcataaggataaaagcatatttgaaaaataatggttgaaaaagtcttgaatttggtaagagcaacaagataacatattcaagaatttgaccaaactctaaacaagataaaactcaaagaaatccaccacaagaaacatcayagtcaaaaattttaaaactaaaaacaaaataaaacaaaaacaatttcaaaacatcaagagaggaatagcatcttatctatacaggaaaaacaattcaaataacagtgaatttctcatggggaagcatgcaggccagaaaaaggtgacatttttcaattactgaaagaaaagaactgtcaattaggaatcctatatccagcgaagatatccttcaggaatgaataagaactcaacactttctcagatgaaagaaaaataaggtattatgctatcagaaacttatactagaatggctaaaga

SEQ ID NO: 4230 - DNA, 600 bp, Bovine  MMBT01039
gtacgcccttaatgaaggaagttatgtatgtagttttcaagttttattccttcagtggacttagataaatgaacctcaacatccattacttccaaagcataaaatacaatatgtttttgacaaagcaaatgcatgatccaggtcaaattctaacatgagctgacctgtagacatatacagattttgtttttctaaaaacaaccaagattagtatatagctatatatattataaaagcatcagcagctttaaatgaatttgactttctgggcagtagacttaaaagcagctaaaacatatstcttattatagcttaatttacatgtaaagttatgtaatggctgtattgcaatgaggcagtgttattatacagcaaattgtctgtgatagtttatatctgctcaaatagctccaacattgttttcagttcagttcagttcagttcagtcactcagtcgtgtccaactctttgcgactccatgaatcgcagcatgccaggcctcccggtcaatcaccaactcccggaattcacccagactcacgtccatcgactcagtgatgccatccagccatctcatcctctgtcgtccccttctcctcc

SEQ ID NO: 4231 - DNA, 600 bp, Bovine  MMBT00869
stcaactttttcttcaaaatatgtcctttcctagaartaggtgccttagaaagggatctcaacaattccatcctcggccccctgggtgctgggatagattaaaggagtggctcttttgtctgattgtgtgcatcatcttattttcctatttccagatcagtgaagatcagacacaaagactgctggggaaaacccaatggcatttctgtaatgccaggtgscacttgagggagactagttcaatccttagcccaccctgagcattactgcatccctcttattacatcattaatctatctstttgtctccttccatagactttaaactccactaaggacagcggtcatatctttgctttgtacccactagtccacttcactctgtagatcctcactgagagtttgttttattaaaacagtaagaagtttattacagagagcttaggaaacacagataaacaaaaataagacaataaagtcacctgaaactccaccatccagacataacaactggtaacttcttgaaatgtatcttgccagttttcaatgagcagattaataaatgatgtttaggaaataaacaaataaggaaatactgctt

SEQ ID NO: 4232 - DNA, 600 bp, Bovine  MMBT02799
agaagtttacaaagcaacattaaaaagttatgtatattttaatatggagaaaaaattattaatattmaactagattctatgagattgaaatttcattttagttatagttttggtactctggaaggtacattaattccttaagacaatgttatgtattcttcaactgtttcagactgaagcatatttatataactattacttatktccaatataatcatttttttctcctctgaaaagttgctgatttctcctcactctkatggcaaacatgtagtaattattgataagacattcaactaragaaaaacattgctaaaaatattatcatgattcataattaaaaatctctttctgggtatcctagtcaataattcaaattccctgcagcattygtttctgccattgctatttttaagacttacagaagcctgctgatcaagacatagatttacatattttgcttttaatgtattattgcttcatttctcttatattctatacctttgtgtacaaccatccatgttgagaaaactctccttatgcagtgtagaagttggaaacaattcttttaattatcttttgtgctgaatatttgtagct

SEQ ID NO: 4233 - DNA, 600 bp, Bovine  MMBT02849
cttctaaaggagtttcatggctggtgccagaagaaaaatggaaatttgtggctgagcaggtatttttgccatcggggaggtctggttaatgcataagccagacgaataatgcacactagagaggaggtaggagactgaaatgggcagagaaaaaaattgatgttaagtttttcttgtcttgccttaacataggaattttatttcgttagttcagagcgttaatgagaatgacactattataggagtttgttagtgaaaggaaaaaaaggattacccagtggggttttagtacctatatcrttttttacattaaaaaagttctaaagctaatataatatgttaatattgcttaatttcagaagtggttagatarttaattgttaaacattttttttttttactttcatttttaaaggttttattattgaatgtgtgaaggcttaatatgcttrtggaatttctttctcttagtggggaaaaagaagggaatttaagtaattctttcatcaaaaatccctttgagcttttatttgtcaaacttccttcttcctcgttatgggatttagttaacctcaaaccatatttacttctgtggtttca

SEQ ID NO: 4234 - DNA, 600 bp, Bovine  MMBT01606
cagatgctagaactcaggcggggcctctgcatgcccaggtcacttgctgagtgaggagtacctgtgctcagatgcactttaaacgtcttatcaggtcacacgagcagggggcttaggttttctgtccctcctgcctgagccagccagtgggttgtgctcccccgttctctcgcggtgctgttctcttagggggaagttactcgtggcacctctggaccccatctgagggtcccagtggggaagcatggtgttccctgcctgagtgttctggtgggtggtacagtctctgagactctgctrtggttccttggtcctgtttgattcaggcccatagttcttctttgggttccttctaaaataattgattgcattatctgaaagtaaacatctgtggtttttttgcatgtaagcatttataagttcctttacacacacacacacastcctatatacttggaatctcatgtgatttaaaaatgtaaatacagaactgagtgaggaaagaatgagaagtcttgatggaggaccaaattgtaaaataaagttggtccttttcttctgaatggtgaagtgtaaatttgggtagaaccttgtcccaaa

SEQ ID NO: 4235 - DNA, 600 bp, Bovine  MMBT00909
cctctgggggtccttgctcatctcccttgcccactgtcaggcagacatcacgatgcagatgtcccccagcttggttcaggggattagttgaggccaattctcctttatggtcagttcctctgggttttcccccttctctcaggaactgtgtatatgtaagggggtcacacctggatgctggccagcctgaccccaggcaaactgagtttgccagtgaggatgcaaatgaacacacaaatacccatgcaaataagccaagaggcaaggtctctgtcaagaagcctaagaagctgtctcctrttactattatcctggcttgcatggcaagggcaccactgccaggttcaagttctgctgtttattcctaagccactttaccaagatgccagaagcctttggctaaccccctaggacctattagaaggagaaagtttgtgctgtaagaggagggacagagggtagacttcagaaaggactttccagaggatcagaccagataggaataaaaagagagaagcctaagctggattctttcctattgagaggcaagcaggggtctgggcagaagctttggaagctggctgggccttggggtcctct

SEQ ID NO: 4236 - DNA, 600 bp, Bovine  MMBT00780
aaggaccatttcatattacttaaagttcccgaggttaaaatttatttattaaactcgtctcaacattacaaagtcaaggtgaaatgatattaatttctttcactgatttttcaggttctgtaagtaaatatatttcaagctatttccacagttcaaacgttatcttttgggcctaggagcatattctagtaccataaaagagaacatttctgaggacccaatgaagctttactaaaagtatgactgcaagaattatcttccagcattatcaaacaaaccaacaaataacaaaagtcacargattatgatcaaggttaatgcccagaaagtttcggaacccaaacatctaattccctcatgtgtcccattgagtcatgatgctaaggattccttatcatgtgaatcaaacttttatcagttctctctcagacttttaaaattccaaattataatccagccttttgttgttttacttaaatcaatcagctaaaatgtctggtctactgtttaaatgccataagtcaattttgtgaaaggaagaagtaggatagttctaacaatccctggacatttcagtcttcccacaaggcctagctaaat

SEQ ID NO: 4237 - DNA, 600 bp, Bovine  MMBT00770
gtcaatttaattttatgcattgttctacatgaccgaaggctgattacgggccttttcactccaatatcccaagttaactggtgccagccgcactcagggctgcctaattgcaatttagcccagacaattcctcccatttttgccctccagtaatggaacaacagatcacggccaggtaaagattttaaggtggaaataaagcccgagcgacaaaacactaaagttcagaaaagccttttttcccttcttttatttaatagaataaagactcactggaaaaattaaatgaagcaggttttyccctttttccttaatatgctgcgtttgtgagctgagctctagtagttctacctaactaccaaaagcataacctaccttgagtctaaggaccgcagtgggctgctttcctttagacagtcattgtaaccaaggctgactgtccacacctaggaattttgactgatagtatggaatccacaggaatattggacagtggtttcagcagatttcatgggttttcttggcattaaccaataattatttattgttgctcttttagaatacaagcaggttgcagggttctgaagttctgtttttgtt

SEQ ID NO: 4238 - DNA, 600 bp, Bovine  MMBT02060
ctcaacttcaaagggggggaaaaaaaggtagggagatcccattccagagaactttttggagcctggaccgcagtcagcctccatctgccccgggatggcttyctgcatgggcaggcctgcctgaggagtaaggacacactagtgggattcaccctggtgatgaatggcactaatgcatcatcaggatgacaggccacactggcgatgtcttgccaaggagcttaatgagagcaatagctcattctgattattctcccatgaaaggagggctctgtcttcagaagaactcatctacaagtygactctgtttaattacaggatacaacacacactaatagtaatgttaagatgttctttggcaccaaggttttggcactgataaaactaaaatttatgactctactctgtacacttggaaacattcacacagtgtgcatagtcttgaaatgagaagcgaggtaccctggaatccacttggtttctagctaggctggaaaaatgaatttctactgtagatctctcaatagatgcttcaaagatacagatttatgtacttgtgtcaatcaagctgtcctggaagttgcatttgattcacaagag

SEQ ID NO: 4239 - DNA, 600 bp, Bovine  MMBT09585
catttgttgttgtcagtctttttaaacttgaacatttgacattctaataaagaaatgtgtttgagttcttcagagaaaccgaaccaatgggatataaatatatatatatatatatatatttctgtttctctgcctttttattctctgcaggtcttccacaaattgaatgattccagcccatactgggaagggcaatctgctttactcactcttcgaactcaaatgttaatctcattcagaaactcccagatataatgtgtaaccaaatatctrtgcaccccaagacccagtaaacacaamattaaccaacacaacagataggttaagtacatacacagacagacgcattgggtattaaattgattttaagtatctatccttggggctgtctcctgatacttgctatgagaattctgttgactcctgggacagtaggtgagccccagactctagaacaagaggctgagtccagaagaggtgtgtcgaaagaggcaacagtcagaactggtgggcctttccctagtccaggatgttctgcaggagagaatggcccagacatcaacccctgataaactgtgcgttggtttccaggtgtttctt

SEQ ID NO: 4240 - DNA, 600 bp, Bovine  MMBT09134
tcatttgacctaacttggattcccagcaaaatgagttcttaaatatgtttattactgtttggccaaaggcaggaaatgggttttcaatttgcattctctcccgtgtctaccttccttggtgtctcccctcctctcctctctctattctttccttcctctctgcttacctcccgcttccttccttatttccagcgttagctttaaagaggaacagtaacagaagaaatcagaagatctctagcagacttgtctcttttgtttccaaaccactactaacagcagaattactcatagctcccscaccacccaccatgctatttaaatatccctcttgggacatatttttctctacattttctgttctactccatggtcatggctgtgggggaaacactcaaggcaacgcctcacacacatgaccacataaatgtttattatttttttatttgtaaatctctgtcctgtgcaatctatacagtttttcattgctgacatccttgtttatcactggtttcagataaaaggccgatttggtagttcagagaagatcatatcctcgcccttgttttgaatgatagagagcttaaaccatcacaggcc

SEQ ID NO: 4241 - DNA, 600 bp, Bovine  MMBT05273
tcccagcgaaggaaggctagcctggaggagcagacggggtgctgtggatggtgacagctccctcaggccctcagagggaagagggaatttcagaaccaaatgcacacggcccccaagggtggtgtggccacctacctcttggccccaggggggagtggctggctgccagaggggggcgtgagatggggtgccacaaagtccctcaggggcaggagttggctctcggtgtcgagcagtacctcagcatctgaggagggcaaagaatgaaaatgtggtggggactatccctcagagatcaayggggctcacagcccctgcccttacgatggatgaccagatgggactgtggggaaggaaggggacgatgggtcctcacccagaacccagccatactgcgtggccaccatgaagctgcccttgtcggcactccccagcagccccttcaacgtctcctgcagctccttctgcaacggggtcatcttctgttcaagggctgaggggctggggaccaaggctgaggtaggcagaaggggtcccgtgtactcagggtgctccagctgggcagtggcattgatatgcagcagcttctggaaggtgctt

SEQ ID NO: 4242 - DNA, 600 bp, Bovine  MMBT03319
taaaaagagcaatgatggtgtaactcagaatgcaaatgcatgggcatgcaaacgtctgtccatgtagtcaacttttgatcctcttgggggcatccttttagggcctgattttttctgggccgctacagtgcagcttagtgcaaaaggtgggctagtgagttatgaatctgaagttaggtattttccattatttttggataattaccttttttcccttgtgagggtggaagatatgacacagctaaaaacatctgaaaagaaacagaaatgctattgcagatatgaacattgtaattacargtgtgcatacctactaaatatatgtccaaaacacacactcggtgactcctggttttgcctcccctgaaacggaatgcacaattaatgtcactaaatataattctctgttaccaaaagaatgccacttccctttgtcttcaaaatatcactggatcgcctctatgcaaacattctttacaaatattacttcatctgatatggctatactgtatccacctatctttaaaggacaaaacaagatttatggactacataaaatgttttctagaacatttttctagaacaaacaacaatgaaaac

SEQ ID NO: 4243 - DNA, 600 bp, Bovine  MMBT04065
ctgcccctggtcagtatgactagcatccttatataaaaggcagatctggggacacagacatgcacacaaggagaatgccatgtgaaggctggggtcaggctgccacaagacaaggaacgaccagaagttaagaagttctgtagggtctatggggtcacaaagaattggacagtacttagtgaacaacaagagagggacctggaacagacatttctcccatactcgagggagtgtagctctgccaacgccttgatcttggactgtcagtgccagaaygaaaagacaaatttctgttgcttyggctacttggtttgtggtactttattgtgacgctctagcaaactaacacacrtgatattttgaccctgtcacctgcggctggtcagttattcaaacaatttcctccctgacaaggtcactctggaaactttacagcattgtggatgtttttggaagaggacactctgaaaattgtgtgtgggttaagtgtgggaggagcaggtgcaaaatgtagaagatgagctcatggttggcttattttaaaaattagcttaggggcagttyggaaagatcatccctgcaggaagagcagagaattca

SEQ ID NO: 4244 - DNA, 600 bp, Bovine  MMBT07865
tctcgcctggaaaattccatggacaaaggagcctggcaggctatagtccatggggtcacaaagagtcagaygtgactgagcaactaacactttcacttcacttttcaagctgtttactctgccctgcccaatgcaaactcagataaaatctctggcctaaatttgcctcttgctcctgcttctgcctcctgacccaaacctgatgcttccacggggacccttcatggcatggtgtgcctctttctctagggaaatgtaattaaaaaaaagaaaaacttctttccatggcattgaccttgycatggtgtcactcagtcacctccataaactgaaatcctacagtacgaatgagagacccacccagcaaaaacccaaactgaagcaaacaaacaaaaaaacccttgtgcktacatgtcttacttccaaactatttgtgcacatatttagaccatttactgaattagattcaggtcagttattccctgtctgtctstctcattcttaatcgctcagtcgtgtctgactctttgtgaccccatgaactgtagcctgccaggctcttctgtccttggagattctccaggcaagaatactagagtc

SEQ ID NO: 4245 - DNA, 600 bp, Bovine  MMBT08248
ctyctctgtccatgggattttccagacaagaatactggagtgggttgccatttccttctccaggcgatcttccccacccagagactgaacctaggtctcctgcattgcaggcggattctttaccaactgagctaccagggaagcccccaaaagatcaataaatgtgtataatagaatgtcctatgaaggaaaatcgagctgggaacagtataaaggaatactgtaaagaagaccactgagggaaaagagtacctttggtttgtatgaaccacataaacagtaaaaagtggaaatcccttyaggagaaaatataatacataagaaagaaaatatcgccaaaatacctattttcttagaggcatatcatgatcatacttacatggaaagcatcatcttctgaatttcaatcctgaactaggaaagcacttccaattggtaaaccagtattattttacttgtggttttatgacaggcttgccatttttgtctttctttaacaggaaagattgtcattgatgggatagacatttccaaattgccactgcacacactacgttctaggctttcaatcattctgcaggatcccatactcttcagcgg

SEQ ID NO: 4246 - DNA, 600 bp, Bovine  MMBT08643
taaacaatttctaaaatttttaaaaattttaaataaaggaaaagaatttttcattggaagatgagaggattctaagacaatagagaatgagaatgagatgttaaactgctccaatagtttcaggaggtttctagtctcatgccttccctagttggctcacctgatgcttctggctttctggactcctgtgggctacatcactttgggacatgaagaaggatgattcctccatgaaaccaccatggaagaaaaactgacacctgggtttctactaactcctgccagcatttttaaatgaaygcacacacaaatatgttctgacagttgcaaaaaaaggataaataatgaagtagatccagaaaaagatatcatcygctaatcctgccctgctgctctctgatgttcccttgcrtgtctgttacaaatggagttggtagtaaatgtagttttcaaggtagcctgacatcttacctgtataacaagctgccacggaatragctggcaggcagtgaaggatggggtgccctgagcctccctccctcctctcccactctatgttcttattatgcagaagggggtcatgaaaattaacagaacttt

SEQ ID NO: 4247 - DNA, 600 bp, Bovine  MMBT05827
agaatttccttggtgccagtcaactgtgtaaaactcacttgttccttttattacacttcaattcagtctcttgctctgagttctttgtcaatggtacagctctttaataaacatttcacatgctgtctcaataattgacaactaattaacaggaaagctctgctgctgggggctggtgatttcaaaaagaaatgagcaggaaagttgctttgctttctgtctccacaagctcctgccgttgtcattgtaatatgttggagatggtgatcccttaatagtgtgaacaattttactagagayctctgctgaaactatccatttgctatcagaggaccatattgatcctgaagaactgtcattgagttccagagtgcctgtaagaaatggacaataggaagtatgcttcagtctgggttattcctttctctgagaaacacattataatcaaatggaatctaagtgatttcctccactgctcctgcaggctggaaacactgacaaggaatttccagttaaaaaaaaaaaaaattagcaactggtcccttttccagatacttcagttaatctgtccccttctaagatgcttctgggtatccatta

SEQ ID NO: 4248 - DNA, 600 bp, Bovine  MMBT09955
cttctatagactgttaacccctctggatcacgaattaaaacctgttttacagtgatctgctgctcagaagaggagcgatgaactcctcattccacctgcacttcttggatcttgggctgaacaccacggatggcaacctctcaggactgagtgtccagaatgcatcctcactatgtgaggacatgggcattgcggtggaggtgttcctggccctgggcctcatcagcctgctggagaacatcctagtcatcggggccatcgtgaggaaccggaacctgcacaccccccatgtacttcttygtgggcagtttggcagtggccgacatgttggtgagcttgtccaactcctgggagaccatcaccatctacctgctcaccaacaagcacctggtgatggccgatgcctccgtgcggcacctggacaacgtgttcgactccatgatctgcatctccgtggtggcctccatgtgcagcctgctggccatcgctgtggaccgctatgtcaccatcttctgcgccctgcgctaccagcgcatcatgacgggccggcgctcgggggccatcatcggtggcatactgggccttctgcgccagctgcgg

SEQ ID NO: 4249 - DNA, 600 bp, Bovine  MMBT08103
ctacttcctatggggcttaactcatgggagctcccactagaagggcatctgtctgactccactctggtggaaggggtattccatggccctcactgcttccaggaccccatggtcattgttctccckatgtatcttttgaaaacacagctctaatttatcatgttcttgtttaaagccttgttgtcttggcagttgctactgaacarcttctacactctctagcctggcagtcaaaatccatatggccccaactcacctttgtagccttccctcctgacagtgtcttcactgtctccctcyrtgcttcagcccaggaataacttgctgctctttgagcacacatctctgcatcttttcatatgctgttccctctgcttagaatgccttcatcccttctccatctggtcaacacctcctgttatgacccatctcggtggtcaccctgtctattgacccctctctgattcttccaggcagagtcactgtgccrtgctgtgtcctggcacgcagcctttgctgggctggcccattgtactgtccctatctgtttccacgcctgctctctctgccttgtgagtaaacagggcaggggtgatcttc

SEQ ID NO: 4250 - DNA, 598 bp, Bovine  MMBT08489
  misc_feature (1)..(11): n is a, c, g, or t
nnnnnnnnnnnccagcccatccgtgacccagtcacccacacccagaacggaagacgcgaacactgacgtctttggcccctacraggcatcctccccagaacttcttcctcaggcattcttgctgttgaagcyggacgayggcaattgcctcttaacgacagtggtgcctgttggcctggatcgtggttgtgtgcccactaactgggcatcaggacatgtttatgttgtccttgagcaaaggaaggcattactcacaccagcatctgctcccaagaagtctgaaaagctcacttattccgyagagcacaatggaaaatatagccccgagctgaaggtcatcctctggctccttggaattcggggaaccagcagtcttgaccctttcctttcattctcccgcaactgttgcttgagactcttcaatcttaacttgaattctataaataaaaatacatccagtttttttwattttattttaaaagtatatataacttttttttttttttagtaaaaagctttttaccgggaaaccagttggcctccaatgtctgtgaatggattaagtttcaattcataaagtcggattaaaatgggagag

SEQ ID NO: 4251 - DNA, 556 bp, Bovine  MMBT07438
taatcaattagaagccggaagccttactaaaataaataagtgaaacagaagaaagtttgataacagaaccatctcaattctttgaacccctttccaagttatgtaccaaaaaattctatcatcaataattttctttttgatggagatataagtgacatatatcactgtgtcaaaagttatttttaatcatctatcagctgacaattcaggttctcccatttggtggaaagcaatgaactggaaaaccatctgacttttaaaaatatattatccagtcattgcagtcaatcaccttaaaayttacaccaacatttcaagtccctctttggtgctcagaggttccatatccaactgtacagcaataagacagagaatgggtgagaaggaacttttcccccaaaaaagtgggaacaaagtaactgtgaaggaacarggttcctttgtcttataggrccctttctcagatccacttaggaagtcaagggactgggaactggcttccttaaagcggagtactcagatcccactggaaaaatcttcgtagccaccaccctca

SEQ ID NO: 4252 - DNA, 600 bp, Bovine  MMBT09953
gtgcttgtatctgggttccctggtctgtaaccagcagaacgactgtggggacaacagtgacgaagaaaactgcctcctggtgacagagcacccccctccgggcatcttcagctgtaagtccttcctgcccacctcgcgccattcagctgtggtgtgtttgcaaacggtaggcggccctgaccctgggatgtgggaaagatgttgtttttggttaagagaagaggtttgtgttgtcacaaaggcaatgttttcttttaggatagaaagagggtatgtctgagagtcagaagttccttccaytttgagcagcctgtgttttgtttgggagaggctttctgctgcatatctgagaagcactgactgatcccaagaaataattattgacttagtattcttcatactggttttagagaatttttggaagtaattttaagccactattttaaaataattttaaataargaaggatatatagagtctgtgttcaagcatgtaattaaaacaagaaaatagaaaaaaaaaatttgttgggggtttaaaaaggttgtaattgtgtattttttctatttggtactggagtgggttgtttctcaggtaaag

SEQ ID NO: 4253 - DNA, 598 bp, Bovine  MMBT10355
  misc_feature (1)..(33): n is a, c, g, or t
nnnnnnnnnnnnnnnnnnnnnnnnnnnnnnnnnggtgaatcttgaggacgttacactaagtgagatgagtcagccacaaaaagacaggtagtgtgacgtcactacactaagtgcccatagccggaatcactttcactttctatttctagagcgtgaaatggtggttgccatggcctggagatcaggggccggggagacagtttaatgtgtgcaaagtttccggtttacaagatggaaaaaattctggaaatggatgctggtgatggtggcacaacgtgtgtcactgtgccctgagctgcrcactgaacaagggttaagacggcaaactttatgttacatttgtttcaccatgatacacaaataatgcatgttttaggtataatgtataatattttgaaagtatatytaaaaacaatgcaaaaactaatacaattaattcatattatgatagattgtgaaaataagtctaaaggctgtttctcataactggatttgtcatatgcaatgtcataatgtcagatgtaggaaaaattactatttatgaaataaaatatattataaaatccttragaataatttagcacaatctattaaaatc

SEQ ID NO: 4254 - DNA, 600 bp, Bovine  MMBT05758
tactcttgcctggaaaatctcatggacagaagagcctggtgggctgcagtccatggggtcgctaagagtcggacacgactgagccccttactttcacttttcacttttatgcattggagaaggaaatgacaacccactccacagtgttcttgcctggagaatcccagggacgggggagcctggtgggctsccgtctatggggtygcacagagtcggacacractgaagcgacttagcagcagcagcagcagtaatataatagaacttccctgctggctcagagrttaaagcatttgcctrcaatgtgggagacaattatgtgatataatagactatttcagtgtgcgagatagcaagtaggttggaaatatagatgtgtctcattttcactgaaattaatgcttctaaataacttaccatagagtttgataaagatttatgtatataatttggtgtttaatattgtcaatgtgtttatttttgagcacatccacatgtatttttaaaagaattcatttaaactgtatatatatgacaaaataatgatatattacacctcagaagtgtttatgacaaataaaacccatcacactgaatgtt

SEQ ID NO: 4255 - DNA, 598 bp, Bovine  MMBT10431
  misc_feature (1)..(80): n is a, c, g, or t
nnnnnnnnnnnnnnnnnnnnnnnnnnnnnnnnnnnnnnnnnnnnnnnnnnnnnnnnnnnnnnnnnnnnnnnnnnnnnnnnctcaggctcttctggcctcgggtggcccttcctagcactcaggtctgcctgcagacctgcttccggcccatggcctgggccccctccccgagagcagagcacggtaccgaggcagcctgccgtctgcctcctgaggccccgccccctgaggcccttctgtcctcctcacagaaggcgtgtggcatcccaacgctgctccctcgagtttctggaagacacrgtgggatgtccctcgggtcaaaggtaaggaccccgcctctctcctggggccaggatgggtctgggaggggcagagtgacctgcttttcacctgcagaaccaaacacatatccggatccccgagacacaagggcctgaaaaagacacacttcatcaagaacatgcggcagtacgacaccaggaacagcaggtatgggcgcgcrgcccaccatgtcctccctccagccctgtgggacctcgtcctgcctgtgtcagcagccctgtcctccttcagctcaggggactcgtccccacagccc

SEQ ID NO: 4256 - DNA, 600 bp, Bovine  MMBT08488
gatatttatatatttttaatagcaataattgcttacccggtagtagttgctgtattaacctccaattgctagtaaatatttttaagtacataatagacagcaatttaaggcatagcatagcagtttactggaccgttttaaagagccatttgtacgtgtgatgagttcataattttaaagagaaaataatgtacgcaggacttgtatgctacaaaatatgttgctgtgttattgcttgaagagttagttcattgagaggaagttaggttgcggctgctgctttgtgagaataaaggcagrgggtgccttacgacaatgagtgttgagtttatgccaggtgcttatgtagtttagcactttctttggaatattttggattatatattatatccactactatattctttggaatatagtagtggattatattaattaggcatggaaagatttatcttttttgttcacgggctaatttagcctagttaattctgaattaattgtattcatcaaacattttcaaaggtcttctctgattaataagaaaaatactctgtccccactttatactatagtctatgtattatatattgacaaaagata

SEQ ID NO: 4257 - DNA, 598 bp, Bovine  MMBT10967
  misc_feature (1)..(52): n is a, c, g, or t
nnnnnnnnnnnnnnnnnnnnnnnnnnnnnnnnnnnnnnnnnnnnnnnnnnnnattttttaaaaaatgaattaggtaggccatggcttatataaaataaatgtatatttaatcttttaagcagtaatgaaaaatgaattacaaatggattttactagaaaataattggatgtggttcatgcttagtacttttgaaagtgtaaaaatatggtccccacacacaccaccaactttcctctgacaccttgcagggcttgccaaatgaaagttggaaaatatccaaagtaaacagtaattatgarctctgtgacacctaccctgccatcattgttgtgccaactagtgtaaaagatgatgatctttcaaaagtagcagcatttcgagcaaaaggtagaatcccggtaagtaataaacaatgttatttagatatgaacatatactgtatttggtctaatatggggaaaagcaagttagaaaaaaatctcatgaagaaaatggaaagtagaaaaagaagtctataaacctgaacatatctttgattctcaagaactatctatataagcattttgtctgcctgctatgaccccacctgccatgagt

SEQ ID NO: 4258 - DNA, 600 bp, Bovine  MMBT09975
tatgccttatcactgactctgccgcacgttatttgcaaacaatctctggctaaactgtaaatctacaagcaccctcgtggcgatcgcctggcagaattcagacataagtgctgtttgagctttttcctaattgtagattctaaatgtttgaccctcttctttgagtgccagagacctgacttgacttgtctgtggtttgggctctaatttgaaagcgattgaccatgtttggatggtgtttgaaatatttgtattgtatccacggaaaggatggcaggttttattttctcaagagtacartttcttcagcacgttcttgtgccatcgtgtgatgtcctccttctgctttgtttgcttccaggatrtctttgtggggcagcacattgcgcccggccatgtgcctcagccccatcttggaaaatgatctctactacaagctcagcacgcacaagagcggctggctcatggctcccaagcacrtacctgaccactggaggggacacgcttttcaaagtgtgcccagttccatagtcttctagtgagagaagcaggaacccagtgggtagatgggggttatttttttgtttgtttcatctgttg

SEQ ID NO: 4259 - DNA, 600 bp, Bovine  MMBT03625
ttgctttgactagaacaagtctaattttataacccaaaaaactgccaataagggaatttttatatacttttgagatayatattttttactggaaaactcctgagttaatttctctaaaagttctttgttaacactttctttgcaaaatcgtacaaggaaacaggataaatttatatcaccataaaataatgaaaactgtagtgtactggaaacctaattttggaggcatatagacacaaatattcatctccctgatttttaaatttggacaagttacttaatttccttaaagttgagttktatcatctgtaagttaacactaatcataccttcaatgtaaggttattattattaaacaagaaaatgtaggaatgcttgggacttccctgctggccagtggttgagactttaccttccaatgcagcaggtagaggttcgatccctggtcctggggctaagataccacctggcatcccgcccaaaaaaccaaaacgtaaaacagatgcaatattgtaacaaattcaatgaaggcttaaaaacatggtccacatcaacaacaacaacaaaaaatcaaaaaggaaaaaaaaaaagacaaggtta

SEQ ID NO: 4260 - DNA, 598 bp, Bovine  MMBT10032
  misc_feature (1)..(32): n is a, c, g, or t
nnnnnnnnnnnnnnnnnnnnnnnnnnnnnnnnaaaagctgaacatctatacctattaaatactaaagaacaagaatccagcaaagtggagttacagaaagagtaatgcaaataacagaaacagttgtggtcttcactctggcgcaatggatttagtgtgtggtgcctgattagcagcattagtatcacctggaaacatgcctccagcacatactaatgccctgacagcgaaggtttgaaaatcactgctctagtttaccatcatatttaggatgacttagctattttctttagatgtgtktctctttgytttgataaaggttgcatttttatgatgactggggctatataaacyacatagggaaaaaggaatatattttggtttatctgaatcagagagactgacattcttaaagatcctaaatgtatagtataaatattttatgaacattctttctagaaagtgttgcttttggggttgatctctctttgtcctctctttccaaatagtgtggataatgacagtctccaataattgaatactgtgggccttgcctccatgtaacagaaggtcccaattctcccactgcagagggctg

SEQ ID NO: 4261 - DNA, 600 bp, Bovine  MMBT02497
aagctcaggcaccctagagccygtkytctgcaacaagagaagctaccgcaacgagaagcccaagcaccccaactatataggagccccaactcgtagcaactggaggaaagcctgtacagctatgaagacccagcacagtcaataaataaataaataagattattttttaaaatggtgcccagacaaggatacactcttctagcctgaaaatactaacacaaaaataaatgtaaaatgcttgcaaagtaagtaggcatcaagtgctgtcagtttatcatattcaaaagctaagattcaacmattttaaatatcraacattaagagagcaagctgcttgaaatccttttttgtggaacaaagtagagaataaataaaaacattgttgatgtctctcttaggcagataatcctccaattttgagctgatttttaaaatagcattccgaaacgtcacattcctcaattctttcttttatcctctggtcatgcctcaagtttctgtatataaacttggagttaattgaacatatttttcttcccattgataaacacagctctattataatttaaacagatttatatattctaaataatcatttaa

SEQ ID NO: 4262 - DNA, 598 bp, Bovine  MMBT02875
  misc_feature (1)..(21): n is a, c, g, or t
nnnnnnnnnnnnnnnnnnnnnttttttttcttttgctgcttatgttctataattatgaagttaaaaataaatatgaatgccacgctttgcctggagaagataccactattttaagtacacacgtatcaatactagtctgctaaagcatggagaccaaatggaaaaccatactttgtctagaaatcttagaattggccaactaaatgtctaagaaagcatccgagtagcatgcactttgggaacccattgattcaagtgtaagagacttccaaattgttagtaatatgagtaggtctggtmttgacatctgccaatgaataagatatcatccagttgtccgtggagtgcaaattgcaggtatcaaatagagatgataaatgcaggcgttattcctttaagtggttcttagcttttgactgcatttgaccatttgtcaaagctaactggcctctgtttagtgatattgagagtgaaacacacgtacayagacacatgtgtgcaactgatacttgaaataaaatttcataacattaccatctatcttagagattcggtttctgaattccttagtttttataatccaatacttcagcaatga

SEQ ID NO: 4263 - DNA, 600 bp, Bovine  MMBT05684
tctagaagtatctttaaaaaacatgatagcatgtttaaagtgatgagttgtgatgtaaggttttttattactttattaaaaataattctatatttcagagaactatttccagacttttttactaggtaaagggaataaaaagaaatgtgaatttatttttgacatatgttttaaatcataagcaagctacaaagtacaataaatgtcatttgccttacccttattctgaaaaataagtaaaataataaattcttagtttcctagggttgaaaagtgcctgaaagatcttcatattacctmatctctactgaatacattaatcgtctgaaccatatccaaatgtttgaacacgtttcatttcagaaaagaaaaagaaaatactttgaataattccattatattttggcaaaattttattggaatttttttcctacatttaatctatgacattatgatttacaccaatctttattaaactttgttccataacccaatgacagcattcaaacattaaaaggtcttcaaacattgcaagaccataccatgggttctcagccatgcttccacttggaatcatcattgaagtcatcctagcctttc

SEQ ID NO: 4264 - DNA, 598 bp, Bovine  MMBT11536
  misc_feature (1)..(37): n is a, c, g, or t
nnnnnnnnnnnnnnnnnnnnnnnnnnnnnnnnnnnnncccttggtgggtgcattgttcattctccaaatgcaggacgactgatctatctcattccccaccttctggccgaccatctgacccgagtttgacacaatggcacaaagattccagtccagttgccaaaggctgaaaaccagaaagagaaaccagggcaggtaggggagaaatgtgtaaattagraagttcctcatattcccaacaagtttttctgggaaaacaaattccagatattgtgcataattgctaagtgtgggaatatmgctgaaatatatttatactaatccaaaactagctccataggatatcaagcttggggcatgcctccatttaaaaagtgaatgtggattgctaagaaataactttcatttctctttcttgtgttgctttgaaattcaatgaaaaagcagtcatttgtttcccaccttttatgatgtcttttcattcaaaactgttatttcaaatgaaataaggaaatacagaaagatttgctctctttaataagggtgatggctaaaaaaaagaaatgcaaaaggagtatatataggcatcaatttgaag

SEQ ID NO: 4265 - DNA, 598 bp, Bovine  MMBT12343
  misc_feature (1)..(236): n is a, c, g, or t
nnnnnnnnnnnnnnnnnnnnnnnnnnnnnnnnnnnnnnnnnnnnnnnnnnnnnnnnnnnnnnnnnnnnnnnnnnnnnnnnnnnnnnnnnnnnnnnnnnnnnnnnnnnnnnnnnnnnnnnnnnnnnnnnnnnnnnnnnnnnnnnnnnnnnnnnnnnnnnnnnnnnnnnnnnnnnnnnnnnnnnnnnnnnnnnnnnnnnnnnnnnnnnnnnnnnnnnnnnnnnnnnnnnnnnnnnnnnaaagaaccactacttacggtgaaccagatgttgctatgggcaaaaacaatacagtgtgatggtsaaagagttggtgttgcccggagtcaggctgcttgatttgaattctgtctcctgttgtttatgagctgaaggaccttgaacaaattccttaatctttctgccttagtctcatctgtaaaatagaaataaaaatgtactcacttcacagggttatttaggggaataaataagcaattatattttaaactacctaatgcattaaaaatgttaggtatataaatgctacctgttgttgttgttgctactgttattattactaggcacattctgatttagatttaagaacaaatatccactac

SEQ ID NO: 4266 - DNA, 602 bp, Bovine  MMBT11726
  misc_feature (1)..(2): n is a, c, g, or t
nncaatgcaggaaatgtaagtgatgcggstttgatccctgggttggaaagatcccctggaagaagaaatggcaacccacttcagtattcttgcctggagaatccccacagacagagaagcctggtgggctatagtccatagggctgcmaagagtgggatggacatgactgagcacgaacacacacacactgcacaatccttcatctcagargtcacagtgtacacacagacctcacctggagtctcagatgtgcctggaccatgctatcctcatcctctatcctccatactctctayaccayacataggctcccaccygcctgtgaagtcttatgcctcagtttcttccactgcacccgacaaacatcccacccataggtcctcacaggacaacacacacggcccctttggagcatcaacagccagggactgtgtcattaagctgctgacaggtggtccctaccagcagctaccctccccccacccagttctgcatgcccagccttctgccagagccagacagtaaagcctgcctcctggcaggcctggccaaaattgtcaggaggttgatgatgtgtctgaaaaggggggaaaaaaaaaga

SEQ ID NO: 4267 - DNA, 600 bp, Bovine  MMBT14302
aaaaggcaggcccgggggtagyggggagagggggcagttgccacggctgrctccaaagcccctccagctgcgccctgctcccctggcttggccagcccaaccctccagctgtggagaaaaccaggcccccaaagccagatcagcccgaatgggctgctcctcacaggggtgggctcctggaatgggcccccccgtaccctcccaggcagccagctgccctctggttttcatttaaaaccagagctggatccactttggtgtcttcttaccaagtggggcagggagagggcggatggtgaygttgctgtgtttatttacygcctactgcatgccaggcccctgcgtgtgctcagtgggccctttgcacgcatggctggcctcaggccttgtgccagtccaggaggtgtacagagggcttcatgaccccattttacagatgggaacattggcaggtccagggaggaccagccacacaggcccgagagcggcagggctgggagccgacctcgagtctcttggctcaagctctgagcccaggcagcttgctgggcttgttggagaagcgcccggccttcccctcacccatcaccagcccctccc

SEQ ID NO: 4268 - DNA, 600 bp, Bovine  MMBT14078
gaacctggaagtyccagtgtcagtcttctgcccactggaggacatggactcatagagaagctgagaagggaaraggctgataacttcctctttcctgttgataaacaactttttaaagtggcgccatccagcagcgtccactctaagtgagaaaagctaggggcaggaagaagccttggttgggctgtgtctctgtgatgactctagcacttcaaggattttyctccccaggatgttcaggaggattctaggaacgattccaggctccttgttcctgtcagttcaagagggcagctttcygtgtccttgtctgtcctcctctaaaccccagaaggagcaactggggaggctctgggagcaggaagagtgtgctgggaagacctggttcccacacagaaagcagggttgccctgagtgacggctattgtactgtggtcgctcccgcatctgaccaccagagacgctgacttacagaagactggcggtcacggcagaacgcagaccccgcagggaagtgggagtgtttctggcactttcagctgcctttgtcttgttggtcagttcacatgtgccccttccctcaaacattacagattccct

SEQ ID NO: 4269 - DNA, 600 bp, Bovine  MMBT11745
acttgggctcatagcctgctatgggggaactgctgagactgaggttcagtgtggaaagtcttttctgctgcctcgggagatggttgtggaattgacaggcacagaaagaatcgacctagctcttccctcttccagtacaagggcagcctggcctggcaaagggcttatacagaatttcccctgttctttaggttatttctaaggtgttagcaccacgccgatgctcttgtaaaatcacactggctgctagtccccttggatggtgtctcagccaccagctctaaacaccttcagatgttygagccagcagaccctgcactgtcctcgttggccaaggcactgtcacctggtcagcaggtgcttatggagaatccccgggtgcccatctctgtaccaggcgctcttgcatttagcttatatgtgtgaagaaaactgttaattgcctgctggacgtgctgttctggaagggttctgacacttcggcgagcattgccagggcaaccagaccaagagtctgttagttaattaacattgcagtgatcgcaccctattctagcttctagagaagaggaaactggctgggatgttttcgttctctgt

SEQ ID NO: 4270 - DNA, 510 bp, Bovine  MMBT12168
ctcctagactgtcagcttgaaagtgggatttgtatctgagtcagtgttggcatttaataggtgttcaaaacctgtgcttttcaataaatgctgaaagagaagaaaggaggtggtggcagaatggctgtattgctcaccaaggtgaagtccgggatttgtccgaccaatgtagaaatatacaatggcagcaacacctatgttaaccagggtatagacccactggataacaaacatgatgagaagsgacccaacagcctgtggaaagagaaggaagagcaagtcagctcatggctgaaacaygcactaagcaagccacaagacaagggccttaagcggaggaattccctgtgctccagtggttaggactccacgcttctactgcagggaaccagggcttgcttcctggtctgggaactaagattccgcaagccacgtggtgtggtcccctcaaaaaacaaacaaaaacccttgataagactaggacctttagaaacaaggtcctctcatcaa

SEQ ID NO: 4271 - DNA, 600 bp, Bovine  MMBT12633
ttcagtatcagaargcttttttggtggaaatgcttcctacctgtcttcacrtttctcattcattcactcacttgactcagatgtttatttcctgccttctctgagccaggtgctctgctaagccctgaggccccagtggtgctgagctgttgtctgrcccccagtctggaaacagtgtaggaacagtggacccrcagcctgggctgctggacgctgcgactccgctgaacaaacgctgcgctyaccccactgctgggtccatgcctgggccatctgcaggcttggggcaaggaaggcagytagaaaatttggattcctctcagttggcaytgaccttcaaaatcacctcctaagtctgtgcctgttcatccttatagcaaccaattgtcttctgggacttgaaggtgggatgggagaggtgaaaatgactgaaatgtgagtcagaaaaggtgtgagatgcaggtaaagggtgctttgcccagctggctgtttttttgtttttgtttttaatcaggaggcatcatagctgcagtggcttatttgcaggtaagaaggggaaagctgtgagtctgggaagtttggattgccagccagtcttct

SEQ ID NO: 4272 - DNA, 600 bp, Bovine  MMBT12770
aactgatggtttgagttgcattgcttttgaaggctttattagagttgtcaaggaaaaaaaaatctactgtgctctcattgcccttcaagcaaatctacttaaatatcttctgctcagtcactcagttgtgtccgactccccatggattgcagccctccaggctcctctgtccatgggattttccaggcaagaatactgaagtggggtgccatttccttctccaacttaaatatcttgaatgacccttatttttgttttaaattatgtaggaatattaagattgctttaactgaggtaacygcttatgatcaatacctctctttgcygtgattaactggtattgatgagaaaggatagtcctgttaatactttttaataaaattagaacattaagctcttcagaccccaaaatayttggaattattccagcacaattggagcttaaagaaacagataaatgttttgtggatctgagcctccatgggctgccttctgacagtcagataagttttggcatagctgtattatctaggttggtttctgacatcttttcttttttttgtcagtgggccagaatccaaataaatatttttggaagca

SEQ ID NO: 4273 - DNA, 600 bp, Bovine  MMBT12699
acagtactagcactgaatcgttttcttttttccccccactgtgtacttattcatgttcggataattaataactagttaacaataattaaatttatacatcttcagcacatatgcccaaagacttgaagtcttaggacctcatatgaggtcagaggcatcaatttctaattaaagatgttatcattcagttcttgagccaaaggttacattcctaatctcagccaactaattcaatgtttaacttttggtgctgatcaatggttgatgattccttttcactaggaaataaaacaggtacaygtagtcctttgtggttcattggatgagccatttaaattgaaaaatgaatgtaactaaacattaaatattttcagttaatattatatctgaattgaacatcattttcaagtagtattgtctcatacaaaataaatttaatagaaccttttttatatttttatttaaagttgtgttttttattattttatatagcacatgccaaaatttaattcaatttcaattagtggataccatatgcaggaagcaggggctgatgccattctggaactggcctatactatagcagatggtttggagtac

SEQ ID NO: 4274 - DNA, 600 bp, Bovine  MMBT13934
ttcccctgccaatttagaaaagaaaaacagttctcactcatatattgctagatccatcatcgtctataagcagtgatggagaaaacagttttgggtggggggtaagcaaacctattgtgaaagttctactgtctttacattggatataagatcatctccatggtggtcaaacagagtggtctgtttgactcaactactattaaaattcctttaaaaagtaatgatgaataccctccaatgtctatttacacagatttctgactgaactgaaaagacatgggaaacaaattttttaaactygcaagagaaacctcttccccccttaaagtcaagcaaatctgagttgacttctctcataaattcaagaacaaaaagttataaattgaacatatgaaggacgttgctttttttttttaagtgatgtttccttgccttaatggatttagctgtggcagagagtcagagyaaagctgtcttaactaaatctttgactgattatgcatttttttccttattcatacaagatagattcatcatcccaatttgtcaagctggcgaggttccaattaattacacccggcaaacctcagcttgtgccct

SEQ ID NO: 4275 - DNA, 452 bp, Bovine  MMBT14105
attctgttatttctcaaggcaatgactaggctatagaatatctgcctggtagagtttctctcatgggattctggtcgctaattttattttcgctcttggggagagagatctttcagatctgtgtgaggtaatgctactcacgaaacattactttggcttctaagttggactgaaccataagcacatctttttccagtgtctggcttagaaactttgcttggtctgtcaaaaaatatgaattgagcacttggaacattgtgtaatgatattgttgcctccatccaggcataacaattctaygyagctttcttgaaataagaatgtctaaccactcttgtgtcctgatcaagacaacaatctataatgaaaattgcctaactcaggcagactatttttttaagctgcatctcatcaacagtttgatatgtttattgtttagtagggcttgccag

SEQ ID NO: 4276 - DNA, 601 bp, Bovine  MMBT13707
  misc_feature (1)..(1): n is a, c, g, or t
nagacaatagagaatgagaatgagatgttaaactgctccaatagtttcaggaggtttctagtctcatgccttccctagttggctcacctgatgcttctggctttctggactcctgtgggctacatcactttgggacatgaagaaggatgattcctccatgaaaccaccatggaagaaaaactgacacctgggtttctactaactcctgccagcatttttaaatgaaygcacacacaaatatgttctgacagttgcaaaaaaaggataaataatgaagtagatccagaaaaagatatcatcygctaatcctgccctgctgctctctgatgttcccttgcrtgtctgttacaaatggagttggtagtaaatgtagttttcaaggtagcctgacatcttacctgtataacaagctgccacggaatragctggcaggcagtgaaggatggggtgccctgagcctccctccctcctctcccactctatgttcttattatgcagaagggggtcatgaaaattaacagaactttattcaagtgtagagacagacagctgataaattatacacctgcctgggagaagacagaaaatcacaaggtcatga

SEQ ID NO: 4277 - DNA, 600 bp, Bovine  MMBT13542
atggagcccccctcccatggaccagaattctccccaagttgtcgaggctgcaaaacacttgtctccattgatatcgaccagtggtgcattcagtaagaagaatggggacagggagagagccagctttgatgtctccaggggcaggaaatcactcagatgattcttccagggccacttggcagcaggtagagggtgtgacagctggtgggaaggtcggcaactgggatgtgaccgctgaaccatatcrgggaactatgctgcccttgcaaacagaaaagttcattcctctagtctrgtagrgggtagggatgagggagaaagatcagagggcctggcacattaccacctgggaacaagagaattcaaaattgtccaacaatgacatgtcagaagctttcattactttgcaagaccaactggcccaagtcttcaagtcaatctaacaagaatgtatgactgtcaacacctaacaggtgggattcattgtggttaatccatgtaccttgaatgaggacttgaagcctctctttacccatctgttaaaatagcttataacatgtttctgtgagaaataataattactacatactcactatgtgc

SEQ ID NO: 4278 - DNA, 600 bp, Bovine  MMBT14316
gtccccatgtggtaaggagaccaacaggcagttgggaggaagggagattctcaggaacaaaggggctgtgggaacccaggtctggaatggctgcctggggtgataagaaaggtgatttggaggtcttgaaggatgagtaagagttcaccaagtsggggaggtgggtgaaggtcttgaaggatgagtaggagttcaccaagtgggggaggtgggtgaaggtcttgaaggatgagtaggagttcaccaagtgggggaggtgggtgaaggtcttgaaggatgagtaggagttcaccaagtggrggaggtgggtgaaggtcatccttgcctctggaaggctgtgagagcacagaggccactgtgggtagatcctgggagtcaggaacrtgacagcctcctgctcaaggagcattgtgcatgcccattttatagatgagcaaactgaggctctgagaggtgaaattacttgcccagggtcaggtgtctggtaagtggcagggtggtgattcgaacccagatcaatcttaagccaaagcctgtgctggcttaaggcatccaggaccccagaggttatgtgctgggaagggggccacttcaaagagc

SEQ ID NO: 4279 - DNA, 600 bp, Bovine  MMBT13221
gtgatctttgtacttagcttatttccatcatcttgtgttaaacaattgatggaacatattcactttgaggctgaacctgcttaaaagagccacctgttctcaaagactgttcactctgggagaacacacctgggccatcgtccactgacctccccactgtgcatgcgtggtgaccagcccaaggcgacagaaagaaacctagtaaattcagctttaagaggctctgcctgcttttctctggatttaacccgttctctaaggctccagccaaggttcatggctacagaatataaaaccccrattctcagtctttgggttcaacytgtacacgcagagcaccacagagctcttggtgagcatcggctgcataaaggttttgcattctcatagacatggaggttttaggagtctaaagcagaccttcgagcttttgttktcaaacacttgcaaatcattttccctccacaaaagcctataaaatgtcagcrtgtgagcatctctgcccatggggctgccccttccatgggacttgggtagtaattcactgctggggatctattggctcctggaccccaggaaggctgtgcatgtttatcaccc

SEQ ID NO: 4280 - DNA, 600 bp, Bovine  MMBT12342
ggggaggtctggttaatgcataagccagacgaataatgcacactagagaggaggtaggagactgaaatgggcagagaaaaaaattgatgttaagtttttcttgtcttgccttaacataggaattttatttcgttagttcagagcgttaatgagaatgacactattataggagtttgttagtgaaaggaaaaaaaggattacccagtggggttttagtacctatatcrttttttacattaaaaaagttctaaagctaatataatatgttaatattgcttaatttcagaagtggttagatarttaattgttaaacattttttttttttactttcatttttaaaggttttattattgaatgtgtgaaggcttaatatgcttrtggaatttctttctcttagtggggaaaaagaagggaatttaagtaattctttcatcaaaaatccctttgagcttttatttgtcaaacttccttcttcctcgttatgggatttagttaacctcaaaccatatttacttctgtggtttcattctgaaaatgaaaatttggctggtttagaaaaaaaccttccattaacctagattctaagctagagattctca

SEQ ID NO: 4281 - DNA, 600 bp, Bovine  MMBT16095
tggacagtgactactttctgtatgccagacactgttctgggcacagtggatgagcaacaaggaccctggccttgggcagggtgaggctgaggacatgagagtcactcagtgatggccctcagccatttatccagcaattgtccagcaggagggaggctgttggtgccctgagttttgcctcagcagcaccctaggtcacccaatggacacggcaccatcctgcccggcttctatccccaggacacttgtgagccacctgggtgaagatgggtcctagacaagcaggggatgatagaggamgggaggagaggcctgagaggagactgccagcaagccaaggtcatgctgaagccacaggactgcccctccctgcccctaacacattggccagtctcctttctaaaactcaccttgggcccaagttcaaaactccagccacaactggcctggtgtgaatcagaagcccatcactaagccaatcagcactgcccaggagtagggatctataaacaatggcagctcccattcccagagcagggtgagcatggggggaaatggttccctgaagacaaaaccaccaaaggccacaatactgacctt

SEQ ID NO: 4282 - DNA, 600 bp, Bovine  MMBT18177
gtgtgttgggtgttccagctgccctgagcccacatttctgtgagctcatgggttgcttcaaagctgttgaacgcagttgaaacagaatattaatacatgtgaactgagtctatgcggtttattctcttaataacgtctccaggtttacagggagggtcctgttaagtgattttctttagctttaaagaactagaaagtagagagaaagtgtttgggctcttttaaccttcaaacatgaccacactgaggacagagattgcccaagaaatgccagtctctttcctgagacttctgaagggycgtcgtcacaagtcctttcttacgctcatcaaggtctcaaaatgcgttttcattgtgcctgatgcatagtgtttctctgatcacaattccggtcttactaagcaaagtatggggcaatttagaggggaagagggacctttttaaaccttaatggggcaattgccaagatcatgactccttgtgggtgttggacacactgccctttagtaaawcttaaatgaccacacttctctcttctttccctccatccctaagggtttcattcctaatgtctgacctttattctggactcaggattct

SEQ ID NO: 4283 - DNA, 600 bp, Bovine  MMBT17000
cagcgggtttaaataagagactcgctaattaatggagcaccaggggacagcttaaagagaaaattgctcagtagataaatccaggttttcaggcctctctaaaggaatgatggcagtccctggagggctgtggaagtgaatgttttctctctcctctgtgatctggtttgtttggagtctttggaggccagtttgccctggctgtctgcagcgaggagtaaagacagcaggtacttggacttcccagccagttgaaatcaagatgtgaagtggcacggctgagactctaagacatggctytcccagcccctctgtcagccctgwccctgggtctctggctgtttgtgttctggttyttggtgagagccttttcagggaggtggctcccctgcccttacagggcttctctctcactcttcccctttcaccaatggcaaatggatacctctctttggtctccctccccattcctttgttcctggccaactttcaagactgtcccttttttaaaaaaaattttattgaactatagttgatttacaatgttatgttagtttctgctaactgaagtgaatcatgtaaacatatacatatatccct

SEQ ID NO: 4284 - DNA, 600 bp, Bovine  MMBT17512
agttcctacataacattgtattgaatttcagaatatacacatattcatgcatatatagagtgaaatatatgtataattactttcaatttcacatcctaacagaggactgggatcagccacagttcaatctgtacacttgatacctggacaccagatgtctttagaatggaaatattttactcagtgatttctttaagagagagtttatgttaccttactctcaccttcaatatgaataagaagagattgagaacatcaaaggmggtgataactccttttgaaatgcagcacactttgttytaaacyctctgacagrcagccaatccttattaaaatcaagccttcaagatactgtgaagytgtccttctctctaggctgttttatcaaatttggttcaaaatagttctgaaacttttcatggatatagatgtaccctgtatgtggtacagtggtttgggtatggataagatgcacccggctttctgggaaataggccaagcactggcttaaggggaccactstaaggacttttcttgcttggctccttgacaaataggatgcctgcttgatcaagacatggtgcaatattgttgctgccc

SEQ ID NO: 4285 - DNA, 600 bp, Bovine  MMBT12124
ctatgggctaaaaacttactgcttagaacagtatccacctagcctattgtaagtctttagtaaatgttagctattgctgttatctaaagataaagccttaattgaccattattgagagtatcatcaagctcactgaaatggaaaacagtgtataactcagtgattgtttttttttccctgtgttgtaggccataaaatttcctttttaatttaaaaaataaatgtggagatctttaaagatttgttcttattttcctaaagatcctgagcacaggtctccttccttatgaagatgatggrcttattgtcctgaaaattactgcttatcatataacttgatagttcctcattgaaccagtttgttgaatttcttttctctcttttcttgctactcatttgtggagaagtacatactttaaaatttatttcccactctggttgtaagtttatgttctctctttgggtactttctcttatttggtggcaagaaatattgaggtcctacagggcagggtattgtttatttttatagtgttattctcttgtgagatgttattcaatttaaagaataaattgcattctgtgtgaatgctgcaaggc

SEQ ID NO: 4286 - DNA, 600 bp, Bovine  MMBT17955
gcaaaacccgggtgactaaagatacttttttttttttwattggattgaaacaatgcaaactacacactgtgtctaaatgtttaatataaacatttacactgaatatatttgcagatcaacagctgctcaaacaaaagcagcgaatctaatggatttcatagttgaagcccccaatcaaaatggagtttacgttcacatagcttattcaattgcacttgtgtatgggcctttgtttcaaaattattatctacttttaatcttcttccaagaaacaatccaaagaaagttacttagttcacrtttctagaccaaatgaggtacagggcaattaattttattcctcaaacaaaatccagctagtattattgatatgcaatactactttgctatcataatgcaattatgctatgtatgctcatttcaactgaacatatacraagacattccaaatgcatctgaattctctatcgctgttctatgtgcaattcaaagcatgtcagttaagggcacttgcaaatgcttagggaccatgcactgaacacttccctttgtaatcaataaggaactccatgaagtaaattggtttataattttgcagga

SEQ ID NO: 4287 - DNA, 598 bp, Bovine  MMBT18261
  misc_feature (1)..(64): n is a, c, g, or t
nnnnnnnnnnnnnnnnnnnnnnnnnnnnnnnnnnnnnnnnnnnnnnnnnnnnnnnnnnnnnnnnacgctggctgcactgttgctgcggtggagtgacgagtgacaagccagcatctgctctgtgtgcaggaagctacaacctcaccagtgtgctgcccacagctcccgacatggcccagttcaagcagggagtgaggtcggttgccggaaagctctccgtctttgctaacggagtcatgacttccattcaggtcagtgagatggggactgcggtaactgagtttggtggtgggttcgtartttcgaaaatgagatttggaccactctttaattgctagaaaattagrttttatattctcgatttatgtgtttgctacagtgtaacccaggacatcatgaaaaccagaacttgtaatttcatatttgtttaaattttctagtttatgactccagaggaattgttacaggaattgtcatgatcattactacttttctcttatgttaaaaaacaaaaataaataagaacaaagttaaaaattgcccataaccccacccacctcccaaggaaaacgttcattaatattttggtttattctaa

SEQ ID NO: 4288 - DNA, 600 bp, Bovine  MMBT15490
tacttcctatggggcttaactcatgggagctcccactagaagggcatctgtctgactccactctggtggaaggggtattccatggccctcactgcttccaggaccccatggtcattgttctccckatgtatcttttgaaaacacagctctaatttatcatgttcttgtttaaagccttgttgtcttggcagttgctactgaacarcttctacactctctagcctggcagtcaaaatccatatggccccaactcacctttgtagccttccctcctgacagtgtcttcactgtctccctcyrtgcttcagcccaggaataacttgctgctctttgagcacacatctctgcatcttttcatatgctgttccctctgcttagaatgccttcatcccttctccatctggtcaacacctcctgttatgacccatctcggtggtcaccctgtctattgacccctctctgattcttccaggcagagtcactgtgccrtgctgtgtcctggcacgcagcctttgctgggctggcccattgtactgtccctatctgtttccacgcctgctctctctgccttgtgagtaaacagggcaggggtgatcttca

SEQ ID NO: 4289 - DNA, 600 bp, Bovine  MMBT14590
agtattggcaaacatatgtcttccctggacttaagggtttctcatttgtccaatgggaggggatagcctcttggaggaaggctcacatcttctaatactaaattctatcattttaaggtccatcttttaacttgtgaaaacatttttgatatggtactttaaaaaaaagatctcctctaaaaatctaaatgagtacagtgagacatctccgatcaaaaatgacaagaagctccaatctggctcaagtaatgggaagtcccaggcccagttcaagttctaggactggatgacctgttgcckctgggagaagagctcctttcgcaaatctacagtgctgtgggccccagtcaggcagagggaactctgccaaatacgagtatctcaagtggaattccaaatgtggatatctttttcctaagtgtggtgctccaccagttgaattctgatgactgttttatggtgtgctagcttgttattagctggatatcaatttgagatttttcagaacacatatatttttggaccaggctttacaagagatgctgagagtggctaaataccttttttggagagatggggaaagaatcactgaacataact

SEQ ID NO: 4290 - DNA, 599 bp, Bovine  MMBT13958
  misc_feature (1)..(77): n is a, c, g, or t
nnnnnnnnnnnnnnnnnnnnnnnnnnnnnnnnnnnnnnnnnnnnnnnnnnnnnnnnnnnnnnnnnnnnnnnnnnnnnctgaagaatccccatggaaataggagcctggtgggctacagtacatggggtcagamagagtcggatacgttgagcgactaagtgcaatgcagcacagcatgactaatgtattgaaaggcttttgtagatatattcctgcttacttataaaagtatttctataggataaattcctagaaatggagttgctgagtcaaaggatataatatattaagtttagacagkgatcaccgtactgtcatccaaaaacactacaacaatttatgcttaatgcataaccaagtcactttggaacttttgatgggtgatgtaatctttgtatttcattttccccacttgtaaaatgagaatgattatgcctcaggaataattctaaatgaggtcattgctttgatatcaccatgggtctttaagaagaaatacactgttgggaaatctaaggtgtcattttcattttaattttttctctcatatctcctcaaaccttagttccttttctattttaaccagcagaagaaataaa

SEQ ID NO: 4291 - DNA, 600 bp, Bovine  MMBT21450
gaattcttagccactgggcttgccagggaagtccctgcagcatgtttttaaactctgttttttctggagcttggaggctggagttgctgggaaggcccaggtgcagatttccaacccctgatccttagaaggatctagatctctagacctccaaggctaggaccttcagagtcttggacaggccatctcttctggccagtctagaactctcaccccatcttctacacaaaggctggtacctttcatgggaaccacggcagagagcatggggaaggagtgcaggcctgggagtcaggcttmagaaggagagggtrggacaagtggagagagtagcctggaaacatatatactagyrtatgtaacatacataggcagtgggaatttgctgtatgactcagggaactcaaaccagggctctgtggtgggatggggtcggaggtgggagggaggctccagagagagggggcacatatctatacctatggctgatccatgttaatgtagaaaccaacacaatattgtaattatccttcaattaaaaatacacttaaaaagccacgtgggttgtaggagtcaatgaaaagtcattactttgacatc

SEQ ID NO: 4292 - DNA, 415 bp, Bovine  MMBT22075
ggttggagcttgcctgctccatcagatatgcaggttcaggccagcaaggctgctttgaatgcagaagtgtcctgctgtggatgatamattatacgatcatcctattcttagcccaggggcctctgtgcattgaactgtctgcatctgctttgttttaaccacagtaccaagctttacaataggttggcaataggattctggcagacagagtgaggrtgaggaaaaatggaacaaaaagggaacagattgagaacaggtagcagagaaaatggtagggatggggaggaaaaacttctaccmttcttgctgggccccctgacctaggtagacccgctagggaacaggagtggacccaagaaacttacacgctgtaaggattacaggaagctgattctgaagacactgcgacccagct

SEQ ID NO: 4293 - DNA, 600 bp, Bovine  MMBT17346
ggcagatgggaggggggaaattctcacattttttgaaaatctcacatgcatacaacttgcattaatgttttaaaacacacattggctataattaataccacaaagttgtgcacatctcacatactgcgctgacccaactgtgagaatctgaaaacataagtttcacaggaagaaaccccgcctctctggggtcttaaaggaaggattctttccaccatgcttccttttgtcatgaccttagggtttctcttttttttttctatttgtgatcttgcatgatgttttaatagtacttaaagkcagtaaaagtccattctgcagttcaaggccaaattgtactaatacttttaatgctttggttcaatctaagtcgacagtgtgggacaatctactactaacatttcatctgcccttcagacttctcagaagtgcttttctggaattgtgttctgataccagttgtactcatagtggaagctcattattgtggataatctttggttttctttttttaaaaagtttttttgtaattaaaccccgttggatagcactttaaaaaagtcttatcctttacactaagttctacatataacttgaaat

SEQ ID NO: 4294 - DNA, 600 bp, Bovine  MMBT20130
aagcttttttaccaaacgcctatttttagatgacttctgcatcaaactataccatttcattttttttaagagcaaaatttcattttaaaaatgtctctaaacgtatgttcaagcytttgggggaataatccagctgttttgctgagcccccctcttttatttttttcaaggttgcacatgtacaaaaagtagattcactttgttacataaaggatgtactttgggaagactggagctacttctagttagcaagttctttgccacgcaggtaacaatttatcacaatttggcaagatacastttttacatttgaggttaagaaggaatgtagaaatagctctgggcagaaaggaaaggcttgcatggaagtatataacctgttgtgatctgatattttactccacacccatattataaataaacacaactgggaaagaaatcctcccaacactctctgcgctaaaactaaagcccgtgtgctatattaagagaagtgggatatatgtttgcatttgtagggatgggctggttgggtggttttcatgacaaaatgcttgctttcctttccccaccctcaaaaaaaaaaaaaagaaagaaaga

SEQ ID NO: 4295 - DNA, 600 bp, Bovine  MMBT22370
gaagagctacctctctggatgtctaccacacttcttagaactctgaagtaaatagtttatgcaaatacggccaagccaccccacctgagatgaggtcctcggtctggccaacaaaggaagccaggcccagcacccagaggtatttttaacagggtggagatgtgcgctttgcatattttgccttcttggcagcttgtggttcaaggtcccaaccaaaactaaatgtgtttacttgtttgtttagacaggtaagatctcacagtctcacaccccacagtgagaacgccttctctaaactgsagacaaaggctttcctcaaaacactcatttggttactcagtttgtgctgaagcctttatcctccaggtcgcatgagggttggcctggagtgtactgcaaagcccccatgtatgagcccacagaagcctggttctgtcagctctaagtctctgagtttctaagtgagagggcgttctggggaagcagggatatacggtgggcggttctagccctctcaacttctggagatgtcgccgcttgatttgttaagcggttttgttaaagggagcctgaatgtaactgcagagaggaggaagttga

SEQ ID NO: 4296 - DNA, 600 bp, Bovine  MMBT20748
ctattgcttaccatttaatcatcataaaataaatccttctctcattaaaaaataaatttatctcccctagcgatcattatttactattaataactttctaaaaacgaagccagtttttcctctggtttacttttacctgtctgttttattctatagaatattgtcataataattgaaatctttttctcttattcttattcaattgagctctgtgtttgttatctgcagcatactaaaggtaggatctttctaattatgaggccagtatttctgtactattttcctcattgtttttccaastgtgccatgatagaaagtgttgacagaagatggagcaaagcmgagtccagtttatggctcagtggaattgcattatagcagtaatttctcatattggaatgtaaaagcaaagtatgactcagaatggactgagaagcagctgtctagcacagggaactcagcttgrtgctctgtgatgacctagagggttgggattggtggggagggagggaggctcaagagagaattgatgtatgtatacatatagcttattcatgatgttgtacagcagaaactaacacaacattgtaaagcaattat

SEQ ID NO: 4297 - DNA, 598 bp, Bovine  MMBT21204
  misc_feature (1)..(81): n is a, c, g, or t
nnnnnnnnnnnnnnnnnnnnnnnnnnnnnnnnnnnnnnnnnnnnnnnnnnnnnnnnnnnnnnnnnnnnnnnnnnnnnnnnncctggtgtgcactgcgcgtgctctgagccacttatctaaccatctatcaccattagacccttaggatcattccacttttttatttttcaaatgctgtgattgataccactttttaaaattttcccraaaagtctttgtgaggagaggatttgcaaagtagaagcatgaacatgcctcgccctgaaactattcacccaagcacagttgygatcatattgsccacagagctgttcgcagaccagaattaaatcctgtaaaattacactgggcagttgtagaagaggaaaaaacgccctggaaatagctcagaagtattcarattagaataattttcataattaaataaaatttaatttttcattcctattataaaagattatatcaggtttctcatttcttggaaaatcagagagaacttaataacaaataccataattatctgcaaagactgaaccgtgattaaattatcaggtggcagctcctcctaaaactacttcttcaattagctaaagctggc

SEQ ID NO: 4298 - DNA, 598 bp, Bovine  MMBT20219
  misc_feature (1)..(11): n is a, c, g, or t
nnnnnnnnnnntgatagagtaaacgggaaagctcagtgtgcctgtgctggcaagcccctgctgtcagccccctcccctcggtgggactgcttgtctctgaggamgctgtgctgccacagcaaatggggaaaacacccacatggctggagtccagagcaccracttacccagtgaactgttctggataccctcctgcttattcacatatcgagccacttcrcaagtcttcctgataaaccccataaaggctttccaaaagtgtgtgtgtyccaggaatgattgtgctttctcaagtgtatsaaacatcctgcaattaaaaccaatccagaaaaaacaacttttaataatgattttccagaaggtcttatcacaaactcatctaagtacaaatatatacaaatgtctgacagtccgattatacaggacattagaacctttgaaatcgttttcttatttatgaacattccgatcctgatttgcaaaatgaggaaaaattattttatggaaatacataaaacataagacaacaagccaagagaggagaaagtgggaaattaaaggatatgatatgaagcgagttctgagttacaaaaaacac

SEQ ID NO: 4299 - DNA, 600 bp, Bovine  MMBT22548
agaactcggtaagactctgaaccgtggcagagaccccggaggtcctgaagttgggtgtccccaggcagatcggggacctgccctgtgtctggcctttctttcaattgggatcgtgtcttccctgtccagtaagaaaagacttcctaaactgatagacagactgttgtcctcggagctagtgagggctgtggggtgcataaggtgcaccaggcggctccaggtccccttagaagcgtggtgtggggacgaggggacaggcagatccaygtttataggtgtttgtggcaaaacttgaattgsctggcataggggagccatgtgaaaaggtggattcagatgatggcctttgatggtgtggggaaacatttctggtataaaaatgagcaagaaaagatacaaacccgtggcatagtatgaccagattttgtaaaaataccctgggagcacgcttatctcatgatggagaccccagaagcttaacaggtggagtttctgggtggggttcttttcttccactttttctgtgtttgacacatttccaatagcagctcacatttcttttataatcgaggcacacagtgtggaatgtaaagagccgtg

SEQ ID NO: 4300 - DNA, 600 bp, Bovine  MMBT22072
ttggatgaccttgcctcatggaattcctggtgtgggcaggcttcctaaatagttgccacattattccattttacacatcagtttcaacatatacaaatattttattcagattttatagatattgtacaatctgacaggattttggataacagctccttgagttttggggaaaggaatgggggaaggtagggccagtatatttatgaagtaaaaatacagaatgaaataaatattgcatgagacctacttatatcctcaaaaagttgtttatctgaaattcaaatttaactggatatcctrtattttatctccccaccccagggagaaggagagtgggaaggtcatcacaaaaattaatattaaagaactgggtagattgaagcagtgttccaaattaagagaatcttggtctgtaatgagattcaaggagtgctctgccaatgacctaggggttttaggcatctgcctgagaaaccaggatcttagtggatggccaaagagaactcagggagtgtgtgtacagcagaggattgacgctgatgggttgtagagaggcgctgactacagaaggtctagttatagaccagagcctaaaaagcc

SEQ ID NO: 4301 - DNA, 600 bp, Bovine  MMBT19312
aattagttgtttaaagtcatgtcctattttagtttccttcctatttacatgttggctttcttatttacttctcctcgagtttcagtaagcgttttctcttgttgccaaaatacgcagtcagcaaacctttaaaataattcatagtgtcctttgtgttgaatccagtcctatccagaggcatccctaccggggtctcygttcttctgcttcagtccctgcgggtttctctgctgcacmactgttactctgggactttgttaactcctgacttgtcaccrctgctttgtgaaccttctcttyttctctttcatagcttatatcctcattgtactaggagtccttgctttagtgtcttcctcagaaatgatgtgtgggaggtaaattttctgagcccttctttgcttaactttactttcacttaattggtaatctggctaaaactctagtttcaaaatagcttttccacagaatttaaaaatcagtgctcttttctagaactcactgttgctgttgagaagtctgatgccagtctaatttttgttcctttgtaactgttcggtttttatctttgaaaatatttaggatttctcctaaaattgc

SEQ ID NO: 4302 - DNA, 601 bp, Bovine  MMBT21015
  misc_feature (1)..(1): n is a, c, g, or t
ntaatcgaattgcattgatactccaaacaagagtttcttctagataaagaatgacaagcaaatgccctacagaatgacaaatgttgcaggtggatctgatagggaccatctttacaaggagaccaagttagctgaatactttcggcttatactgtgaataaggatcctcagaaacaagtccatttttctgatcctcatatgtaatcttyataaataaatatttctttgctttacatctgygtggaaaatttgcctcctacacaagccccaccttccagccaggtccaaatctctcactacyaatgttatcattatccttkggagtccagctgctttgggttatgaggattttttgcaaatacgaaccraagggagcaaaacataaagcacttccatttttttccttcccatttccccaagttaaataacagtttattctgcaggctttcaaatcactcccacaaaattggcaatccaagacaatcgacacattcatgctaatccacccagaagtaaatacactgtggtaaaactgtgacatttgcaaaggccgtagctccccaattactgaggaattaactagggatataatgagggaggg

SEQ ID NO: 4303 - DNA, 600 bp, Bovine  MMBT21599
attgatctgctaaatcctgggtatagaatgtaaggggtctcaacacataggaaggacagggagataggaaaggaagcagagcggctttgagaagaaaccatgaaagaaggacatacaactctggagttgtgtggatatatgctctctagaaagtggagtaaatgtagtgccgagtcctgcagagaagtgacccttgcaccgccaggagaaatagtgccccccaccccacccagaggctcagggctctcctttcataggcagaatagaaaagacacaattctgagggattctttcattcaycaacaaatattccatagtaacgcagcagtgaataaaacaaacaaaaacctctgccttcttgaaacttatattctagtgcrgcagagaaaatccagtaacatgcaaaaagtagtatttcatgactgtactgctgggtgtgctaagttgcttcagttgtgtccaattctttgtgaccctatggactgtagcctgccagcctcctctgtccatgggatttcccaggcaagaatactggagtcrgttgccatttccttctccaggggatctttccaacccagggaccaaacctgtgtcttttac

SEQ ID NO: 4304 - DNA, 598 bp, Bovine  MMBT18877
  misc_feature (1)..(72): n is a, c, g, or t
nnnnnnnnnnnnnnnnnnnnnnnnnnnnnnnnnnnnnnnnnnnnnnnnnnnnnnnnnnnnnnnnnnnnnnnnagtaagtgaatgttagatcgctagaaagatcataatatttttgagtttgaagcaaagaagaaattatgaaggaagggttcatggtttcatacttaattgaaaagaaacatcatttatttaacttaaaaataggaaaaccggatataaattagtgacacattaattttytgatctactggaatttgtgtggcctgttttattttttgcaccttgcacagtgctcggcayataggaaatgttcacactagttatttgttgaacaaatactgcaataattaactaaatagacttggattaattatataagacaaagaagtgaccctagggtccaattagctagttgcaactaagaatgatgagtgaaaactaatttctttggcccaaatgcaaaagaaccatgcaggaggctgtctactcagtggtgggatgggaagtgatgggaaccacaggtgggctgtgtaagtgctatcagaccaaatcatgtcacacaataagcatcagctgttacagggtaatagcagccaac

SEQ ID NO: 4305 - DNA, 600 bp, Bovine  MMBT20368
attttcactttgttagtcaaccatctcctctaatcatcttgagagttcattatatcaaagagtaaactgattactaaaaatatggacatcatagcctcaaaaacattggattctttaaaaactgcacactatatataggcaacaaaacaacactttagaaatcatatcccctggtatggcatcacttttaaaaggttttaaagagttcgaataaaaaatctcaagcacagatccttyatgtttcccatggacaaaatgctattctttctattaatttcatttggctaagaatacatggcyaaaatgctcctcgcaacctaatgctttgtggttaagtgatatacttctaaaatctactcagtggcaatttttaaaattagtacaaaatcttctctatttaaagataggaagctatttcagaggaattctgtaataagtttgtcacatcacaccaggcattcaactctaaagctatattttacacttatggcgcagcaatagcaattggcaaattacactgtttaaaaaacattttcatttttgaagcaaaaatatcatcaaatgaattatttatacaggatttaaaatatttctaatttt

SEQ ID NO: 4306 - DNA, 600 bp, Bovine  MMBT19155
taaaaataaagcttttccaaccaaagacaccttccatccagcagcaccaagacaatgccgtaataactaaacacagaggaagagatagaataaggatggtttttaaaaagtagaagtggttcttaaagattagaagatatgtgtttcaaaaactgggcttgagtgaagccatttgaatgcactgattgtttatattagcactcacataccaaaccctattttaggtgttggggatacaaagattataaagcacaatttctgacttcaagaagttcagtcttaaggaagcaacatgagccyttttaatcaatattttctatcaccacctagtcaaggctgaaattgtgaaaacagagaaagaggaagcaaaaaagaatcaggacaaagagcacttttgcctcacaaaatcgaaattakgggaagaagaaggtgctgattctttgctgaattgaggtcacttattaggtcatctgaattaaatataaacatatatatttttgcaaaatcagggatgggcaatatatggtgtttactcttcctgtccctagtacatcagagtaccttgtcctcctgaggtcacaggtggctttaatgtctttt

SEQ ID NO: 4307 - DNA, 600 bp, Bovine  MMBT21453
atggggtcgcaaagagttggacacgactgagtgactgaactgaactaaactgtacctgttttgtgtctcatgagcttctggacctgaccttttcccaaaacaactgctttggagatttcatgcttaccttggtccctggctcctttccctgagggccaccattggctcctccactgctgtccattctatatgggaggattaggccccatgccagttaagttattgcaagacctagaaatccttcccattgagggctyatttgcctatcagtcctacctggcgcataccactaatggaaayrgaaaggggggatttccaaccaggacccttgtaattgtggccctacttcctatggggcttaactcatgggagctcccactagaagggcatctgtctgactccactctggtggaaggggtattccatggccctcactgcttccaggaccccatggtcattgttctccckatgtatcttttgaaaacacagctctaatttatcatgttcttgtttaaagccttgttgtcttggcagttgctactgaacarcttctacactctctagcctggcagtcaaaatccatatggccccaactcacct

SEQ ID NO: 4308 - DNA, 600 bp, Bovine  MMBT22130
tgtcatggtctgatactacagtttcacacaggattcttcccattgtctcagttcccatagattgctcttgttcagtcgctaagtcatgtccaactctctgtgaccccatggactgcagcctgccaagcttccctgtcctccactcttctcccagagtttccacagatacttggtgtaattagtgtcccatacaccgttcacttctgaattatctttggggtttagatcctagatattttgctaccaacaatgagatagaaacattggcagaaaaaataacaaacatggagaagaggaaaygaatatttattaagtactccccatgtcccaagcaacaacccttttatctagagtgtctcatgaaaacccaatagcaactctaaaaaggtggtactattattctcctatctggatgaggaaccaggctcagaaaggttaaattacccaccccaagtcagagaactaaggagacagagagctgggatcagttatcaagtatgcctaactctgataccgacttgggtagcattggtagtacttgaattctttcttttctgaatttgttaatattctacagtttgtattataaaaacattacag

SEQ ID NO: 4309 - DNA, 587 bp, Bovine  MMBT21791
ctgccctgctgctctctgatgttcccttgcrtgtctgttacaaatggagttggtagtaaatgtagttttcaaggtagcctgacatcttacctgtataacaagctgccacggaatragctggcaggcagtgaaggatggggtgccctgagcctccctccctcctctcccactctatgttcttattatgcagaagggggtcatgaaaattaacagaactttattcaagtgtagagacagacagctgataaattatacacctgcctgggagaagacagaaaatcacaaggtcatgacagaacrcagcagatgaatggtacatcaaggtcaagagccatgactaggtgagcagccatatgccccctctgcytctgaaaagtttgcttttccacagattcaaggaattggagcattggctgcaccagaaaagagaacacgctgtgggatggataggtgatgtcatgccaggtagatgtctgtagtgtccccaactccgaaatgtaaggatctaaatcctcctcaggacagatgtaggggcaatgtggctctactgagttgctctgtgacttgctatagaggaaaataaacag

SEQ ID NO: 4310 - DNA, 601 bp, Bovine  MMBT21790
  misc_feature (1)..(1): n is a, c, g, or t
natcactttgggacatgaagaaggatgattcctccatgaaaccaccatggaagaaaaactgacacctgggtttctactaactcctgccagcatttttaaatgaaygcacacacaaatatgttctgacagttgcaaaaaaaggataaataatgaagtagatccagaaaaagatatcatcygctaatcctgccctgctgctctctgatgttcccttgcrtgtctgttacaaatggagttggtagtaaatgtagttttcaaggtagcctgacatcttacctgtataacaagctgccacggaatragctggcaggcagtgaaggatggggtgccctgagcctccctccctcctctcccactctatgttcttattatgcagaagggggtcatgaaaattaacagaactttattcaagtgtagagacagacagctgataaattatacacctgcctgggagaagacagaaaatcacaaggtcatgacagaacrcagcagatgaatggtacatcaaggtcaagagccatgactaggtgagcagccatatgccccctctgcytctgaaaagtttgcttttccacagattcaaggaattggagcattggct

SEQ ID NO: 4311 - DNA, 601 bp, Bovine  MMBT21789
  misc_feature (1)..(1): n is a, c, g, or t
naatagtttcaggaggtttctagtctcatgccttccctagttggctcacctgatgcttctggctttctggactcctgtgggctacatcactttgggacatgaagaaggatgattcctccatgaaaccaccatggaagaaaaactgacacctgggtttctactaactcctgccagcatttttaaatgaaygcacacacaaatatgttctgacagttgcaaaaaaaggataaataatgaagtagatccagaaaaagatatcatcygctaatcctgccctgctgctctctgatgttcccttgcrtgtctgttacaaatggagttggtagtaaatgtagttttcaaggtagcctgacatcttacctgtataacaagctgccacggaatragctggcaggcagtgaaggatggggtgccctgagcctccctccctcctctcccactctatgttcttattatgcagaagggggtcatgaaaattaacagaactttattcaagtgtagagacagacagctgataaattatacacctgcctgggagaagacagaaaatcacaaggtcatgacagaacrcagcagatgaatggtacatcaaggtcaagag

SEQ ID NO: 4312 - DNA, 579 bp, Bovine  MMBT21241
tggtgcgtgaaagcacaaggtagccagtatagtgggcaaggtagaaaaagacacacccaggtcattgacagacagcagagataggaagtagtacattggctggtgcaagctctgctcctcctttatgatgaagagaatgaggctgttkcccagaatggagacagcatacagcagcaagaggagggctgctaaccaatgctccagtccctccatctctgagaagcctgttaaggtgaagctggtcacgctcaagatgttagtttcaaaacttcccatggagtccctgagtatcttttggaraaacacaatcagagtaaagtgaggtcagacaatggaaagaatggtcactgtccagaatggaagggacaaggctacttagattgaacaccaaagatcatgaaaaattagaaggaagcaagctaggtatcattgctcacatctcaggccttctgccatctgatcatttctatagttgggtcatgggctccaattccttccccacaaaaatcctttgagtctattttgaacactgtatcatattcttcctgtttctgtattctttgcagaaatattaaaatc

SEQ ID NO: 4313 - DNA, 600 bp, Bovine  MMBT19313
ggattcactttaagacttttttaattagttgtttaaagtcatgtcctattttagtttccttcctatttacatgttggctttcttatttacttctcctcgagtttcagtaagcgttttctcttgttgccaaaatacgcagtcagcaaacctttaaaataattcatagtgtcctttgtgttgaatccagtcctatccagaggcatccctaccggggtctcygttcttctgcttcagtccctgcgggtttctctgctgcacmactgttactctgggactttgttaactcctgacttgtcaccrctgctttgtgaaccttctcttyttctctttcatagcttatatcctcattgtactaggagtccttgctttagtgtcttcctcagaaatgatgtgtgggaggtaaattttctgagcccttctttgcttaactttactttcacttaattggtaatctggctaaaactctagtttcaaaatagcttttccacagaatttaaaaatcagtgctcttttctagaactcactgttgctgttgagaagtctgatgccagtctaatttttgttcctttgtaactgttcggtttttatctttgaaaatat

SEQ ID NO: 4314 - DNA, 520 bp, Bovine  MMBT21797
ttcaaggtagcctgacatcttacctgtataacaagctgccacggaatragctggcaggcagtgaaggatggggtgccctgagcctccctccctcctctcccactctatgttcttattatgcagaagggggtcatgaaaattaacagaactttattcaagtgtagagacagacagctgataaattatacacctgcctgggagaagacagaaaatcacaaggtcatgacagaacrcagcagatgaatggtacatcaaggtcaagagccatgactaggtgagcagccatatgccccctctgcytctgaaaagtttgcttttccacagattcaaggaattggagcattggctgcaccagaaaagagaacacgctgtgggatggataggtgatgtcatgccaggtagatgtctgtagtgtccccaactccgaaatgtaaggatctaaatcctcctcaggacagatgtaggggcaatgtggctctactgagttgctctgtgacttgctatagaggaaaataaacag

SEQ ID NO: 4315 - DNA, 600 bp, Bovine  MMBT18604
tagtttttaatccttagaattttagcaatattttggatagattagtggttctcaagattagttgcacattagaatcactttggaaagtttttagaaaaaagtaccagttcctgggcttcacttgtgaagattttggtttaattgattttgagggtgtgtttggcagggctgggtgttggtgtttctggattttgtttctaattcttkaaatcagtcatttttggcaccagggactsattttgtggaagacartttttccacagactgagatggggtttagggatggtgtggatggtttykagatgattcaagtgcatacatttattttactaccactgatgtgacaggargcggagctcaggtggtaatgtgagcaataggcagtggctgtaaatacagatgaaacacctcctgctgtgcagcccagttcctaagaagccacggacttgtaccaatctgtgaccyggaagttgtgaacccttgcttccgatgattaaaatctctggctagtcattaaaatctaaccactggaatagatgccccttggaatcctgtataacttgaactacttagatatagtccttatgtttttaggtatca

SEQ ID NO: 4316 - DNA, 600 bp, Bovine  MMBT19247
taacacccgggttgcctgctcctgagagcatctgcatcactaggacagtttgataatgagattttgtataaaagaaatggacattttttgagagaagtcatgatgtaaagtgtattcttagtaagacatataagagaagctgaaataaaatccttgtaaatttcagtggtgagactatttccagaattagagctctctaattaatgattttttggaacttgttttaatygaagtcctcatatgtcaactcataattttactgggacytataatttgcaaagtgcttttaaaatttacyckcctccccccaaatcctatataataaacaactaatttcttctgagataatttattcttagctcaggctaagaatgctgcttaaagttttatgaaacatctacaaacataacagatcatgcycattttcttagcttttattcttactttgttcccttggcctcaaatccataatttcctgagggcatttcagtgcactttaccttagagaaaaactagttaactacgtcctaatctcacgtcatgagaaattcacaaaccccttccagtgaatgcagactaaatgctgtatctggrgatcct

SEQ ID NO: 4317 - DNA, 600 bp, Bovine  MMBT20797
acatgactctccaaagctttagaaataagataacttgagtggctagcagagtcaaaatctttcttaactatgagaacaaaattcaactgatacttgaacaacactttctacgccatttgcagactaaatttttacaatttaaaaaattatgtaatagctgaaagtagattcaatttcaaaacaagtaagtaggttgtaagtaggtttggaaaagatgactagcctatgctttcacttttgctaccttgtcccaaaggatgcaaataataaagttaagcattaagtraggagaaaactttkggccctgtgtttaatatcattttactgttttgcttaagtctatttttaacagagtactcataaggttggggttttcctaattccaaactctttaacagaaaacagaaaccagttaagaatagaaggctctatttgtcctgcttaaggggaaaaaaaaatacttttgaggaaacagatggtatgtagctaaccctaaccacgaaagagaagtgttgccgaacctcagccttggttcatcaaagttgaatagaaactcggagacagagttttgggtgaagtagaaaagagtcaggaagcaac

SEQ ID NO: 4318 - DNA, 600 bp, Bovine  MMBT18600
agcacaaatgttycatgagtctctgagttcattcataaggcagatctccctaatgtcatattcattcactcagtgaatgatcattaaacctgtacaggtgctgtactatttagattataaacaatcctcgctcagaaggggtcacaatatagtgggaaattacaggagacacaggttygatccctgggttgggaagatcccctggagaaggaaatggctacctgytgaagtattcctgtctgggcagaggagcccggtgagctacagtctatagggtcacaagaattgggcccaacttakcgaactaaaccaccaccacatagtataaataaaaatcataataaaacttgattatgctgtaagaatattgtgaattaactgctaaagtgatgcaggagagggagcctgtaattgcctctgactcaggcaagatagggtagcgtcagcctagctcctttctgtgttagtcctacagcaggcctcagagaagcaagaggtaattttggttcctaatttctggttcatttctcagtaacaaactgggacatgttgaaggctatagaaatagatgtttaaataaaatccagtcttttcacccat

SEQ ID NO: 4319 - DNA, 600 bp, Bovine  MMBT16142
tttgcccagaaaaaagttaagatctttcttaggatctcagtgtcactgacttggtccattaaaaaaattcaatgaaatgttaggaagcgaagttcagaaagccttgcatctcaaaccctgggccatgagtgtaataagaatatgaataacactaatactgtaagaaaacatttatagggctaagtttcttttaaacccactattggaattttataaataggaaccccaagccccaaaataggaagtcattttatcttttactgacatattctgatcaaaacagtggtgagaatataagtkttagtttttatcctgcacttaggagaaaaaaggttactactacaggactgtgtacctcaatgttataaaccagcatttgtgaagaaatgttcagtactaatttcaaaacaaacatagtgtttgaaagcaaagcataatggtgacctttctcattagctgttgctcaaacaaagatatgttccagcaatatccgatgcttccttcctgccagggcctccaccctgtgcaatttaaaacacttgtgttacatccaaatcagagctgaggatgtggtagagctgagtttcaacagcattgtgt

SEQ ID NO: 4320 - DNA, 600 bp, Bovine  MMBT22183
ctcctctgacaaatggaatttatttcctgccctattggtaaacataggatgtcacagtcatcagcaattgcagccaccatagacagtgagctggtgatccctgagggaactcagcaagaaagaacacctgccatctagcagccatcagactgcagccacttcccatggtgagccctggagaaactcaggatatgaaaatacaggatactggccccagatagctggggtgcatatcaaaggaatgatttcagtgagcccagactcttgcatcttcccatgcacagaaaatcaccaaactcyttaacctgggttatctggttttctttcattaacaactgttttttgatgttagaccacctgccctttgttgcacaacttctatataacctgacttctccccttgcctccttggagcagttctgtcagttacttagatgctgcctcctaggcttgaagtcctaaaaacacccacctaatgaaacctaactctcaactttgaggttgtgaataagtccacacctccaataragccccatcaagrcccagaccccagggaggcaaatggagacctctgaccttcaggccacgctggaaggtgga

SEQ ID NO: 4321 - DNA, 542 bp, Bovine  MMBT00737
tgtcagaaatgttttaatggattgcagtagtggttgcagaactataaacaactgaaaaccattgaactttatgttaatagtaggtggattattctttaataaaacttttttattttttaaagctgttttttaaaatgcaagtctgtaattattccataactctagggttttgtcttaaaactcaatagatggattgattgaatgtttatcaggtgttaacatgtcctattaagataacttagcatcaacgtacatcacattctttgtgtatgaggaattagcctcatcagataatgaagwagaatggttgtattctgctacaaaacacaaaagttttgtagtacaaaagttctagactttaagtgactgatttttttttcctctgtagctcaacagagcattccaagaggaagactctccagctactttttattgcatcagtatgcaatggtttagagaatgggaaagttttgtgaagggtaaagatggaggtaagtgtttaacagaaagacaaaattctttgcaaattttttacttgacaa

SEQ ID NO: 4322 - DNA, 600 bp, Bovine  MMBT03234
gtgagtctctattacagcccctgccttgtctttccatccaggcagaaaggacaataagtctgctttgggtgacaagaatctttcagctgcaaaagtgtgaaccaggtctccttcagcatctcctctggactaatcacacggtgcccggccaaagagggttttaattacacaatttgcagaactggcccgccttgcagatggatttgaggtcccacaccattgaatggaagggagaacattacagaagcacagccaaatcaattctagtttccatccaatatgagcatctcccagacagcrctcacattaacacctgtgtctacttcaaattcaacccatttatagaactccttctgggtcagatgccactgatatgataaatgaagttgtggaacagttgagaagtgaatatgataaagtcctatcttctttaatgctagcagccctctatctaaaagcgaaacagtgcaggttttaaaaacaacaatttagagccaaatcccagatcctcacttgctagctatgaccaggaaaagctcccgtatctgcataatggatgtcatagtacttaccggccagatgcaagaagctcaaaaacag

SEQ ID NO: 4323 - DNA, 600 bp, Bovine  MMBT09767
gtgaatctgggggttattttgggaaaaataacctactgtgtcatccagtaattgattgacatagtacagtgtacatagaacatggtcagtaaatacttgatgagttgacatgagagggagttagggcaagggctatcaagggtgacctgtagcttggaggaactcataggaataggccatcaaaggagataagttttaaaatgagagtatggctttgttttttggagggggtatcatgatgagcttgaatgacagaggggcaggcaagataagatcctccataagtaagcagaatatggrtcaggcaggactggcaggagtggatctgggagtctcagcacagagctgagcatgagagaagatgggcctgcaaagccagaggtatagaggagtatcttagtagatgcccccagttccggaacggggagcagggataggttatcaaaggacagaattggaacctgagacagaaggaactctggaatattttagtaaaaactgaggaaggagattgcttcgaggaggcatagggtgaggcctgaggcaagaccacactggcttttgtcaggaggaggtctttgtgggagaccagtttcagtg

SEQ ID NO: 4324 - DNA, 600 bp, Bovine  MMBT14461
agagtaaatcttgctattactattgatcatggttttatgcactctggtagatatcagtaaggcattcctgtaactctctggctggatacagaatcagacacaccagacagaatagataagtctcaccatgaagatcaaatgccaaaaagcagggtaatggagtaaaggcagccaccttttaagaaagtaccggctgtgaattgctcctgaagaggggagraaacaattcacatgtcaagtatggtgtgagcaaatcaatgggagcaagaatgagcacatgatcaggagtccttggaattscttggctgaatccggaggttttcctattgggtgttaagaataatcgattaagcagtgggaggtaatggaagaggttagaaagttgtcagaagcctcgagaattcctctacgtgggtgacaagctctctggattcaactttttcttttaggcttggaaggcccacaggaagtgctctttagaataaactgggaggtgggggtgggagaactatgcaaaatacctccgcatttagcactaaatagtattagttccttttccccctcggagattgaaaggttagtttaataaaggggaagggt

SEQ ID NO: 4325 - DNA, 600 bp, Bovine  MMBT19721
aattataagtgtgtactgatgggttaggattatttttctataatgtctcctggaggcacttcacactgtcatttgttcaaasgaaaatgatgtattcttagagtaaagcatcgattattttacaaaaataattcaggccttcttaatttcaggaagtctatagttatatcattaactctgcagcttcttcatcacatsggttttgaaaattgatttatcattttttwaaattaatgtattttatttaactgtgctgggtcttgttgtgcatgcaagacgtgagagctagttccctgaccygggccccctgcattggaagggtggagtcttagccactggaccaccagggaagtccccccaacttgtccttttaatatcaagtaacttctaagtgaaactgacagttatgaaggttaatttttttgacattttagcatgtattgtgggaagatttaccctgaaaacatgtttaamtctttgctaaaagcaaaagtaagtggcttactttccttgtagtcttaagagatttcttggactaaccttgtgacatttctgtcataggagcaccaagtttctttatatattgccctttccacctgg

SEQ ID NO: 4326 - DNA, 600 bp, Bovine  MMBT00739
agaggtctttatctgcaccagctcaccctgggcttgttagtatctacagttttattttcttgagtagaagaattctcccacccctcaatggccccaagatgtctgaggcactggctcttctcagacttcagcccatcttcccaggaaggagaccaaatggggcagcgggggaacaggatgaatatggtctcatttcggcctacgttcctttctgaccaggtgaggctctgcagaaaatggaaaggaatggagtcagtagccacagatcatgagggggctggttcctgtgtgagcgtccaygtaaggaggtgtccagatggaaagagatgacccaattccagatctcctccttgtggccaagaccctrctcatgccaccaagaaaatcaagacaaaagaagaagggaaagcacacactagccaccatgaacacagaaagcacagtggtgaaaacagcctgaaaaaactgaaaacattaattgctcagttatgtctgactctatgcgaccccatagtctgtagcccaccaggctcgtctgtccatgggattctccaggcaagaatactggggtgggtctctatgccctcctccaggggatct

SEQ ID NO: 4327 - DNA, 598 bp, Bovine  MMBT01593
  misc_feature (1)..(102): n is a, c, g, or t
nnnnnnnnnnnnnnnnnnnnnnnnnnnnnnnnnnnnnnnnnnnnnnnnnnnnnnnnnnnnnnnnnnnnnnnnnnnnnnnnnnnnnnnnnnnnnnnnnnnnnnccttcctaaaaataatatatatgttttccatcctttctttttagtctttggaacatatgaaaagtgtattcaccactctccttgcctctaggtgtgcatcatatgaccagaccattctatcggcctatgttctggccaatggaatgtgggagaaatgaggtactcctttcccaacctgaacccactaaaaaagtcttmcagatgtgaaatttttttctttattgaccccatgtgaggacaacatagtgtcctgtggtggaatgwatctgggtttctaagaaatttggggaaattcttcccaggggtagccacccagccaggaatttctgcattggaattagtgtcaacaagaaagtacattgtacactattgagatttttagcattgtcaattattagagctaactgttttaaccctatataacatatatttttttgatttgtgtgggaatggtgatgaccctcaaaggttgagtacctatgaaggagtgagtgta

SEQ ID NO: 4328 - DNA, 600 bp, Bovine  MMBT04004
ttgcatcycctgctttggcaggtgcttctttacygctgtgccacctgggaagactgaggaagaaggcaggagggcaaaaataatttttctgaaattaaagaaattatttaaaaacytcacttcttgaagaagcagtaaaagaagtatttgaacctatcgatgtaatcatttcaaaayacaaataataaacctgatgagagagttaatcttcatagttaaattataagtgtgtactgatgggttaggattatttttctataatgtctcctggaggcacttcacactgtcatttgttcaaasgaaaatgatgtattcttagagtaaagcatcgattattttacaaaaataattcaggccttcttaatttcaggaagtctatagttatatcattaactctgcagcttcttcatcacatsggttttgaaaattgatttatcattttttwaaattaatgtattttatttaactgtgctgggtcttgttgtgcatgcaagacgtgagagctagttccctgaccygggccccctgcattggaagggtggagtcttagccactggaccaccagggaagtccccccaacttgtccttttaatatcaagt

SEQ ID NO: 4329 - DNA, 600 bp, Bovine  MMBT07157
gtctggtcagtcagcctcccggtgctcagcacaaggacaagctctttaaaaacctctttttctcactggagtgaaacagtcccatccctacccccaagcccttttctgactggctgctctgtccctacagcagagcgatgactcctctgatgagggctcactgcacatagacacggacaccaagcccgcccgcaatgccaaagtgaagaaggacagcgggggttcggccgcgggcatcctggacctgcttcaggccagcgaggaggttggcgcactcgagtacaaccccaacaggtaggyctagtgccctcagggaactggggggactgggtgcttccacagagttgggccaaacagggctccatcagcccatgtcctggaggctggacagtcagagtgggacccctgcctggcagaggtggtgccaggtggccagggaggtgagcgggggctggctatgtaggtccttcgtgttgcagagctcctgtgtgaggagtctgtggggcctccatatctgtgtgcctgcgggaaagcaggkccaggctgggtacctggagggtatcagggtttttccagactgggacgtccagctgtctctgc

SEQ ID NO: 4330 - DNA, 600 bp, Bovine  MMBT11878
atttcatcttgctaagagttatattgatatactatatcaatataaattgtattgatatattatattgacataatagatgtaatattagttatattgatataatactaaytgacaaactctattagtcctgaattttaaaatttaagttctcaagtttcctcagctttccttctaagaagcaatatttctgttattctggaatgaacataaatcctcaagatttctttagatgtcatctatctytgttcctccttacatctcttttcatctgaagaacagagtaagtatgggactcttaastccttcgatagcytttggtggagtggaaakamgccyctctctacatgagccaggagacccagattcaataccagggtaaggaagatcccctggaggaggatgacaacccactccagtactcttgcctggagaatcctatggacagaggagcctggtgggctacagtccatggggtcagcaaaagtcagacacgacttagagactaaaccatcaccaccaccacatgagccagaacagccagtatttccaaacacctgagcaggtaagcagatagaagytgtgcctctcatggagccccag

SEQ ID NO: 4331 - DNA, 600 bp, Bovine  MMBT18595
taagtattcgaatattatctgaaagtgaaaatgctttctctgagtaatcttgctcagtcatctgattgtaggagaacattttgtgtcgcacagttatttgtgtgctagctaacttctggcctgggttatttagtattcacaacaactaatgagatagtttgtgtgcttgaaaaagcagagtgggaaaaactattacaattttataattaactcttggttctttgtagtgttctctttgctaagatactgttattaaagaaaataagagattcttayttgtaaagcctagtctgatttttyctaattatttaaaaccttactatgactcattaatgtgttgcaccatcattttcaattcatccatagtcacaacattttgcattgctatgtctatcttaactgtcattaaatttctttgaccaaaggattttgtttttatttatttaccaagatttatccttttctgtcttggtgtcttctatttgaagctgtttttcactatttcaagagcattaattggtagagcccagtattttttcatttttttaattggaatataactgctttgcaatgttgtgttaaaagggaggtccaagaggg

SEQ ID NO: 4332 - DNA, 598 bp, Bovine  MMBT01684
  misc_feature (1)..(39): n is a, c, g, or t
nnnnnnnnnnnnnnnnnnnnnnnnnnnnnnnnnnnnnnnctgcacaaattttcataaagcacttgcattttgaaagcatttttgacagagttccacatcagcagtaaatggcagagtgataggtgtgggagtcttggaaaagtggaaaattggcttaataaattagatactgaaagcaagaaaccaaaaaacccagagttctagatggatgacactgcattggcaggaaaggtggatatgtggagactgacagccagaagtaaacagatttagatcattctaagtctaacatacaaaaawggagagagaaagaaagggaaactagtcgactagttttaaattagaattgtgtcccaataactgtctgttagcatacctgttgcccatcattcctttgttttctgggtataccaatgactgacgaaatgaactccaagccaatatttggtgggcaaggtcccaagccagtagcaatgtttctttttaaaccgtaaaatgcacttggatttctttagttaccaagtaaagaagaataaagaagaaacacttagttggcacagagtggcttcatttagaaaacacaaatgaatcttctgcc

SEQ ID NO: 4333 - DNA, 600 bp, Bovine  MMBT03239
ctattttcataatgtcttctaagactgtaatttaccaacatttaatgtgacatgtaaaggtcacattattcttccattcactatacgttgartgcctacagtgtgccaggcagcgtaccagctgctagggatgcagtaataaagaatgcaaatgaaataaatttaacaccaaaggagggtatgatttgccttcctggagttagaggtctaccagaggattagacaagcaatgataatcgagtataagttttctgacagagcaagtgctgggaatcttggcagggttatttctccggttgycaggtgggcaggggcagtcctccctacatattacatatggccacttagaacgcagggcattgggctgactrtcctgattcccagtgactgcagaccacaccataaagtagagaagcatcatgctgttcccagtttgcaggcactgaagcaccttatagcttaaattgccrtataatgaggtcttgtttgtacttctggccatcttgacggatatcagatgggatgcctttatatcaaactaccaggtaataaatattgttctaaaattttttactrtattaataagactatttctttttt

SEQ ID NO: 4334 - DNA, 600 bp, Bovine  MMBT19813
ttaagggccatgtgcccaaacctcactatgggtctggagttgttttacatgaaccactcaaccaccctgacccttttacaagtctacttactgaaacgataaattcggtgggaaaagtattaaatccaactgggttttaaactgttgttctggttgtaccatgtaaacccaacttaatagcttctacagtcaactctggtcaagtaagaaatgtcatactcatgcatacgaatcctctactgggatcttttattcacatactattttcatgtcatccaatgcctggttttcagtttctcycaatgtgatttaagagcatgatattttagatttctaatgcattatgaatagaatgaatttaatataaactcccacttgctgaaagataatttctgtttagaaacaaaggaatttcaaatagacaaaaagaaatgaaactcttaaactctcctctcttttgggtattcctgcaatggcaccccactccagtactcttgcctggaaaatcccatggacagaggagcctggtgggctgcagtccatggggtcactaggagtcagacacaactgagcaacgtcactttcacttttcattttcat

SEQ ID NO: 4335 - DNA, 598 bp, Bovine  MMBT11170
  misc_feature (1)..(113): n is a, c, g, or t
nnnnnnnnnnnnnnnnnnnnnnnnnnnnnnnnnnnnnnnnnnnnnnnnnnnnnnnnnnnnnnnnnnnnnnnnnnnnnnnnnnnnnnnnnnnnnnnnnnnnnnnnnnnnnnnnntggagagggttgcctttcctcttccgaggaccttccccactcagggattgaactcaggtctctggcactgtgggcatattctttaccatctgagctactgtggctaatccagagagaagacctggaggtaagacagaaccaggagtggcggttggtctctgagctgcttttggcagctgtgcagcartggagaaaacagtcacaacatcagatccaacacagttatcrggaatgtggatcctgttattaagccaaataccccsagggtgaggcttccaagtcctgggctgrgacctggctgccagcctgcccagcacaagtaaggccccactcaccaccagcccctcttcatctttggggatttagtggccctatggaggatgcacaggggcctgagaagggcacaggatcctctacaygcatgtctgagaagccccaaacatgtgactacgcaaagatttatagtgcaaatgatcatgagtgag

SEQ ID NO: 4336 - DNA, 600 bp, Bovine  MMBT01677
agggaaaagtttgagctgatagtattggaaggaagtgtgtctgctggacagaatacagaatgaaacagtaagtaaacagaatacattccaagctgttagagtcagagtgtgagttccaacctgaaataacaagaatatttaataggccaattggataatcaatgaactcacagaaatggctcattttggggtactcgtatgaccatctgccttgaatgcaaatacagattattactgattacatgtcttataattaaggtagatgagacaggtggaaggtggaattaaggaagggaggcrgtcaggatcaaggagatgctcagcagagctctagttcctgaaaaggagactggcaaaaagcacttgcaccagctgagaggatctggtgcacaatgtaagccatcagaatagggaatcagaagccaagaaacaagataagggtaaaggtatgaaactgagtttcaacaaagacaggatattgagattgggtacattctaaattggrttcctgagtggctcagtggtaaagaatctgcctgccaacrcaagagactcagaaaacacagatttgatccctgggttgggaaaatcctctgcagg

SEQ ID NO: 4337 - DNA, 600 bp, Bovine  MMBT22193
tgctccatccctcacgggctgttcaccaaagccaatgccagagctaggcaagtgaggcactcagggcacagatttaagggggcctcctctcagggaaacacaaaattggccccttgctgttcagtctggatgcccctattttcccatctctgccactttgtggggtgagaatgaaggtcacctcctcaaggaagccttccttgatttcaccaggcagagttttaggttctgcctcgacactgawgactctcctgtctcatgatggatatcaactccagcgcaggctggctcctcccaggragaagctactagaaaggagttatgcttctctttgcccctcagaggctgcagtaaggcccagaacacagcaggtgcttagtgcacttgtagtgaacaagcccagggacccaggggtgacagcaggacaggaagatggcaggaacagatggcagcgtgttagcaggggcgcatacgcatactaccctctgtgctggggcccagaatacgggtgtctcgaggtggagggagggatagggtggcttctggacatgtgaggggaagggctcaccctgggtgtccaggaaggtgctggggccgctt

SEQ ID NO: 4338 - DNA, 600 bp, Bovine  MMBT00830
aacattctctgtatgtgcatcagtcttacaatttattcaactcataattcaacacctactggtaatttgtacattgaaaaaatgattagaaagtatcaggcattatcctcatctctatggaactaaaaaccaaaaaaaaaacataacttcctttagaaaggtgtgaaacaaaaggctctagggaaatcttgcaggagctaattaattcagtctgccacaaaaatgttgcaacatttacattataaggcttctttctgcaaaattagatgttagttttgaagtgttaatatattaaaatayatgcaaattatctcaaatagtcactaactactatggattttcattctgttaaaagttataggttytagctaatcaaatatgcaaacactgggtgatctaaggaaaaaattcttaggcatgattaattgccaaattcttttatctggaagaatctagatgaaamtaattttattaagattatttgtgttcatttaaattggtgaattgatataatgaaatttaagtgggctaaagcatagcaaagtattagtgagaccaaagtgtttactatagttattcaggataaaacaatcccctgta

SEQ ID NO: 4339 - DNA, 531 bp, Bovine  MMBT01716
aagcactgattttatgattttctacatataagtttttagtcattaggcatgctaatgatgcaccccattttttcatgtgacaagaatacctggacacagtaagtaaacagaatatggtttaaagacagcactgctctgattctgaccagtaaacctttaaagcaaaacacaaaatgtttaacctcttttcaacaaacttaattttctctcaaaaatcaagaatatttataggaatgcaaaaatattcaaaatccaacaaagtaagattaataacttctgttatccacttgaaaattaccmaaagtaaaaaggaacaggaaaatacaaaccataatgtggatgaaaactgacacatacctgacagaaatgttagaattagcagacaatggcaataaaacaacattattactgcatttcattttttctaacatttaagaatctatagaaaagatactggaaaaaaattcgacttttgcagttgaaaactatacagtgagaggggaaaatagactgcattaatagtagataaca

SEQ ID NO: 4340 - DNA, 600 bp, Bovine  MMBT07797
ggaaccttgtaaagtcctcagtgaatactgtgtgtgtgcgcacgtgcacacccagtcacttagccgtgtccagctctttgcaaccccatggactgtagcctaccaggctcctctgtccattggatttcccaggcaagaacactggagggggttgccatttccttttccaggggatcttgccaacccrgggattgaactcgcggctcctgctgcatctcctgcattgcaggtgaattctttaccactragccaccagggacctttcccastgaatactgaggagtagcaaaggaaacagcyatgagcccagggatgccaggtccacgtctgtgtccccccaccctgggagctcctgcagtacacctcagtgctagctgctaccttctcatgttctcctktggggctttcaacttcatgctcttgcctctccttcacttctagttctgccacagaaccaggaaattatgctgagaatgcagtttctctttgggaacataaagtaatctgggaaggcttccttgaagaagcagtcttcctccacccagaggtgtcctgctgaccagagtgctccagcaggcgcttgggctgctttcctctcct

SEQ ID NO: 4341 - DNA, 600 bp, Bovine  MMBT17599
tgacaagacaactgggccatrtggtgacaatattaattagacaattgctgctgaagaaggcatctgtacagctctccacctgcttccccaccatactcagttcatctacaacaaacagccaaccggggctgacagccccaaacggtacagctgtagttttctccagggtagtagctccagaagaaacrcaagatgcaggagacctgacagagtcttgggatggaatttgccctctagaccttctttgcaaggctgccagatcattgtccagaggttgaacaccaaacccttagctcaacrctgagggctctctggcagttttattagggaagtcaatcagcaacatggccttaggctcagcaaccatgtagagctgggttcaaattccaggcatgccttgtgctagctgtgcratcttcaactatttaatttactatttgaacttcttccyttacttcgagaacattatcaccttcccagtagactgtcccttacggccttcataagagttaaataaaataatatacatgtaacttctctatatcggctgttttcccctctccttaccctctgaagtgctacccacgccagtcgatgaac

SEQ ID NO: 4342 - DNA, 470 bp, Bovine  MMBT23540
tgatgttggggtcccacaggctgcctatcgcacgggcacaacgtgaccaggagtcagagagaggggcgagcgtgcttgcacatgtgcacgtatgtgcatgcttgtgtgtctgtgtgcatgtgtgtgtgacccaagtaaagctcccacacggtcgcccccacggttacctgaactcacacatggcgtggtgtccttcatcctggggtccttgcagtctgtggattgggaagaggtgcaaccatcagcccctgccttggagagcttgtcttayagaacctctaacgccagaggtaacaaccrtctgctttctgggagyctgtctaaaggcggccccttcagaggagccctagaatggacgctgctatgggtcggaggcccgaggcctgrggctgccttggccacctcaccactagtccctccagaaacttccagatccaggcagaagccccctccccagacttgttctaaaa

SEQ ID NO: 4343 - DNA, 600 bp, Bovine  MMBT03675
aaaagacaaaatcaaaacatttttaataatataaaagaaaacaaatccatataattaaatgctacttaggtgaaagaaccttagagggtatatagcatttattttctccacaaaatgtgcatatcttgaatttaatgtaaaacaccttgtttcagttccaaaggaagaatatcataatatagagttcttgatgaatctagatggaatgaatatttaaatagatcccaaagatcaaaacaagcttttatttggtcattgttctaactctttaatgttcattaaattgattcacttagaaaytttagaaataaaactctacaaccaaagcacagaaaattcagctattcctraaaaaaactaaatgcatagtctttagtatatcattaaaatagtggttgtggttaagcaaacaaatgaataaaaattactacaactcatgtatggtaaagttacaaagcaatacattagaagttttatcagatgtatttgcactataataaaagaaatctggataatagtattcagtaaaatgtttttgattattaaaagaaatgaaattcccaattaaccctgggttgtgttaggagcagtgcatttgtc

SEQ ID NO: 4344 - DNA, 600 bp, Bovine  MMBT04319
gtctcgggctaagcagaggagtgcccaagtaggatgcatggctcatcgcatgtcaacatcagttttcygggcttttkgcgcctcatccccagtcttcatcgatggaaaactgtctgmagaaccttggcacaaaaattaccctgtggattccagragggtgtatagctttttgcagcagtttgggattcctactgaaatcgccttactaacctgacctttaaagtccttgggcgagtggatgagaggatggaggtcaaagaaaggagatgatggaggggcgctcacccattgcttcactgyggcgtgtaagaatacgcaagatctgtcacaaagctgcattctaaaagaagcttcgattccttattagaaactgatcaaccaggttccagagcgctaagggaacgcatgtgttctgaaatcggcagatgggtggaaatcttctagaggtagaagccagagagtgtcatatttgtctttgtatcacctatgcgtgagctacgggaagcactcagagttggtggaaaggaaacctatgggggaggggcccatttttggtaaggttgcctaaaaattcctcacactaattaaataaagagaatt

SEQ ID NO: 4345 - DNA, 600 bp, Bovine  MMBT21564
tctatcagcatgcaggaaatgatattggtgacatatttagtatacctggtcttttactgaacagggagcgaccacaagcatcaaggtaaccaattcctacttttcctaccattaacttcatggctgtccatacaattctccttttccgtaagagggctggacgttccttcatttgtaagacctgagtttatctaatggcacctataattaggctcatataaaaatgtagtaarttgcaacaaatacartggcaccacaggaagtaagctttggagctggaagggaacactgtaatattkytgtcgccaaggacagggagaccatcactagcagaaagtatcttttcatgtccctcggcatcctttgggatgtaggtaggggtcgtatgaaagttacacacttgatgaatctccattcctttttttgaactgacttttagctttaacacatgggcaatttatcttggaagatcaaatggttaatctgcctggactaatgagcacagttctggaatgaagaggttctcactgcttcagctatcattatttcacgtactttaaacaaaacgaaaatcaggccacgtgcttagacgtctactct

SEQ ID NO: 4346 - DNA, 598 bp, Bovine  MMBT02277
  misc_feature (1)..(105): n is a, c, g, or t
nnnnnnnnnnnnnnnnnnnnnnnnnnnnnnnnnnnnnnnnnnnnnnnnnnnnnnnnnnnnnnnnnnnnnnnnnnnnnnnnnnnnnnnnnnnnnnnnnnnnnnnnncacctgctccccttccccgtctgcttgtgcaaatcgaccttgtgctaattcctcagcagaatgtgctgcttgtccttcagacagacagctccttgttgtctgctccttaatttgtgatcatacttccttgttactttctccttcttcccagatcccatcttagttcctgtcttatgtaaactccatgggtaagcrttggtgagttgttaatttgggaaacaaggcctgcaatctgtggagcaacaagaacagctggtgctgctgctgttcagtttttcttggcagatggatgtagagggaattacgaatggggaaatttgcctcagccttggctgctatttygtacagcaatrtaacattgccagctctctctctctcctatgccaccactcctgcaccacagcctgatactttaatgtgttcccctaacttcatgatccaggtcttcctgggtagcctttgttatatgcttcatgcccartatacctttttg

SEQ ID NO: 4347 - DNA, 600 bp, Bovine  MMBT20643
ccacacaccacctgcttgctgacgtctgtggtgttacagaagtcctgcacgggttacagctgaagatcggaatactcaagtaagtgaagggyggccaagggaggggttcagttaggtgtaagttttaattcaagctaagtcagttgttttttgtttctaactaatttttactggagtgtagttgctttactggccaactggaactgatcatgtccttggtagactccatgcatcctggtatcaggcactttggtgtaccttgtttatgtctgtcttcccttactaagccttgagttcctrgaaggttgggattgtgtcttactcatcattttattcctagagcttagtggagggatgagttctcagtaacaaatgaaattcgcttctgttggatgtcataaacctgaagatgaatttcttcataaaaaagtcacacaaatgctaaaactcaagagagaaactaatttataaagttaggctttaaaaaaaaaatgtggttgtccttgatatcaatatgaatttctgaacatttgtaatttcagtaaagatttcaactggacaaattttgcctcatgcctataggttctgtttatgttaatg

SEQ ID NO: 4348 - DNA, 600 bp, Bovine  MMBT15775
acttctatgtgtcaccttccagaatgggggagggagccacctgacctctgtctgcaggctggtatcaaccatcacaggcagaagaagcatttgctaaaggattagacacaggcagatctatggcccaaaccctcaggtgactcacactctccctgctcatccctgacccctcatccctgatatgggctcttatcctattcccaaatgtaggcctcaccatgtaccccatctctgcaaacagaacctaatatagtctttgtccaacaacccagacttagaaacatgtcaatgattctcctycccccagcacagcaaagcccctctgcctacctgttagcctaattcatgccccctgatctgccargatgcactattccgccaaaatgaactgctttcatacccatcccatttaaattcagaatcatttaacttaagtgaaagtaatccacttttaattataatacagacaggaaatccaatactggagagacagaacataatgagttggaagcactaatctggtatattgtgacacctaaacaaatttatagtgatgatatagacatgattttaaaagtcatcatcaaagaactatactat

SEQ ID NO: 4349 - DNA, 600 bp, Bovine  MMBT03865
ccaataagcataatagaatttatgattctatttggttacacaaataattagggtattcttttaggcaacagagactctaggtatgarccctggagctcttccttccagggagcctggttttccagttggtatgtcgtttccatagatactgggcatatagctcaaagtacacagtccggctcaagatggagccctgctttcaagatggagcctgttctgtttcctccttcataataagtaaggaaatcaaatacatactaacttggctattttggaaagaggagtgatgtaagcatgccwtcaaaagaggttaaaaayatctgtatacacaataaatattgtccaaagtcataataaagaaaaatgtaacatttatcatgtgaagaggaggcaacattatttgataataaaaaatgttctcctccctgaaatggctgaaaactactatcttgttagaaaaatatattktaatggatacagttaatcatatataaaatgaagtattatggcatttaaacatgtacacaaatgtatatgttatataccacacatgttattttgcatcttcraatgcaacagatgtttgcaaagtaaactctg

SEQ ID NO: 4350 - DNA, 600 bp, Bovine  MMBT11508
gttaggtccctaccatttctgtcctttattaagcccatctttgcatgaaatgttcccttagtatctctaattttcttgaagaaatctctagtcttccccattctgttgttttcctctatttctttgcatgttgactctaattcccagaaggctaaaaaattgttgattctagaaagtcttgtcttgcccttctttgaaactcacacagcgtctagcatggtaccctgcatgcagttaaggattcaaaggtttaataaactaatttttacagattatgacaaascaagaatgcagagaaaytggaaccctcatacattgctggtagaaatatacaatgrtgcagctgctgtgggaaacggtggttcctcaaagttaaacacagagttagcatacaatctatcatttctattcctaggtgtacagagacaagaaatgaaaacacgtgtccacacaacaasttgtaagtgaatgttcaccrcagttttattcacraaagctacaagaagaaactcaaatgcccatcaacmgatagataagcaaaatgtggtatattcatacaacagaatattattcagctatgaaaatgaatgaagtactgat

SEQ ID NO: 4351 - DNA, 600 bp, Bovine  MMBT12162
tggtttccgtgttctgagggatgtctccatttctcagattcgcattagtcctaaatgagtgggacgtgctgtctggccagtgcctctgttctttcccttttccttgttggtatccccatagctccgccctctttactcttctctcttcacttattgcattgtcttcgggcaacttttgctactcttgtgccctcaggtaccacctctcgacagcttatttccgaagctatccctataagtactcttgtgtattgaacttggatcctgtatcctttttcccactggcagaagccccatgasaacstcaaattcagcttatccaaaccataatttgtytccttctcaaaacctaattattggtgtgtataccctgtttttgtgacaggcattatcatctacctagctgcccatgctggagccctcggggttattaaggtctgtcgggttctccaggagacaggctctgagatgsagatttgcgtaaaagtggaggtttgcatacaaagtgtgttcaggacctgtytcttgccctccacccaactcgctaaaaaagtaaaagtgaaaaccgttttgttgttcactcatgttgttgtggttgtt

SEQ ID NO: 4352 - DNA, 600 bp, Bovine  MMBT13543
tggaaacacacatttgggagctatgagtggaaaaacggtagtgaaagccttgaatgggtgaagtcactctggcacaatataatgttcaaagagaagattactgacagcaaaagtctaggaaaaactgccatttaagggatgactgaggactgagaaacatcaaggaagatcagaagaataagccgaggggcagtggagcaggaacctggtctgaacaagggttggaaagaagtatatacaaagatatgaatggagcttctcaatatcctggatgaggggaatgagggagtggaagggggwgagaatgggtctcaggtttccagcttgcgtgaacagctggctggccaggagaaggaagatgttaggttctagaaataattgtttgacatactagtgagacagccaggagaagaagtgtgggcaactggaattcagaaaagcatccggatagcagtctagccttggagggagtccacacagtggtgatgcttatcattaggggagaagaagagatggttctggaggagccattagctgagactgcagccctaggaatgctctaatttaaggagcaggcagtggaagaggaaccagccaaga

SEQ ID NO: 4353 - DNA, 600 bp, Bovine  MMBT14820
tggaccacagttcacactaaggaaataattgctgggattagccagctgttcagataattgtcaactctcacattcatttggttcctaaaaaaagtgaaaagagatatttccaaaccatctaatgctcagctaggggaaaaaggaccctgggttaagaatgctgccctgttgtgggaccaggctgtaatgcatcaagccrcattcttcatctgtaagaagtaatcaaatgactcctactcatgagacgatgctacaaggacaaataaatcaataagtgagaacagtctacttcagatccayagtatgtggaactcatggatgagaaaaaattttttttcaaaagcaaacaaaatccctttcaacccctgacacagctgtctgagggtcttgtcaccaaaaaatccttcactggtctttttctttagtgccaayctaattcttatttaacataycattattagagcttcccaggtggtgcggtggtaaagaatctacccaccaatgtaggagatacaagagattcagctttgatcccagggttgggaagatccctttgtataggaaatggcaacccactccagtattcttgcctggagaatc

SEQ ID NO: 4354 - DNA, 600 bp, Bovine  MMBT15430
ctgctgctaagtcgcttgagtcgtgtccgactctgtgcgaccccacagagggaagcccaccaggctccaccatccctgggattctccaggcaggaacactggagtgggttgccatttccttctccaatgcatgaaagtgaaaagtgaaagtgaagtcgctcagccgtgtccaactcttagcgactccatggactacagcctaccaggctcctccatccatgggattttccaggcaagagtggccaacaaaaagccaaaaccttttcaggaagttggcaatctgcttccactgcaaagaaracaggctcactctgtcttaggcagacatggtttctccctcaaaaatcctattcactttttcttgttttaggctatttctctaaaacatcctcaagaagagatcattgtttattttgttattgttttaaacaaaatgccaaagatacacggacacataattcctcaattttctacaggcagattactccttaagaggatrtatggggctcacctccataagaacaaacaagccatgtattacttgtaaatacacagccttttccttacgtccaatctcacattaccgttaccctgcttctt

SEQ ID NO: 4355 - DNA, 600 bp, Bovine  MMBT18212
atttaaaaattaacacagatttgacaaagatatacatataaatttgtgaggcagttgctagaatatttacatatttgttactaatatttaacaataaaattggatcatctctgtaattgtgggaacaactagagcctccttccatctaataatagtaaaacatcattgtctttcctctaaacatacaaattcaattaaggttgtgtttaatttaaatatcagtgtggttttttttttaagccaaataaatccaattcattttaaagagcaatttatgtgctgggtaataagaatgacacrttggctcctcaggtgaggcacaaagataaagacagctatatttaatttttaagagatgtgacataataactgaccttaaatagaaaatttttgtgattatataaatcaaagagcttcaaagatatgacttaaaacctctgggtaacaaattttctaagagttatattactgaagtggaaaaaagcaaagccccccaggcaatgagattaagtaaaggacattttgtgtacatcctaatgcttaatttcaagaggcagtgccatgtaacagaggcaccactctttcaatgaaccaaagagc

SEQ ID NO: 4356 - DNA, 600 bp, Bovine  MMBT21105
aatgtattttgtttaaaggtataatctctgtgaaacttaggacagtaacttctaatcaggctacagttctctgaaagggtcagtaaaakcatcatctatgcaactgatgaatctcacaggattccttcacagttttcctgattctttgactaatagtttcaacagtttagcctatagaatcatattctatatttgttattttcattygtgttctgtacatttctaaatcaagcatagccattttttcagaaagtgatagttatatatggaggaaaataggaggcaagccaacccccacckccaaggaaaaaagtatttctaaataacaggtaacttatatctaattggattaatttttcattttaggacttgaatgctgttgcttttaggtttaaagataaagagagaccacggggctatacctctaagattgcaggaatattacatgtaagtttattgttattttactctatactttggcacatagagtgtttcagtgatcctgtatatgttactttcagtactatacaaatcataaaaattgaagctacagtgtaaaactttagacattgtagcaactagtaaagtctgatgtgaaga

SEQ ID NO: 4357 - DNA, 600 bp, Bovine  MMBT06408
ttgactttattacagggacgaacattgtatctgactgggaaacactccccgttaggcatgtaaatccatgtttcaaagtaagattaattgaacatgctaaatgggaactagtaaaactgcttgagcrttcgtggtgtggaacagaagctagagtgctagaagggacaggttctctgtataacagcagtatatgcagcaaactggggcttagggcaaacgtctgtgagcacctctcagcaatgactactgggacttcagactggagaatttccaattaaggggcatttactatcctgccaytggacattattaactgaagccacccctatgacagaaggacataaaatgatcttgaatcgtgaaacagccataatgtctaggatgtctgagaaacactctaatggggaaggcctatccaaaagaataaagtaacaaactggacatggtttatctaagaccatgctgcctggggaatgcaaggaggagattctcaggagtagggagccttttttccctaagactgactctgcaactgtatgaggagttgctggattccaccatcactttggcagttccctataaacagttcttaactgacct

SEQ ID NO: 4358 - DNA, 600 bp, Bovine  MMBT08846
gctgtggctcatgtcaacttctctatggaccaggagagtgtctcactcaccccaaacttccttttgcattaaccagctcttcagttcagttcagtcagtcgctcagttgtgtctgactctgcaaccccatgaaccacagcacgccaggcctccctgtccatcaccaactcccagagtccacccaaacccattttcagttgataccaattacatctgaaaataaacacaagtcaaatttgataacaaaaggaagagtgataatttgacgaactactgtgttcagctgttgcatctatgatraaacttgttttaagatactgcatgcaaaggattatggaaacaacataagacgtaatgatcwtttatcytcatacctacatatgctttctttcacttaaggtagaaaataaattgctttakgaaaagaagaaaaatctgtttgtgttaattactgcagctttctcaacctacatatcaatatagcaatcactataattcttcaccacaacatctgttcagttatctaatttgggacttaatagtaggagaaaagataatctccctttgcagaaggctaggatgaatctcgcagacatggag

SEQ ID NO: 4359 - DNA, 600 bp, Bovine  MMBT17613
aaggaaacaatatatcctcagggttggcttagattgataaccagaaagacattctatcagcatgcaggaaatgatattggtgacatatttagtatacctggtcttttactgaacagggagcgaccacaagcatcaaggtaaccaattcctacttttcctaccattaacttcatggctgtccatacaattctccttttccgtaagagggctggacgttccttcatttgtaagacctgagtttatctaatggcacctataattaggctcatataaaaatgtagtaarttgcaacaaatacartggcaccacaggaagtaagctttggagctggaagggaacactgtaatattkytgtcgccaaggacagggagaccatcactagcagaaagtatcttttcatgtccctcggcatcctttgggatgtaggtaggggtcgtatgaaagttacacacttgatgaatctccattcctttttttgaactgacttttagctttaacacatgggcaatttatcttggaagatcaaatggttaatctgcctggactaatgagcacagttctggaatgaagaggttctcactgcttcagctatcattattt

SEQ ID NO: 4360 - DNA, 600 bp, Bovine  MMBT17632
cccttaaaataccccacttccatcaaagatacattgaatttcatcatccaagtgtagatgttcttgataagttatcttaatccttgtcttaaagcttctgtttcttgggcagccatttctctgtgcctagaagaatatttgcttcatactttggcagtttatatttgcacatggttattatgtcaatccaggcatgttttctctcttttcagatatttttcctaattttggatcattctcatatttgtcacattcagttttcactaaaagacaccatgtcaactcagttgctccagactractgtgcatctggctttcattaaagagtttcctctagtccgagtaattggtcatatactgtgactccatgtttacgtgaaataggcaggctgtttcccctacagaaattcctgctaacagtatcataaaaatatactcaatcaaaaaaaaaaaaagaaaaacaggttgaagctgaacatatatactaacagaagtctcctgaacacaattcttgatttgtggcaagaaatcaaggtggcatggctcaagcctctgtcttaartatcattcttttttcatttttaacctatttgtcattat

SEQ ID NO: 4361 - DNA, 600 bp, Bovine  MMBT16465
tacgaccctggccagagagaatcaggcctccgagaacagagaatggcgataacaccccacttctccagtccctccaggataggccggggacctcaggttgatgtctgcccctgtgtgcacgcacacacggatgctcttgcgcacaccatggctcacgtgcccatgcccgctcgcgcagcctttgctcactctcttttctcatgccgctctccaggcacttgcgaagccggcaggcctggcattgacgccgggtcttctgggtgatctcacaggtgcccttccggaaggggcaccggggcygggcattgcgcttcatggccctcctgcaagaggacagagagcagaagataggccgcatcgtataccctggcttcctgtccgcccctgacacggacactggtcacaccctctacgggctctgcytttgcctctgagttgggtggggttcataggaaaggtacagaccagggctcttcaggcttctgtgggtgcccagaggcctccgagcctgctggaggaggggagccaggtactagactgtcctcagcatccacatgggaagtggacgctgctcagggcctgcaccggagctgctttgtg

SEQ ID NO: 4362 - DNA, 600 bp, Bovine  MMBT17913
acactgctttttttgttgacttgagaaaaccaatggctctgggccagtcctgacccacctcaggcgcacgaccatagacgactaggtgtctggggtccctgcgctcactgctgtcttcccacaggccctggccatcagtgaccattacccggtggaggtgacgctgacataagtcccttctggggtccrgaacctctgccccacgctgggagctgaagacaacaactgacccgtcacagttaagagcggagggcggagcttaaggaacccagtgccgttcgtccccgtgtgccctcaacyaccccacagcagctggaatttgaggagagggatggaaggtaggcttttcctcacctggcccacttccattgtaagtgtggcggtcgtgtcaccagagcaccccactttctcagtctggaaagaaagtctaaaactaagaaatgccttttaatttaaataaagctcaaaagggggtgttgtcattcacgcacccagtcgttccygtgtgtgtccctactccctagtgactggctgcaggccgccttgccccacggttgcgtctgtccccttgtctgcggccatcagtgtcgctccagggcc

SEQ ID NO: 4363 - DNA, 520 bp, Bovine  MMBT21788
aatgagatgggatggtgtctgggtcaggggactggaaagccaaagcaagagaataactgaagaaagataacgcgaagatgtagttccaagactcattttgggtgcaaaagaaaaacatrctctacttagcactctgctttcagtgtggcatcaatgaatgccaagaaagaaacaccatttcagaatatctgaaattcaactgcaaacttgcattaacacttagcaaaaaaggaggggaacacaaagtgacaaatttgcttggagtcttgtgggctctcttgtagccaaatcgctgcttcragacagctcatcatctctgtaagagcagcaactgcagacttgtcacattccccgmtctctgctaatacaagctgagtggttacgtccgctctccccggtcggcagcttgagtcccgttctctgcaacgcagctcgagacgaagagccctctcaggggactaatgaatgactgtcgtcagtgctctggactggagacggggaataagcgttaacgtaggaa

SEQ ID NO: 4364 - DNA, 600 bp, Bovine  MMBT22518
actgcagggactttcctggtggtctagcggctaaggctttgccctcccaatacagagccccaggtttgatccttggtcagggaactagattccatatgtcaaaactaaagatcctgcattcagcaaccaagacctggcacagccaaataaataaatacacattttaaaaacaataacaaaataatgaccacatttgaaattaaaactaagaaattaaaaaaaaattcctccaattgcccacctctctcctccaccaccactcaagtccaagttggccactgtaactgcttgcttgtcacytgcttctccacttgcccccttccaatctgtagccagtatgatctattcaaaatttgaatctgattatgccactccctgcttagcatcctttgatattttaataccttggtctcaggatgaaccagatcaaatccttacctgacccacaagtagggttgccaaataagacacaggatgcccagttaaatttgaatttcagataacacataattttctagtgtaaatgtatcccatgcaattattcattgcttatatgaattaaattcaacctggcatcctgtatttttattcactaaatct

SEQ ID NO: 4365 - DNA, 600 bp, Bovine  MMBT01185
aggtcctgagtcacaggacaaaagttccctaaactcctggcctgagtcacatgcttcaaataaaagactcttatctcatactcccttttattcatgcatctggctttaaagaatttacagtgtgattttgcaacgagaggagaagaaagtgaaatggaaataccatgatcttgatcaggtgcctccaggttgtagccatatcccagcagtgtgcgtacagcctcacggaggctatccttattggatttcttagttcggtcatctagaagggcatarggaacaagccgagggtttcttctrttctttacatcctacaggaaggaaaaaaaaaaatgtatgtgatcatcaaaggacaaccaacagcatttggaaatgacacagccaccaaatacatcaaaatataaagtgtctgaaggtagatattgtaccttccctttgtctttccaggttgtaggagttagtgaaatactcccagtatgaagaatctatcaagtgagtcactgatcaatgtaaatcaggctctctccatgaaaagaaaatgtaaaaataacagcaataacaaaagccaactttaatgatctcaataaccatcatccatct

SEQ ID NO: 4366 - DNA, 600 bp, Bovine  MMBT02590
tttatgatcttttcttgtgatattagatgtttctagtaattaaataccttatcaactgataaacagtgatgagctgttttattaaaaaratatttgtgatgaactaccatgtaccaattatatgctaagtgcagaagatacaggcaaaattgaagactggactcttaatgaactcatagcctggtagctaagtaaatcattaataatgcaccatagactagatatgatgcccaaagaggaattctaaatgtgttttgaataacagtagaattattaaaatattgaaaacttcttaaaagrctattttgaatggacaaaaataaatctacgtttatttggaaatgtggtttctggactgtttagaaaacaaaaaaacagcatagcaagatgcaaaagactcagtccttgaaattctaagatctggcttctagtcctattctttctgtatggtttcaactcttatccactctaggccttagttttctgtgctgtaaaattaagaagtttgacagattagtttctgacatctgggtcaattcaatgaccacaactgcatagaaatcacagacttccttgatttccatctgcaaggtcaatagt

SEQ ID NO: 4367 - DNA, 600 bp, Bovine  MMBT04684
caggcattctttccagccctctcctgctccccgtccgtgtgcctcaatagcctccttcacagagtgagagggctgtggtcctccctcgaccggactaattaaagaaagacacttgtgttcccaagtggtggttttatttttttagtttttatgtttgtatgggaaattgtggataaagtgaaagaactgtaaataaatagtgtatttcctcctccactgctgatttttctgccatggatttgcrtaaccccgaacctaaagtctccttttctcgggctcttcgtgctgatgcctgtaagyatgggggacgagctttctgtagggcaggcacaggatcgacaggaggacgggaggcagcctcagaggatgttggtaaacacttgcgagcacctcctctgtgcagatactgtggacacaaacaagtcacgtgattcgtgattcttcattgctcatgtgtatagggcaccttgccgtgtgcaaagcactgtgaaaagcacttgaggtttatttcrtttatgcaaaaaggagtatatagtctaatggaggttagaaaatggacgggaagttcagcactagatgaaagcctggagacatctagtt

SEQ ID NO: 4368 - DNA, 598 bp, Bovine  MMBT05820
  misc_feature (1)..(53): n is a, c, g, or t
nnnnnnnnnnnnnnnnnnnnnnnnnnnnnnnnnnnnnnnnnnnnnnnnnnnnntgatgagacacaacacagtccatgtttattttggcagaaaaacacagctgcaaacggtaacaaaaattgctatcacttttttattttttttaagtaacagtacttgctacctattccttttcctctagagcaatagatttttctgtccatttttttcccctcactgctagctgacaaaggctgtgggcagaactgaattcacatctcacaattctcatcacccctccctgacaaagatgcacactcygtatgtttgatgtattatttcctccacagaaaacaaccctgcctcaagaaacaaaatatgatacaaaaggctcagctttgcctggcagacaagaaacaaaactttatgaaaatgaggccagtgaggggaaataatagcagctctatacacattgggataaaacttttttaaraagatgtataatatctagctgaggtaattagtaaaaacaaaaagtaaaaacttttgtttctactaatgacactggaggtaattgataaaaacaaaagctctttagatatatgtgtctgtttatata

SEQ ID NO: 4369 - DNA, 598 bp, Bovine  MMBT12687
  misc_feature (1)..(100): n is a, c, g, or t
nnnnnnnnnnnnnnnnnnnnnnnnnnnnnnnnnnnnnnnnnnnnnnnnnnnnnnnnnnnnnnnnnnnnnnnnnnnnnnnnnnnnnnnnnnnnnnnnnnnnatactttatagctaggaaaattacatgccccagattaaaaaaaaacaggtccttgaaacaaaacccctcaaaactagatggcaaaataggttgagaaatcaaggcctactttgaaaacaccaaacacttgcttaagtgaaaagaataagaagtcaagctatgtgatagcctgaggacaatcaattcagcagataaaaatrcaccttggtgagctccttgccagggagttccaagagcaagaatcaaagtttctttaaatacatcaaaarcaggaaggcatctggagaatcagtgagaccacttgattaaacaaagtacaaaatgtgaataaatgattgcatatgaaagaaatataccatgccagattcaaaattttgttgaagttacttgagttaagcctggaagcagcagagtaaagccttttagcattttagagtcaaactgaagaggaattttwaaaattatttaaaaaataktctatgctctatttgaagtgct

SEQ ID NO: 4370 - DNA, 600 bp, Bovine  MMBT14217
tagacaccttctgcccacataatctgtgaaaccattaaaactacctcagaaacaacgtaacaaaactctaaactgaaaaattttaaattaggcaacatgcttcaaagtgactgtagaacactcaagtgtggacagcaaagatttcctcatccccacacaacacttcatccattgtagcgctctggttatggtagaataagtcaaaagaacagccttcagtgcatttcataaagttcaacaaagcaaagtctgctgtaccaaactcagctgtgttcttcactgtggaaataaatagtaaayggcaactctgcagctaaaagtcactgaggcaggaaaacagcacagaatatggccagtgaccggttctcctgcatacatcagtgtctaaagctcttagtttgggtcaaggcaaattgtgggcctgaggacatcactttccttgtgacctgggaaaggttactatatacaagggtgaactctgtacacaggagaggcttgaaaggaaggaaggaaaggcaagtggacaaggcttctataaatagatcaacagctcacagatacaaggaataacaatcagtgttgctgggtcaaataaacaaa

SEQ ID NO: 4371 - DNA, 600 bp, Bovine  MMBT21856
agagctgattcatttgaaaagaccctgatgctgggaaaggttcagggcaggaggagaagggaacgacagaggatgagatgattggatggcatcaccaacacaatggacatgggtttgggtggactctgggagttggtgatggacagggaggcctggtgtgctgtggttcatggggccacaaagagtcagacatgactgagcaactgaactgaagtgaatgtccattgagtcagagatgctayccaaccatctcatcagctgccacccacttctcctttggccttcaatctttcccgtatrttttaataccagctaagtcattgaagcagtaacatggcaaggaataacttttattaaacttatatacttttttctttgtttatcagatcacaaaggaggaagagcgagagaagaagttttctagaaggctaaatcacagtcctcctcagtcaagctcccgatatagagaaaataggtgattgattctttgaaccatgtttaatttttagacattgcttttctttatatgaatatttagacttgattttcctttacataggggcaagtattatctactgatttattagtgtgggaaagtag

SEQ ID NO: 4372 - DNA, 600 bp, Bovine  MMBT07624
acagaggatgagatggctggatggcatcactgactcaatggacgtgagtctgagtgaactccgggagttggtgatggacagggaggcctggcgtgctgcgattcatggggtcgcagagtcggacacgactgagcgactgaactgaactgattgaaacctcaagtcttagttccctgggcctcgactgttgagcgtatacatacctgctggtgatttttctaagaactgcaaccagcgtctctccccaccctgtacactgttgaacactctatgtatatttagagatttcccttctcagtragtcaaaggaaaatgtttccccttattaggtaggtsttttaacatttaaatttccttttcattcttgtaagttgtatcacatgctttcccttttatttctgatttctatgctcaaggcaggcctacacctttcttcttattttagttctgggaactcacctagtttccatgtgtaagggctgttccctctgagttcaccaaagctcaaattttctgtcctgtttcccttcccgctctcctttctctaaggctgtagtgttgttcttgtgcttctcagaagctttgaggacacagagcttt

SEQ ID NO: 4373 - DNA, 600 bp, Bovine  MMBT21123
acactgtgtcatcctcggaactgagcatttagtgttcagttacgaaccttgtccccatctctatttaggcttcagaacctaactttcaagtcttatgttcaaaataaccaaagactgtctttaactccactatagcttggctacaagaaactagtttcccattcaaccaaactatgataatactccagctttacaatccaatctgggacttgatatctatactgatagttatttatctagaactatctatctataactatgtttgcaggtacttccaatagcttgaaaagaataatatgkatagctcacaaagcccacaatacatgcttgaccttactgcttttatacttgctgatccaccagcaaaggcatgtttctccaattatttgacagttcatcctcttctcaacctctagttaagtcatttctcttcaaacgtattctcgacattattagagagggcgcagagactcttcagaaagccagaaaggataaacaatgagttgctaacacttcctttcaaggggaggaagttaggataaacttgaccctgacattagcttcagcctggaattccatgacacagtagggggctcagaa

SEQ ID NO: 4374 - DNA, 600 bp, Bovine  MMBT21867
gtttaaaagtttcatttcagatgtgtgagtttgtaagagtgtgtcattttcaacgtgtataatttttccttcagtgtgtattactgaaaggactttgttgcaggcaataaaacagcttaacaccttagagtaaaacacctttactcaagcttagatttatactccccttgtgacctttattgtgtattacttttagcctttagaaaatcatgactttttttttataatcccagtatttctctgttactctgttcttaagagtttttttcctatcatctaggtgttctaggcctttctccrcattacttcacttaactgatctccttaatatcttttctctttccatggtaaattttcttttcttggcycagttaatttgtttgtatctattatgaactccttttccttcctctttgagtatccattctcatcttcagcagtgttcactgtataaagccctgttaggccctgttaatggataaaamctaaatgttcatcacagaaaaaataactgtacttgtattgcatatttggttttattggctaaagttttgcatactaagatttcaatgaagaaaataaaaaaatctctcttctata

SEQ ID NO: 4375 - DNA, 598 bp, Bovine  MMBT04973
  misc_feature (1)..(124): n is a, c, g, or t
nnnnnnnnnnnnnnnnnnnnnnnnnnnnnnnnnnnnnnnnnnnnnnnnnnnnnnnnnnnnnnnnnnnnnnnnnnnnnnnnnnnnnnnnnnnnnnnnnnnnnnnnnnnnnnnnnnnnnnnnnnnncccaaggaagcctcctgtttcataggagaggcaaataaggaattgtcaggagaactgtagaaaccataacaaagtcataacatctagcctgaattagggaaacaaagaaaaagtgttacttaggcccctggtgggtagtagtgaaaagagttcaacaagaggaaagatgcttgagyatcttggaggattggctggaatttgacatgtaaacatgatcaaggagagcagggcacagggcctggtggagcaaacagcatgtgtgcactcacagaggcaagaaaacagcacagcatgttcaagaatgagtagttgaactgtcactggatttagatacagaacagttgtattaatacattctataatttccttataaataaaccatacattaaagccccattgctgcttttccccatcttttaatactgagaaaaataaatcccatgaattttccttgaaatcttactagatcatcca

SEQ ID NO: 4376 - DNA, 600 bp, Bovine  MMBT10283
acatgtgaattcaaagccctaactggtttgctcttggaacatctgaagcttccagtttgaggaattctcaggtttctctaggaagaggcatgatccatgaattgggaatgacaacagccaagtcaagaggtcccccgaggggcgaggtcagaaccacaagagggtggtccttgagcagggtggagacagaaccaacgggtagacaccaccccttccccagctgtggccactgcaggaaagttcctgagagtcacaggtccactaacctcctcgccatccaagtgactgctcttctactgytttctgtgagatcagtcttaaagaaacagagtctctgtttcacaaacgatggaactctgtaaatacaawaaataaataaataaaaggtaaaatctgcttaatttttatcttagtagtgtagtagtaaaaagttgcaaacaactgaaatgtccgcctaaaagagggtggtttattatttataccccatccttttccaaaatgattttaaggtagctttcacaacataccttattatataaaaataagtgacgaattcaagcagagagaaatctgagggttgggccacagatttcattctga

SEQ ID NO: 4377 - DNA, 600 bp, Bovine  MMBT12352
ttattcctctgtgaaagaatttctccccatttgtgccctgtagtactttaaaatgttcatattgttttttacctctggtattagttttgggtctttaaaagagctccatgaggtagtaagtatttttgtatgaaattttccattctgttattcctattttaagaggtgattttgtgcttcttcccccatcattatatttaggaatattgtccatttttgtaaacagggtctgaaattacctttctttatatgtagctccagcagtcttcctatgtgtctatagcaagcaactccaacttkacaggaacacctggtatccagacccaggcaaggcttccgttcaatgggtgagtgagttatttgaatatgttttaagttgttgcatcaggttaaatgcygcgtgaaatagccatacatatttcaaaatacatgtatttgatttttctcccctcaaagccatgtgagcatgcccctgcagtactttttattttgtaatactttaaacagaaaagttgcaggaatagtcagagaactcccaaattatcttttactcccagtcaccaattcagcgcaggtgttttgttattttctgtctatttt

SEQ ID NO: 4378 - DNA, 598 bp, Bovine  MMBT02936
  misc_feature (1)..(10): n is a, c, g, or t
nnnnnnnnnntaaagataccaaactgacttctgttaaatcacaaaaataaatattgtctcattctccaccttaagttctaatgacataatgcattttcttgcctttctatttctctcagaaatcgaatgtcctgtgaatcttcctctccattgttctttttaataggcatgtccagacatcctccagctcccgagatccctacgttttatcccctgtctccgggtggtgttggacagattaccccacctcttggctggtaagatccttcttgcaacctgcagccaggcgtctgaacatayatcttctactccccgtttatggaaattagctttatgaataataacacttgtggagttgaagaaacttcaacacatgaggtgctaactttatttcatttcaatttaaaagattaaaagacatacagactttgaaatggactgagtccgtttgctaatatgtgtagaaaatgactgtgtagcattcgctttgaagcttatagttttatggattcagtttgtggctctgggcatttactatgcctgtacaaagtgttcactgtggtctttcttttctagttctttatgaacaacttatrtt

SEQ ID NO: 4379 - DNA, 600 bp, Bovine  MMBT05027
taaggaagactcaagtttcaagactatgagatttagtaataattttttttttccatcctgagctgcctaagtaggctttatatatcaaaaaaagaaacaaaaagaaaggcagcactatggaaatccctgacccttcttattacaattgtgtttttgttagacatctttatttactgtctgtgattgacattagatatatatggtggttaactgaaacatacatgctttaatttttcaaataatgttttaaggttataaaatattatgggaaatttgaaaataattacttctacatctgcyacycagccataactactaataaaatgttgatggacatatttcctcccagcctttttattttcacaattcatatagaatactgggtttatactatatctttttgggcaggtagtcgccaagttgtgtccgactcttttgtgactctatggactgtaacccaccaggctcctctgttcatgggatttcccaggcaagaatactggagtgggttgacatttccttctccaggggatcttctaacccagagattgaatatgcttcccatgcatttgaattctttaccacccaccagggaagccc

SEQ ID NO: 4380 - DNA, 600 bp, Bovine  MMBT07394
atatggtctgagtcggccttggaagcattataaaaggagtgttttataaaaggaggaatcattaaaaggatccacacattcatttgcatgaattagcaaacccaggagagtgtctgaaatggactgcagcgctgacctgaaatggaggttactgttttccccgcaacacccaggcctcagtgggcacaaagcagagtcacatgaacaaacctttccagccagagtccaaagatcatcgcctccaatgatttgcatctcatccatggactggtcattctaaacagaaagggggagataatrttttactatacaagaaaagctgtatacagcacgtttccccatctacccagccaggagctggattgtgccttgcaaatatagcacaaatagctggtcctgattcatggttgcctatggttaccaagagccagtctcctgccaccgtgtttgagacaaagcatcctaatggctgatagccgaggctgtgtggagaggggatggagggagtgggggagaggacaagcaaatctaattttggaacaaaataaaaccatggaaggtgcccgagcctattctgaggcagatggaattggagaagac

SEQ ID NO: 4381 - DNA, 600 bp, Bovine  MMBT13102
ttactttttgatttttgtgtaagagtaagtgtgcatttccgacttatcaaaaatgtccctccagattacttgtatgtctgtcacgatgctttcactttatttttactgtatggagaattaacatggttagaggagccactttaattttcatctaattcttttttttaaaagtgcttgggtaaaaaaatgtacacagcagagtttgattctgttagtttgattcagattaatctgcatgcctaaattatcccttggtaaatttaaaactttcctgtttatttyttttccccattgacttargtaattattaatgtgcckgaatattgtaaaaatcttacctctcaagaataaatggcccattcttgtgatttagttttataatatatgcytttctgttaaaaaataaatgagtgtatctacttttgtatttgacagaaatgaagccctggatgaaatctgttttaaagtctgtgcctgtaacacagtccgtgatgtattagaaggtagaackattagtgttcaatttaaccagctatttcttagacctaataaagagaaaatagactttcttcttgaggtaagacattttcccccctttgg

SEQ ID NO: 4382 - DNA, 598 bp, Bovine  MMBT14471
  misc_feature (1)..(40): n is a, c, g, or t
nnnnnnnnnnnnnnnnnnnnnnnnnnnnnnnnnnnnnnnnatagtgtttgtctctgcctgagtcttataactagggtctctgtgacattgacaggacttcctgggaaaatcggatccgttcttggagtttttccgtcagggtgatgggaaatggcacctggcatacagatcagaggtgtgagccccctgggattgggtgtgatggagcaggagagaatctcctggggtttgtgactaccaagatttggagcacagggaggagcctgcttatggctagggaaggatggcagctccccacakgccaactcagcactcactggaagctttgtactccaccctcaggtcatcaagaacaacctgaatcctacttggaaacggttctctgttccccttcaacatttctgtgggggagatgccagtacacccatccaggtgaggagcttgccttctgaatggactgagcaggggcagagtctagggagggatgtattctcacctgccacccgcctcctggtctttacatacacacacgccttccctcctaggtgcgatgctccgattatgacagtgatggttcacatgacctcattggtacctt

SEQ ID NO: 4383 - DNA, 600 bp, Bovine  MMBT17091
gttatcttgatgataagataataaggaaacattttttaacatataacagaatatttaattacatcagtctcctatcaacagataagttagttaatgctgtttatattggccatttccattggctggctggaggctcttccactaaaggctcccatggtttccactggatcatttttcttgccagacttagttcgttttcagcctgttaataaaagatttttaaaagatcatttgattatattgtttagtaggtatttaccatagctaataactgaaatataaccatttagaactacttcrtacatgttaatacctaataagctgtttcatcatcaaatgtggaacatacttaaataaattaccttcatcatgagtgagaaaggatggcatttgatttttctgtttaattaaaatttgcttttacagtgttcaaaatttagttggtgagtaaaggatccatgacatacacatataactaaaacaaaactaaaaatatcattacctttactagctgtcatactcaattttctgatgaatgtaaaaaaaaaaaaaaaaactagtcacagtctacctaactgatttcatgatccataataacgt

SEQ ID NO: 4384 - DNA, 600 bp, Bovine  MMBT17207
tataaagcagttagcataatgtccatagttgctgatcaataaaaatgttattttcattaaggaagttggaaagcttggaggttgttctaaggtttamgatttcagatgcagaattactcttttatttattttttttttgaccacactgcgtggcatgtgggatcttcgttctctgaccagggatcaaacccatgccctgtgcagtggaagcaaagagtcttaaccactggactgccaggaagtccccagaattattcttaagtataagtaattgtttcctacacataagtgtttcctaaytttatttcttaaggaaatttccatattattacatcacttgcccattatacatgttttcayactgtatttyaattatttgcttccctagctgaaagctggggtgggcctcattttggttatgttctcagtgcascagcccatagcatttgttgaattgattttggaaatcattcccacagaggcagatgactgaggtaaaggagaaagatctccaggagggaactttgggtcagraactacacactttgctagagactggcagtctacagattggatttctcattaactgtgcacttacar

SEQ ID NO: 4385 - DNA, 598 bp, Bovine  MMBT20030
  misc_feature (1)..(46): n is a, c, g, or t
nnnnnnnnnnnnnnnnnnnnnnnnnnnnnnnnnnnnnnnnnnnnnntcactcagagtggagcctgtcacaggatctccttcttcctcacaggttaccacagattcgaggaatcacaattagggaagtaaaattcactatgttcatgatagatcttgccacaatatcctatatttaaaaatttttactgttacacgataaatagaactcagatttatgaatcacaaattatatacctcatatttcacatttggttatagcrtttttcttctttctctgattcatatagatgttacatgacrgtgtgggtgggatgtgtgtgtaatgtcatccgaggaaagtgcactctcgtgtgctatctgaaaccactgactgcagccgaccccaatgagatgcttctcactcacaaagcttggagtttgcagggtatgtcacttacaaaaaaggcatgcttccgcagttatctgtagcttggctgataacagcaaagagctttctgcaattgtcattcaacgtgggatccagagaattctcacagttccattagggactgttgagagaactgtttcaggaatatggtatgtgataatcttagataaa

SEQ ID NO: 4386 - DNA, 600 bp, Bovine  MMBT22992
acttgcctgacagtgatttttgttttgatcatcagacttgattgaaccacggggcgattgacatccatgctgtggagtcrtatatttttttcagtgaaacaaattgcatttacccattccaaactggtatggacacttgactgattyctacctaagcatgaatgtaagaatcccagcgcttcagttgtaggctttaccactgagtaaacctctcctggtaggcaggcaacrtgcagaagagaagatccaccttgaaacctgatttgtcgccttcctacctaaagagtggcccccaaaccygcctgaacttcataatgkgatcttattgggaaataggatctttccagatataagtaaggatacagatgagattggactmgattagcaaagaccctaaatccaaggagaccaagaagtacagacagagactcaaatraggtgatgtcaagacagaggcagagatgaacgtgacatagctatatttccaggaaggtaaggattgtggacgaccgcccagagctggatcagaggcatggaatggattctttcacagagctctcagaaccagccctgggacatcttgattttggacttcaggtc

SEQ ID NO: 4387 - DNA, 601 bp, Bovine  MMBT03602
  misc_feature (1)..(1): n is a, c, g, or t
natggcaacccacttcagtattcttgcctggagaatacaatggacaaaggagcctggaatcacaaagagtcggacatgactgaagcaacttagcagcagcagcagcagacaaattttaagtaacttagtaaacgaagaaaacaattttgtggaatagagatacacaggacttttacataggacaataaagctacataggacttcttttttttttttacttctgtatccaagtagtcaagagctcatgctaaatgctaacagtaaaattctcctttgctaaacacttttaaacattccattwtgttcgagataattttatgctttgagaaaaggggagatgggatcacactgctgatatgggggtagagattactggtgagggtgaccagttcttccatgaactcagtttccagtggggaacaccaagaccccatcctatggacttaccactcctgaattcagtgagtgayctggaatgacctggcacyttagatttttttcttctctagatccatctaggtgacttgtagacgcttctttccacacaaccaaagaaagccatttgggaatgctatttttctctgaataggcctcttgtgtt

SEQ ID NO: 4388 - DNA, 600 bp, Bovine  MMBT04343
gagacaaagcgatggttactaaatttctgcaagttatagagatgaagaccttttgtgcttacaaagcaaattgtgattgagaacttagaagttagggaattggtttattttaagcaatctggagagttccatcgagaacagttttgctccttcagtgcagcaaatttttaatttctggaatttctaataattaggtaattatctcaactgtgtttatttcaataagcagactctgtgtacacaaaactgagcataagaacctataagattcttcctggtgtttgacttcaaatctaagcygagatgatgtgatgttayagtaaaaaacaatactactccccttgttcatatcttctggtaataataatgacctctcacattttgtgaacatgtgatcttttgagtctcacaacttactgagacaagctaggcaggttcactcatctcattctgtatgcaakaaaactgagaccagataagtgatttcacaygtctgaggtcagaaagtgagtcagtggcagaatatggagtagaccagaacccaggtaccctgactccccacccagcaccttgatcaaccccattgtcacagccttggta

SEQ ID NO: 4389 - DNA, 600 bp, Bovine  MMBT10284
agctagtaaactatacctttcccttggggtctcagagccccaagctcagcccattcaccccctaaagatcttaacagcccctcctgctagcatccttgctgggggcttctcactgctctttcttgttctgcactccctcccctgtgcagctactaagagactctttataaaggacaaagccaatcttgtccatgctttgcccaaatttttttgcaccaggtgcaatatagacacttacggaggtatcagctccaagtggaaatcccagttcaactgattaggggtggaactgcatgcagrttattccactttgagttctcacacctaccttacaggaatcttaagaagtgaatgtattatgggtagatgcctggcattcctctcagccctcagaaccacagcttgcagcagggcccccaaggactctcctgctgttcatcctatttcccttgacctgagtccctctccacactacacaaaatctcttcacagctctctgtgcccattctgcaccctttaagaaccaacccaaatactgcctcccaggacagcatccctgatctacccagggggagggctcctggagcacttggttcaggc

SEQ ID NO: 4390 - DNA, 600 bp, Bovine  MMBT16475
gtagtatcatgtgatatataattttttgttttctggcaaaagaaagcacaccaaattcatctgcagagaaactatgttttctagagctaaattccaaaaagttttatgaatccttgaaagcactggcaaattggaaacatcactttcatccttagctgtttataaatagtgtaaattgagaatttataaaggtgtatataattttctttcaaataaactttacacagatgtggttcttattraattcatcaggagaaaaccagcatcactataaagactcatccattcatcaaaaccaakactctaatttcttacttacctccaaaccccttctcctaaacctggtttctagataaaaaattagtatcttcactcatttccactttaaaattcttggccttttcaagaggatttgattagatacataatttaagaamtgggaattccccataatgagtgagcacaatttaactcttgtctccttcaaaatagctaagtcaatatccacagaaacactcaccctggtcattgtatcgagatagatcggcctggctgatgtagaggtcatgatcactatctagttcccagaatttacaataa

SEQ ID NO: 4391 - DNA, 600 bp, Bovine  MMBT22991
rtatatttttttcagtgaaacaaattgcatttacccattccaaactggtatggacacttgactgattyctacctaagcatgaatgtaagaatcccagcgcttcagttgtaggctttaccactgagtaaacctctcctggtaggcaggcaacrtgcagaagagaagatccaccttgaaacctgatttgtcgccttcctacctaaagagtggcccccaaaccygcctgaacttcataatgkgatcttattgggaaataggatctttccagatataagtaaggatacagatgagattggactmgattagcaaagaccctaaatccaaggagaccaagaagtacagacagagactcaaatraggtgatgtcaagacagaggcagagatgaacgtgacatagctatatttccaggaaggtaaggattgtggacgaccgcccagagctggatcagaggcatggaatggattctttcacagagctctcagaaccagccctgggacatcttgattttggacttcaggtctcctaaactccaagacaatacatttctgtattttaaacccttgctgctgctgctgctaagtcgcttcagtcgtgtccga

SEQ ID NO: 4392 - DNA, 600 bp, Bovine  MMBT01393
caaggttcacgtattgctgaagcctggcttggagaattttgagcattactttactagcatgtgagatgagtgcaatcatgtggtagtttaagcattctttggcattgcctttctttgggattggaatgaaaactgaccttttccagtcctatggccactgctgagttttccagatttgctggcatattgagtgcagcactttcacaggatcatctttcaggatttgaaactttttgaatctgattcttcaacatcccaccaactttgtgcaatttcaagtgcttttcaaatatgttcaawtctttcccaattgtccagtctattcattttatatatcataactaaagacaaagctaatagagatgaccaaagcagtatataccaaagttgttacatgagatacaacagatagatgattggaaaaccctaactttacttctcattctgcaatctccagttgtatatggagcagatcattaggtgagcccctttatctcttaaaccttcagggtttttttttttttttaacctgaaaaataatgagaaagtacaggattccttcaacccctaatgttcttagaaggaaaatcagtcacatca

SEQ ID NO: 4393 - DNA, 600 bp, Bovine  MMBT04800
ttataccagcttaccttcaataacatacaaaaattctgctcctttacagctctgtctccactcttttcagttgctgatgtcacaacacctttattgtggatcccaaaacataaactattaattcttttaaatgcatagtctcttaaattatgcagaaaacaagatatggagttacaaagcaaagttatcgtaacactagtttttacactaatagttgaaggttttttcatttaaatgtgttagtctcaaatcaggtagaaagcaaaaagtgcagttccaaattaatgttacaatactacyagcttttataattgcccgtgtaattacctttactgagatctttatatctccatatggctttgagttactgtctgatgtcctttcattttcacttggcaggagaaaccttgggcatttcctgcagggcaggtctagtggtcacaggcttcctcagcttttattaatctggagtcttaatttctctttctctgctgaagggaagttttgccagatgtaggattcttggttgactgttgttttcttttagaactttgaatgtattggttcataggtctttgggcctccaagtttctgatgaga

SEQ ID NO: 4394 - DNA, 600 bp, Bovine  MMBT04948
attaaaaaaatgagtttctaaattcctttaaaattcagctgtagggaaagaattaggaccatagctcataattacttattatgcgagattatgaaatcagaggttactagtatgtcttgccttaagggatggataaatacagacatgccatggcagactgcatacaaggctgaaagaaactcttcagttctactgggagaagagtaggaggaaacaacgctgacctttcatttcctgtaggttgcttgtaatttatgagattctttttttaaaacagcttcaaatatctttaaaccttayrtatactagttaaacttcaataatgaaagctgagatyataaacatcaaaaactccatttagatgtagggtggatttttctaatgtaacctagagggagagcctctcagaagaaggagtttcatgttttgatttttaactgctaatttaaaaattggctgctagagaaaagggtgtgagtttgttttagttttggtctccatttcctgtgtaagtactttgggatggatgttaagttgagatatgaagccactggaaaaaaacaggtaaagagaaaayactatcatgaaaaattaaacact

SEQ ID NO: 4395 - DNA, 598 bp, Bovine  MMBT05777
  misc_feature (1)..(102): n is a, c, g, or t
nnnnnnnnnnnnnnnnnnnnnnnnnnnnnnnnnnnnnnnnnnnnnnnnnnnnnnnnnnnnnnnnnnnnnnnnnnnnnnnnnnnnnnnnnnnnnnnnnnnnnntatatttgttcatattatcatagttcattgatcatggtagacacttaataaatatttgttaattgtgctattacttacctgactgaaagagaccaatactaatctgacagtcccctccatttttgtctcatgtagaatgtgtccttttatttgtaacttcagtcactatttatagtgcttagtcttggtgtaattttmtctctctgctttatcagccgtctgacctctgttgtgttgtataaatgtgaaacatatgtgaagctgtttttttcatcctcttaagcaactagattttgccagctccctttttttccctgaagacttgtaactgattctttttgccttacagtcagagaaagcaattaccattactctgaaaatagttaatttaaaggaaaaaaaaaaaaaaacagttcaggttagaaatgttcctaatctaaagaagtccatgatcatggtctggcttcagaatatgtgtgtatcttctatttaaata

SEQ ID NO: 4396 - DNA, 600 bp, Bovine  MMBT07384
atggaaatttcattgattctgtactgatttagatttttttttttaaccattttttgctctaaagttttttcttgtgttaaaatcaaaaaggttatacaatatgaaatgtattttacaaggctgggaagtaatatgagtatcctgctgtgtgacaggtgtctttattagagacagtagtatatatggttccagtctttaaactattaaaaaacctgttttttaaaatagggagattcaaagaggttaaagttcaaaggacagatagcatgtatgtgggatcagaacccatgacttccttayttgttcattttccacacgactgtgttactactaccgtggaaaagtccgttttggagggatgatttctacgtttcattccttattagtcctgcctcagaggagtacttctgtctttgtgtactgctgaatttaatataaagcaactaaatgtttaccagtattttcatgtccttacattatgctgaaaagtagccatgctgacttgtagaaaaaaggaataaccatatatactaccttttatctcagttacaatttcagttaagaggagattgtttcaagtgtgggccaaaaatttcttta

SEQ ID NO: 4397 - DNA, 600 bp, Bovine  MMBT21359
agctgacccctgaccacactgctgaccctgccccaggtccggaccaacgtgccttcatggtgtgaccggattctctggaaatcctatccygagacccacatcatctgcaattcctatggtcagagcctcccggacagggtgatgggcgatcccgggtggtccctgacctgactctgccttggctttgggagtcaggagcagagagtaaggagctttcccctgagcccccattcctactcccctcccccaggttgcacagatgacatcgtcaccagcgaccactcccccgtgtttgggacrtttgaggttggagttacctctcagttcatctccaagaaaggtggctattctggctgtgctgtgggtgcggcatccatctgggtgggtgcaggtgctagcctggggggtgtgcatagctttgaatatatctgagtgtgtgtgtgggtgggtgtgtaggggcgggtacatacatgcatgtgcaggaatgtgtctgaatatgtgatgtgtaaagctgtctgtgttcctgagtcaccgtgagaggtatatgcctgtgagcaggtgtgtgcgtatggaggtaattgtgtacatgtttctgcctgc

SEQ ID NO: 4398 - DNA, 600 bp, Bovine  MMBT21361
tagatttgttgtttagtcactaagtcgtgtccaatcttttttgaccccatggactgtagccccccaggctcctctgtccatgggatttcccaggcaagaacactggagagggttgccattcccttctccagaggatcttccctacccagggatcaaacccatgtctcctgcattggcaggtggattctttaccactaagccacctgggaagcccaagtagattaggtgaggtttaaattcaggtctttctggggcaaagctggcttctttgtgccacacgatgtgcctcactatgagccrgaaaggtatcaaacttcatrtggggactgctgtaagaagtcagtaagacactacacagaaagttcggattaccatgcccggcacacagcagccatctcacagacggcagtcacctcattcacttggcagcacaaattgaatccttctgtgatccaggccctgtgctaggtgctggagttacagggatgaatagagcatggtctttgtcactrcttcctcatgtgtggagtaaagagatagaaacaggcagttaaacaagtgctctggaggtgccagggcaacaggctctttagacaattt

SEQ ID NO: 4399 - DNA, 574 bp, Bovine  MMBT22870
aagaattgacctgccgacgcaggagacacaggttcaatctctgggttgggaagatcccctcgagtaggaaatggcaacccactccagtattcttgcctggaaaattacatggacagaggagcctggctggctacagtccatggggtctcaaagagtcagacatgacccagcgactaacactactactactacacttggagtgtgtgtatttgtgtatatatgcctgtatgtgtatgtgtgttggagagagagatatagtctcttatcccaagataagataagatasataaaccccatgargcccamcaactgtggccggagccctgcagtgggagtcgctcctgattctctcgtggacatcccctgtggtttcctctggttttggggtagatggggggtcccttggctcaggtttcagggttgggcacctgtccagtggatgggactcccctctacctcacttgtgcctgcaggtatctgggagatctgctcggccgatggccgggataccctcttcctgagggccaaggatgaggctagcgccaagtcctgggcggctgccatccaagcccag

SEQ ID NO: 4400 - DNA, 600 bp, Bovine  MMBT02675
cgatgctccatttccgcctcattctgttcccacagttttcaaacttcatctgccaaagcattaaaaaaaaaaagataatgataattaaacttaagataaatgttcttaccaccagaatactcttcgaaaatgtatctgaattaatcagaataaaaagctaccttaaatgagacatgatggatagtagcattttatagagggaaagaaaaacaaacccttaagccagtttatttaaaaaatatgaatgaatgaaggtttgcatcacagaaaatgtttcctaatttttcagctttactcttyacagccaaacatgagctgtgtattgtgtaattgcagtggataaaataggaattccccgacagaraggcacttttatactgagaaaagcagagyagtattcattttcaggtagagttaactgatttccctttcaaattgattgcttcttaagttgttaccattaaaaaggtttggtgttaaacaggctgaggaaccatcagaggacaaaattcaaagatatccacttaactgggtttttcaagtcccagttttaaagtcagccttgtgtgggtggggcatcatcttgctcgggctcctaga

SEQ ID NO: 4401 - DNA, 600 bp, Bovine  MMBT19489
tatttccaggaaggattactctggggagtacaccatctacctgatcccttgcacagtgcaacccacgcagccatgggcggacccaggagaaaagcctctggcctgcaccgcacacgccccagagaggtagggagagaggattgatcctcactatttgtgaacttacctactcactgacatttatttgtgaccccgaatccaattttcgtggtgctatcctgatcattccctgaccggcagagtgatgaaatagcggtcatctgagccagattcccagctcagacttctcatcctgtgaayaagtgtcccttttacagtccatttgctgccaggtttttcaaatttttgtccctcgcattggtggttttgctgtttaaaatggctccccagcagagcgccgaagggctctctcgtttcctgcatacaagaaggcggtgatgagccaaatggagtgttagatgagcttcattccatcatgaacttcaggaatcaacagtatatatcaagtaaggtgtctttagacagaaacacgcataaaacagagttaggtattgatcactgatgaaaatgttgagagcagaggctgcaggaacttgaccc

SEQ ID NO: 4402 - DNA, 598 bp, Bovine  MMBT02217
  misc_feature (1)..(55): n is a, c, g, or t
nnnnnnnnnnnnnnnnnnnnnnnnnnnnnnnnnnnnnnnnnnnnnnnnnnnnnnncgctgtagggacactttcctcccgatggtctccaccacctttcttcctgttgagtttggggcacggtgagggtgtgacacagcgcccgcccccaccccgggcagggggaacctcagagaaacagagtaagatgctgcatttctcccccagctaataagtacggtcaagttcaaggagctggatgcgtccttagtccagtaacattctcaaattctgaacacttaaatcccttctcatttccatasaacttttgcttccaagttcgtttctaaaaagctccaagaaactgtaaaactctcataatcaaatgcaattgaascatcataaaataaaaactctgagacttgtgtgtaagctgtcaggacttggctcattattctcatttacttaataaaacacacttttaaaataactctctattcatatatttatagtaaaaatataacttttttgatttaaataattacctcaacaaaaactatttggaaatatacaaatcatacaacctaaaaacaragaatcattactaacaccctaatgcta

SEQ ID NO: 4403 - DNA, 511 bp, Bovine  MMBT01952
gctgcacacgggaaggggtgagggggtacttgccatatctggaagcgtagtctggtctgggaaccaaaataattttttggtaagctttgcagaaaggttgaagttccgcatcaaaaggtcgctttgtggtccccacaattagaatcctgtcgtctggcttcaggagtttcagcattttgggaagctgctttttcaggcgcttaggttccatctgggagaaacagagaggaaaaaaaaaaatgagcccacatatagaaaacagaattaagagctaaagaaagttcagcctcggacgcaccktgggatgcccttacwaatgtgctttcagggctgctggccatactttcctagagtgtgtcctgggccaggtctcaggacgtgattcctggttggtgtggtctgaattgctggcccttcctttcctcaaatctggtgttcagatttggacagggggaaggagggaagcacctgaccgaacgttctagcatcttagccctaagcatgggaaatg

SEQ ID NO: 4404 - DNA, 600 bp, Bovine  MMBT01412
cagtacactgcttactttgcagctctgtctcttaccagatgctgccacagttacatttgactttagaactcactcagactaggatgagaaaatagctatttcttctccatttgccaatagagtcatatttacattataacagtaataggatacaagagatcacatgtgagtttttaaattctgggtcatgaaacaggcaaagagaagtctaagacaactctaatttcagatgggaagttgtttaccaagttttcttttggcccttagatcttttactgtaactgtgagctagaaggaaayggagtaatatgaatttcatatctcattttcttcttccttgcctgtaattgcagtcctaatgaccaggaggcaggaggtgagaagtcttatggccacatagacaatcttatcttctgaatagctaattttatgttacaccagaataaacatttattctttactttactttcatatgctgagatatagagattaatttcattatttatctgtataggcaatacatgaataacaactgaatatttatattgtatttttctaaaaattaaacaaaaaaacagggatgacctacttgcaaagcac

SEQ ID NO: 4405 - DNA, 598 bp, Bovine  MMBT04089
  misc_feature (1)..(11): n is a, c, g, or t
nnnnnnnnnnnttgctgcctggcttccctgaaagttgactttggagtatctgctttagatgtccctctattttctcatattctgaagctataatattatctctgcatcaccaatgtttactccttctctgctcatagatgttatatttctggcttatattgatttttattttaaaaatgatgattgactcaaagcattcactatcctttcaacatatcaatcagttcatatgagacttttctaaaccttgagttctagtaggacttcctttactcctatataagtttaagtatatttttwaaaaatgtttagcatttgaagaaaagaaattcaattattgtcttctgscccaatacactctatcttagaaacaagaaaggtactctgtaagtatcagcttctgacaaaaaacttttcctatacrctgacttttttccttttaatataatattttgtagaaggaamtggcaacccactctagtattcttgcctgggaatttccatggacagaggagcctggtggactacagtccatgggatcacaaaagagttggacacgactgaaagactaacaygcacastgccctacttgcaggac

SEQ ID NO: 4406 - DNA, 600 bp, Bovine  MMBT09025
tgcctttccttgcggggatgggaaggagtggggtgctggagaagggctgggatccgaggtgccaccagaatgggtggcctgagtcagcggagctgttctgggtctcggggatttccagggggaactgcgtggacagaattcccctgggatgatggtctagacagggctcacccttccctctgttcaccagggccttctgcttcccctttaggaagaggaaacaccccagatgtttattttggggttgaggatctgttgtgaataagccccaggatggatctcaggacaagtctttgcacrtgtggggtatctcaggaaccagacagcccttgtcacagagctccagaaggaccattgatcaagtagggaagtaaaggaagggacaatgcctgagattaaatctagtaaataagaaaaagtaatttaagaaaagtaaataaaagaagattagaattcttgctaattttccccatcttaaaaccaagctatttttattaaaaaaaaaaaaaaaatcccatagccactgacagccattattggagtaaattccaagtacaaattaacataaagagctaggcttatattatacatggaaagtga

SEQ ID NO: 4407 - DNA, 600 bp, Bovine  MMBT10136
gctgcttacctcagttcaggtaccaggagacattttaaaaatcccaaaactgcccttagacataggccaggtataatctatttcctccaaagagatgaccctgagctctcatgcacacccatccttcccgtgatggacccacgagcccctcccccaacttcttttttaaataatacatttaacttttatcattgacaaaatttttgtagtagcaagaataaaaacaacctgcatgacccaaggcacacgtgccaaccacttctcctaaaggcgtctgtgcctacttgtccacttgcattygaggggggtccgcaygtcagggttcatctttatgatgcaataccgagggagaccggtgttcggtcccacatgaaagtgcacgcaaacatattgtaaatgtggcctctgccagaacactgaagactgattagtaaatgattcagaggaaccccgggtgaggtgagggaaagggaaggagtgaagggaggaggtggagggccacagcgtgtctgcgtaaagggcgcactaccgacgacaagacatccaaacctgaccccagaccttccacgctacaggatggcaaatctccggaaatgcccg

SEQ ID NO: 4408 - DNA, 600 bp, Bovine  MMBT09909
aaagattccctctgggttctcataagtgtgtgggtgtatcatcctcagaatgtatatattcacactcaagcccagaagtcagcattccagtacacattagaaagctgtcattcattgagctgtgttgaagacagatttacttcctcagcaatgtgatggaggcagctccgtgagctgcctctactgtggccgagataacaagcctgcagggagaggctgcgtcacacgctcctctgtgaaacagctgctccttattcagaatcagtgtgtgcagctttttaaacagcgcgttttcattcygggacgcatgacaggccttggttttgttttttacatttctctgctgctcttgggtcaagcaaaygtctgcgtgactttgcaaataacacttgatttctgttttcttaaaagaaattggaaagctggacagccagataactggggtcatggccacgggcctggagaagattgcgctggactgattaattttgggcagtggaacgatttcccatgtgaagacatgaatcacttcatctgcgagaaagacagggagagaggtaagcagtggaagggatttaagagagcacagcagagcttata

SEQ ID NO: 4409 - DNA, 600 bp, Bovine  MMBT06795
tctcagcaagctggagttaaaattggatgtgctggagcaggtaagcggtgcagctgtcacggattggaaacattttcagcctgtttagaagtaatctggtctttcctgcattttgattttatgctttaaaaccttcgtttttctgctaatgtatttagggctatcttgaaactagagaccctcttcagaatttttttcttttacggtttgttgctagtgatgrattgttagaatcgtaatcccccaaattgccgcaaccgaaaaacaatttcattgttcttgtcagaattcttccagaaycgaatatgctaatttacactgytaggattctaaatgatgctggaaaatattatattccttttttcccttttggggaatgaaggggtcctgaagacaacaaggttagatcttgaggaaagttctctttgtaggaaagatgacattacccatggaatcctcagaatattgagtagacaaagattgaaaatgccagcataattgaaaactttcttaatcacttttaaaattttcttttcaacgtgagaatggtcggatgcgaattaactgtaacttcaaagtttttatattaggtcatttagt

SEQ ID NO: 4410 - DNA, 600 bp, Bovine  MMBT07427
ctcaactgaatacattatgctcagctaacaagaaaaaaatcacaggacttgacaaaaagcaaaaaaagcacaatttagacatagcaaacatcagaattagacacaacaaggatattggatagatcagacctggaatttgcagcaacagttattgatatgctaagtgtgccaatgaataaagtaaatggcaagcagcagcagatggtcactggaagcagagtgaaaatgttaagaaagagtcaaaaagaaatactagagataaaaaccactataatagaaatgaagaatgcctttgatggrctgaacacaaatgagtaaagaatctctgagcttgaggatgtctcaataaaatccttatgaatgaaaagcaaagagaaaaaagattaaaaaaatagaaattccaagtactgtgggacaactacaaaaggtataagatgaatttaatgagaataccagcaggagaagaaacagagaaaggaaaagaatatttgaaataatagtgacagagaattccctcaaattaagttaatgtcagataccaaactacatggggcttcccagatagctcagttggtaaagaatgtgtctgccaaagcagga

SEQ ID NO: 4411 - DNA, 600 bp, Bovine  MMBT11224
atgctggtgttcaagtttgcaaagcccacttccctgcatcctctctgtttccatgtgaaatctgtcttgttgaagcccatctgagcggccagtgcagccctgagtcctgtcttctagagctcacagtatctttcttctcttaggaaagttaagtgttaacattgccctgaccgcatttgcctttcaggaagattaatgaagttcagcctgcagaagataagcttgtctgggaagagtaggcaagagctaagctgtgtcaacacggcctaagggcaggagagaaccagattgattacttargttatcttcactctcctcctccctcccccatccatttataattctaatacaatttgatgtctgtataaatgtgaagaaagataaagaagcaagcttatggaacagctgcttacagtcctagtctttaccaggtgctaaacgcactagaaatacagcaaaatggataaaattgagttctcggggatagcactcctkaaatttgtgraggattgggggagaggatgtaggggcaaacagacartatgagacccccctcaaggggtctgcttgagtgctaatgattattaaaaaattacttcc

SEQ ID NO: 4412 - DNA, 600 bp, Bovine  MMBT12095
ggaagaagttgatttttttccttcattagcaagcaattaaattaattcaattttcttttacctaattttacagttatttaatccattaatwctaggtctgttaaattaaagatcctgaaatttgtttgatcacttaatgcttttgttgggagataaaagttaagctctgatgtctctaaactgagaagaagcaaaaagtcatttttcacagtccatttgctccttcaatcactttatatgtccctcaaggaagtgtgtctatrtatsttgtccatcataacccagctaattcctcatccygtatgtttattcccaatgagatgaatagatcaagggcctctctgaggtgttacccagggccccataaccattaatcttgaactacctcctttctgtgctggcatttgcygccaattagagtttagattcgacaagatgcttccaattcaccttcattatagactaaccaaaagtagagagtttgtatgttgacactttactttaaaaacaacaataaaactaacaaggaaaacaaaatacaagataaagtccacaagtkttgacgtcaaactagagtttatagattggttctcagtctac

SEQ ID NO: 4413 - DNA, 600 bp, Bovine  MMBT13105
tcagttgcatgtttctactttgtttattgattgttatacatactaatcattgttaaaaagcaatgaggaaattaacctcaaatatataatgtaaaaatgttttgttcatattataacttttatgttatttgttatgtattataacttttttccatttagtgttctaataaagattttttggggacagctttttttccctgtgacttagattccgttttagtttttcctgctgattgttagtgtttttctcttcaattagatagaggagatcatatcaaaaagtttatttataccgatggyggactgaatattagtctttatttcaatccttataaatttttcatctgataatagtttctgacccttgttttccttagataactttataagacttaatttgcttatctattagtttattggtttagggaattttagctgtctatggtttcaaaatgtgattataaccttaagaatatgtgaatgtttcagtaatatcttttgatccacatgaaaatttgttctccaggtattggccaatatttttagtgtgtatcattattctctaagggtaaattttgtgttgttttattgcataaaaat

SEQ ID NO: 4414 - DNA, 600 bp, Bovine  MMBT13644
atgtgtctctgatctcctaaagtttttgtttctatttttcagatccttatgtgaagattcatctgatgcagaatggcaagaggctgaagaagaaaaagacaacaattaaaaagaatacacttaacccctactacaatgagtcattcagctttgaagtaccctttgagcaaatccaggtaatgttaaacatattttgtcttccccttcgatttcgtttcttcagaccgcataaattaaacacacagaccttgtaaactctcagtgcacatgtctctacttgaactgccatccttactccaygcacattagatgctcaagctacrtgaagagggaaatgatgaaatacacagcataggatacgctgcttcatcagcaaaagcagcagcattctggtgagcagaaataaagtaggaaaaagaacaccaacagaacaactctgctaattcaaaaagtacatccacaaccgttaaaaggtcaagaaaaaatgagctttaacttttgactctcaagccacagtatttctcattatcacctctttgtagcaaaaaataaaaataaaaagtgagaaaagaaatatcttggttgatgctagatatgcag

SEQ ID NO: 4415 - DNA, 598 bp, Bovine  MMBT05249
  misc_feature (1)..(78): n is a, c, g, or t
nnnnnnnnnnnnnnnnnnnnnnnnnnnnnnnnnnnnnnnnnnnnnnnnnnnnnnnnnnnnnnnnnnnnnnnnnnnnnnggaaaaaaatcaatcctcattacctttttgtgaaaaaatcttttggtgatgattaagaactttcgaaattgtggaagcagctactcaattgaaactattttattacaatagtgagaaactgatcaacaaagcaagtaacacaggcgtatttaatggataacaccacctacgaaacacagcatatccaggcaacaggctgtagttaaagcaacaaaaatttcrttataacgaactaactcagaatcttctgtctctgagtaatgttgaatgaagtgtatccggaaggcatgatggggtataaaacaaaccactattatgaggaggaagaagaagctcttgatttgagctctgtactcttgatgggtccacatgtctggccaaagagcctttaccagttgaacaatgacccacatctgtatcagaaagagggtcacaactgttgtcatcataatgacaatcatagagtagttcaagataataaactccttgcgtttgaggtctttgtagaactcaaaacact

SEQ ID NO: 4416 - DNA, 600 bp, Bovine  MMBT16173
tgaaccacatatgtattttaaaatttcctaggagccacgtgaaaaaggaaaaacagatgcaagtgagtctttgaaatgtggtatgtattttacaactataatattaaatcagttcagactagcaacagttcaagtgttcaaccacaccatactgaacagtatagtcctcgatcagggatcagcaattttttttctgtaatgggccagagagaactttaggtttggggggccacatggtccagaagcgctacaggcataaatgaatgaaagtggttgtgtatgacaacttctgttctagayggctaaatttactctaagtctggctgacatacacgcacagtttctttttataatctcatgggactatggtgaacaaggctggtgcttccctcacaagggtatgtgtctcattccccttgccagagactgcttcaagaatgggcacgagtactcagttagagatggcccacttatagttactgagaagagtttagaaggaacttttttataaatgtgtcaacaaatttaagaaaaacaacaaaagatggtgtagattttagggctagtaacacacaaccaaaaactgctactatcctgaaa

SEQ ID NO: 4417 - DNA, 600 bp, Bovine  MMBT15363
agtatcaataggatgtaactaactaaagccataggaggtgacattccaggaagaggaaatagcaccaggagacccaagatcatgagaakagaattttctgagaactaaacagactttggtgtgatgaaaagtggttcaggaaactgacaggactccagcctgggatctagtgtggggacaccatgagccataccccacagtttggaaytttggaggcaaaaggaagaggagagatctgtaagcagaactagaaaataactatgatacccggtggaggatgaaatggaaaccaagtatcargtaagacaatatatccagattaaaataataatagcagtttttattattaaaggactctgaatcaggattgtggtttaggagtttcaaacaacataaccccctgagctgagcatcgctgtgactggtgagagagtatcctgcttaccaagggtgttggaacaaataggctgaaagctgccatgggagccacagtgtatcttccctgcagtccaaaaggatatctgtggatgagagaagagatggaagcaggatatgagctagctattgtaaaagaacacatttgaaacattyastcatcaa

SEQ ID NO: 4418 - DNA, 600 bp, Bovine  MMBT22827
ctgttgcaaataaggctttaataatgagttggtaaagtgttggggagtgaaagtgttcttaggtcttaattagatctcagtagttggctgagtctctatctggattgtggtactttgcttgtgcttttcagtgcttcccaccccttaggtagaatgaagttgcatatttcccttccaccaggtcagttagastctaataaaacccaatatgttggcctctggttaactagtttctcctyagagaaaaacttaagaaaaatagaatgctctagcattatttaaaaatggttcattttcccmctccctgctggaagcatgagggaattttycctccgatattctctttgaggtaaaagaagaatggggattctgtagtgactggctccccctggattctttttatttttaatctcttagacttgtccacactgagcctccaacaatttgtcaattacagctccggtttctccactcagcactgattcctgtggagactgctgcttatgggtttctgctccgctaagttgtgattctcaatgtttgtctgttggtatctccaatttggagggcagtagtttgccctgtgatctcacttcttct

SEQ ID NO: 4419 - DNA, 600 bp, Bovine  MMBT18531
ccatcactgccagcctggtggtgccgtcctctgcctgcagaggcgtcacagctcacagggcatgaatgtcaccccagcactgccagcgccgggcacagccacacgttgccccagtgacaaacaccgctggccccaggaggtggaggcgcacagggctctgggcgtgaccttggtccctggacaccaggaggggcggcgccatggcctttctcctgggtagtccggggccaggaggatgagtaccgggaagaaggcaggccgcctgggcatggacaacctgaaaatgccaccttcccaagsagcgctcccccccatttctaatagaacgtagttgctttgkggggaatagaatgcagaggccaacgaggttgtcctggccctaaggcctgaggagcaggtcctaacaggacttctcggaggctgtggagtcaggtggggtaggggtggctgtcaccacacgctggggggcccaggatrgacagggtgggatgatcgcttcagacacccactgcggccagaggagcccctctttcttaccaaggccccctctccaattcaggccacagagcctgacaaggaggccaaagtccaggggcatga

SEQ ID NO: 4420 - DNA, 598 bp, Bovine  MMBT22551
  misc_feature (1)..(8): n is a, c, g, or t
nnnnnnnnacgctggtcctgggctggacccggaaagagcccgcacagctaaatgtgccctttcctgatgctttgggactcgcctctctaaatggggtttggctcttatgaggctacccaaacccctcagaggtctgggcccaaccccagggcgaggctgcactctgcatgaggtggtgccatcgagcacccagcagggaggtgggacctgaacctcaccaaggaggaagggcagggcccagcggccgggagatcatgatttgctctaggaggcaccgttctccaaaggacataacaaggygggtacctgggatcttctcaggaaggggctctgaaggaaccgctggcagctctatctgttcctgcgggagacagagggtaaaggccgtgagacactcccgccccatccttgtcccgggaaggacagcatcccgtccacctggctgctctcagcggagtttagacggcacgtgacgccgcagcatgcacacccttggcttctggcgtttctgtcactcagatcggtggccacaaaaggtggctgctcccaatgacccggagcctgaggggttccccgcccagagttctgttctgagtct

SEQ ID NO: 4421 - DNA, 598 bp, Bovine  MMBT19858
  misc_feature (1)..(55): n is a, c, g, or t
nnnnnnnnnnnnnnnnnnnnnnnnnnnnnnnnnnnnnnnnnnnnnnnnnnnnnnntaatcatcacctattaaaaaattctgtgttttttttttatgctattaactcaatgttatccctcatttggggggggggccagtaatttgtagcctcatttatcacatctaattcacaattctactccaatcatttctcaaattgtgatacccagatgggcatcatcaagggcatccatgtgaacttgtgacacatgcacatttttggtctgtatccaaaaggtaatgaattagaaaccctagggyggggtctaaccatctatgttttgataaatcctcccagtgatattaacacattctgtttgaaaaccactgctcttgaattatttttcccatgagattagagaccttgatttggttgtcaaattaaataccactttttagctttcctcataattgatatttagaaaatattcaggtgagccttgcaggacaggagccatggagctggcactgagagaggctgctgccagagcaagtgggagagacaaaggctatgacaggaccagttatgtgtgtgtgtgtgtgtatttttaagtaaatc

SEQ ID NO: 4422 - DNA, 600 bp, Bovine  MMBT01446
cctgtaatggtgctgttaattacttcagactgtgcagctcatgaaaaattttaagggatagataattttacttttcttgcctctccctgtctggctccttcacctctcacacaattcctttgaacaattttagttgtcttctgtggtcaccagtgtctgagatactcagaaaccctttcagagagcaaggtgtgagtggagtaaataaaatcatgtttcactgttggtatatcaaccctcctaggtagttttcctgccagccaacctgcgtgctgttaaggcccataaaattatgcaatrgtgacttctttggaggttctttaatcagataatggccggtgttaggagggaagggcccagggcgatgttgctggcacttaacactgggctcggtcattacttgtctggtagagaccaataaacagctgattactatcctataaggagccaatattttacatttatcccagttattttcttcttctctttgcaacttctcataacaacaagcatttgtcaagaagacctacgagcggtaacctcacaggccccttaaaaattagaattttcctagcgtgaaatgatgccttttgtgaaatg

SEQ ID NO: 4423 - DNA, 600 bp, Bovine  MMBT00606
caaaaaagtaatcctgatttggtaactcggtgtctttaaacttcaaactaatccttcccagttcagaactagagccattttccctttttaaaaggatttgtagtcgtttgtctcaacagctggtctttagagctgccctatctatttcttctgtgttccaccatcactaggctacttctgtgataatgtaatatggagaatgtctaaacgccaacggatgttcagatctgaaggtctgtgggagcccgccttccaatgaggttgtttgtcagtgacaccaaatgagttggagtacaagcrgtagggttactgcaggttctgaccaacttggattcaaaggacagccctcccgaagaatcaggagtgtctggaatgtcaagtggttgaaagtctccctgtgaaggaggaaggattctggttgtgctctccctgagctggcccttgaggtaacctttaggaggtaatgcctggttttcactttctgcagagggaccccgggtagcccgaggccacttcggtttccaggtgcagttagctggcagagagaaagctgtttggggtgactgtcccacgtggttgttaagctctatagcatcacct

SEQ ID NO: 4424 - DNA, 600 bp, Bovine  MMBT01290
cttaataaacttattcaaccagtgtcacatacctacatggcatactgtacttgactttagagacactggtgaagaaaacattctgcccaccatcatcaaatttgactttttttgtggtaaatacagacaagtaaaccagtgattgcagtataatgattataatgctgttgacttacttattttatttaacgtagtgatcctctcccttagaattattatctttcctttatgggtttttttgtaccaagttaaccacagactagattatattagagttgtttgggattttatttgctctcyaataaattagaaataagaaagttaagaccatgctccacagctttgaagagtacagttgacccttgaaaaacacaggtttgagctgctcaggtccgcttatacatggattgtttctgttcaaatcctaaaagatgatgttgtgaaagtgctgcactcagtatgccagcaaatttggaaaactcagcagtagccacaggactggaaaaggtcagtttccattccagtccccaaaaaaggcaatgccaaagaatgctcaaactaccacacaattgcactcatctcacacactagcaaagwaat

SEQ ID NO: 4425 - DNA, 600 bp, Bovine  MMBT04636
taactagaccgcatcagccaaagtgtagattacagaacatgcttcatcacctccgttgtaattataaccttgattatctgagagatgtttcctggagacagcctgatatttccatctgaaattttcatggtttggaaatttgcagttcaaaggaaatgtttgacaaattggcccccaaattaacttggcatctgttttaggtcattggcaactatctgcctggcatggtttttctcttgccttgcattttaccctaattcctcatacaaccccttcttgtgtgtttttaagctaataagmcatgtgacatttttgtggcagaaagaggggttttattcatagcttcctgtaatctgttcctttctctgaaaacgttataatttgcagacttccagattttaggtattttcttcttaaatttacagagactagagaaatgatttttcaagaagatcccagatatgatgtgtttaataaaagactagcctactgccccacttttcggcctattccaaagacccactgaataatcttctttgttgaaaacactaattcattatctcttcttacctcctatagagtgaggattgaacctaaatc

SEQ ID NO: 4426 - DNA, 600 bp, Bovine  MMBT04775
ctgtagccccccaggctcctttttccatgggatttcccaggcaaaaatactgtactgggttgccatccccttctccagaggatcttctctgacccagggattgaacctgtgtctgcagtttctcttgcattgcaggcagattctttaytgctgagccaccagggaagcccataaaagccttaggaacaacctaagtctgcattcctgtttccttttagtgggagggttaaaaatggaatgatgaggactgcagaaagaaaagagtaagcaagctgtgtttgggagatttgcaagctttaytgcaaagagtgccgggtgagaaggatccctagggaggaggtccaggaagggaggtagtgtgaccctgaggagggggtgaagggcttggaggagcacttggatcttcttagaaatagaacaaggagctgcaggagggtgctggctgaggacatttgtagctaaacatgatgtsacatgagctctttcgcctccatcatcgtggcggcagctgcggtggccgcgcrgtttagtcgcgcatgtgcagtgtgtggtctacgcctgggagcggcacacccttgaggtgactggcaggagatggtt

SEQ ID NO: 4427 - DNA, 600 bp, Bovine  MMBT06378
tattgtgagcaaaactattagattaagaaaggatcaccctataatctaaaatgctcccaaggaggccagatagccatttgtcagggacgccaccaaggcaattcccgcattcagtgggaagtgaataactgatctttattttccaagttccaggatggttttactccatgctcctgaacttagtatccttaaaggaatacataaggttttactacagaaatggcaatgtcacatagttcaatctaaaaggtctgactttcccaggctgacatgagccagtatcactcaccaatgagcaayaccaggcaamtatatgttcacttagaaactaagggcgtcaaactcactcttccctacgtacatcagttcagttcagtagctcrgttgtgtccgactctttgcgaccccatagactgcagcatgccaggcctccctgtccttcaccaaatcctggagtttacccaaactcatgtccattgagtcagtggtgccatccaaccatctcctcctctgtcatccccttctcctcctgccctcaatctttcccagcatcagggtcttttcaaatgagtcagctcttcacatcaggkggccaaagta

SEQ ID NO: 4428 - DNA, 600 bp, Bovine  MMBT08230
ttgagagaagaggtttctcttctttctcaggatgccctgtggagaaacaggatttgtatagacttccttgctctggtggggatggacaacaagatcacatgaatccttcatagcagtagctagcaaagaagcaggatgaagggttctattaactgtttatttagaacttgaagtatgaaatcrtgtttcatgggcagttttgggacctttgtgcaggggtggctgggagtcaggcatgygacctcttggagaaggaaaagtcacgtggtgggatctaaaagcactgaatcaaatgttatyaactggaagactaggatgaagccacacaaatgaaaaaggaagatgagagaagtgttcatatgagaagmgagttgaaggacaatatatgcagctttgtcagcaggggattgaaattccacagatgaaggcttattttcatatacttacactgtgggggctgaagcccctcaggagaggccctaaatgtgtccttccagaaagacgactctagtgtggaccaacatctttagtgtctctgatgggtaatataatagaggtgggaaagatataggtttcatggaaccaaaagcgtaaacagtt

SEQ ID NO: 4429 - DNA, 600 bp, Bovine  MMBT07833
aaacctgtcagaaataaygcatggaccaaagatctgcatgaaaacataatcacacatttttaaagtatacacctcaaagagcacaggttcaaggggagagagagcaacagaggttgtatgatgtgaatgcttattgcctcttcataaccacaaactgtggttcttaacctggaaacatgcatctgattattgtttgcctcagaaaagccataaacatcaggagaaggaaatgatccaaaaaatgtggcgtgttcactctaaggggtaaactggaaataacaatgaactgtgagtattgayttaatgtctactcatcattaaacaagatgcctgtggacttgtaattattggtttagaagggcagcagtgatacatatgaatctctcatactggaaacttaagtttttgcattaacatttgtctcagggaccacagtatctgtacatcatcaatataaagagttatactcagagattgtccacatgtgcactctaaaaaaagactacactgtgttcagagcagtcaagaaatacttaaaaaaagatagcacaaaagaagaggaagatataggctttattatggcaacatggaaaagactga

SEQ ID NO: 4430 - DNA, 600 bp, Bovine  MMBT06564
tactgctgttgatggggctgctgctcagctgggagagtggctgggcaatctcggacaaagagctccagggtaagtgaccaggcccccaggggtcagagaccatttcttccctgtgcattggatctggtttgctctgctcaggcccctctctgagccctctgtcgccagcccaggctctttgtggtcaaattgtcttccaggcactttcagatggaacccaagccctttctgactgctgcatctccttcagctgttcccttcccagtctgcttggcccagcgcccacacctcccccatgaygctccttgaagcctggaccactggggcctctgtggacttcccttggagtttccataaagctcactacctgtatctgccaccttgccacctagaaaaccaatgctctggattcaggaaagaggaaatatcatttattaggagggcttgtcatccttcaaagcccggcttttgcttcccctcttctgctaggtccttcttgacacctgtcttccctctgcttcactctcgtcccgcgagctgaccagctctccggggtagtagttagaaaccctaatattgagatcagaggtgggtgggagt

SEQ ID NO: 4431 - DNA, 598 bp, Bovine  MMBT05278
  misc_feature (1)..(70): n is a, c, g, or t
nnnnnnnnnnnnnnnnnnnnnnnnnnnnnnnnnnnnnnnnnnnnnnnnnnnnnnnnnnnnnnnnnnnnnntatataaataatggatttggaatgcttaagattagaatatttgccagaatcgtaaatcactgatagaaaacaatggtctttattactttaaaaattaaactaaatctaggctatttaactatgaataaaaataaaaatgagtttggatgggttggagtttatttcagataaacatctttcttttaaaaattttatcccaaacttctctgtgtccagaaggaggcttgcartctgatcagcacggggtttcccgtgaagctgtgttgctcttcctgtttactctccaagcgcacttgcacaaggcagctgtttaggacgaaggcttttctccagttggtctcagattgctaattagattggtaagggagagatgaaatggcccaaatggttttcagccccaagttgtttgaattaaagaaacactacatacaattatcagtgattttgtaaaactcttttaatgaatcaacttttcatatgaatatataaatacaatcgttgtttgttgtttagtcggcaagttgtgtc

SEQ ID NO: 4432 - DNA, 600 bp, Bovine  MMBT07935
atcacaatgataattaccaatttctggaragagggataagagaaataaaaacaagtcatcattacaaaccaccaaaaagccggagtcagccatccaaaacccacctctgcaccggaagcctcttatsrccccagagagagtgaaatgaamagctgacatcgctacataaagacgttccactgggctctcgtgtttaagttgcctctgcactagcagtgccagcaggtgcaaatacggagcctccatcagctccgagctcacgctgcagccctcacgtgtggacagacgtggccacaaccrtcacggggtgtctaagcagcagtaaaccaagatacaacgtgactgagattttccttttcaggggggaatatgaagacatatttgacacagtcctcctaaatgcaaactgccatccatctctccccsaaagaacactcccacctgtcaaacccaggacagtgactgagggtctgaaagtacaggtcctgttgtgaacaggacaggattcatcatgtgaaataacttcccagctccctagacacctgcccaagcaacaggtaaagttgggaaaaaargaactgaagaatgaaaatatcagag

SEQ ID NO: 4433 - DNA, 439 bp, Bovine  MMBT09732
aggacttcataacgatgccctgtttccaccccttgccgccacctgggaagtagctctggtgttctcagaagttcccactgtgagagcagacccagggcccagggtggggcgtggggttgaggagggggtatttgagagcagttttcttccagtttgtacttctttctgcaagtagccagtggtggtgcagctgagcccagtgctcttccagaaggacatggctttctctggccaacggggagctttggggtcccctggagcgtgacatttggtagccctcctttaaaaagctgtgtgctrtttattggacagtgaagaatgytcatttcactcgcttccttcttagaaaggtcagtttcttttcatcaagaggctacctttacccaaactagctctgtgcccagcgattcggagatgcattaggacaagccaaatgaaa

SEQ ID NO: 4434 - DNA, 600 bp, Bovine  MMBT08739
ataaaagtaaaccattagctgcttaaaataaatgaaaatatttctatttaaaattaaataaaaatactgcagtccctcaggagagattcttagattttacttttccaagtgacctactttttaagcagttgtaattacttccaatcatctttctattcaatttattaaatgaaggctttgctttttaatggataatctgcattctattaaagattgaaagcaatgcctatggcttagttattcttcactgaagcaaactctttttggggactcaatgcttatcttatagttaaaatgcayatttcaggaaattaatttcaggcttgaaagacaagaggcatgcatatatccratatggttacagcacaagaaagcaagcaactttgatttctaaagtactaattgtcaygttctggaactccyttgagataatgtaagttagatcctaattttcaaagaagcctacatagaaataataagtacaaaataacagacccagtatgtgtgsttgatgtcattagaatgctaataggaaatgcttcagttaatgaaaggcaagagttcacatcatatttaaacaaaggcactgtgaacaattaa

SEQ ID NO: 4435 - DNA, 600 bp, Bovine  MMBT04219
tctctctggcttctcccagaagttagataacaaaatatgtaatagcttcaaagtccctgtgcaggccttttggtttagaaaaatgtgcttgtttttgttagagtttttttttttttttttttttaagaataaggtaaaaaatagaagcttgtccttttcagtcctaaagaaagtaaaaatgatgtgattggactcaccactgaacttttacctaatgatgtaggggacctgtggttgcctagcatcattagcctacaacttcaggcctgggaaagaaagagatgtggcgttcttcatttktcccctccctccagagaattgtcctactggcagaggctaaatttcaggtatcaggtttcaggtagtctctttattatacattcccaaatgccaaccctgctgtaaggttctgaactttttttaagactgttactttcctcagaagagcatgttactgcttagtatcacatatgtctgaagaataaaggcagagcccgatttctttacatttttggtgggacaggggtaatgattttagttattaagaatcaaggtagggtttggcccagaagggagcctctcaaattttgataaatcata

SEQ ID NO: 4436 - DNA, 598 bp, Bovine  MMBT06379
  misc_feature (1)..(203): n is a, c, g, or t
nnnnnnnnnnnnnnnnnnnnnnnnnnnnnnnnnnnnnnnnnnnnnnnnnnnnnnnnnnnnnnnnnnnnnnnnnnnnnnnnnnnnnnnnnnnnnnnnnnnnnnnnnnnnnnnnnnnnnnnnnnnnnnnnnnnnnnnnnnnnnnnnnnnnnnnnnnnnnnnnnnnnnnnnnnnnnnnnnnnnnnnnnnnnnnnnnnnnnnnnnnnttatgcaccctggcaatatgaaggcaaagatcaggctgagagaggtaaggaggcaggagacggtagagaggttggagaatggctgggagtgtaacakcctatcttcacacagtgagggaatcagaccaagagcagagasatctcagtatcacaatgcaactcagaaacagagtggaaaggaagtacagcgaggtaaaatgccccaagcttgataaatcaagaaaaagtagtacaggtatgttttctaaagttatggaggtaatactgtttgataataactattaacaaaatagttaaaactataaacagaaacagttaaagtaacttgtctctgaacagtgggactaggtgcaggtgaagagtgtggcaaaaggccactgattttttattataaa

SEQ ID NO: 4437 - DNA, 600 bp, Bovine  MMBT12936
ccgcagctgtaaaagtccagatctgtatccactgcccaatgtgaatgcacaatgtctccttagggagaggatcatgctgaaaattagtgttacgtaaataccgttaccttttctggtgaaaaactccttggaatatttccccaacatagcgtattttcgagggactttccccagcagttcaatgatcaatgctatgtgatctgcattgggaaacattgccagcaaaacagaaacacacgacagtttaatcagtacactgcatgcagacaccgctatcgcccgcgcagacagaaacagagygccgcccgcacagagcacaggctctgtctgaaggcccctcggaggagatgcacagggggccgcagcctggggccaaatgcggtctccttctcaactttgagatcagcacaagaattctgctgggttgctttgggaatttaagagaaatgcctttgtcaccattaatgctaccatcagcagctgctattccgtttctgtctgcatcgtggcgcttttcaaaaagaagaggtactacctctgcgattgaagaattcccgagaatattttccagatagagcaaagtgccttgggatactgcct

SEQ ID NO: 4438 - DNA, 600 bp, Bovine  MMBT13099
ctggttgaaattatagtttcataaatgaatgtcagtggtatacaagtaataataactttttgttacaaagtaggattttgctctatatgtaatgagtaaaattattaaatgcaatcttatgtttcattactgacagcttgttataaaaaaggaattaagactgaaattttaattattttcataaagtagatcagctttttcactcatgtgtagtgaaacctactcgactgagactcttttgaaggaagccctcattamattacatcactaaatacaggactgacagttcatattccaaaytattccctccctaaactcttcaaytttaaaggaatctaggaaaatattaagttcaacataactataactattaagttaacataactatacaaaatgaaaacattgaatgcatatctttggcactatttggaatgcagtatttggaaagaattttatgagactatttcattggtagtaccaagtaccatcaacatagatgttacgatccaagttggtggtaactaaaaaggactaatttttgttgttgctttgragcattatatccttagtagttaatacttaagtatcaattacttgaag

SEQ ID NO: 4439 - DNA, 600 bp, Bovine  MMBT11529
agaataccagatttcaacactgggtcaaggcagaaatgacataacaaatagcagcttctacatgtgacacgtaggtatattttcctagaatttaactggggatggttttcatttataaacaaaggtatgaacatcccacaaccatgggattgctgggtttcttcatttataaatgttgacactgacaggtaatggctgtttataagacttggatgtgtttatttactcagtctattaaaatcagtctcacaatttctacatgtaagtaaacatgtgtcatttgacttgtattatgcatamaattgttccaaataatctcctgagcttctgaaaataccccaaggacaaactttgatagaatctacttcaaccttctgaaactcatatttggttccagaccactaaatgctgatttcttgtgatcggtctcaggaatttactccctggactcattaagtgttagaaaagtttaactttactgttaaatgcgttaaatgcatgagtaaataaaaggcactaatgtcgttgtattggtattaatatttgctggaaagtgtgtgttacttccagtgccacttgtaacatgaatcgtccttggga

SEQ ID NO: 4440 - DNA, 600 bp, Bovine  MMBT12011
cttagtaccaggacaaagtccctgcctcattaggcaatatccgagcaacctcatcttctcgttccctgggagagcttttgcttttgtttatccacccgccaaatgggtgcatcacgcagtgtgtgcagcactcagcagataaagggtgctgacccacagctcctctggtcagttctttcaccaatcagcgcgggatcctaagcagggcccaccctggccggcctttgggtctcttgcctgttagatggggatgacaacaccgtccctgactccgccagccccaccaggattcttgggagwatttaagcagccaaaggctgggaaagccctttgcaaagtgtaaggtgctatataatcttggaaggtcattattatcctctttgcttaatggaatggagtcaaaactaaaccgctgcatactactgcttgttaattattagcaacaatagttactgcatactacttarttaccacaatatctattttacctttattacaatatctattgtttattttaaaatraaattgaaatgataggcatgtatctaygtatattaagcattcgtgcaygtgtactaagtcacttcagtcatgtctgac

SEQ ID NO: 4441 - DNA, 600 bp, Bovine  MMBT15879
ggggagctgattctggtttgtaaggcttaagatcagtttgggattctttgacaaaagaaatgctgctcatcaggcctgctctcttccaggcactttgagaagcagccagcaaggcgcagattcgaacctgttggagtctcattaaatgggaccccagtgcatctgtttgcacacaaacaacagcaatgcagttagagagagagtgtgtgtgtgtgcgtgtgtgtgtgtgtgcgcgtgtgtgcaaatccctgatgatttgtttaaagggcagggggcgcaacaaaaccacaaggacttcgstctctttctcttttccttccctttttsgcattttccttgggtggcatgtgcctctctccccagcatgaattcatgagagacctcaggggctgctgagaacaactgtggtttgaatgaattcttttacggatatcagtccggaggtcgccgttggctggagctggcaagcagcatttccctgttggtggtggtggtggttttccctgatggtggccagttyagctcaacagcccaagtcttggaaaggccacgccttgacacaggagaagacacgtccatgtacccctgaaaataaataat

SEQ ID NO: 4442 - DNA, 417 bp, Bovine  MMBT18005
tttccaccccttgccgccacctgggaagtagctctggtgttctcagaagttcccactgtgagagcagacccagggcccagggtggggcgtggggttgaggagggggtatttgagagcagttttcttccagtttgtacttctttctgcaagtagccagtggtggtgcagctgagcccagtgctcttccagaaggacatggctttctctggccaacggggagctttggggtcccctggagcgtgacatttggtagccctcctttaaaaagctgtgtgctrtttattggacagtgaagaatgytcatttcactcgcttccttcttagaaaggtcagtttcttttcatcaagaggctacctttacccaaactagctctgtgcccagcgattcggagatgcattaggacaagccaaatgaaa

SEQ ID NO: 4443 - DNA, 600 bp, Bovine  MMBT06664
tgatgctttmtaaggcccacttgacttcacattccaggatgtctggctctaggtcagtgatcacaccatcgtgattatctgggtcatgaagatcttttttgtacagttcttctgtgtattcttatagctgtgattatttttctcatcactctatgttacaaatttctaaaatggaaaccataggacttacataaaaaaaatgacttggtagaaatatgaccacaggtaaatgttagtagcttcagtttatgcagttttccctagaggtaacacttatttcataatgaaaaagcattaatrtatctgtaatgtcctaagaggtaggtaaaccaacatctttacattgctggagagagctaatttattttcaacataaagcatttcaaatatattctctcagtcaacatctactttagacatcaatttaagaaaaaaattcaaaataaaaatcaatgaagtttaagcactatttgagatactttaaaaagccaaattgtaactaatgtattaaattatactattcattgttctttatccatagtagatgtttacatctctctataaaaaatattgggctctcttcttctcttttctcttact

SEQ ID NO: 4444 - DNA, 600 bp, Bovine  MMBT13691
aaatgactataattaacattttgctgtttgtcctcctagggacctatctctgtgtgtgtatcttatttccttgatcttggaagcttttgtttttaagacacattatcaatttaataacatttttaccaagaaaagagaagtatacaaattttcctttgtaacaaattgaaaacagattaaaagaaatatatatatgactcataatgcattcctgtaagccttctgctttaatttaaatattgttataaattgctytgtgctatcatcatcagcagtccctggcagcagggatcattactrctggcagcctgtaatcattaccacttcatcccttttggaactgaaaatatacctttgagatatatttttgaaatatcaggatttttctgcatttcctattcggttaaagttagtccaagtttttccttatgcagttcctcttggtcttcggtctgagctcttgacatgtagctattcaggcctgagcaaaagtccttcacaatactcacttggtcatgccatctctcctagttttgaaaattttaaggccaggataatttctgtaggctttattgccatcacctaatgtgtggccaagtg

SEQ ID NO: 4445 - DNA, 600 bp, Bovine  MMBT15267
tcagtgattaaaaattcaattcagacatgcaagtggttggaacttgccatgggttgccagaagaatacatcatgtgacagtcaacagtggtgaaaatcatggaaaatgaaagcatctcaaaatggaaaaatataagttttcaaaacaggaaattaacttctgaaataaacaagaaagaatgaatatacatgagagtagtaagcaggtatgcagtgactacttagaaaaaaaaagtagtatttcatgtctcactatgataactatattgacattaaaaattatcttactcatatgtgtgcrgagagagctcttggtttagtaggtgyttcaccttacctctcccctcaaaaggtaggttgacttagagagccagatggcctacattcaggactagttcatcttagtggactcaaatgccatatggtccatttcttatctgctttaaagtataatgtattagtagaaaattggagatgtaacaaggccaacagatcagaagatgattgtcattataaaggtagggtttttttaagtttttttattatttattttgacagaaaacagcaacattctataaatatagtttttcattcacagttc

SEQ ID NO: 4446 - DNA, 600 bp, Bovine  MMBT13190
acttctaaaggaaatgaaaagaatttaacacctctttaattttgtttatgtaattcttttgcttaaaaatctcccccactaccacttcacgttgatactgctaaggtaaacattaacttctccgtctcactttaatatcaaagaatttgagaaacagcagcgtctgaattgtcgaggtttactacatttaagtcagggattgagttcaaccatcctctgaaatgaagcatcatcttgaaaggtttgtccatcaaccctaagtcataaatgaatctattgataacttgaatttaaaaagcrccaaaaagtattgggtgtgtctgtgataatcttgaattgaaatttggcactatcctctcctgtgaataaacaaatgcaacgtagcatagcttgtttggaatatagtgtatatttaaaaataaagtctggtgacagaagcttttctctttaggtggttaggcaggctgaccctgtgttagttgttgtgaaagtgaaagtgaagtcaactctgtcgtgtccaactttctgcgaccccatggactgtaacctattcggctcctctgtccatgggattttccaggcaagagtactggagtgggt

SEQ ID NO: 4447 - DNA, 600 bp, Bovine  MMBT15539
aatatacccatgaaatgatgggctggctggattaacaggcgagatgggtcacagagggccttgggtttcatctgatgagcctctcaaggactgatgtggaggccttgggtttctcaaggccacaaccccaagatgtggcatcttgggtttctcagcatygctgtagtgaatgattggagggcagggacaacactgggcacccaggtggctccagcagatcaggcagaaaagggcaagcgtctgaactgaggcagcttcctgggggatggacagaagtgggtgggcgcaagaagtyaaggrctaaccggagagtgactggctgtgtgagaaggggaaggaggagwccaggatggtcttgctttccaattcaggagaaggtggcgatttgctgaggagggtgagggtcaggaggaggagcaggttttcaagggtgtaggcaatggatatgtgggtgggatgggttgaagcatcaagctgagagcactcaggatatttagttcttaggtgtctcctgctgtggggcgagtctggggggcaggaggaccgtgggcatgcatgcacatactctcccatggtacgtactccttgcacccctcttca

SEQ ID NO: 4448 - DNA, 600 bp, Bovine  MMBT11962
gatcttccgtccctaaggactggccattgccctgtcccgctgaacttcacccacccagccatatacacagagagaacccccagacagaaggatgcttgcaatttattccacctgtttctctccacttctatcaactctaaccttcttatgaaactctctggagaagagattctcatcacctcctccagttatctacttctgccctcaataccggaaattcatatatttatctgccaggatttacccaagtaacacttttctgagaataaacagaacgtaaagagtgctgctttatggggraaaaaagtgggggaggggttcctttcattttgaagctgataatgaaggaagccaaaggtaatgttcagctgtttatccaaaatgttatctaatttattcacatctttctggcatttagattagcatgaaaatctgtcttctgaaaagttcaaaatctgctttgagataaacccttcctgttttcagtaaatgactgttgtagctttaagaagggtggtctcgccatcattctcacaccaaatctctctcttatattccgagacctcaagaagctgagccggtacagataagccactgggg

SEQ ID NO: 4449 - DNA, 598 bp, Bovine  MMBT20184
  misc_feature (1)..(20): n is a, c, g, or t
nnnnnnnnnnnnnnnnnnnnctttcctggtggctcggacagtaaagaatctgcatgcaatgcaggagacctgggtttgatccctgggtggggaagatcccctggagaagggaatggaaagccatgccagtattcttgcctgggaaatcccatgggcagaggagcctggtgggctacagtccatggggttgcaaagagtcgatatgactgagtgactaacactttgactttcaagcatgacaatatctcagtttattagagtgaatttacagagttgattatagaaattttggaaggagaycatcactggaggaagtaacgctgacttaatcaaataacctctttcagtctaaggattgaatttgtagcagctgaaagtggtacacaaatacatttgtagctttgagtttcaccagaggatggcgcccatacttctctgataggttttgccaagttggtttggcatcctttcaagccgtatccgagagacgttttagagactggttacctaaactgttaaccaaattaaggcctttattattaattcagttaaaatgagtgtaagtgtataacatcttcagaacaatttatgccaaaga

SEQ ID NO: 4450 - DNA, 598 bp, Bovine  MMBT20513
  misc_feature (1)..(4): n is a, c, g, or t
nnnntctttggtgagactggggttagagatataggctatggaaggaaggaaaagttaaataacacttatcggataaaagtaagacctttctcagaattacagtgtgttctaatgaaataagatgtgcatttcaatcaaggttctttaggaaataaacaactattaatatgatgatctggatggatgaaaagggcaaaaaagagacgatcatatgttaattcagtgacaaaaacttttttgagggttaccatgtgccaagcgctgcatacagtatctcatttcttctttacaaggaacccyatggaagcaggaatcctattatccccattttacagatgaggaaattaaagcccagaaaagttaagaaacttgcacaaggtcacatgatttactaaccagaaaaagtgagatttaccccgttctgtcaaatgacatgctcacccttaacaaacacccttctacaccacatgccaagctctctgctgtgctgaggacacagcaatgggcaaaacagaaaccctttttgacctcaggaaatccaaaaataagcagaaatctttgagcctccacttcaaaccttcaattaaacaagaaaaaa

SEQ ID NO: 4451 - DNA, 598 bp, Bovine  MMBT20846
  misc_feature (1)..(82): n is a, c, g, or t
nnnnnnnnnnnnnnnnnnnnnnnnnnnnnnnnnnnnnnnnnnnnnnnnnnnnnnnnnnnnnnnnnnnnnnnnnnnnnnnnnnatctctgactagtgatctcgsctgtcagagcctcagtatctcccccttaaagaggaacttagaatccttacctccctgacagatggcaagtatgatgctcacaagaggaagagggagtagatgtgcttggtaaaccctgcgtgcatgctgcatgcgtgccaagtcactttactcatgtctgactttgtgaccctgtggacrgtcctctgtcaatrggrttctccaggcagaaatactggagtgggttaccatgccctcctccaagggatcttcctgacccagggattgaacccttgtctcttgtagctccttcayygcaggcagattctttyactgctgagccgccggggaagcccaaagcctgcacctttgtgtaaatatgggccctattgttcctgttactggcacccaggaactggcttggattccttccactgctctgatggaagataagtgctttggtacctaatcactgcatatgaatagcctgatttcaaaatatcattttaggataac

SEQ ID NO: 4452 - DNA, 600 bp, Bovine  MMBT20676
ttgaatttgaatttcaagcccattacagcaagtgtgactcagcagtgtgatatagctcagtcaaattggggaaatgggaattggttcttttacgggtaaagaaattgagtcaggggacaatgataggtcatctgtattagggaaactcccaagcaggttgtaaatcttctgtttctaaaggagctttctggatatagtattcagtccatatacaaattttaaaaagaaagcatagaaccagctcaaaacaagcaactgtaaaaacaagtttcagggtatgcagatgggcagaaaaagtgrcgttgtcaaggagctgatggttggagaggatggaaagctggtgagtgccctctgccctctccacccttccggaaatgaaaatgattgcagcacaaatgcatgctcattaagcagcaggcctaatgaagggcagacttttttggccctgtctgcaatgccagggaccttgctccagtgttgtcatggggaagttattgtcatcctcctggcaacaggttacctaggtgaataccacacagcctcacctggcccagtaagaagtggggcccatgctgtgcgccatccccaggctgctttgcc

SEQ ID NO: 4453 - DNA, 600 bp, Bovine  MMBT19830
ctgtgtgtgtgtgtattttaattctcagtgctatgcaagggacaagacatcggcctaccgaaccctacaaaatttgggcyttggttactttaaaaattcctttctccatagcacttcacagcaacaaagatrttctacgtttctcctgttaatgagatccaggtttaaaatttcagaaggaaccttttcagarcaagaaccccaacttaggggcatccagtcactagaaccataatgcagttatgtttattcataaagttaagtctattcataaagaaggaaaatgaaatgcaagaatcragtaaaaattaacttaaaattcaatgcttatacaacatatatgcatcataagatatataaaattattatttattgaatctgaagcagtccaaatgattayactggctaactgtaaaaaataaaatcctggtcatgtattttaaattataatgtgcttatttttattaaatccaagttcagaaaaatagattattatggatacttgtcaattcttccaattaaaatgtaccaacttaataaccaaaagaggaaataaagtctcttaaaataaatatctcttttttttctgaagaggagtaa

SEQ ID NO: 4454 - DNA, 600 bp, Bovine  MMBT22126
cagcttttgtttaaaaaacatatttattgaggtatacttcatatgccataaatttcactcatttcaagtgtcaattcagtgagttttagtaaaattacagagctgtacaaccatgtctcctcccgtgtgtcaggctacccatgmaatcttcactgttgaaccaatttctcattcgttgcttctagttttctgtattaaaattgtgggtaaaaggtaaaacaagagttaccagcctctgagcaaaaatttttttccccagggaggaaaggatacaagctgtagtgtatagattgtggcatktatattgtttgcttagagaccctttaamatatttctccaggtcttctgttctgattcatatagacaagtccactccatgtaactgctattcaaccctgctttctccacacccagtactagagcaaagtttaggctcttattaaggccctaggctcgcaacaattcaactatgcctacattgtcagggtacataaaaaatttcttttaaagaaaacaccaaatatatacaaaagtagaaagaaaggcaccatgaacctccaagyatccaacttccaacttcagcaaataacatgtaaccac

SEQ ID NO: 4455 - DNA, 537 bp, Bovine  MMBT03275
tcacacgttcgcaggaggccgtaaggaaaggtgctcctcatccgccatagcaaaggacacagccttgctccttctggatgcaaaccccaggcttctcccagaacctaggaatccccaacccaccctgtaccctaaaccggccaggccccaaactggcacttgctctgttgggtcaaaggcacgttccccacctttttcctaagcactgcaacaatgtctgcctaatgccacctccaccagcaaggcttctttgactattctgtccccttatgaacatgtttattcttgaaaacattccayctggtactcagccagatgagggctccgtactgctgtccctggggtctgggtaaatgtgacttccaacatagcagcaatccacttaaggccagaatcacatgaggacacagcccaggcaaccctggatccatgcaaagagcgggaaatgaaatccacacaggagtccatgtgacagacacacactggagcaccaggaaccaggaaggctcccgggcatggccttcctcttccctctgt

SEQ ID NO: 4456 - DNA, 598 bp, Bovine  MMBT05481
  misc_feature (1)..(5): n is a, c, g, or t
nnnnntaaaggtacatgtgcctatgggtatgaggaaagtgggagtctgtgtattgttcgaagttgttgtgtgtgtgctgttgtgggtgtgtgtgaacatgtgtgttgtgtttgaagtgtgcagttttggtgcatatctgcattcatgcaactgtggtgtgtggatgtgtgtgcctgctgctcagcaagtgttcgctgagcacctactgtgtgcgagggcagcagtgaaccaatgaagtgcacccattcagcactttctcttatgggaggaaactgatggtgacaggcagtcatatctttrtgcatgcacaagtgctcctgtgtgtgtctgcatgcgggggatgtgctgagtgtgtgtcctgccaccttgcgaaggctcactaatctgagtgtggctctggttgtacgcatgtacacagggcttcacatccagaatctgtggtgtcttgtgtactgctggtcttttgcatgtagatattctctttcttgtatgttgtatgaggttctcacctgtgacccaagctgcagtccagaggctccagtgggaattggcatcaggagggctgagtggtgatggctggggaggttgaggcggagta

SEQ ID NO: 4457 - DNA, 598 bp, Bovine  MMBT11276
  misc_feature (1)..(58): n is a, c, g, or t
nnnnnnnnnnnnnnnnnnnnnnnnnnnnnnnnnnnnnnnnnnnnnnnnnnnnnnnnnnattatttaatcaattcatttaataaacatttattgaatgtcctgactgtcctatagctcggttctaagcctggcagactgggatgtgtgcttgccttatccctggtgccatggactgttcacttggaactatctcaaagtsaagtgtctctgttctcagtaaacaatgatccctgaggtttctatagacaggaaaaacctgtatcaaacttacctgtttcatttttttattgtaatgatggratatttcaaacagaacaaagaatttggagataaagccaaatacccaccatccaaaaataacatatgtgaacatttaatcatattttctcataaaacctttctttttgcttttgtaaaatttaaaaattaacataagtgaatccatgctataaatattctgcaacttgctttttaaaaatcaaacattatgttttataaatttatccatactgataatacaggtcaagtacattcatcgttttaaaaacatatccccttacttatttatttacttatttagctgtgctgggtgttagtt

SEQ ID NO: 4458 - DNA, 600 bp, Bovine  MMBT06411
ttatgttttgtttctttcctttcttgtttcatcaccttgctgctgttttgtttccttcaggtcatatttatattttcctttgataactcctgttgggataaaggactgtacatgttatttaatagataattttcaaaattgatttaaaagttcctttaagctttaaaatgtatcctttcattctaatgcctcctaagtatgatgaattgttttgtattcattctgtccatgtttttcgattaatcatgtctcagcctttatagccaggataaaatatcttggtttcaaagtttgcaaaaygtcatcccttctacattttttcttgaccttcagggcaaatctgtgtctaatatttcagctgtaatgtactctcattttaattactgcttgaagatggtacgtcagttaaagcatttagcctttttttccatgaactttctagtcagttgttcataattagattatgtgtagctccttgttttgttttttttgtatattgaaatgtatctatctatctatctatctatatatatatatatatgaagtgtgtctgtgaaatagtaagcttgagtaaaagatgtgatgtgtctttttgtttat

SEQ ID NO: 4459 - DNA, 600 bp, Bovine  MMBT11026
tgcatgtccacacagcaccccgaaggtgacaccctacagaacaaccgcttaccagaccaccaccaacccttggaacagtccccgtgaggtggctcctgccacccccatttcagaggagcctcaggctcacagctaaatgacaccccaggcacaggctggcgatgcggcagaacctgcacaccagctcaggggcacctggctcacagtccttgttctgtctgcactgactgcctccccgcagcaccccgacggggctgccggttactgctcatccacagggaccacgtaccacgcgattamccgatcccccttctagtgccttctggcagcctgtggcccctgaggagaggaaggggcaggtctgggcggagacctcaggactcaccatctcctctggcgtgaggtactcggaggcaagtcgtggtccgaccgtgctcagggactgggcctgcagccgcagcttggcacggatctcctctagctcccgctcccggaggccatcagccacgccgccctgctccagtcggaaggactgcggccgctcgcctttcgagttcctcgtcgtacttggacaggatagagcgaggtttgtgctgcaag

SEQ ID NO: 4460 - DNA, 600 bp, Bovine  MMBT22197
ttggatttkatccctgagttgggaagatcccctggaggagggcatggcaacccactccagtattcttgcctggagaatcccatggrcagaagactgtgggctacagtccatggggttgcaaagagtagaacatgactgaagcgaaagcatgcacgtacgcacgcatgccccagaacctaaacacttgacaattatcgagatctttggaatcacagtgctaygtcctgtgtggtctctagsaaattgatgctatgaacattctggaagtttggggtgaagataccaaaagcaagagatgaraccaactgacctggatctcttgggagtccccagatggtctcctgttttagatcgttctctctttccccagctcacgttcatcgggtaccacaccttctccactagctgccctccaccccacccgctgacttgatggagcacaagttcctgggcaatgaccagcagcatcttcccttccccagcatgccagtctgcagagatggagccactgtcctgggggatgstgtgttgtgattgtcctgtctctttgaactcctcaccctggccagtcagggcttttgttacatgtaagataactga

SEQ ID NO: 4461 - DNA, 600 bp, Bovine  MMBT01387
ctcaaggacttaaaaaacagctaatgcaaggaggcactgaactcctcctatctgcctaaagacagatcctgcaaaaggacctcaattatcagaaaacctctcccagagagcttcatcaaccaggaaaaactggctcttgccacaggaaagaagactagaagctgatgccacaccatatatgcatacatgaggtatatatgttaatacccttctctagttaatctgttttttaattgtttttctctagttaatctgccttttattataggggtcctagcttagaactcagaagggtttagrgaaagttattttccctgaaaatcactgatcctctgtcatcyagtcactgcattcagtgtaatgatattgcactgatcactgaaggtacatatatggacccctgtcaaggggatggaaaggaatagctttggaagaaggaatgctggacctttggatatcttgctattacccatataggaaaattagtcaaggattttgtgctttggggaaagactgaaacaggattttgaactcctatgacctgtagggtcttatgctggttttatgaaagcatttgagaaagggatgatccacgtttct

SEQ ID NO: 4462 - DNA, 600 bp, Bovine  MMBT02429
gacaatccaccttgtagccatctccaaagaagactgtgtggctctattaagtctgcaatttgctttttaaaagtgactaaatatgctttttcacaacaacgacaagtcatctccctcctggagccaacagagtttgtcacccagcttcaccggctkttcaaagccagccatcaaaaagcaaaggaaatgtcatgactttggagcggtcagaagctcttaagtcgcagtgcaggctatttctccttttgtgrcacagaaaagagtggacagacacaatgaataaataatcccattgtactyacacacgagtaacaatccttcaaaatgaggtgaggaacaaagataggagatagcggtgcagccctggtcttaacagaacagcttgcaattccagggcctaaactgcttttgcaaacaaacacacatgcggtgaccctgagaaaataaaatttaaaaatggcatccgattcagaatgccaataggctcagcctaaatggccttctgcataattcactttggacatcttcaggctccgtggctaaaaggcagttggtctgggccaaggttaacgccttaaaccattcaaaataactgacttt

SEQ ID NO: 4463 - DNA, 600 bp, Bovine  MMBT09397
cctctagcaatcaggcgtcccaccagccaggaacgagaaactcgagggctttattctgctctgggaaaagacagcacgcatgctcaatggtgacgttgccaaggtccaggaggggcccacctaccagtttcttatcccaagtccagacactgcttgccagctgtgcccctgcccacccaccaggcacaaagggcacttgggagtggcagcaggtcttgggactatggctgtgaggatcagggccttctagggagatgggcaaaacaaagagctcgaagtaattttaaatgggcaaagacyggacttgagtcctctagagccacggtgcccacaaggatgggtttggccaaaaccctggcgggcagcgctgccctcagcctttcctctgtcggagcttctccaagtacgcctgcagcgacttctggatggagtctctgcagacgaagctgacaaagttctgggtgtcggcgtcgcgctgcctcagcaggcggtcggcggtggcctttcgcatcatgttcttggtcagctggcgcgcgtgatctgaagaagatggggcccacctgtgaggacccgggctctgtgccggggagcggtattgct

SEQ ID NO: 4464 - DNA, 600 bp, Bovine  MMBT13722
ccaggagggctctgggttcaatgcatggagtggcccatttcttccccacctcaggttcccacattggacgccaaagccggagctcagagccaagacagcagaaattcaacctttattcatcctggaacacaaacaagccaccacactcccctaaccaccctggccccctcccctcccctcctcaaggtcactctaaaggccctgggccttcttgaactaacyggtgagtcacagtgccctttgcacagaggactttggatcaagagaggattctgaaaggttggggaagaaatatactcmtttccacactggctgcagagcctcccatctcttaatcccactcccaccagtgttcttctttctcctctatgctcagtcatgtctgactctgcggccccgtggactgtagccctgcagggtcctctgcccagggattctccaggcaagaatactggagtgggttgccatgccctcctccagaagatcttcccaactcaggaatccaacctctgtctcctttcttgtgtctcctgcattgcaggtggattttttactgctgagttataggggaagcccttctttccccactgctgctgctac

SEQ ID NO: 4465 - DNA, 600 bp, Bovine  MMBT16431
tttccatttaaaaggcatgcacaactggtaatggatcttctggtaagcatttcacagaacaggggccccaggtcatgtttgttttatctgtatttcctaaaggctttccagtggcatcatgaaatacctgatggagcttttacctctgtacaatagaatgtaacatttctgtcttgctctctcttaggttactcaccagctgaggacactcaagcaatcctggagagaggtctatgaggtgagggactgagaccacctgccaaaagctggcactactttggtagccatggaaagatgccrttttggaggtggatcctccagtcctcaccaactcttcagatatagccctagccaataccttgactgcagtcttatcagagagaccctgagtctgaactgagacaggcttgttgctgaaattcagcctctgtccactggtgctgaattaaatctcagagacagagctttgggtgaaatagttattgctttgccaggcaaaggggcaacagcagaataatgcccttaagactgtgagtcccactctggagtgggtagcgaggagccttatcatgtttaaggaatagggcgtgatcagcttgt

SEQ ID NO: 4466 - DNA, 600 bp, Bovine  MMBT12497
aaggtcagcaattaggcartctagttcttgcctgaatgtatttttaaagcttatattcaggttagccatgaagttcacacccaaatgaactttttggccaacccaatatataaatgttgtcaaattaaacaaaactgaaaattactgaaaagtgtgtgaacacctgaatgttttgccttcaytgcaccagatacctggatatttagaggcaaaataaaggtagggcttgagggaattattaggaggaaataacagattatgyaagaggaatgtgttattgaaatgaaagcactccataartattaagaaagaaggtgagtaatcttggatagctccttttgtgcccagtaccccctccccagaccctttaactcactagacagacaatcttttgtagcacaaagactgtgtctgtacaaagtctaccacctgcctttcaccctgctgagctattaggctgagtggagaagtatttataatgcactttctggattcttagatgaaatgtgtttatcaagtaaagcctacttccaagtgtttcaatctcagcttgaaagtcatttcctagatcaaagagatgtacatcaacttggcaggggg

SEQ ID NO: 4467 - DNA, 476 bp, Bovine  MMBT19127
agctgagacttgggcttttctttgaagcccagcacaaaacccaactctcccaggaggttttcctggcctgctgcaccctcgtaataatcctttctttggaatctctgccattctagagcctgggctacacacactgaccccrtgttgacagcctgggccagtccctccaacctcacgttacactggaatcgttcagtaaaatgtttgcagaaaraaaaagaaacgacctcaagttgttcctgcatcatcctaggtatgccctcctggtcgcttcaattaaargatacatttttgagagtycaagctcttctttatccttgcttccctttgctgctcatcaaggcacttagatgaactaccccatctcccttcagcttgattcagcaataattcacttatacctctatcattaaaaagggaataaccaatcatctttttcatgtttcctcaccataactccccaaacttaaaacatc

SEQ ID NO: 4468 - DNA, 600 bp, Bovine  MMBT21425
ctgtcttctgtatgccctgacatcccactrctgtcatgggatgccttttctggcaccycatggcacttctgaccagttcgcacaatatctggggtgcctccagagctgctctcaatggcttcaaaatgtttgccagtaagcattagatttttyccccatttcttactgcaaatgtgttagacaagccgcaaggttaaaagtaaactggattcatgatgacatagaatgttaacaagctcctgakctgtctcaccacacatccctccaacccacactcagcaaccaaactctaaatcaacytgccagaagaaagaaatgttaaaggaagtctttgtcagcccctataactatcatgtgaataaagttaagtcaaccaaaaataagacttttagaatttattttagcttctatttgtgatactgcatttaatccttgactgagactgaagtgacaaatgttataatatttctagcatttgagataagccaagatcttccaactgctgaggatttgaaaccaagtcaattaagagtgtcatatttcaaacaattccattggttgagtgttcctcaaacttgccttctgaattagtcccaaggg

SEQ ID NO: 4469 - DNA, 600 bp, Bovine  MMBT22345
acataactacataactatgatctggctttttgtttttttttaagggcaatggacctcaggtgctaattcagtgtgaaagaccaggtaaagaaaagagctcagatgtaaatgaccttggagataagatagctagactgaaaagtcctcagggcagggatggcatctgtgtggtgtgtgtgtgtgtgtgtgtttagttctctctcattgtttgctcagtaagcgctcttgaatgaccagtgggagaactttctattatttctcctacccaaggaggcagaagtggaaacagagggagcagargtgggaagtggacagtgaatcccttacgtggctgctgttcatcatggcctcctccacacagagctgattctcctgcaaggtcttcccytgtctcttgcagacattgtgtagattcttgatgtcagcttgcaggctcaagagcttgctgttcagactgcttacgtctctgtctctctcccccacctcggcagtcagaaaaacaaaagcatcaattatgaactatcaagaaaatgcttactttcgttcactggttgacagagactttaaatttgctggaaatttgtccatcaacccttcact

SEQ ID NO: 4470 - DNA, 600 bp, Bovine  MMBT02084
tactcctactgttaaaaartatcagttaaactgataagagaaaagtagtgactattcattaagtgctttcaatatattatttcatttatgaaataggtcttagcatttccatttaacagatgggaaagacaagctcagagataatattactcaattgtgttgagcttttactatatgccaaagcatttctacacgttttatctgcattcataaattaatttaatcatcaagacttgactaggggaggacccacttccaagcttggtcataggagaattgtcaggactcatgtctttactygctgttggccagagacagctcctcactaaatgggcctctccatagcaggctcacagcatggcacctcgatcttctgagagcaatgcctgagagagacagacacagagagagatggaagttaaagaagttaaagtctttgtracatagtctcaggggtgatttcctatcacatcattatcattttttaataaacatttgtttttaatttatctagctgcaccgggtctttgttgaggtatgtgagatctagttccctgaccagggattgcgcccaggccccctgcggtgggagcagagtct

SEQ ID NO: 4471 - DNA, 600 bp, Bovine  MMBT00612
tgaacatacgaatatgacattaaatggtagtctagtgtcagtattaatcattgtacatatattcattttacatagtgggatgggcaaattacaatccttgggctaaatgcaaaccaacacttgtcttttaaataaagttgattggagcagttayaccaattcattcatgtcagtggttcccaactaggaattatcttgccctccccaggtctggggaaatttctggttgtcactgtggagcggggaactactgacatccagtggccagctgctactgctgctaaacatcctacaaagcargatagccacctacaacaaagcatcccaaaacattagcagtgccacagatgagatacccatatattgtctctggatacttctgcactaaaatgatagagttgagtagttctgacagaggtcatatggcctacaacacctaacatstttattatgtggccctttacagaaaacatttgccaatttttctctatgaaaccaaaaaatgtaagtacctcatgtttagctggttacctattaagtctagaaaacgctctttaacattatttctagaatgagacaattgacatttttatttctacc

SEQ ID NO: 4472 - DNA, 600 bp, Bovine  MMBT04674
gcgactgaactgaatagtgaatgttatctgcacttggattccagataaatttactattttttacagaatgttttaaagaacagctacacaagttcttggacataaggaccctataaaatgttttaaaagatgagtaaagccgagtatgaggtgaaataacttgttcaaattaagtcaacaaactaccacaaggccaagcactagtagtttcaattccttgagctttaaagtcatttacccttaagctcatttttttcctgcacagctcaaaatactgctaaaaagaaagaacaaataaaygaaaacagtcagtttacaaaattccttcattttctagctaaccaggttgcttatttaacaaaagaggaaattccctgccaagtacaaggactgtgctatgaaaagatattctgcaatttttacttcggtaggaacaaggtattttaagaacagatatcactccttagtatgcgtcccaggtatggagtatactgctagagttctaagtgattgagtgtcctgccctgtttccaaatgaacgtccatacgttaacacactgcactgtatattacctggtaatgactttttaattttgaaaa

SEQ ID NO: 4473 - DNA, 600 bp, Bovine  MMBT04682
atgacaatggagaaatgcctccaaagttctgagcaaaagaaagtgtgatgcaagaatactttactcagccaagttgtgttcaagcataaagaccacagagacattctcaaatgcagaaaacacagcatttatgagccattccctgaaaaacttaatgatgattcagccaaccaagagtttgaaaacaactcaggaatgagaagtgatggtaaaagtactgctggtgagtcacagatcagtttaaatataaaatgaaggctaaataattctgggaatgatgatttcagagcagaaggaaaytcaacagtgataatatccatgtagctgtaattcatacagattgaaaagtagaggaagagataaggttggagaaggaatgagctatttttttatcttcagaaccttgaaacatatcgcctagaaatgaaactttattgcgaacagttccagttttttcaatgtttctcataatcttaacttcagagaggtttttaaggaatcaattttttgtgtgggggagaaagaaatgtctacttcactttctttttcttctatcataattatataaaattgatatagcatttttattctttgatatga

SEQ ID NO: 4474 - DNA, 600 bp, Bovine  MMBT04088
gcttgcacgagcatctcagacacaaatagggatgccagtctattctagaaaatagacaaaaaggagaaaatataaaagtcatgtattagaagtgaaaacaagaacaaacattaagcttgaaaagatatataaaatatagtcataagatctctatataaaatatgtagacatctgtatctatatagatatacattcataagaaggtaaagagaaacccaaaacccccaaacgctagatgagagggataaaagctgaaaataaagatatacatctatgaatttttatgactaccttgtgagyttacttgctgtcaaactgttctgaagacatttatttgagcagctatagaaactcctacaatgccgttttcatcttgatacttctattttaaccttgaacagtctgtcaggcctcctacatttctctctgtcatagcyatgatgcctcttttggcaataaacatcagtaaacttaagtgccatgagtcatattgtcaatgtttaattaaatcatggtctagctagggtttgatttatttaggcctgaattcatttagaccctggtcctcataaatttacatagcttatttaacaagctcat

SEQ ID NO: 4475 - DNA, 600 bp, Bovine  MMBT04090
aggrtatatttattttttaaatatagcagctctatgtgaaggtcagcaattaggcartctagttcttgcctgaatgtatttttaaagcttatattcaggttagccatgaagttcacacccaaatgaactttttggccaacccaatatataaatgttgtcaaattaaacaaaactgaaaattactgaaaagtgtgtgaacacctgaatgttttgccttcaytgcaccagatacctggatatttagaggcaaaataaaggtagggcttgagggaattattaggaggaaataacagattatgyaagaggaatgtgttattgaaatgaaagcactccataartattaagaaagaaggtgagtaatcttggatagctccttttgtgcccagtaccccctccccagaccctttaactcactagacagacaatcttttgtagcacaaagactgtgtctgtacaaagtctaccacctgcctttcaccctgctgagctattaggctgagtggagaagtatttataatgcactttctggattcttagatgaaatgtgtttatcaagtaaagcctacttccaagtgtttcaatctcagcttgaaagtcatt

SEQ ID NO: 4476 - DNA, 600 bp, Bovine  MMBT02987
tgaaatgacctcacactaacatgagcctgaataatagtttacactgtgtggagcatggagcctgtgggccaatgctgtgtttccagaaatctcccccygccccccrgagtctagggaatgtcacagttccgggcccatcccctgccactatttttagtggtgatctggaggaaggaggactttcctggacttgccttcagagtctggaaaacaaacaccaccccctccccaccctcrccctcccagttcccctggcaggaagcgggagcccggattcccgggcctgccactcaccctccrtgcttctgcttgagctctgagctcttcagagctgagggacgggcggcagcaacagtgtgcccctgccctcaggtaggacctcagacagcctgcracaggtcccctctgccccctacagtatctcttyttattacactgtctgcgggtgtctgatcccctcctgagggttggccttgccctccgtctcaagtgtttcccagggccccaggacttccctgatggtccagtggttaagactccgctttccaatgcatggggtgagggttcaatctctcattagggaataacgtcccacatgct

SEQ ID NO: 4477 - DNA, 600 bp, Bovine  MMBT04270
atataaaatgacragatgagctacaaatatttttttaaaagagagagaaaatagattacaaagatgaaatgaggtgtgtagtatattaaaagtcatgctatgaaatcccacacacttgctaagagtgtgtcacaaattaggctataaattttcattcaatgagaaaaggaaaacagaatctctttacatagctaccagcaaccaaagggttaaaaacatattagcttcttttaatttgatttccacaagttcagcctggaatctgttcacattcagagaggagccaaggggttagatgcrgtggaagaaatgaactatcagttataacatgcctgcctggtgccagacaccacccccatactttcagatttggtattcaaacaactttgttcttagtccagatcctgtgggctttccatcatcctctgctttccctcaggaagaagaagctcctgtgtactttgctgtctgctgaatccttagtacaaaacgcaggttgattcccctggtgtgtatcgataatttgtgaaggaatcttccatgagatgtgaatcaaaggactttatccaagatgattgatactcgcagctgtcttttaag

SEQ ID NO: 4478 - DNA, 600 bp, Bovine  MMBT10396
ttacattgattttagtacacttcacgcctagatttgagaaatagtaatgtgcagttatgtgtcttatgaaaatctgctttttggcaatttaaatgctattttccctctgacttctgacctgtggaacttaccttctgctcctcactagctatagggtttctcaggcctgccccctgaaatgtaaaccatctgtaagccaacatttccatggaccgggggagctattagaatctaggccctaggaaggcatccgatgtccagcttataaccaggcatccattttgaactgatttcttggcragaaggccgcctgcagatttaaatgggytccyccacctcgggttctgggaagtctgcaggcagcygccctaaaagtgagttatgtcagcattccagaattcctaatgaattctcctgaacaaaaaaaacgctgttgcaccccttccctcaagtcacatttctagttgattcatgagcaaaggcacggaagaaaaaatctatggctttgagggaatcaggaagagtgaaatcatttctgctctaagaaatcactgcgccccaattattttatttgttaggaaaaaggaacctcgttttcca

SEQ ID NO: 4479 - DNA, 600 bp, Bovine  MMBT11821
aggtagtgagttttccacatttgattattttggactgcctttaatataaaattgttagtttggcttattctgtgsaatcagtatctaaatgggatttgacttttaaacattttgaggggaaagtaaaaggagtttatactaccttcayttacttgctttttagttcatagtttatggcttattgtacaatgtaagtcaattgaaagtattgtcrttatagaggctgacaggatagttctggctgggacccacagaatggttgtaccttgtgaagaactgagatctggggttctcactctyaactttgcacatttagraactgaaaaatgattaggctttttggggagatgatttatattaatcagactcacaaaagacttactcattcactgtcagtccatttgacatactttcactgaactgtgtgctggcagctcttatgggataagttattctaagccccaaatgattttatttggccttagtaagaattataatcgaaatcctaggccacaactttcaaaaatacttagttagaagactattgacactatgatacactcagaatgcagagtttgttatttttattttattttgttt

SEQ ID NO: 4480 - DNA, 600 bp, Bovine  MMBT18284
ccaaattatggcctgattcctattgactcacagtttgccttgaccaggtcactggcccctgtcgacatctgtgtcttttctagctgggacaaaccatgattctataggtctactcttcttgaatgactgtattggtgtracatctctctgcaaccaaaaggtaaaatgaagtcccaattccttagcttggtgttcaaatcctttggccatttcaccttgcttctcttccagaaagaaagtcttatagtcactttggacccctctgtcttcccagaacacaacaagtcttcctcacagcartgcttttgttcaggcaattgctctgtttgggaggcttctccactcactcctaccccttcagcaatttacatcctcccaggtccagtttaagtgggaaaatgaagggctccttctttggtctgcaggacgattgtcagttcccacagtacctctgttcctccaaatattagtggaatatttgaatgtctcctggatgcaaagataagtgttgaattgtaaacataagaaatacctatgattgacttccttcacatagggccttcccccttccatctagaccatgccactaagggttcattt

SEQ ID NO: 4481 - DNA, 598 bp, Bovine  MMBT21583
  misc_feature (1)..(188): n is a, c, g, or t
nnnnnnnnnnnnnnnnnnnnnnnnnnnnnnnnnnnnnnnnnnnnnnnnnnnnnnnnnnnnnnnnnnnnnnnnnnnnnnnnnnnnnnnnnnnnnnnnnnnnnnnnnnnnnnnnnnnnnnnnnnnnnnnnnnnnnnnnnnnnnnnnnnnnnnnnnnnnnnnnnnnnnnnnnnnnnnnnnnnnnnnnnnnnaaataatgctgatttaatcactaaaatattccaaaaggggtgggaggaattccaataaataaatagtacttggatattactccagggcttcataccataaggtagtgaacamgtagtgatctatttggatagtgctgacaaagggtgactcattttggcttaaaggtttgctagacctccaaacagacagggaagagcttaagtactaatttaaagcctgatgagattttaaagatcctaaggctcaggttaagtaatttaaaaaatacacacatctcaaacttaagtttaaaggttttaaattgtgaaacaaaggagctgcatgtacatttaatttttggtacctgaattactaacctaagacatcaaaagacaatgtacaacatgtgtctttataccattaaaaaaat

SEQ ID NO: 4482 - DNA, 600 bp, Bovine  MMBT22830
tatagttacagtgtccataagatacaagcaagtcaactgtttagagagtcaactttgcagctattctaataaagagatatttaaagtgacaagccaataccaccaccatactcaatgcaatggtggggtttgttaaaatgagattggctcagaaagcgcagggccacttcatcaacaaattattttcccttcaggaaaaaagggtggcattcctaaagaggaaaaatgaaacaagttcagctaaagtttgcctagagggacagccattaaagagaaaatgttaccgttctctacatctamaatccaccaagagattctggaacacagtgaacaagacaactgctacatcagtgattaccccaagtggggaggttgatcagctgagttttaaaggattttacagagaaagtcctcatcttcaatgtttgtgagagacagggttttcattaagattgtttataaaccatgagaakactcatttatcttgtttgtctgtaggctccttgagtgggtctattattttgggggacaaagcatccgggcagtttaaagtcatctcctggggaaagtgactatattcaaagagaattcagtgctcct

SEQ ID NO: 4483 - DNA, 600 bp, Bovine  MMBT22737
acaagattgcaaacccggcccatctccctgaggccacgccctttactccccgtgacttcgtagctcctcccatcaggggggtgtggtccagtttccccaccacttggwtctaagctttgytaagtttggctgatagaacacaacagacatgaaatgaggcaagaagaaaccttgcagcttcctgttctggttcttggaatgttccagcttgctctgtgagtcttccctagactcccaagtgatgaggggccaagtggastsagaagtccagctgacagacagcatcaaggccccagacaygtgaggagaccatcttggaccctccagctgccagataactatagtcatttaagaaatgcaargggagaccaacagaaggatacccctgctgagcccagccaattcatggactctagaaaaataataagttattgttgtttttaaacattaattttgggagtggtttgttaaacatccttagataactgacacggtctccaaatctccagttttccaggaacgtctctatgataccagagaccaccacagtgggtgtgactatcatgaataatccctgaaaacataaatgtgcctttttct

SEQ ID NO: 4484 - DNA, 601 bp, Bovine  MMBT21404
  misc_feature (1)..(1): n is a, c, g, or t
nccgacatgcgggctttgaccttgagtttccagaattgccaggagaatcatctgactgggaatacagtaactcgaagcttaaaggtgatgagctgagtaacttttctcttttgcatcagtcggctcatgggcacgtgcacagaggccayggttaaataaatgcgtatttgcactctctgcatatgagcgaatctctgtgtccacagtttctggtgacatacggygttggtgtgtctcatccactcagaygtatttttcagttgtttcactcatgttcagtccacttctttataggagtcartgtttccacaagtttgtggttaaaacaaacaaacaaaaattcckattcattctcaagcttcctgagtaaactgtacactcatacacttcacagatttttcagcttttctcctcttcctatctcttagtcagacctactcatggaaacattatctgcactgtggtcttgaaataaatgaatttcactaaggctgcttgggagaatgaaatctttggtatgttccttatgtaagaaacccatttgcaagaatcacagagaaaatgacagactaatggtctagaatagaatcgctgctacact

SEQ ID NO: 4485 - DNA, 600 bp, Bovine  MMBT19872
agcccatgagcccagcactgacctggagcatgccatatactctgcacaacagcccagtgaggtcactgtcagggttatccctggtgtccagatgaggacaccgtgactcagggaggctgtccaatgtcaaacagctagtaagttctagagccaggacttgaatccagggccggaggactcctttctctccatcacaccacagcccaatccagcaggctggctgcttctacaacatgctcctccttccaatgctgctgctgctcattttcttctttaaaaaatgctacatggcatgcaggrtcttagtttccagagcaggaaccaaacctgcgttctctgcagtggaagtactagacatgcaagagtcttcaccactgaaccgccaagaagtcccactgctcattttctactgatgcagctcagtgtaaccttgttgcattaatgccagcaagaatgatgtgatttccaattcactgaattctttttagaaatcacggactgtcattcccattttcaagaagacagaccgaggctaacaagggtcacactgacagaactcagaacttaggtctccctgactctagattcaaagctcttcca

SEQ ID NO: 4486 - DNA, 600 bp, Bovine  MMBT20062
actgggtcagaagcattagtatattttcaagaaaagtctatgcaaagagggtccaaggaaacaggaakgtgaaatctggaggggttgtgaagaktcttgagaatttaggaaaatggaagcttctgccattaaaagtcctagacaaaacaaaaagtatgatggtgcattattacatattatggttatatattatatttaatacatgctatatgtgtgtatattcagcattccaaaataactatatgaatctatattttaacatctttcttgcttttcacaactttgcatsacatcaaagtytgggaatcagtggaatttcatttcactttcaaaattctaatgactctttcataatcctcacagtggaatagtaggaaatgtgctgcttaaatgtaaaagaaaataatatrcaatattcttaataatgtatgtagttataaataaagtgtttttttagaccaatgacatgctaacaaagagattacctactctgctatttgagatgtgaatttaatattcagtgttcttttatttattttttgtttcattttctttaaaacattctcctgttatttattcttgagtttatttctctcacaa

SEQ ID NO: 4487 - DNA, 600 bp, Bovine  MMBT03712
taatgagtgacttacaggaaaagaatcagaagtagcaggatgcaaattttagagcaacaggaaaatatgttatgagtgtctatttttaccaaagttttcttaattaaaaaagttgtatttttttatcatgtcactggaagatgtcacatgcagataaaatcctcagtgtacctcagaaagaaaaaatatcactctttggttaggtaattgtatagaatgatcctggacttgaaatcagggaaagtttcttggtggaagtgggcagagtgaaatttaaaagaggtgaggttggaaacatgrgtggacactagacttgggggattttgtaaatcacaacagaaaaagttggaatttatctgaccctttttggaaagagcagctagaaaggaggaagacacgtagaaaaatgtggtgtcatagtaatccatggtaaggaccttcaagaaaaagcaaatgatcatcagtgatcaagcaggataggtctggaaaaggatctgttgtgtttgggaatatttactttaaaaaatacttgacaagaacaaattccatccatagtaaggatagaagtcaggtttctcagggttgaaaaatggcccgtgg

SEQ ID NO: 4488 - DNA, 600 bp, Bovine  MMBT18039
tgcttagtaaagcattttgaagatttagaaagtgactgctcagtctgcttaggatttatatcccaaacagatgtgccaagaagtcataggaatcaaactgctgttctgtgagtagaataatatattaacttgccttttagtagtgtcgattacacagctgtacaaattgcaatggagtcttcacagcttaagttgcttttatcaaaaatacatcacttcttcaggctggaagttttaacattgcaggcatctcgatgggcatgcatccttgcaaaatacttattatttgagaggaaaacrgtccagaaaattgagatatggcagtgcttaacttaccttgaggaattatctgctctctttttgaactggatcatttcatgatgaaaataaggagtgcctaaataacagtaccatcatctcatacttctagtttttctgagtcttaatgtcctcaactcttatgtcaggatattagcatccattttattgggttgctgtaaggagccaatgagagttttataaagagctcagcaaattgctaaacataggaaatgctcaataaatggtagttactattagtaacattgtattttgtttctc

SEQ ID NO: 4489 - DNA, 598 bp, Bovine  MMBT17873
  misc_feature (1)..(67): n is a, c, g, or t
nnnnnnnnnnnnnnnnnnnnnnnnnnnnnnnnnnnnnnnnnnnnnnnnnnnnnnnnnnnnnnnnnnntggcttttttttttccttttccttctcaaagataacaaataaattaatgcggaaagccacatccatattggaaaggcttgtctctttttccacataccctcagcgatatcgagggctttgtgataaataagtttgtcaggagttcttttcaggaaactcaaccacaattttagtcttgtctattcaacacattgttcagaaatgttttggtaacctttaaagtcctactctargagagagtttcccatacccttcaattaagttttttcctattttgaaggtcattaagactttggaagatattcttatacgtgactttgagtcatgagtccgtgtcctcagctgaagaggcaggaaggtccacgcttgtgaggaaacgttccaccaaactgtgctgttccagggcctcgctggtcaggaaggggagcctgggggtgttggacacagctgcctactagcaagggctcactgatgagggggggcttcatctgctgtggtcgatgccagggtgtgaccagacctaaagtaatg

SEQ ID NO: 4490 - DNA, 600 bp, Bovine  MMBT08214
catgatgctatcagacttttttggttctaggcccattttcatgagtctaccgagtgatggctcccatgatctgctctagtatttttttttttctcctgctgagaacatgactctgattcaagtaccattgttcaatgagaaataccctgatagtcttcacacattcagcgaatatttattgaggccttaatgtgttccaaactctgggtgaggtgtaggggatatgaaaatatataacatgacattcttgccctcaaagaactcacaggtattcataaaacatccctcacactccaactyactgttgttgactgacactgttttattagcaaagatcctgtcattagcttttagggaaagataggtagatatggaaggtcttattctggtgtccagcatagctgttctgtgtagctggttaggcaaagggtgaggatttttttactctatgtcaggagtgataggcagtcttcaccctaaaccagtacagcacaaggcctggtgcacagtgggttctcactacacattagtttgtgctgtgctgtgctaagtagctcatcatgtctgactctttgtgaccctgtgggctgtagcccacca

SEQ ID NO: 4491 - DNA, 600 bp, Bovine  MMBT00065
aggccctcagaaggagcatagagttctaaccattggaccaccagggaattctggaactcaggtttcttacaattccctccagggactagagagagactacaaagttctgcctcccctgaggatattagagtaactaagctggtagagttgagatgttttcagccacaggcatcgatcctaaaaaattcagcaagggacccgagcaggtctgaaagtgcaacatagcttctgaaagcttcccctgtacatggcgttcataaactctctctcaactggcagtgtctagacatacacggttcracacatgatttgacgtctccctctctacaggaagtcacagagctcttcccgtgagtcctgctgtgttaaaagcactcctaaagccttcctgcagcatgaactttctggtgcctaatgaggtgggagcttaagctatatgatttcccacactcattgcattcatatggcctctctccagtgtgaactttttggtgccgaacaaggtgggaggttctgatgaaatctttcccgcatttgctgcacacaaaaggcctttcacctgtgtgaactctctggtgtgcaataaagtcagagcttcga

SEQ ID NO: 4492 - DNA, 598 bp, Bovine  MMBT07195
  misc_feature (1)..(105): n is a, c, g, or t
nnnnnnnnnnnnnnnnnnnnnnnnnnnnnnnnnnnnnnnnnnnnnnnnnnnnnnnnnnnnnnnnnnnnnnnnnnnnnnnnnnnnnnnnnnnnnnnnnnnnnnnnnaggagcagttgagattatgaattggagaattttaaagctacctaggttagttgttttccactctaatttgtcctgctaattagaagacttctcacaatgcacatactcatggaggaatcatctagccccgtgggcattctgttctgtttaaggaatgaaaaggtaagctgtagcttttctttgaactagacatcrtgaaataggatgagaagttattccctttcaaagcacattttattttttgctctatttgtaaaatataatttacatggcctaaccatttttatttgcacatgtgattattggatattaagtaaagggcttccctggtggctcagctggtaaagaatcygcctgcaatgcaggagacatgggttcgatcccttggtcaggaaaatcccctggagaagggtagggtacccactccagtattctggcctggagaactccattkactgcataatccatggggttgcaaagagttggacacaac

SEQ ID NO: 4493 - DNA, 600 bp, Bovine  MMBT10385
tagttagcaggtgatgaaactagcttgaggtccagagggtagagggaccatgtgttatgttatttgactgcatgaaactaactggactctataactgggaaaaaataacttgggggatgaatacaagatggctcacagaactgcacgtgaggctgaaaatccaacttggacacaaaggcaaatagagttccgaggggtctgggtggtagaaacaagaattagggtgacagcttgggtcatgaactcattccgtggttaaaggagggctggacgccttgactgacagtctctctaaagttkattgggaagaatgtcttttttaaaaatttattgtatcgaagtatagttgatttacaatgctgtgttaatttccactgtacagcaaagtcattcagttatacatatatgtgtgtgtgtgcgtgtgtatacatgtatacattctttttcatgttcttttccattatggtttatcacaggataatatacagtgatacagttccctgtgctatacagtaggaccttgttgtttattcatgctctatgtaatagtttgcatcttctagccccaaactcccagtccatccctctcgcatcttcctc

SEQ ID NO: 4494 - DNA, 601 bp, Bovine  MMBT06254
  misc_feature (1)..(1): n is a, c, g, or t
ncctagagcacaatttgataaaccgcaattccaaagattgaaaaagcaatagcaatgaataactcactggtgatagggctcaagtggagtatcagcccactgaatatacctcctatattactcttttatgggcagtgtttccctgacacctggcagggtgaaccacacaggcaaaaagccactgaaggagcccaggagaggaatgaagcaagatttactcacgggagaagcgggcaagtggcctggcagtcttatctccggcttcatttgcaactggaaaaaaaaaaaaaacagaagatgsagttaagtacaaggcatgtgtgtctacagaagatgccaacctacagctaatcctcaggatgattcactattaagctgtgtttgaaagtcattgtaagaggataaaagcaacttcactccctctctatatttccagtgccgctctcactgcctaaatgaagccaaatgtcttcatcattttgattaaaacagtgaattaagctggcaacctaaacagtacctagtttactgggcttaggggagttaactggcctgcaggcagagtaagaggtgtgcacgcctggcttccaagccagtgcac

SEQ ID NO: 4495 - DNA, 600 bp, Bovine  MMBT13431
gcgcactttatccctggagtgaaaaggaattgaacctcgtcaaggcactcagcaggtggcgctatgtgcacagctaaaaacaagtcaggggcgccatttccagcacaatctccctgccctgaatatcctcctttattgtactctcccatgactcaactgcttgaaattagggattcaattcttcactgaaatattatcctctctgaaagcagcctcttctgaaaagtctatgatatgcctctcttcttcatacaatagggagttcctttaaagtagaatcaaaactgacccattttggtygtaatagagatgaagatcaataaatactactgggtgaagaaatgagctaataaatgtacagtcgagcctgggcccaccccgtctccttcacagaagactgagcatcttgaaggcgacaatcagttaccatcagaagaaaagcaggcagtctgaccacagcttcggatctacgcagctgtgtgactgtggacaagtctgttccctggaccaggcctgtttcttcctttttaagtgggactcaaaattcctgcttgcctcaaagaattatcttgaaacccagtgaaatcttaactggaatgc

SEQ ID NO: 4496 - DNA, 600 bp, Bovine  MMBT17486
ggacatgtgagggaaaggccccactgagcaagctcactttccctccctgaacctctgagacaattcaggtcatgggtgtccctccccaaaggctgggctgccttgggctcccatcccaagctactaaccttactagagagcctgtttgcctttagagatgatcctctgatgcatggtgcgaaagaaaattcagtagtgaacaggccaggtggatgcaggtactcctccccttccccccgcccactgccctcagcctgggcctttgagcatgagatttacagcatcctctagtacccccamaccactttgatcctgtccatctgtacttggaagggcagtctccctgtctaggcttctggatgaaaatgaggatgaggatgaaaatgagcaactctgctgagtgataacactaggaaargctgtccttttgtgaaagagaaaggaacagacttcaaggataaccatccagaggtccaaggggcagaactagaaagactggtatccggagtgacrcaggaccaaaaggaagcaacagggtaagctgcagctcagaggccaggactaaaccgtggtcacaacttcagagatgacaggtgcttc

SEQ ID NO: 4497 - DNA, 598 bp, Bovine  MMBT21233
catatgcccagaagtggaattgctgcagcatatggtaattctatttttagttcccagacaccattttagcctcacaggaaatgcaacaggctccgagagtctcaaggtcttggtgtgaattggtaatagactcttgcttcctgcctccaagaccccagctctttgtaccaaatgggttttgcacccatacccccaaagaaatcacatggtagctaagagaaatgatgcacttgaatttaaaagagctgtattaagcttgatttactttcctcttttgtgttcttttacacaaatgagtgmgcaggcaggtggactgggtcagggagaaattataaacttatagtctgagatcaatttaggctacagatgcgctttatgtggcctataaagggtttcatacctttaaagggctgaatcatttttttgtctttaaaaatttttttaatttaatttttatattggtgtataactgacttacaatgttgtgttcatttcaggtgtacagcaaatatacactttgttcagttgtacatatacatatatccgttcttttagagattcttttcccataaaggttattacagaatatttttttata

SEQ ID NO: 4498 - DNA, 600 bp, Bovine  MMBT11611
ctagtccagccaaatacctactcatatcgagttttacatagctaagtaaaacaccacagtaaaattctcccatccctagaaagggtgatctaaaactaagtaaaaaagagggtttttctgttttctttccttttgcactctcaaaagcatgtttgcttaccaaaaaccagaatgaggcttttgttttaatttcaatgagacaaatgctagagtattactactcatcaacaggaagcaaaattactcatccattccactgagatatctaagactagaagactcaacatattttctcccttyttaaaggattctatgtgacrggattaaatttcacaaattccagaatacatttacatatgggatttaaaattttaatcccgttgccattcactttagttttaaacagcttgcttatcttctttctgatagcacaaaattcggtgcagaaatggaaaccagatttctttacgtagtgaatttcatgtggtttccacatttctccaggcagtcatttcccagcagacattcatctaaaatattcttccatgagtgatttttaagtaagatggcatctgtagcatttgtggcacgttctaagta

SEQ ID NO: 4499 - DNA, 598 bp, Bovine  MMBT15746
  misc_feature (1)..(106): n is a, c, g, or t
nnnnnnnnnnnnnnnnnnnnnnnnnnnnnnnnnnnnnnnnnnnnnnnnnnnnnnnnnnnnnnnnnnnnnnnnnnnnnnnnnnnnnnnnnnnnnnnnnnnnnnnnnnctctgctgtgcgtggcctgaagcccctctcccctgcccccctgtgtggacacctcctctcagctcctgcctgcctctggctggtgtgagcacccttcctgccccctctaccccgcccccgccccccgacaccagcagggacgtgtttcactcattcctccatgaagcattcatgaggagcctgcctgagagackgatggggtgctggggctaggtcttggtgacaagcgggcctggtttcagtgctgcccccggagtggggtgttctgtcatcgtgtgctcagggctaggccaagggagcccagaggaagcaccaatccaggagggcttccaggaagagggggccctgtggcattgggggacaaaactggggctaggtgtccatatgctcttctctgcttaagggccccttgcctgtatcctggctcacctggatgtccctcacccccaaggtgggtgatgggtgggaccctccgggaccccagaaaggaca

SEQ ID NO: 4500 - DNA, 598 bp, Bovine  MMBT23193
  misc_feature (1)..(15): n is a, c, g, or t
nnnnnnnnnnnnnnnaaatgctgaaacattgagccagaagataaatgaccagaaaattaaccaatgatgacaagtcaaggtgtactcaatttttttgtcatgtaaagtagaggagtgtgagaagaaggcattgaacaggtggcaggaaaaggggtagaatgagaaaccaagaggaaggaaaataaatatgtacataaattcaaggagaaaataaagtgattaaaggcataggctggggaggagacatcctagtttcaaatcagggctctgacatttactagctgcatgatggtaggcaakttacttaytgactctctaagtggagagaagtcctaactttatggagtttgtgtgaggattatggacagagcatgcttgtgatatacttgccatagtgcctggagtgtgaagagccctggataactatcagctgttattttgttggtataagcctttcctcatttctcccgcctctgcttctcctagctattcccaggcaggttcactgtggccaacttggttcaccatagtaacccctgaaccagtcctgtctgaggcaaggaatatcccatcagctttagcagacccaggagctgga

SEQ ID NO: 4501 - DNA, 548 bp, Bovine  MMBT01611
atgccaaatgagtctgacatatatgtcagtctctctgttttgtatgagatagcacttggatttttaatctgcagaaataagctttggtgtgttcagtgatgccagtcaaagttgtttttatttatttttaaagcattcaatggaaaagtaatccacaattctctttcatttgccagatcttctaacgtctgtatttctaaattgggagtttatatcttcaagaaaataagtaactcaaagggagtgcattttaaacaccacagtggtcagagagaacatgagggttttgcagtgtgcttyctctatgcccatatgagataaaatcatgtctaagcacaaggctctaaagtaggaatcagcgacaaaggtctgtgggagaaatccatcctggtgcctgattttgtagggtccatgagttcaaaatagtttatacattttaatggtttggaaaaaaaataagcagcttatttggtgacataagaaaattatataaaattcaaacttaagtttccatacaaagtgtttattggaacaagtaatgctcattt

SEQ ID NO: 4502 - DNA, 600 bp, Bovine  MMBT02110
ccaccgggacgtcctcctttctttctatcaaagaaagaaaaagtgaaagtgttagtcgttcagttgtgtccgactctgtgaccccattgactgtggctccccaggctctctgtccatgggattctccaggcaaraatactkgcgtgaggagccattcccttctccaggggatcttcccgacccagggatcgaacctgggtctcctgcactgtgggcagattctttcccgtctgagccatcagggaagccctcctatcacagagtttctccaaataagcacatttatagagtcccgtcacrggctgattgcagcttccacccagcactgacagtgcctgagggcagamgtycttgtagagtaaataggacgccagcctcacagaaagaagtcacctctatcctagaccaacggtatgaccttggttagtgtcctggatgaatccgcacttacaaccccacctccacaaaatgtagggagatggtggcttcctgcccagctggcaagatccctgcttacaaagaacgctgtgctggggaaacgaaggtcctcacactattaccagcactatttaaatatgcttggccgagagccttgcccgt

SEQ ID NO: 4503 - DNA, 600 bp, Bovine  MMBT17611
gaaaactgttcttgaacattctgtgactttcttagattagaaggttgctgtgtaattttatattaagtgttttactgtacatataattatcttaagagtgattttcaggccactcttgcacagtgttgaacatctttctggtactcaaaaaataattgcttagatatgttcgttaacaattatttttaagtgcctttgaatagcaggaaatataaagggaaatctactttatggcttttagatgggcgatacagtctttaaacacttgggttcttaacttcaatcataatttctatacaygaaagctttactaacagttttctgtgtctatgtgcttttgtgctcagtctctcagtcgtgtccaattcttggcaaccccatgggctgtagcctgccaggcttctctgtccatgggatttcccaggaaagaatactgcagtattggcagaaatggcagtttcctcttccaggggattttccagacccagggttcgaacctgtgtctcctgcattgacaggcagattctttaccactgagccatttggctagcccttttctaagtctacagtagtactttttccagaaagcttaacaggttg

SEQ ID NO: 4504 - DNA, 598 bp, Bovine  MMBT06242
  misc_feature (1)..(35): n is a, c, g, or t
nnnnnnnnnnnnnnnnnnnnnnnnnnnnnnnnnnncctctgaaactagagtcttttaacatatgcagctcagctaacatgtgcacataaaatgcagtctgactgaaggaaggataaaatctttcatctcaagtactcagaaaggctcaacaaaagataacagaaaaagatgatcaagtgaaaggtacagaagaagatctcgtagataccttctttgaagctgaaatgcaaaaggacatttgtcatgacctactgtgctgtgcacttctctcaaagatgaagaaggattcctaagggcttwgtgtgaggtcttmttgtrtttattgctacctcctggagatttccagaacaagatcatgtgatctttgtcaggaaaatccttgcatgggaaatccttcttccattaataaatcaactcaatgtcctgattatattaatcaatatatcttatggatgatctgtgattctgattgaaagtatgaggactttattaacatcattaaattgagcaacaatattggagagctagaagctgtcagaagtaaagcagcagaagaattacagtatcttcgatctctagatacagctggtaatgatat

SEQ ID NO: 4505 - DNA, 600 bp, Bovine  MMBT10530
gctctgtgagcgtcccctgcccctcaccatggtgcccagtgagccacaggccagccaaggggtgacacacaggctcaccccagccacctgcgaggacagggcgcctcggcgtccagtggacccaaggtgcaagactgtgctaaggctgcaagtgtaaaaggtacccacccaggaccccccagctgtgggctcttctcctaaagagacgtgtgaccaggacagtcacagggaaagggtagcaacgacagcaacagcccccaaaacaccagtgtagacacaggacactggagaacctggcargcaccccagcttcctgttccccccgaaccccgggacacagcctctrgcatggatgtaatcaggctgaaaggggttgcagccgtctcccctcttcccagcttggggcatagcagggtccagcccccttacctgccactggccgcccacgggcctgtagagcacaagagggtcctcccggcagtcttgcaggacccacagcccgtggccctcctcaaaggcggcgtcccacacccggtgctggaaagtcagcagctgccttggaaccagctgtcgctgggcagcatccagctggaagatgta

SEQ ID NO: 4506 - DNA, 600 bp, Bovine  MMBT06978
ataacaatttgtctaggcatttagactaaaacttgcagctcacagtgaatgaatcatcaggctctgtcaacttttttaaatgcaacctaactatcagtgtttatttatctctgtttcagctgccactacttaggtaattgttttataattgttttattggcttcattaaaaagtgatctttttgattcttgtttttttctttatttataaaatgttatgaaagattgttacctaataaatctgaaaacacctctttgtgtataatcagctatacccccaaccatctatgtccaatacaarcaagggaaaattctaccctataattaatttktattacttgaaatccaaaatagaaataataagatgtgttttaaaattcaagagactgtcctttattagctagactactaaaatgatctttattccatcctaacttcttgaaatctatattttcattgtagtcagttcaatttgatctctataccacctttcctgaagtcttaaatcacagtggttattacatcaccatccatggtgtaagtacagaaactctttacaatcaggttttaagtccttacaatataaagggcagactttgat

SEQ ID NO: 4507 - DNA, 600 bp, Bovine  MMBT11974
gaaatactgaaagtcttgaaatatatagtatatataaaaatttaaaaaaaacctcttcgctttagttagtagagaaaagcagtggaggagtagagatgtgatgggaactttttaaagcggaggatttgacggatgagggaccatcactcatggtgtcggaaagcttgagtcaaggttaggccagagtgagaagacgtctccttggacagtcatgccaggcaccgtaggaacttccccagtgtgagctggtgcagtgaaggctgaccatgcaagtagacctagaggctgctagggagcccrtgagaagagtccgtggagttttgaccaggatggcggcctgaagaattttgtcatttttaatttaagttgactcctttaaacatgtccctcttgcgtttcacgtttgtaggtttaagaaaatctaccaagaagcgcagcgaatccccgcctgccgagctccccagtttgaggcggagcacacgccaaaagaccacgggctcctgcgctagtgccaggtaataatttgggcctgtcagtgtgatattagttcatttcctgggtccagctttccccaaaggccttcattttatgagttttaaa

SEQ ID NO: 4508 - DNA, 600 bp, Bovine  MMBT01651
tgtacaggagaaactaacgcaacatttgaaatcaactaatacgccaataaaaaaaatttttagtcttcactgagctccaatttcttcacctataaaatgtcacagaacaatccttgcagattgctgaaggagacactcttgaaagcacttaacaccattcctggctcaaaggaaatagtcaataaaatgaaaaccatcattattatttattgacttgatttatactggaagcactcatgacaaaaaaaaatctaagcatctatagaagaactttctgctaaattataagaaatccccaawtagcattaaaaagaaagaggcaacactctgaaggactcagaacactgtttggctgaaaagtgagatgacattcctgtatctaccagtattacactataaaatttatcatctagttgatgtataaacaccactcatgagtctaggaaacaaacctatcagtgtttcaagtaaaaaaaaaaaaaaaaaaacccagagaaaatatgcttagtttagtccacaggtagaatgaaaaaactagcaaaacatgactaatgaagatctgacttagagatacaacaagtaaccctaccattaattttg

SEQ ID NO: 4509 - DNA, 600 bp, Bovine  MMBT08438
aacctgcaagtttcagcctctttatcatggtaaacctactaagggatataataaatcctatcccgtgagggccccaggggggacagccagtcctcattctcccaaaagacgagatacatcaacatcatcattagcatttccttcccttttgacatctctaggggacaaagaggtaacagaagcgaccggattctaatcctgactgtgctgtgctaacataaccggagccaatcactctccttcctcattcccagttcttcatggataaaacggaggagctgggctcaatgatctgataaycccttcttatctacaccactggctgtctatcctgttcaacacacctccctcaccctccacaagcactttccagttttacatttcttgctcttagcattgcttctgtttctctgactggctcccccatccactttctgtctctccacccatcccaggaaagtctggggtcctctactccgacctcagcaacactcagttatgactctagatctgttctcgtataaacactactatgctccccattatactgagcctagcatggtatctgtatatacttgtggtattgaaaagctgtgcctt

SEQ ID NO: 4510 - DNA, 600 bp, Bovine  MMBT11644
aaagcatgatgtagaacccatagtaccgtatgtagtatatgtaactcacatgggggagtcttcaacagttattgacagttacagggtctctttctttaaaagactggaaaccagttatctgttctacagtggagcatattatcaaacagttgaaacataaaaatgagtttgaaagacaaacttagtgattgattttggatatcacgtattttggaaagagattggtttcaggtttacagttacaggaggaaagttaaaagtatcactttgctgtaattttgccacatttaaatactaatmtttataagctacatttttctttttattttcctttttaaacttgtaaaagacttcagatttgaggaaagcagactgaagagaaaattttcttacatgatttaaattatcagtgttgttaggtgctggttaaaatgataaaaaatctcatgtttgacatgaattattatagattttgtagtgtaattttctccttctttgagcttaattaaacaaataggggtactaggtttctgacttttcttttaagcattgtgaaagccagattctcagtatctccgaaatatttaattttgtcaggga

SEQ ID NO: 4511 - DNA, 600 bp, Bovine  MMBT09142
tttgcaggtaacaatactaagtttcgtatgccagatggtttacctttctggtgagaacttcaagtcaccatagtcttctaagaacttcctacagattctgcatctgggaggagcacagattcacctgatgaatgtgttgccttttgtgttccgcctgacttatctaaaggaccttttctggggtgtttttcaagttgaaattctcctttactgttcttaagattcttaggttctgaggggttggttttttgatcagtgttttttttcaatcagttacttctttggaaagcccatgttttmttttagaataattttaacatcaacagactarttacaaaaaatagtacagagagttctcacgtgtctctcaccaaatgtgtcctaatgtaagtgtattacatttccatggtacacaatcaaaactgagaagccagctttaagactgccacgaacaaaattccagacattatttagcttctactggtctttccaccagagaaggcaatggcaccccactccagtactcttgcctggaaaatccaatggacggacgagcctggtaggctgcagtccatggggtcgctaggagtcggacacgac

SEQ ID NO: 4512 - DNA, 598 bp, Bovine  MMBT02076
  misc_feature (1)..(104): n is a, c, g, or t
nnnnnnnnnnnnnnnnnnnnnnnnnnnnnnnnnnnnnnnnnnnnnnnnnnnnnnnnnnnnnnnnnnnnnnnnnnnnnnnnnnnnnnnnnnnnnnnnnnnnnnnnacacacacacacacacacacacacacacagaacaagtgctaaatattcaaaaggaaaaaaaaaacaaaacagtttgattgagaaagattctagttgcttcttggaaagtctcatttttccaaaactgattttcagtgtgttttgctgacaatcagattgttatttctttaaagagcttattcttggatgggacacygatgaattctgctttttgagatgggtactgtccttgcctaatttatcttatagtgtctggatcttaactccttgccgctggatctagataggctctattactctgctgtactttgcactcctctttttattgtctgcacataaaaaggtgaatatcgtgagaacagacagacagggrtttattggtctgcaygttcatctctttgrcataatgttgctcctctctctaggggaagtgtgcaggggtttatcagkcctactgtgatagagaggtataatacagtctgtaatgtttaatc

SEQ ID NO: 4513 - DNA, 600 bp, Bovine  MMBT05710
agaggtcggccggccgctgcttagacaagtttcaggaaacaaggatttccggagaaaacaatcaataagtaaattcaaggcccacgggggtgtagacagcctccaaagactcagtttgaattcagttctttcccactggttttgcaaaagcgccttggaggaygtgagcgatcrttcactaactcactcatttgttcattccaaaacagtactggtctgccgggcagacgacctggtttgtttcagaaacaaaaggcacagaaataaaaaggggggatacgttacaaattcaaagacccracttwtaagtcagatggaatatgcgagtctggcacagatcctggtttgattaaatgaggtgtggggagaggaaggcacctatcctgagcaggaataagtgaatgcactctgagttggaaaatattaaggaattactgtcattcttcagacacaataatggttttgtggttactttttaaaattcgtatctgtaaagtctgggattttctttcctggaaattattccaggtaaccccccgactcctaaccccccacaacacacacacacagattcgacttgaggaygaaataagatcagca

SEQ ID NO: 4514 - DNA, 600 bp, Bovine  MMBT04130
gaacaatttctgtctccctctgagctagtctcatcaaggtcagttttatggagaattccctagtggtccagtggttagcacttgacgctttcactgctggagccccaggttcaatccctggttggggaactaagatcctgcaacatgtgcagcatgccaaaagaaaaaaacattagctttatcccagtggtcaaaaccactgcatgacctttatccttcactgctctagatgcctttagcactgttgagccctcctgatgaacactgacgactccctcattctccatgaagcaagatgtyctggttctcttggtgactctgtgagactgctcacttgcagtctcctccacagtcagctgtcactagcccattacctggactaacaccatatgaagatacagaacatctggctgtttctacttcctgcgatggcaccagacacacggggtcaagggcaggtggacagagaaggggctcagaaaagctggtgatgctctttattcctgacttgaaaaccctcagtgctctggatctggaggagtcaagtggctgagggatctttttagcacttagtttttttcaagtctcacccaactgtgg

SEQ ID NO: 4515 - DNA, 598 bp, Bovine  MMBT18672
  misc_feature (1)..(210): n is a, c, g, or t
nnnnnnnnnnnnnnnnnnnnnnnnnnnnnnnnnnnnnnnnnnnnnnnnnnnnnnnnnnnnnnnnnnnnnnnnnnnnnnnnnnnnnnnnnnnnnnnnnnnnnnnnnnnnnnnnnnnnnnnnnnnnnnnnnnnnnnnnnnnnnnnnnnnnnnnnnnnnnnnnnnnnnnnnnnnnnnnnnnnnnnnnnnnnnnnnnnnnnnnnnnnnnnnnnngtttattagtcagaggaaagactttttattccctaagttcatctttagaataagtggtaaaaatattccttccagattctgttattattktgtatggaattttatttttacagttgtgaattttcatgttgttctgtgttcctgttgatattttaagaggaagtttggaaagactgccccaaggactgcttgttgtatgccatttaaagccagacatcctgaattatttattaacaaaagaaaaaaacttacatccaggtgctactgcatacctgctaccttgttaatgtcaatttagggctttgtcatttgactgcatatgtgtgactcatgaacacatttacaattatgtgctcaaagggatcatgatcttctacccagtttataa

SEQ ID NO: 4516 - DNA, 600 bp, Bovine  MMBT02419
gagagcagtggttaactgaatcaaaaggtgctgagagatcaagtgagaagaggattagccagtgggcttggcaatgaggaggtcactgatgatcatgggaagagccacataccaagcctctggtccctatttcctgagacaggggcacctgctttaatagccagaaggagactgtggcatggacagggcgggtgctacgcgtgctgacatccagggctcctctggctcaggcgaacttactttctggggtagatgaccatcttggagtcaaggtcagatctgccagcccctcttttaccrttgaggagcctgctccccaggctggggcctttgattcccctctttggtggggctcagagagcacgcyttccagggagmaccagcttgagttaytggtgtttccagttgggaagggacttggggcactttaatcctcatcccttattcacagaagtggaaaccaacccagggagagccagggctgattagaagcagagcttctggggcagaaacccacttctgcaaggggcaataaaccagcgcagttaagacagggcactttaaactcaggtcgtcctggtttgagccacctcctgacct

SEQ ID NO: 4517 - DNA, 602 bp, Bovine  MMBT02633
  misc_feature (1)..(2): n is a, c, g, or t
nnatagaaaaactgttactgtgaaaggaattaaataatgatattgccttttttgggggtattgtgtttttagattaacttctctgtaagaaattattacagttataatttaaatctctggaggttgttcgtctaggtagaagacatttaaaattagcatattctaaggtcagtttggaaaatttaaggaaactaaagggctatatggacacttagatttttcacttaatgtagagaaattgtacagtatacttgtcctaaacctttataaatttccttttatctgattttcaggtgttctakcgcacctgcgaactaaggtgaaaagtacacaaaacctctcggctcttcagaagcctctctctgcggcgctgtgcctcctttagaggagccrctgtctctccctgcagcagctttgggactaatcttattaaatctgagctcacttcttgtttacagtccgtgtgggagaaatccagaaagatgtgaaatttttttgaagtcttccttgatagtggtggctttgattttttaaagtatggattggtaataagacccagaagtaatcttaaggcttatcttaatttcatgggctcctttatt

SEQ ID NO: 4518 - DNA, 600 bp, Bovine  MMBT05626
aaattcttctcctcctctctacatgcctcattacacagagatagaggattcaatgtttgaaaaattatcatttttgtaggttttatttgtgggacgtgagaactgggaaatatagagctcaatttaacagatgccatctctgcctttacaaacgccccactcctgctatcacacaatcagatgtgtgtgtgtgtgtataaatgcatatgcatatatatgtatatgtatttaaagcaatacatcagagttactatgttgtaaagattttagaactctattcgatgctcagttagacacacwtattctgtgagtcaggataccggccaacaccagtgtcatgaagaccataactaagggataattggctggttgtcaagatgcatttttagatgaaaagtccacaatagcaaatacggtggggctgccctgtgagaagaggaagtgtggtgtcttggggtgagccacagaccctgagaggagctgctgaatcccattgtctcaccactaatttaccatctgccctgagtcaccaaaattaccctcaggcctctattaagtgggagtaataagcacattttatcgcagcattaaaagagggcc

SEQ ID NO: 4519 - DNA, 600 bp, Bovine  MMBT03685
ggtgggattattgagtcataggccaagtgtwacttttgtctaactacgcatagcaaattgctcctccaggtgattatrccagttacagtcccaccrtaagtatttgaaggttcttgcccatctttggaactgctgttatttaaatgtttgccaatttgaagcccgtggaatgatttcttgttgtcatttggtttcccttattaattttgaggctgaccttccttccttactttgttggccatcggtttttctttctttttagcaacattctatgtcctttgatcacttaaaaaatattcktttccattatggtttatcacaagatattaaatctagttccctgtgctctacagtagggccttgttgttgtctattctgcatgtaatagtttgcatctgctaatcccaaactcccaatccgtccctcctccatcccacctccccctggcaaccacaggtctgttctctatgtctgttgatcactttcttaatgggtttttagccttttcctgtttggtttattctcattttagcttttaaaaaacaagaaaaagaaatccatctacccatccattaaacacttttttaaaaagtgaaaatt

SEQ ID NO: 4520 - DNA, 600 bp, Bovine  MMBT06995
tgattttgaataaaccccacatagacaagtaagtttgtgtagaaataaattctttctttttagctggggctgtagtaaaaaaggtgactaataaaatattctagttatgagagccctacaataggatctgttaaaatacataaatttaaattccatcccatgaaagcaattgttatatatctatatgctgatgtgtgaaccaaccacttttagtgtgtataattcagtggctattgattttttattttatatgtgtaataacatgctcctaagttcaaaagaatcaaaacactgatgttmggcaattttcaccttcaaagaccagtaccaatgcaagtaatgaaagctcaggygttactgcccggtgactcagawgaggtctaggtgctgaaagcagagygcaaggctggcggcccagagcaaaccaccttgtgggactgacttgcctctgtctccttccctcctgaaatgaatggctcactccagggtaacggcagcagaagcaccaaaggaatgaagtgaatttgtgtgtgcacagttagacaaagatggactccaggtggggccttgagtctgggtcactattgtgtctggcctgtg

SEQ ID NO: 4521 - DNA, 600 bp, Bovine  MMBT04841
acttgccccaggccctttgcaggacacatcatgaattcaaaacaatgtgacattccatttacatatcaaataataaatggagagtgtggaagtataaaacccatatcctagagtcacggtacttggcttcggaatcgactcctctctactagcattgtagccttcggcaatgtattaacctccttggccttagtctccttagctatgaaatgaagataaagataggaaggtttcttctgggtgtccctgaaaagagtaagtgaaaacaaaatccatgtaaagtggtgaacacaattagaygcaagtgttcattgcagtggttgatawttcttttacctgccctgagcactaagtgactgagaatttatttctcatgactgatgacgmatctccagcckcccactgtgccaaccctctgtcttcctgcaagtatcacactgacaaatttcactggctcagcattttcccttgcatgcagttgttctggggcttcatgtccttaaagagagccatgtttactgtttccattatttttccaaaatcagtaggcaaaacatttacttaaatttttgtactgaaaaacagcacagtctgaaggac

SEQ ID NO: 4522 - DNA, 598 bp, Bovine  MMBT07515
  misc_feature (1)..(114): n is a, c, g, or t
nnnnnnnnnnnnnnnnnnnnnnnnnnnnnnnnnnnnnnnnnnnnnnnnnnnnnnnnnnnnnnnnnnnnnnnnnnnnnnnnnnnnnnnnnnnnnnnnnnnnnnnnnnnnnnnnnntatttttcatgtgagagcccagagacagattggtgatccaggtttggtaagtgactctgcaattttcacacatgacttatgtttctaagtcccagagtgttccatctttcaaccagttgacaggaaacaagatgaaggggatatatgttcaactgtactgtgcacctaaaattttgttgggttctyaaatagaacaatactcagaaatggcacagattgcttcagctcacatcacagtggctaggatttagtcacttggttatacttagctgccaaggaagctgagaaatagaatatttacttgggggaaacatggccctaattaagacaacrtttaaatggaaaagaagaagascaattattaaggagcaaataatagtctagcatagtctagcatggttgagataccatctttagagcaaatccttcttgtatcactatatataagtctcttatgttattagcctcttatgttattagtttt

SEQ ID NO: 4523 - DNA, 598 bp, Bovine  MMBT08587
  misc_feature (1)..(92): n is a, c, g, or t
nnnnnnnnnnnnnnnnnnnnnnnnnnnnnnnnnnnnnnnnnnnnnnnnnnnnnnnnnnnnnnnnnnnnnnnnnnnnnnnnnnnnnnnnnnnnctgacttgtttataataaaaacatttggtttgacttccacagaatccagcctatgatgcaaatgcttaagcgtgttagcccacattccttgtcgtccccagagaagttctgttcagaaagcgagaggggtggaaacaaacagttcctgggagtgtctccagtcagcgcccttgcatttagtctgagccatgcaaataatttggatgcyaaaactcaagccctacgtggaccttttaaatgacaaagcaattatgtgtgtctgaggagacagacagtgtctctttaaacgttctttctgttcctcgggtgtgttgtaatcagcagatggccggccctaccttccccagggccccccttgcagcagactcttctaatagctaatatcctgcagcgaccaaggccattagaaggattaagccattaccctcctgtccagcaaacacacaacgctcacaagggccgccttttcctcttcggttgttgttttcatggatgaatcagggcct

SEQ ID NO: 4524 - DNA, 600 bp, Bovine  MMBT04831
tttgacttccaaaatttcccccaacatttcaccctgaaaaatatcaagcatatagcaaagttaaaagaattttatggtcagcatcacctggattatatcattaacatttgctctctcatataactatccattggtccaaccgtcaatctacctgtcaatttatcttatttttatgcatttgaaagtaaattatagatattagttcataacctcctaaatatttcagcatgcatatctttagctggggatttacataaatccccatttacataacagggmacataaaccatgagatatttrtatcaaagcatcccctccccatgaagataatttgtttcatartaagtgtccaggtagcatattttccccaggcatttcagtaaataaccaaaatagaagacagaaatgttagtactcaggaaggagatggcaaacaatgggaggagatgaaacaagagccggtggaaaccagcaaagaactggaaaagaaaaaccatagaaataaggcaaatttggaggaaacgcaaatcaaatggacactgtaacaaaaaaaaaattctttgaaagttgaaaagaattggaaagaaaatgataaagaaa

SEQ ID NO: 4525 - DNA, 600 bp, Bovine  MMBT04186
aacagtaaatcttaagaattcaggattaataagaaccaggcaaccaacacagtagaaaaattggcaaagatataaacaagcagttcacagaagaggaaataaaaatgaccaatagactattaaagaacacttaccattctagcaaccagtgaaatacaaattaaaagatagtaaaagatttatttcaataagtcaaagatgttaatggacaattaacagaagaagagatgcacactgaccaagaagcataaaaagatgctccttggcactagtcagcaggaaactacagatatagagacrtcatttctcaccagtcagatcggtgaaattactatgttggcaaggatryggagaaatagatatacaaggacatgtgatatactgcaggygggattgtaaattgtattctggagggcaacttatcagyatgtatcaaaagtttcatcagtatatgttaaaattttcatcaatttgaaaatttatgtggcatcagaactgttttataatttcattttctcctgaggcatcttatcagagcaagttagaacatctgtaggctaatgagtgatgtttcagtaaaactttatttggtggtgctca

SEQ ID NO: 4526 - DNA, 600 bp, Bovine  MMBT08606
acgtttttccccactaggcctgttatctgacacacactgatatctccactagacataaggggattatgttaaactgaggcagaaccaggataattatgtcaggatattggcaaacactatttagcagttattttttgtttgattttatagcgacaagctttccatctcatagataatgtgaaatagtcctgtcctaggcacaataaccccccaaatatcatcaaaatgtctctttcatgtttcataggtgctcactgaatgagtgaattaggtaaatgaatgcataaatgtggtaaacartcccaggagtggactaatacatggagaagtataagaagtttaggaagagatttcagcccaggaacttatcatttagaagtatttgaacaatatgttatataataaggttttgaactgtgaggaatggaaaattggagataaggcaaaaggaggtgctaattatttaggcaggggagttcagacagaaatgtttttaatttattttctgtttttgttttttaagacaagaaagatcacagtcctcagattctcaatatatctcaggaaagaaaggcagaatagttatttctcatattgcta

SEQ ID NO: 4527 - DNA, 600 bp, Bovine  MMBT07392
caaagagtcagacacgactgagtgactaacacacacaccccagaaccttatttcgggcttccctggtrgctcagtggtaaagaatccacatgccaatgcaggtttgatccctgggccggaaagatctcctgtggagaggaaatggcaacccactccagtattcttgcctggagaatcccagggacagaggagcctggacacgagttagtgactgaacaacaacaacaaaacatgacgatgcccatgtgataggcagagcatggtgtcatagggcctggattagaatggtgaaagtatgartggagacaaaaacaatataggatttgataactcattgtgtttggaagtgagaatggaaaacatagaatcagaaattaggctctggtgatttttttttttttttaataataagacattaagaaaagaaaacaaagtttcagggggaagttaatgatgtcaggtcactaaattgtcctggggttgatgagggttacaaagaagaattccaagtggcctaaaaaacagaagtcagatttcaaagatagtctgcatgccttctccaaatcaggaccatctgcagggaaggctggagtgacattc

SEQ ID NO: 4528 - DNA, 600 bp, Bovine  MMBT05317
gtctccttgtatacactatgttatttaatgtcatttttaccacataattatactctacattgtgtttattattcccatttagcaaagttaagaaccctaagcgacttaatgactgaacagcaacaaagaaagctattccttcttaatttaggtttgttttatttgtttaatgttaatccatgctatatttcagtatgatacagattctgtacctgtgactccagtcagatatccagcagtacaaattagcttcacattacacatattgaacaaaagacagacgttgaacgagcaaggagkggaggggcagggcccagggggagaggtaaagaaaagaaacaaagaattgaacatgcatgcaggcttttccataccaccttcaatgctaacctgcgtcagagggagagtaaaagtaggcaagaatgagcagccatggactgttgaactgttaccagcaccatgcttttcagcaacatttcagcagagtttgaaacacagcaaaactattacaacaaactccgcaaacaaccttttaccacctcaagttaacatccaattaattttaaacactggtataaaattcaacttaaacaattagaa

SEQ ID NO: 4529 - DNA, 598 bp, Bovine  MMBT04304
  misc_feature (1)..(21): n is a, c, g, or t
nnnnnnnnnnnnnnnnnnnnnattttcattttaagaggcccatgttctaaaaggaagcttttctcttgtcctcccaattaagcaaaattatttcttgcatcagaattaccatgaattactaatcatcctaaaattgcaaaataaaggtggtgatatttgaactgagggaatataaaaaatggtgctcaaaaatgaaaatgatccatatattagttcattatttacttaaatacacaaaagtggatagaattctgttttggatagttaattttaattccaataatttaaaggagtgaaaaktaraagatttatttttgtcgtataagtctattatcttagaatccttaattggcattttattcatttcatttttatcattatgcccaagtcatgcaatgtatttccttcataattattacctgtatcaaaactggtttggaagatctttgaactcctgttttcattttcttttgaactctacttgtctctttgatcagcgtattgctcttgcagcttccgcctgatgtaaagcagtttgtatggctgcataccttgtttctgtggcccaaatataaaaagccaaatgacagaaattaag

SEQ ID NO: 4530 - DNA, 600 bp, Bovine  MMBT11077
ttaattgcataaaaagttcaaccaatgagtcattaaatagtaaaaggttattttaagttttcattgcagctctaataaaaaacctttttttactcctccatatttattattattttattatttcccatgtttcaaataagtgagatgtcatccaccaaaaaaacagttgtttgaggacattattaccaatgtgatccctaccaccaccattacttctaccaattgctacaatttattgagcatttactatgggtgaggcaggaaatgwaatgcttcatatacatttcaaacacaatccckgaactaggagtgacaaggtgaattktataatgcccctcaagagcagtaaaacattagactagttacttatctctggtcctgcttttctctaggcttggatcaatattgattktacatcttagaagtttccttccagacttcagtattctattactttgttagggtcaatttcatggtacaaattctcacatttatgtcattctttttttttttttttgctataaagtgaggcatatgggatcttagtgccccagctagggatcaaacctgagccctgtgcaatgaaagtgcagtgtctca

SEQ ID NO: 4531 - DNA, 600 bp, Bovine  MMBT12293
cttattataggtggtttattgatgatttttgttgacattacgaaaggaaaacaaaagygttgccttgcctttttgggaactattgcttttcccacttctttaagtacaagagactattccttctctctcttgcctggatttttctgggctttcttacttcatcttgacatgttattttctttgggtttatcaccggggctcctccccctgctaactattttatgggaggcaggcaaagtcagcacaaaggaaacagaagccagtggtctgtgagaggccttctgstgctggccacccacyggaggcactgaggctgagaccagtgacacttcctttgaaacagagctatgtgcctgctatccaaatcaaaggtgcttataaaaagaattccctcttttgggtctagggttttttcttcctcccagcttcaggtcctgctgtcttcctgctgtcacaaaggaaggacccacagtctcgttcctgctttgaatggcaaaaactttaaatggtagtacctgttcctgctcatcttgctaaagccaattttgtgtgtggctacaaaatctggcctggagctgttacctacaactttctttcctg

SEQ ID NO: 4532 - DNA, 600 bp, Bovine  MMBT13166
tcttgagagtctgttggactgcaaagagatcaaactgttgctgaaagagggaccgctttcagagcttgaaagtgggctcatgtctaacactcagaaatgaattgtctgaggagacacatgtgcagacaaagcaatatattttattgggaaggggcacctgggcggagagcaggagggtaagggaacccaggagaactgctcttccacatgactcgcagtctcaggttttatggtgatgggattagtttytggattgtctttggccartcctctgactcagagtccttcctggtggagcaygcattgctcatgagaagaattctgggagtggttggacacctggtgtcaccttttgacctttcctgaactcttccggttggtggtggcttattagttccatgttccttaccaggacctyctatcataaaacaactcatgcaaatggttactgtggtgcttggtcagggcaggtggcttcagtcagtgtgttttccctgacaaaaccagtcaatcctagagtaaatcaactttgaatattcactggaaggactgatactaaagccaaagctccaatgctttggccaaatgatgtgaagagtc

SEQ ID NO: 4533 - DNA, 600 bp, Bovine  MMBT12624
tatatttttaatttcagaaaaaaatctttgattaacttattaaacattctactaagtatatctatttcattcattcatcccactccatttatattaacatctaaacatcatagctcataatttgtagcttattataatttaaccttaatcttcttttccaactttatataatgtcattctcaaccccttgcattattattctagagctagggagctacattgttccctagtgacaagggacagtctaatgttctcttgctattaactcatgctgtttctcctgtcagagtgtgctttcaytgtttggtggtaaaatcctattcatctgtttagacagcttttaagtcgactcttttgtgaatgcacttcctaaacctagctcaaacatagacagtaaaatacacagcagacctgatccttccctcctcagtttctaacatgaattcccatgtaccttacaagtgaaccaccctaaccaatttcctgaatgcaccctatttccataccttcatgcccttgctcagaacaaactctttgcttaagaaggtccaacccatacctcaaaaagaccctatttttctttttctttattccccacaa

SEQ ID NO: 4534 - DNA, 600 bp, Bovine  MMBT13445
ggggaacaatcctcactcagaaagactcaagggaaggaagtgacagcgtcgtggggacagggcataacctcatctcccaaggaggggctggcttctggggagctggtgacttggaggtcacagcccaagagggtacccatccccctggaggaggctaagcagaccccactggggcaagtctgggtcagagcaggagacaggctgggccagcccctgcctctgtctgtaagcctgtgaggcagctgctcacaggctctggtttgccaagaggggcaagcaaggaaaccaacattctctggrcaccttctgggcaccaggctaggtgccagtcctatgacatcatcactatcatcaacattgtcctattaaatcaaatgttagggcaccatttttttttttccaaaactgtggattgcagtccgttcctgggtaatgaaaacagcttagtgggygacaaatagcatttttaaaataacgtgataaaaaatacagaaaatttcagtgtgcattgcacagagcaaggattggtattgtggaagtttcatttcttaatgtgtctgtgagtgtttggaagctggatcgtaatggggaaggaaacag

SEQ ID NO: 4535 - DNA, 600 bp, Bovine  MMBT15400
tgcctctcctgagacctaaaggtgctgcaaagaaaattaacctcacacttcaaaggggagcagaggagacccccatccctggtgatgggaggaagtgagtactcactgggaaatccctgaagtccattttaaatgatttaatgtgatgaggaagaacacagccccgttcacaccrgaagaacctccatgggctctaaggaattaagtgatcctgaaaatgtttgctggaggaacaagaagagtcacgggggagcaagcaaaatgtcacccagagtaaactgttccctgacatcaggtgayggctcagcccctgtgcctttcatcaggtttcaggaaggcaggcttgacatcaaaatcctctggctgccaagaggaggaaagtgatgactgtgactacagggacaagtatggccagaaaaataaaactgctcaataactccaaagcacctagaaaatgtcatgattggggacagagactgggagtttatcacatcagccttagtaaaggaatagtcaagcctatctgttccaggaccacragctgctgctgctgctgctgctactgctaaggcgcttcagtcatgtccgactttgtgcgat

SEQ ID NO: 4536 - DNA, 600 bp, Bovine  MMBT16289
tcagaaaaaaaaaagtgcttcttaaaccctattctgcagggctcaaagggattattttatgtgcaaagttcagaaataaaaaagccaaactccagcaaaattgcttctttttgcattcttcattttgatgatgtctctaaggtgtggttttccatattctttatgctyctaatatactccaaattaccttatatttctgttgtacctaatagaaaggaggtgacatgtaagggtacagggcccccggtcacctagagtcatataccaaaacctgtctgagtgatctccaaaacagactgygccagacattttattaaaggcttttaccttgtgccataaagttaatccacactggaaggaagcaacaggaattttgagtgggttgaatgtaaatcagccagttgggacaatggtgattgggactactgtgggtgaaacaacactacgtcattctgatccaggcattatttgaaggtcattgaacatatgttattggagatactgttacactcagggaagggaggaaagggagaaagtagcagaagattttgaatggtctaaattctgtgcctgaggtatttaaacctataacctttccat

SEQ ID NO: 4537 - DNA, 600 bp, Bovine  MMBT16237
cctcacctcaacaactcaagcatttttaaaatccagcaactaatttaagtacaaagaaactgccacatgcctgagagagagattttcattatcatttttataatagtcttaccagttctactcttggttttaaatattctctcaaatcttttctccagcatacttatatcgtctctcaaatcttttctccaatatacytataacaatacccagtcatttaactcaatccaccatttgatctgcatacaacttctcctgcatctttgattcaagttttgattctgccatctaacaagccaygcgatctttgggaagatgtcagttaaccaatttcagccttgtcttccttagctttaagatggggataactacacctatcgccagagttctttatgaaattaattcagttaatatataaggaaatgtttgacgtgctaacccaaacgttagaagcggtcatcaccaccatcatcactgttagagatacgtgaattcttgacatggatacacctctgatttaacttacggagtttccagcatgactttacaaacacttgtcatcgtactgaggcagtctgtggtgttctctattggcagggg

SEQ ID NO: 4538 - DNA, 600 bp, Bovine  MMBT18152
aacgtttggtccacctggggctctatccatccttctagttccagttccaaccagagttccaaccaatgggctccagactctgggttctggccaatgaaaaacctcccttacagtctcctcttctttttccccaagctccgcccaccatcgggagctctggctaatggagctcacctggagctgttgctttttctctactcaaagcaacaaataaaagcaatggtggccttagcgttgtgtttgatggttattagtactgaagggggagaaggaggaaaaagctccggcagttggccactrtrtgacctcaaggtggcttgtcgtctctaggcaagtcctagggctacacgttttatcccacctctaaagtgaaagggttagtcgctcagccgtgtctgactctgtgcraccccatgaactgtatagcccgccaggctcctctgtccgtggaattctccaggcaagaatattggagtgggtagccattcccttctcatcttttcccatctctaaaatgaggcaagttcagggtacagcatctayctgcgatccagaggtgtgtggtccagtgtcacacactgagcttgggcccttcccaac

SEQ ID NO: 4539 - DNA, 600 bp, Bovine  MMBT17818
gtctttcatgtgttcatctttccctgtcccacatcacaggaggtggttctcatgggtggtttcaactccagagtttctgagtagtacaagatccccgtctgataagtggggagcatgtctaagtctgctcttgggctggttcctgttaggtgtttttcccatgagcccaacaccctccctcacttgtccctggaggaacaagcacccagaacctcgtggcgcccttgggccttgggtccccattgtagtaggtgccgtgtcccctggaagccatgctgggcttttccctgactccctcartggaggagtagccttgcctcagtgggaggagggagactctagttgaccttttccctcaagggatgaatgaagacatttcaagtgtccctcagaggattaagtaagaagggcctcactggccagaactgaaaggcaggtgaaggcagagaacctgacctaggctgcttcacttcctctccttcctcatgccaggagctctccatagagaagaagaaaaccctagagatgctggaggagaatgagaaccagctgcagacgctggccaatcagagcgagcagcygcctcccagcggaggtctc

SEQ ID NO: 4540 - DNA, 602 bp, Bovine  MMBT12717
  misc_feature (1)..(2): n is a, c, g, or t
nntttttaaaaatcacaaaaackgggattctgtggaattagtgacwtaactraagtttggggccgatcagtgacagggccaggtctttggagcctgtattttttttcccctgcctctgtcttaaaaaagaaattcactggcttaccagtgctgagttcattacctgaatctgttagaataatattggaaataaatttcaaaaatgctgcaaaaatatttatagctctcaaatctatggagatgccacaagaataaagtgggatcatagcagagtggaaatattaatagcatgagatttaggmtctgrcaaacctgtgccaatccttactactgtgtccaaagtattcaacaacccgagactgctttctcttttttaaataaatgtatttattttggytgtgtcaggtcttcatcgtgctgcacgggcttttctctggctgctgtgagtgggggcttctctacttgctgcatgtggacagcatgtggggtcttagttccctaaccaaggatcraacccatgtcccctgaattgcaaggcagattctcaaccactggacccccagggaagttccctgctttctcgtatgtaaaatggaggtaat

SEQ ID NO: 4541 - DNA, 595 bp, Bovine  MMBT14699
cacccaggctaggcggtgaaggacccccgttgtgagcgctgggaggtgagattccaagaagccccgggtatctgaaagcaatttaacattttaaaagctctgaatggtaaaggttaacctctccattgattcaccagtcctgtcttgttgagatgctagaatttacaagcgcaacgggctgagccccagtgaaagagagggacagaattcatctgcagcaaggactggagcctcagacacaatattccatggcacacggaagtagttcagaggtaacaggacaacagattgctcttcagsaccaaggagagcaaggctacatccatatcactgaggaacagcgagcctggtttctccgagtgattggcctataaaaggaagactgctctatttattaatgtaagaatctagcatcatgagaggcttagggcaaaatcctactgtgtcccatgggaaaatgtttgcccaggaaacaaacaatcaatagttctatattatatttagctgaagttttatgcatgatgacaaacacagtccataaatgtcacttggtaatttgcacgggcaaaaatatagccaaaagtcacacatgggg

SEQ ID NO: 4542 - DNA, 600 bp, Bovine  MMBT19637
caatacactttatttgtcttttctcttattttaaaaatgaggaaaagtttaaagacaatttaaaaggtaattgtttaaattaatattttaaaatttaaagcttaaaaaataaatttaaaaaattatacctctgttcttgcctcctaaggaattctcaattttggagaaaagaaaaatgcaaaaagctcttgaatagatatttttataamaaaaawtttgtacaattttaaagtaaaaagggcccctgataagcagcccacctcattagaaggccacaggcattgtgctacctgcagccayggagtgctgcctcatggggcccacaccaggtcatccctcctcccgccactccagttatctcatcggcaagcagaatccaagaggtcatagcacatcttcccttcagtgtagaaaaccttgaaagatactgttctggaaacmaatattttgtgaaaggtctgtgttaggcactttagaaatcttttaaaaaatatttctgagcatctggactcaataccacagtggatcagagtagacaactacagtgcatcttgacagaagtaatttttgaaatcaaagtttttattacaacctgcaggt

SEQ ID NO: 4543 - DNA, 600 bp, Bovine  MMBT21064
ctaaagaaaatgtaaagacatgtggaatgtatcttacttatgtaagatataacaattttttctaattgcattagaggttggcacaaatgactttccataattgaaaacataaaatattttttccaagaaagatgtactcaatgatacaaaatccaagtataagartaacaggtagatttgctgctaagatgtaatctgtcaataatgggtctgaaaaattactgaaagtacattgcaaagacgagtacaaaatgcttgattaaaactcaaactctaggtaaactatatccaagaattackgagtctcacatttttaactgtccggatgttcactgaagtgcacatataaattttgatagtcatattctgtattttagtatttatgattattaatcccttcagtcagcctgcactctctaatccattagaattttcccaaaygtgggtttagccaatatgcagaactggttttctttaggttgagtccttttgtgtgatggtaggcacttaacacgccatggataattctgggttttgttatttttgaagcaaacttcttttgttatatacataatacatggatacacgttccttgtagaa

SEQ ID NO: 4544 - DNA, 600 bp, Bovine  MMBT20012
ctatgggctccaaagttcagttgagggccctcaggggttaggggtatctcctaactccatcctccttaatctcccctgaggcgtgccaacgttcttcccacttcactttggtgtcacagaacagaactcatttcttctgtgcagtagcccatatggtacacattggtggctcctacattcatctcttactcagtcttkcctttggctaaatgcagtatcggtttgtgttgcctattttacagaggtctcaaagggattaagttttattgtgctaccaagtagcacaggcaagatagagakccaagcttttactctttctaccacaaaaatgctaccaggcacaagatagacagcttccttgctgtgtttttggtaactttcaattcataattggatcaatctattrtgtttccccacattaattcccatgtttacaaaggaaatttacaaattagagaacattaaccttttaattatgaaattaaatacaaggaaattacagtttgaagattttaacagatactaaaatctggtttcatttaaaatacttcaagcatactttagaaaaatgtaaagatcaaagattttgtatatttactt

SEQ ID NO: 4545 - DNA, 598 bp, Bovine  MMBT07445
  misc_feature (1)..(4): n is a, c, g, or t
nnnnactgtgagaaaagaaatttctggtgtgttaagctgcctgatttgtgataatttgtgatgatagccccaggacactaatacacctactcaggagtgagaagggacatccccctgttgaaacagctgaggtgacatttgcagagacctctcatttcctattcgtttgatgaccagacgtgagaaactgtctctgcgtcttggcatgtgaaatgcaaatgaagcaaatcctaggtctgaggtcgcttctcagcacgtttggttctggctgggataaggttctcaggtgtctggcatgcrgtagactctacgtattcatatttgcgaatggatggattgacttatgagtgatggctgtgggaggtagaagagatcrttctacttctttgtggaagtcaggcttcttcatattttcctttgattcagtcatctgtaaaggatggtctggtttgctgaagtggtagagaatgggcttgaaatcaaacttggagtcactttctgtgtgactttgagccaataacttagcctcagtgagcctttctttccttatctgtgagtaaagatgacartgcttgcctcagagggttgctgagaggay

SEQ ID NO: 4546 - DNA, 600 bp, Bovine  MMBT13304
tattatcattcatgaaccrttggttgctgtaatctccaatctttattttgtgttagaaaacttacattgtattcgtttctataatgatgcaaaatccattgtcaatgaccatattttagtatcaccaagaatytcttttgagcgcccacaaataagtcaaayagaagatgctttgtggtttggaacatccatctccrttcactagtattttataactctcgggctcttttagttcagactggtgatacggtttactgasagcattacaaatcctgtattttaaaaacatcacccagcctytcattttcatcctcttcaagagagaatcaaattaagtgttaccatgaaggaaagaaaagagctaaggtcatagagtattaaattcaggctttagtgcagaggaaattctgaagccctaatcttgctgaaaatactctggcatcaagcaatcgtggtgactaatcccagtatccggagctgcctggcatggtaggaagatgttttagaaatgacagtctcagagaccagcaaagagcagctcttgtggtctctgagtttcactttcacttaagaaactcaattttcagttctacccactgc

SEQ ID NO: 4547 - DNA, 600 bp, Bovine  MMBT21629
catgtgggttccgggcccctcttgcttggcctgcagtggtaattgtttttttctccgcagagctttgtcattagcacgtttatgcattcttacctgcakctgtgctgcccactcacatctcatttagcatccagaatgagagagaagagagtttttctgccctagagaagtgattctttcctgccttctgcttctgagccctgcatataaccccgaggargggctcaggggtcgttataatggagctgaagggaacagtgctttctgagagtgaatcgagtggcagtgccttggtacccygtttacttgtaactctgagggcctcagagggcccagggaacccaatgaggaggaacggcgtgtcacagtggatgccctacctggggtcctcatctctcttggccctttcttttccaggtggtggaggagtcctctttcctgaccctggacatgctggagtcttgtttcccatacgtgctgcttcgaaatgcctatcgggaggtctcccgggccttccacctgaaccgagtgtcggccagtacccactgaaaggtctttggacctacctaaacccgtgctgcactggaagctgtggctatt

SEQ ID NO: 4548 - DNA, 600 bp, Bovine  MMBT00607
aactgctgatttcaagtctacaaaatcagaacaggttctaggggccycacacatgctataaccaattctccccgtcctcatcctttccctccatttttttctttctctctaccttgctagagagaaatacctacctattctcaactccttaagcccagccacaccaaagtggaacattagtcrttaacaagaaaaccttgtttctgttgatcatagagatttcatgataacagcacgttaggtgggacccgtgttagagtctgaggtccagaggatttaagggacttgcctggagtcacrcaggaccagtagacccagatcgtctaactccaggtacattgctgtttccattcccttaggcaatacctgacaaccaggccagctggatttttctgctggctacaatctaaatagctgactgggcctccagactcaccagagagtcattctggtcacctctgggagaggcttcacaatcctgagctatagaaaaaagcaaagacgaagatctagtggagtttgcctcttcggagcctttagctctctgttattgaacagcaatagaaatacccttattcattggtgaagggtgggcagggc

SEQ ID NO: 4549 - DNA, 600 bp, Bovine  MMBT00857
ttcttccaagaaacaagagtcccaggattttttctttctctcttagctacttctagatgtagccaaaaattgatgggcatgactctcctgaccttgtcatcatttgtaggactctctgaaacactgtacctttttgttcatgacatttcaggatggattgtttaatggatctgcaaaaagatacttccttccctctccggttgttacttagaggaatcttacgttgaagctatttgctggcctcaatttttaaagaaacagttaattcactggtattcagataggttataagtaaaaatktttaaatctggacaaccttccccctacctattgcctcatccatctttatacacccagagactgattttatcagtgtattgctcttgaggggaactcttgtgttaaaagccttctgtgacttcaagagagctttggacttcctcctcctactactggtaggcatcaggaaaagaggaatttttattttcctttttctttttaaactaagtaagctaactagaaaggcaaatgaccctcccttgcagattattagatggtatattctaataacaatcagaaaagtcttctgggtggttggag

SEQ ID NO: 4550 - DNA, 600 bp, Bovine  MMBT00611
tgtaaacccacatctcaagatgtaagctctgtgacagaggcgcggggatatttacggacttcccaccaccagcaaccgccatgaaagacagggtggctgtttgcaataaagggaaagaaaaggtgctctatttccgcacatctctatgcggggacaggcttatcagctgcagctgagactaggtctctcctcctcctgtatttgctctattattttcactacatcataaaatggaaaaggttacacgtttgttccttgggtgaggagaaaggacatgaagcctgagggatctggttctckttgtttctgattaagacagttctttttgtaagttttgacttgaaattaagtaaggataaacaaagcattttccaagtggacttatgaaatccagtactttctaaataaaccatatccaacagctatttaaaaagcaaaccagaatacccataggaaatatacaaatggggaaaagagggctatggtcaacaaaaatggttaaaaagctacttaacattgtttgaaaacgagcagcaacaacaaaatcccagcaacaggctgcagaggtgggaacccgggacaagttccagccacacaaga

SEQ ID NO: 4551 - DNA, 600 bp, Bovine  MMBT02444
tcatttttttctaagcatgcatgtgtgctaagtcgcttcagtcgtatccaactctttgcaaccctgtggaccatgctgtccatggaatttgcgaccaggctcctctgtccaggcaagaatactggactgggttgccatgccctcctccagggaatcttcccaacccagggatcgaacccacgttctcttacatctcctgcattggcaggcaggttgtttaccactagtgccacctgagaagcccttttctaagcattcttatcagtttttctgatgtctttgcccaacactatttcttayattaacatacttgtctttttcctggattcttacttattttgcaggagttatgtcctcaaggaattactccatatagctttagggctgataagttttcagagttcttacatattaaaaaaagtattttacccttacacttgaatgataagcaagaccagatttaaaatcatttcctrtaagatttttaacatatttctccacgatttactggtttccattgttggtggtaaggattttgatgtcattcttagtcttgattcttcttggaaaccctctggactttctttaaccttcaagctc

SEQ ID NO: 4552 - DNA, 600 bp, Bovine  MMBT00613
ggctggtgtgtaaattccctggtgggggccaagggggaggtcaggtgcgcccttgaatgcccagcttggggccgtcctggctcagacttaggagacagagttgggccaggcaggaaggggcagcggggggtttcctcagggtgggtcggcttggctcttgttgtgctggaagccagcctgaaaaggaatttcccagtcatgtcttaattccatcttccttgcagagtaagcacagcattgaaagatgggctggactcttcacttcctcagaaaacagttgttcaaggaggaagaggagaygtgaggtacctttcttttggggaggaaacaacactatctcataaggtttcagggtctgattcttctctcctaggaagagaacatacctcaacaactccagagctgattattgcccagggaggaaatcttggcttggctgggtgatcatcagctgtttatccagagttgtgtaatagaaacacaatatgagtcaatatgtgaaactgtaaatgttctagtagccacattttttttttaaagtaaagagaaacaagtgaaattaattttaataacaaattttatttaatccaacatatccaa

SEQ ID NO: 4553 - DNA, 600 bp, Bovine  MMBT03343
ttctcacttatgtgaaatcttaaaaaatccaactcatagaaaaagggatcacatctgtggttcatatgagaagcagggcatggaggtggtgcaactggatgaagatggtcagaaagtacaaagataagatttataagataggtaaatcctggggatgtgaagtgcaacatgataactggagttaacactactatatggattatttgaaagttgccaagagagtaaattctaaaaactctcatcacaagggaaaaatattttttgtatatctgtgagatgatgaatgataattaaagttaytgcagtaatcatttcacaataagtataagacaagccatcatgctgtacatcctaaacttatacagtgctatatgtcaactatattccagtaaaactgagaggaaataaaaggaattaggaggaaaatgttaacatttggacaactacttcctaaattcctttaggcattttgaacattgaaaactgttcagggtatatacaattcttgcatcagtaactaaccacaacacccagattatactttttattcaagtattcaagttggtcttaggacctctaaaattataaggtatcaaacca

SEQ ID NO: 4554 - DNA, 598 bp, Bovine  MMBT05864
  misc_feature (1)..(160): n is a, c, g, or t
nnnnnnnnnnnnnnnnnnnnnnnnnnnnnnnnnnnnnnnnnnnnnnnnnnnnnnnnnnnnnnnnnnnnnnnnnnnnnnnnnnnnnnnnnnnnnnnnnnnnnnnnnnnnnnnnnnnnnnnnnnnnnnnnnnnnnnnnnnnnnnnnnnnnnnnnnnnnnnnntagctgcttattgataggggaaatagggaatgtgacacgtggcagttagcagcctactactgattctattactgctatagtcagagaaaccagctgatgtgtcagacatgttaaaaagtgaaagtttgccacagtgtacrtttgctgtagctttctccccaagcttctataatgatgcttgttacacaataataaggacaaggcaggggcttaggaattcaattttctacagggtcctgtcaattcagccatacactgacctattctctaatggaaatagccggagaaatacaaatatcaagactctgagaacatcaaaaggccttgctggaaaagcccccacacagaaaaaaagtgtgggtgtgaatccttccactctggaagggtaaaagcctgagctgatgatgctggaagacacactcaaagtctttaaagaag

SEQ ID NO: 4555 - DNA, 598 bp, Bovine  MMBT12511
  misc_feature (1)..(159): n is a, c, g, or t
nnnnnnnnnnnnnnnnnnnnnnnnnnnnnnnnnnnnnnnnnnnnnnnnnnnnnnnnnnnnnnnnnnnnnnnnnnnnnnnnnnnnnnnnnnnnnnnnnnnnnnnnnnnnnnnnnnnnnnnnnnnnnnnnnnnnnnnnnnnnnnnnnnnnnnnnnnnnnnntaaagggaaattgtattccagagaaaaggtataaaatcatgtaaaggtgattggttggtatagtctgagtatgtgaagtggggatgcagaaccagacaaataaacaggcagtcctgttttctgtgctcgtaaattaaacaygcagggtctacttcactgccctctgtaaatggtccagacggagcttccttttgaacaaaaaacaaccccaggacctcaggaatgatacaccagtagtgagcctgtcagtcttgtgggtagaatttcaccattgtgcttcctgtcagcacagggagggttggtcttctgtcccccagacattaattaaagatagccagagtcccggcagggcactcgaggtgaggctgggccacagcaagcccttccctctctgctccccattctcctgtgtctaaacatagccctgagatggtggtgc

SEQ ID NO: 4556 - DNA, 600 bp, Bovine  MMBT11500
aaattcttacacaaatacttagttgatgatatcatagtaaatattcagtaagtatttggatgagtaagtatttgctttcagttaacactgtttcctgggtagttcttttgcttaatgaggtctctaggcttctgcaaatatgctaaactatcttccrtcttactttactgtaaaatgattctgttcctcagaattggcatcttctttatctccagggcatttctcccccsacccccccaccccaggttctgtgtcatattaaaacaacaaataacatttggtctgtttcagcaggtggtrcattatggctgacatgcgaaatctggtagaaagattggagagagtggtgggccgcctggaggcagtctcccatgcctctgacacacactgtgggtatggagacagtgctgcaaaaggtaagcagtatacgtgccagtagagtgctttgagtgaaacttggtgtcctggcctgaaatttttctmtcttggtatgatctcttctttggagctaacttgctgaaacattaaatttagaaagttcatcgcctgtaagataagggaggaagtgacttctttgcagggaggcctgtggttaagtta

SEQ ID NO: 4557 - DNA, 600 bp, Bovine  MMBT11487
tatccagagccctgcacacagcccagtactctgggttgacatctgctgaatcattggaaactgacatcccaaaggagggaaggaagcggagggcacttccactttgtgttcattgtccaacagctgccaagccttgaaaccctctcaaaggtctgttttcagccacacacatctaggaagggcataaatttcttgacagcagaggggttatttaaagtctccattaaaacagctgggccttgttggaaacagagctgttgtcactgctggggcctgagaagggcagggatgcacaggcargattaattctagacctttcagagacgcctgctttatagctgtgtttagggcataaagwtgccaactggcctcagtggcatgaaaggacagcctggcgctcacagaagcaggagccttgctgaatgatacttctgtcttggggatatgggcagacctgtccactttttcttttaatctccctcttagaagtttgccaagagctgggttgtgaactgcagggagatgctgtttcagcaagagcaaaaatagacatcaccagcaatcacagattcatcagcgcagcctcatggacacccactg

SEQ ID NO: 4558 - DNA, 600 bp, Bovine  MMBT16091
ggtattttatagtatcagataaatctcccctctagggtgaagagcagcattttacagtggaaagggtgtaaacgttgaaatcctggttctggtacttataagctctgtgaccttggccagtcacttaaccgatacgtgtgattttcctaagtcctcatgtatcttgtactgtttctgtaaaggttaaaagaattaatatatagaaagcatgctgcttgatgcatagtgggtatgtaattgtagtttctttttattaataagagtcttgtaaaatgtgatttataatgtaaaatatgcatraaagttaccattttaaccattttatgcgtacagttcagtggtgttaagtacagtcacactgctgtgttaccattaccactgtccatctccagaacttctcaaacttatatttcatacccattaaacagtaattcacattctcccctccccagctcctggcagctaccattctgttttctgtctctgttaagtttgactgttctaggtacttcatgtaagtagactcctacaagatctatacttttgcgattggcttatttcacttagtataatgtctttaaagtttatccatattgtagt

SEQ ID NO: 4559 - DNA, 600 bp, Bovine  MMBT15397
gtaaatgatgttacaccgaatattatgaaataatttggagaaaaagctaaaatctaataacaatttttttttctcagaaacatgatagcaaaggagaaacaaaccttggtcggcgtttaaaaagtttgtagagtatatccacctgatgactgggaatttcagaaaattcctttttaaagctgcgatccagaacctaaagaaaaacatatcattcccaggattgcaactttgttcagaaggcttttatctgtgaaaatactctttaaaatattaattgtatcactttgatttttaaaaatycatgaatatttggtttataacatagacttgttaaagggtgaccactcactgtgcaaggatttcacaaagatttaccttaaagaagaagcacctcagtaaactaaaaatattatttcatataagaagtcttagaaaccacttagaactgaagtgaagtgaaagtgaagtgttagtcactcagtagtgtccaactctttgcagccctatagactgtagccttccaggctcctctgtccttgggattctccaggcaagaataccggtgtgggttgccattcccttctctaggaaatcttcttg

SEQ ID NO: 4560 - DNA, 600 bp, Bovine  MMBT17508
ttaagatggcaaagttgattgaaaaccacagaggtgagaaagctatgcaaccaggaaggcgacacggctggagctgcatgtcctctcaagcggctgccctctggctccctcctatctcggttcaccatgcggcaggtagtatgtgggtgcccggccccgggagcccctctccatggtctgtggctgtttactgtcagagactaatctgtctcaagtaagccttaggctcagatgagaagcagagcaaaatgccaacacttcctctgggactcagggtaccataatgtgggggatggggcrcagggacactgaagtgacaagagctggagccctggacacgtgtgctcccaggggaaatgtctccaaagccagccctgcctggcaaagccttagttctcccgggtccctggattcagctcccaaactggcacagatttccagcatttaccagacagacagcaccgtggcttcgggggtcaattttgagagcgtcaggttaacaaataacccctcaggaagcaatgtctagttctgatggagaccctggaggcaggaagtggacatttcagtccagggctgatgccatcatttgaagttgca

SEQ ID NO: 4561 - DNA, 600 bp, Bovine  MMBT23243
ctcagattccaggagattctggacatctagaggcaccaaggcagggtcagataaggccaaagttccctaaacatcatctgtggtcttctggtgggggttaagggaggggggaatcttttcaggggtctgtgtggtcaaaagtattttcataacaatgctaaaagtttttctgattgtgctgttatgtgaactgacagtgcaaaagcaatgttggataaaactgctggtgcttttgcaaaaaatcaggcctgtggcaccaaactgtacggacagtcactgtatttcaccaccatatacccrcaataaaaaaccaataaatttaaaagccagtttcatttaagaatgtccttaataaagcagtaaaataattttataaaatccttgagtaaatctttttaatagttacagaatgagacgtgcttaaagcacttacgctgcacactaagtatgatggttgtctcaagaaaaagcacttgtgcgacggtttaagttttaaactgaaccaatcacttttttcataggacaccatttttactattgcaaactatggtttttcagacttgggtatttagcatacattttcttgaaaatgagtgaacc

SEQ ID NO: 4562 - DNA, 600 bp, Bovine  MMBT02533
caaaaacttggacatctggtgaggaaatctaaagtacttgggaaggcgagaatcaagcagcttagacaatggggatcaccacagaggttccataaggagaggggcagggcatgttcaaatytgatggacctgcagccataatcagaggatgggatggagaggaagctggataaggacgtatcttaaaatataaggtggtccttctcaggctgagcrcagggactcctaactcaggtgtctaaaaaatgtatgaggagatgccaaagacagggcccattagaaaggattccccaggagggmgccragagttctcactcacttggaactttaggtgttcctagtggggcaaagcctttgactgagtggatcccaataaactatggaaaattctgaaagagatgggaataccacaccacctgacctgcctcttgagaaacctatatgtaggtcaggaagcaacaattagaactggacatggaacaacagactggttccaaataggaaaaggagtatgtcaaggctgtatattgtcactctgcttatttaacttctatgcagagtacagtatgagaaatgctgggctggaagragcacaagctg

SEQ ID NO: 4563 - DNA, 600 bp, Bovine  MMBT10596
ccccactagtttcctgtcttgaaccactggaggcaaagtttagccagctgggagctggatggttgaaccacagacaaaggcaacaacacttcatttttaaaatgagagaaaaaagagatagcacccctccccaaatatagagctatatatgtatattttatatatatagaattcattcgtgcacaattcattaaatgagcttttcaaaaattaaaaaaaaattataagatacatttctttaggcttttgcgtttttaaattaaaaccaacaagaagtctccatctctactccacccaatwgcaaggggaggccccagaacccttggttccttgtactgtggcctcttgcaaggggtccctcaattagaccaccagcccctctttgcctaactgaagctctgcatacaacaggcactcacccactgctggagtggggtgctgactccttcaaggcgggatggggtgaccccacaggcctgggagatgggtacctcggtctccacccagcctgtccccatcttggtgtcttggcaactatcagtaagacagggccaggatggggacaccctccctctctcctggagtggtagcccctaattc

SEQ ID NO: 4564 - DNA, 598 bp, Bovine  MMBT09664
  misc_feature (1)..(12): n is a, c, g, or t
nnnnnnnnnnnnatctctgcttaatgagccctagcaataaatttggcctgatcaattttatgttccttccattatcatctcacactcttattatccattcctacatggtccccagatttttatctgtatagattagggaatcttaaattatatattgttgtaaattatatgtgaatatgaatactagaaagagatttattataaggtgctggcccatgtgattatggaggctgagaagtcccataatctcccatctgtaagctggagaccaaagagagctgatggtgcatcaaaggccakagagctggagagctgatggcataggttctagtctgagtttgaaggcttagggactaggagtgcttgaggacaatttaaatagtcaggcaaagtgcarcctcttcacacctttttgttttagtcagccctcagtgggttggataaggctacccacattggggaaggccttctgctttactcagcccactcattcaaatgctagtctcttctggaaacatcttcacagaccacccagaaataaggttcaaccagctacctgggcatccagtgcctagtcaatttgatataaaacattaat

SEQ ID NO: 4565 - DNA, 600 bp, Bovine  MMBT09786
tgtagtactaagtccattatcaggaatattcaggaaacacattcttggggaattcaggatgtgtcaggggcctggatatcttgacatcacttcacaaagcaaccaccagagtcccaaaagcaggagagtccgtgcttaggggacaggtaactggaaagtagaaaaaaatttcccaccctgacccagctgggttggttttgaatagaagcagtttagaggataatacctcttactgctggattcagaaatactttggaaagacatcaatattaaacatatttagatttgctttattaatcrtgtataatttctactactaagatattttatagtgaaaagaatgttaaaatatttccttggctagcaaaagttacaggcaagattttagatgtgttttgttttgctttgttcagccttccccagagagaaagggtgttaaatatagactcatccacatgatccctctgaggcgtgtgggtctgctttctgtgtcagctgtggcacaaatgtgcatgatttacccatacaactattgaaccagcattggcctattaagacttcatgatctgttcatgagctgtcaacccaaattgagcttga

SEQ ID NO: 4566 - DNA, 600 bp, Bovine  MMBT09356
tattttaaatccactaaataataactagactatgaaagggtctacttaatttttgaaatacagttcttttaagaattgtaagatctgcagatacaaaaattctacgccatttctaaaacataatctatatcaccaaaaaaatggctgaagaatgtacatttcagattgtaaagatgactcaacttctgatttaaccataaatctaaatcaccatttaactgaaaattactgaatgtctcacagctgatataaatcacatgtatcaactgttttaacattaacacaaaactgctttgatayaaggaaatgcacttgacgggcttttcctcatcccttttttgagattaagtctacaatttatgtcacattgacaacctttactgatattttcctattcaaatgttggtagctattagacttcatatgttgggtaaaaacatttacttacttgctatacaaaatacagactatcacaaagatttatcctcaaggacaaaattccatggtctcagtcttcaaaatggcataccttttggggggggggggggggaagaaaacaatattctaaacaattcattgatggaaccaccaaaagccaag

SEQ ID NO: 4567 - DNA, 600 bp, Bovine  MMBT11246
aaaggtgttcagagtgggaactcatctccttaatgaagaaatggcaagtaccaagaagacacggagaattgaagtcaatagaggaggcctgggactgaggtctcggagagagagctggtagagtttagagtgctctagaggtcctgcatcttgaaggcagaaccaacaccatctgctcttgaacactggggccgtgatgaaagagctggctctgagagctttcctgatactactggcaccaaggaaaagcaaggcacgtgagctgaccagggaaacacacagacacagacatgctagttytgcaaccytgcagctgtcaagctccatctgccagcatgaggaaaaactaaaccaattcactcacacaaaactcatgtcctaaggagtttcagtaatgactttaaaagacttcctgccagcctataattctactstagtyccttctccatgcacaactccaacaaagatcttgaccaggaagaactcacttcatttaaaggggagttacagtaaamagataaaataaacaaacagcatsagatctatataaatatattacagaaaaactggaaatggaggcagggaacaagaaaaacaaaa

SEQ ID NO: 4568 - DNA, 600 bp, Bovine  MMBT08770
gacttaaggactaacactttcgctttcacagaggctcacagtgaagacaggataaaggaagtcaagtgattactattagtcagcaaacttttgaaaagtgtccatagcaacaaaaataggcataaacaacatcttgaaattttcttaaaagacaatagtcaggaaagaaatcaatagccaacaaagggtcactggagctaattagaagcaagggataaaatgatggacatatttcatcagaaatcttcaacctgaaataaatgggttgtgttttggatgattgcttctgagtcatttgcyttagagctgagaaatacatttttccatagaaataacatgctagtcgataactcagtttttgaatagccaamagagtgttggttcctgggaatgtggagtaataaagaatagtccatttcagttatcacatctacattttcctatagggtagtgcattctgtgttcataaatcaagcttccaggaatacatgagacactcatacagtagcagagtcactggttgaaacatatgggagaaggcagagaagtttagctgttgagcagacccagaaaatagaacttactggaatcaggtaataa

SEQ ID NO: 4569 - DNA, 600 bp, Bovine  MMBT10430
gttgggaggcagctccaggtcccacctgcagctcacatgccatccagaccccaaggggcacatgtgatcccttgacctaaagatgcagacttgggggcactgcaggaccaggctggggctagtcccagcttgtaatcatctctcctgattgaccacactagaggaggaaacaccccacccttctgtgcctagaccctcactttgacaacctggggcctgagtctcaccgtccttgagagccccccaagtgattcattaagattacggggcccagtctggccatgatgctaaagggtcacrgagcccccctcacttacctttggctgcctcgttacaccctgccggtcccagctctgtgggaagtcgggttacggcgggttgcaccgttgcccctgccccctcgaaatccaccccggaaactacggcctcggaggaacctccctgacactccgaaggtctccgtgttgagcttcctctcctcagcccacgtcgtccgcctggaactgaaccacaaacaaagaacgtgaaactgactgcagcaggcagctcctcacacagcctggggaggaagraggacagatggtgactcatcactggagc

SEQ ID NO: 4570 - DNA, 600 bp, Bovine  MMBT13472
aaaatgctcctgaccatatcctgaacacacgagagagagagagaaaaaaaaagctagctctcttaggaagcatgttcaattttttgtgggactggctggtggggaaaaatggtttttaagactaaaggttgggagaagaacacacagtatgtgggagggtgcattgcaaggagtgtatgaaattacagcacaaaggatcaaagagaaaaattgcctttagagtgacaggctctccttcaaggagaagaaaaaccaaataatttatgcctgyggaggtaccgtagggctcatatattagcyggcagaattcctcaggattgctataactgaggcttttgcagggaggacctattaatcctttgcatgctttgccattaatattgtttattgggccacaagaaggggacataaacctttaatgtcactttttcgcactaaggattttttccttaaaaattcaatgttgtctgccaatttgatacggcactttaaggtgattagagaagcagatggctgattcttaatgactattttttttttttttgcatcaaccattgattcgttatttaatgcacacggcacagaatagcaacattcctt

SEQ ID NO: 4571 - DNA, 600 bp, Bovine  MMBT15601
tgatttcttggctgtgagaaacatgtgggatcttaactccccagccagggggcaaaccctcaccctgtgcattggaaggcaaagccttaaccactggaccttcaaggaagtccctaggcacaccattgtcttaaaggactttccttggttacttctcyctgggtgatcataaacttatttcccagtaattcctgttcatttgctgaagactttagcatttgttctttttactctctatccctgctcttaacatcattcttgataataggaataaatatggtaaatccaccaaacaattamayctaacactttaataatgcttacaatatgatgggcacagttaagaagtctgttaataaagtcatttaatcattgcagtaatttatatagtagaaactatcattatctccattgataactccaatgataactatcattatctccayggatatggaaattgaaacacaagatgtcaagttactcacttggatcctttaataagaaggagagatagggtttgaatccataagttctgtcaccagagtctgtgaacttaacaatcaacatctaggtgaggatcacagcttttgcgatttaaaa

SEQ ID NO: 4572 - DNA, 435 bp, Bovine  MMBT07290
ggycccctgcactggagggcaaagtcccgaccactagaccaccagggatgtcccagggcaaggctgcgcgctccttgccctcccaccccatccctgcctctcctcgctccactgtcaagtccgatgaccactcagggtgtagagtattagcccagggtctctgagggggatgctcttagcgaccccacgcttgtttctgggcagggatcctgggccacccacaacttgactcccccgctcccaagcacaccccggacgctgcccgatgaagtgacacgagacgagacgagtggaggggcygtctgggtttaccctggtagaagacgtccacgcagggctggtcggcgctgatgaccttcaggatcttggggtacgagggggaggatcctggacgatgttcctgtgatactcgagcagcttccgcgccgtctcccc

SEQ ID NO: 4573 - DNA, 600 bp, Bovine  MMBT15023
aaagcagcccctctaacaggcacctttactaaaagggatgctgtgtgcctgcggtactagggtggacttctgggtcctctggggtgaggacagaagaaatgcaaatactcctccctgggggcctgagtttgctggtgacatgtagcagaatacacagcaaattctttacaggcagagcgcaagcctccctcccgaccctctccactcaagctgggacttctccttcctgtgctctgtggcaagcctgccctggtcacggcatctggcaacttgtccccgagtccctggctttctctgcaygttgccatggaaatgggttcctggctctccagaaagacatattccagtgacattcactggcacttccgagggccccaaaatgggcacacacacatgcacggtgacctggtgcagtggctctagctgcccggcgaccccaccaacatgagaaggagagagtcacatggcagggacttaagactcacgtgggcggctcgtgtggctcatgttcaaagaagaggggaaatcagctggcttcacaaatgcgataatctttgcgggaatctctcgctctctcccccttgcattcagtctagaggc

SEQ ID NO: 4574 - DNA, 600 bp, Bovine  MMBT18474
atcacatggacagaggagggtggagggctgcagtccatggggtggcagactggagaaaagccctcgcagtggcaaagacccaggacagccaataaataaataaatattttttaaaaagacagtaacacaaacatgactatggggtttgaaagaaagaggagcctgaaggtacctcaattatgtatcgcatcccatccacagtgtgctcagagccgctgatctccgaggatgctccgccccagtggaagtgcatctgcttggctaagtactgcgtgccgtcggaggttgtcatgcgcatgstggatggcaggctgatctgtactagaagagaagaygaggggcagggagtgtgcggacgggcggggacagggcaggcccgcaggtgaggcagcgaccctgctcacctgcccactcctggagcaagctggtgctatagacagacctggattgccatgggcagggtgaccgcagaggaggcactggcacacagggccagttggggaccaggccctgagctgggctggacaggcacttgtcccagggcacacaccttccyactcaggaccagcaggtcaggggcaggacaccaaagggcaggtc

SEQ ID NO: 4575 - DNA, 600 bp, Bovine  MMBT20436
attcaaaatcacggaaacaaaaacaaaaaacacacaaaatgactagttctctccttattttccttcgaagtgaccctttcaataatttcaacattcctgaatctagggacaagctccttttctgggtaaatgttaaaaatctatgtacagacattcacttaaatcttctgaaggataacagattgaactgttttctagggtttttgctatgtgtgacctctagattgagctttttgcatgataacagagaggtatatactaatcatacatgcttatacacacatacacataaaataaaastaaattctcaaaagtcatacctgtgggttttccagtattcgtttaacaccatcaacaaggtgagagagaaacttggccctctctgcattgttgaatagggatcttctaactgaggcaatctgtactaagcaggataacacctagagcagggcacaaccaaaacacaaatgagcagaaaagatggtatagctcttttcattactctttcccttgctataaatattcttctctgttttgtcaccctctgctatcattataatgatataaaaaaaaagatcaaggaaggtgtagttgaggata

SEQ ID NO: 4576 - DNA, 602 bp, Bovine  MMBT19039
  misc_feature (1)..(2): n is a, c, g, or t
nnactgaaattatttcatgctaatatgagtgaggagggttgtagagagatactattccttgaaatctaaagggacaagctaataaaacactttcatctacctttaattgagactgcttgtctgctgacaaaacctgttaaagtasagatttaatgaagatttagctcctaagtctgtctttcccccacacctaaacaatttctaagacatcaaaagtgtcctgtcatgtggcgtatgctcgggtaaattctttttattacattcaacagaaaaatagactattttaataaactccaggcaaytggaatcatacacctgccttgttgacttcttttctgttagaagaaattgccaagtttataaatgagagcctagcgtgcagcactctctgtaaacactatgtgcctctgrgattcaggtgagagctagttttggaaacagttccaattgcaacactcctttatacatataaactggatttgtctttgtacatctggaaaatacaggcaaataatctactttgtaggctcaagctgaataagcttgtttcctttaccctttcttcttggcacattgtttttgtttttggaaacttacaagta

SEQ ID NO: 4577 - DNA, 600 bp, Bovine  MMBT19450
ctttgaatcgagtgttcccttgctatctctaattttcttgaagagatctctagtcttttaattctattgttttcctctatttctttgcactgttcacttaagaaggctttattatctctccttgctattccctggaagtctgcattcagttgggtatatcattccctttctcctttgcctttcacttctcttcttttctcagctatttgtaagacctccttaggcaaccactttgccttcttgcattcctttttcttcaacagtgtagcacagcaaaacatggtgtgactacaatggaaytgagtataccagtggtctatattgcacatgctatttatttgtgttttcacttatttatttacttattcaggttctgaagggcttccctggtagttcagatggtaaagaatccacttgcaatgcaagagacctgaactcgatccctggcttgggaagatcccatggaggagggcatggcaacccactccagtattcttgcttggagaatccccatggaccagaggagcctggcgggctaaagtccatggagttgcaaagagttggacacgacagagtaactaagcacagcacacataggtt

SEQ ID NO: 4578 - DNA, 593 bp, Bovine  MMBT12359
gagtgaagttaaccaccaggaactcaaaaatatttattgaaagaattatgtgagataaattgttcattatcatacagttggcatgactgttaattaattacaattgaggctgatagagtaaatttattcccttgaagaaaacagataattgtcatttaaggtccccagagggttagacagcaacacagaaaggaagaaataataaagattattggacaaagattaaaggaaaaaactctcttcttgaaacaaacccacaagataatagcactttattggatgcttactattgttcatatrtttgggttgcacatttttgccaaacagtttacataaatcagctcattttctcttctaatccctacagtatatctctatgagaaagatactcctatggtctccattttctagataaggaaatcagggcttaagactgattaagaaaattacacaaaggcaggtcagagtccttaatccagattttactaatactgtaaaattccatactcctagccatgaagtgatatcaactccaacaagtcaaagaccaatctgatgtgtatttaaacataggaaatatgttagaatataat

SEQ ID NO: 4579 - DNA, 598 bp, Bovine  MMBT20733
  misc_feature (1)..(136): n is a, c, g, or t
nnnnnnnnnnnnnnnnnnnnnnnnnnnnnnnnnnnnnnnnnnnnnnnnnnnnnnnnnnnnnnnnnnnnnnnnnnnnnnnnnnnnnnnnnnnnnnnnnnnnnnnnnnnnnnnnnnnnnnnnnnnnnnnnnnnnnnnntttatcatgtatacattaaaaattttagtacttaaatcctatctttggctacatcttcaaaatccttactttggctacattttcctttttaaataaataatgaattctacaccattttattcaaatttagattatattaagaaatttttaaactcctgctcccrgtatactcttgtcttattattcaatatataaaaatctatcactttcaacactgaaagtgttgagtttccaacactggaaactcagattccatatcagccctttagggctatcattaaaccagcaaaacactcattaatctctacctggattaagaccagcatctatagaattcttgataaaatgaccccctcttatcagttctctgatacaacttrataccatatagattgccccaaatgtctcagataaataaagaagacatagtatctttctacagaaattaacatccaattgcty

SEQ ID NO: 4580 - DNA, 600 bp, Bovine  MMBT20125
aactttatccaagtagtggtattgtggaggaagtctcctggggacagagaattggcaggaagtttccagagaccaggttaaggaggaactgccgtttggaggtcaggagaaagtcgttcccttctctcctgcacggcatcttccccgcacgcccctccccggcactgcactgcggtccctaccacacgtcatcagagctctctgctcagctcctgctctctgttctgtctgtttgtgcttcacaaaggaaggatcgggcctctgaagtccgggcaggacttgtccactcaggtttagctygtccgcacctagcacgtgagcaatgctcagttcagtcggatttgtatctttcagttctttgctctttttttccccccaatcctcaagtatttagttttaaacttcatttatgttggaargaattctccaaacaacagaaactgcacattagtttctgtgcgtgctgagagcaggaacacagtggctgcgttctccttgtgagtttctgcagctacaatagaggagcaacatacaccaggctaaggagatgacagagccatggaaaagtgttacagagagttcttaaaaggagcttggagt

SEQ ID NO: 4581 - DNA, 600 bp, Bovine  MMBT02110; identical to SEQ ID NO: 4502

SEQ ID NO: 4582 - DNA, 600 bp, Bovine  MMBT01614
agtggggctaagaagtgtgtgcaaaattcagtagctccagagacagtaggtcataccatagagtgtctcccatagcatcttcagagacatgatagtatctttcctgttgagacagtgctatcacagggaggaatccaccaagcaaacttgatgaaaggagtggaaaattgacaggaatttctttataaagagtacatgctattctttgacatggaaggcgacaatagtgagaaagcatgtaagtctcattagactccgtgcccaacagggtaattaatcccgctactgccccactcaacktcctgtgttcctggccctttgcatatatcctgggttgctgaatcagctctccactttccagattccagaggagtggtacctaaatgtaaacacaacatatcaaagacaattatccatcctttgttttaggaataggcattaaattttagagttgtctcattttaaaaggatgaataaagatggataaaaaataatatcaaactcaagaaaatctgctgttatgtcagaaacaagacataacaataaaaggcagaaaggcatttttttcccaacagattcactgtagggaaaaggaataaa

SEQ ID NO: 4583 - DNA, 589 bp, Bovine  MMBT01175
ttctggagctcagacgggactgtgtctctgcccccatggctttgcccacttcctgcggcttcctggcccatttcagccttcaggtagatgagatgctcttgaatgtgcgggcagatctgccttcgaatgtactggaatgctgcctactccctgctgctttccatgtgccctgctccatgatttggccacagagttctgagcaaaccccattcccctctggcaccctcactggtcacggggggcaggtggagggctgtcgtgtggagcaatcaacaagagggactccttcaccctcatctktaagccccttctggactccaaaggaaggtagaatggctcctcaagcctgccccgggggtatggaaaaccctacctgtggatggactgaatcaagaatctcaatttctacagcttctgtgccaaaccatcgggcgtcctttggttcccttgtttctacaacatgttccttcaattttgtagaacataattcattatatatccattaggtatacagatcctcatttatacatatggcgaacatatgcatgtatgtgtgtatatatatatagcatgcacacatacatatata

SEQ ID NO: 4584 - DNA, 600 bp, Bovine  MMBT00897
tatgaactatgtgtgcgtgtgtgctcagtcttgtccaactctttgccaccccatgactgtagcccgccaggctcctctgtccatggaattctccaggcaagaatactggagtaggttgtcattctcttccccaggggatcttcccaacccagacattgaacccaggtctacattgcatgcagattctttaccatctgaaccaccagggaagccccatataaaaacttaagcacagttatttggtaggtgaaatgcatacggccccatcaatctcatcatatcaacgaattaaccaaaatytttatcaattttcagtaaaatatataaaattagttgtgacctcatgtattccactgacgaccacatgacagatgccctttgtcttccatttgctgtgatttctgttagcccagcatatgcaggtcatattttgacattgtcccactcctccaccaagtcctaccacagcttcactcccttcttacccagcactccatgctgcagatgccatgaggttctctcaagagttcagtgtcacacgccatggtcccagcttcatccttccactccttacccatcccatttccaagatccagtaag

SEQ ID NO: 4585 - DNA, 600 bp, Bovine  MMBT07383
aaggggccactgcttaccaaatccagaaacaagcccaagaatatgttaattaactgcattgtgtcccagaaagaaagaggttgacaaattcatttttttattccttcaatcaagaaaatgtttgcctagtacatcttagatttttttaatctataatgtgtatatttaccacttgaaattgtacagtaacagtgccaaagaccaccatggccccatagggtgaatcttatgaagcttaacattcctggcgaattaaacacaagcctccgatcactttttgtcagtctttactgtgacacktaagagccaaactgtaggtaatttttatatggtggcaatttatcctaattaaaaaagcaatgatcttggatgcaagcacaagtgaaaaatataatgacagaaaactaaagaaaggtattacaaagactaatctggaaagctacttgtccctctccatccccacccccattcatgcccctttttccacccatttgttgtttttctcacaagtatatcatgacttgtaacatttttttaatttaaataacccccccaaatgcctgaaacactaaaagatgtaaaaagattcaccatctacaa

SEQ ID NO: 4586 - DNA, 590 bp, Bovine  MMBT05769
catgttccctgtctcactgtatctgtggataagcttttaacttttaagagaaatgtctggtgagtgaacgtctgtggagtgcccactgtgagcagagcttctggctaccatcaaatgttgttttcacaatttattttaggtcagcccagatttgtcagggcttgagagcaatctgaagagcaaggctgaccttagcaagaactcactaaaacactggtgattgctttctaaaaggaagggcatctggaggaggcctgagcctggcacttgaaagaatgaaacgcacgtccactgctgagytgatttaaattgggtgggatgagagcaatcaggaacacagggggaaaagctgcataggcggatgggggtggaaaagattatctaayaggtgttcctggctttgagtattcaggcacttcgggcacgttgtccttaggcttctgtagtttatgcatcagtgctgtttctcagaataaatacattagtaatttcacttatgaagctcattctctgcctaaagacccacaacagtactacatcctgtgaggactattttatttccctctttgtcagaattttttttcttatca

SEQ ID NO: 4587 - DNA, 602 bp, Bovine  MMBT06310
  misc_feature (1)..(2): n is a, c, g, or t
nncagtgtccttaaccccaagttcaatgtctgagtatttccaatatttattttgagcacataataaagcagaggcaactacttttcctgaacattttatttccattcagagcttagcaattactttagcttcacattattctgtcataaatgataaccaaatggcctaaggggctaaaatcataaaattattataagccaagtcaatgtcatatatatatatatataaagttaatataaaatgacaactatactggtacatatttgttttggatcctactagaaatatgccaaaataacacrttttagtaaagactgaggtccttgggtagaggagggggaagaagagtcatatcatcaaaaattattaggaaaactgtaggtaaaaaaaaaaccaaaacagcctacaatttaaacaaaataaaggagggaagaagagtacaacactggggtgatgacagttcaggaacacactccccatccatcacagactcgctctccacctcaggagcacagcaccaggctctctaggcactactgctctctcacgaagttctttatgtggaacagaaacctacatttatggtcacaacagaattttat

SEQ ID NO: 4588 - DNA, 600 bp, Bovine  MMBT02381
aaatatctctctgtgtatatatggctgagggttaacatatagggcttttatatcattttgcaacttttttttttttttccatgcaatgacatgtcttgaaaatcttccagatagtatttctcatggtggatattccatagctgttttagcaattcttctattgtttcttttttaaattttttaccattataaacagtgctgcagtgaacattcatgaacaagcatgcacataggcaattatttctctagggtagatacaaaggattggaattgctaagctgagtaataggtacatttttwaattttaaaatgtagatttcatgcataaagcttgcccttgttaattttggcctagtgttcaaatctactgagataaatttatttattgattttggtcatctcttacagtattaacctcactataccagttttgtgtcatctgtccataccatcaggcatatctttcatcttgtcatcttagaaactattttctttttaagtcaaaatgcagcagtcaagggaagagctttgtggctaccaccagagacctgtatcctacccaaagctcactgtattgtcctaataaacactcttagggtt

SEQ ID NO: 4589 - DNA, 600 bp, Bovine  MMBT14010
agggcggtgggcctttggaggcgcgggatgagcgtgctgccgggcggccctgggcgcatgcggggggctcaggacgcagcctcgtcttcttggacaccgggcagctctgggcttttgcctccttcgccaaacccgtctttcctgttcaggggacaccaggggcagagggacctcagaggtcagaacatgcatgcaggaggacacgctcatayacactcataggcatttttatccacatctctcaaatcccccaagctcagctcagtctcgccaccctgcactgtggtcccttgctggttmcccacccatagtctcagcccacmaccctccatggctccctattgcttggaaaggaagtctagacttcccaccctgacttctggagccttgccagatctgaccagacatggcctggctcaggccccatggtccagggtaggagggctttggttttgctttttctttgttcacaggacagattctacccatcagtcttgggattctgtcccatattcagtagattcccattatcatcctgatatcacccccccccccacaaccccgtgccagggcctttaaaaaaaaagattaataaatggg

SEQ ID NO: 4590 - DNA, 600 bp, Bovine  MMBT12112
tcattcacctcataacaactgactcaaatatgtttctttttatggctgagtaatacttcatttcatatatgtatcacagcttctttattcattcatctgttgatggacatctaggctgcttccatgtcctagctattgtaaaaagtgctgcaatgaacattggggtacatgggtcttttatagttatggttttctcaagatttcttatatgtcaagtagtgggacattgggtcatatagtagttttatttctatttttttaaggaatctccatactgtcctccgtagtggctgtatcaayttgcattccaccaacggtataagaggattcccttggaaagcagctatgctcaccaccataccatcaacatgttaactgacctttgtagatgaatttggaatggtcctaggatgagtgtcaaagcaaactytaaattaacctgaayattttattttacaggtataaagaaaatagaagacagcacatataaattttaaataataagtataaatcataaatmatgaataaacatcattttggttattatctttttatttttctgtattttaaaagtttatctttgtaagaaaaaaacattca

SEQ ID NO: 4591 - DNA, 600 bp, Bovine  MMBT13806
aagggaagagaactttgggttcatttttgcatacctctcacctcctaatgtagctttcatattgttggcctgaaaaacaacagaaaaagccctggttgctaaacctgggaatgaggcgagggtcaggagcatcagcgagaattccatccagtctgagcgtgtttccctttcatagcaagattgcaattcctgtctgtcagagaaggggcagaggtaaccgtgcagatctgcacagagggagaattcttcccagggagcagctgcagccgcctggttccacaaagcacacgctgaagagargcaaccttccaaggaaatagagttgaagtcaatccagacttaatggcgggggaacattgagtcagttcagacagactgaggagttatagcagtcagctaaaacatctggtctgagtaagcagatgtggtagcagtagaacccagaagggaaactcaaaccraaaaggatgagaarccaaagtcctgagatcacccaagtgaggtatgagatgagaggagaaatcacaaggacattttcctaagtcctgccraggttgtgtagttgcagggagacccctagtcttaaccactcagaagtgt

SEQ ID NO: 4592 - DNA, 600 bp, Bovine  MMBT16294
tttttttttttgtcttaagctacattattaaccaaaacactcctcttcctraaagagcaaaaaatatgcctttgcacctttcactaatgagccccgctgtttgatacggagttgatgatayacctcaaacratggtggccgaagcttctgtagtttctggcaagaggctcactttaaaacaagcgatataagacttaagatttgcctgtattccaacatacagtcattggacttttggggggcaggagarcaaactcgaaaacggatgaattgagatcaagacatwtcaaactttctttrggagtyttcattatgattatttattaaaaacccgaggagctcatgaagtatagatgttgctggtagcttgcgcgttctgtcttactggaacgatgtttctggaaagaggggttgctctctttggctcctggttaaatagcctgttttgggggttgtggggtgcacacacagaggtgcctgcagagcatttggcgggggaagaagcaaggggaccagtcttctgtactgggaagcagagcagtgcagccgtgggttgaagtattttgtgtttgttcttttactgtcattgtattaatacga

(The sequence listing continues in the following parts.)

What is claimed is:

1. A method for managing animals comprising: obtaining information, at a facility configured for managing bovine subjects, that predicts a trait for a first bovine subject of the bovine subjects, wherein obtaining the information comprises analyzing genetic information in a biological sample of the first bovine subject; and determining a physical characteristic of the first bovine subject using imaging; and calculating a quantitative score based on at least the genetic information and the determined physical characteristic to predict the trait, and managing the first bovine subject at the facility based on the quantitative score.

2. The method of claim 1, further comprising: obtaining, at the facility, the biological sample from the first bovine subject; and forwarding the biological sample to a laboratory to perform the analysis of the biological sample, wherein results of the analysis are received at the facility from the laboratory.

3. The method of claim 2, wherein the results of the analysis are received electronically at the facility from the laboratory.

4. The method of claim 1, wherein managing the first bovine subject comprises performing an operation selected from the group consisting of selecting the first bovine subject for harvest, selecting the first bovine subject for being relocated, selecting the first bovine subject for receiving treatment, selecting the first bovine subject for being measured, selecting the first bovine subject for breeding, grouping the first bovine subject with at least another of the bovine subjects, and combinations thereof.

5. The method of claim 1, wherein the identified trait is at least one characteristic selected from the group consisting of: an average daily weight gain for the first bovine subject, a red meat yield of the first bovine subject, a tenderness of the first bovine subject, an endpoint characteristic of the first bovine subject, a ribeye area of the first bovine subject, and a marbling of the first bovine subject.

6. The method of claim 5, wherein the identified trait that is taken into account in managing the first bovine subject includes at least the marbling of the first bovine subject, further comprising: making an implant decision regarding the first bovine subject based on at least the average daily weight gain for the first bovine subject and the marbling of the first bovine subject.

7. The method of claim 1, wherein the analysis of the genetic sample includes identifying a nucleotide occurrence of at least three SNPs.

8. The method of claim 1, wherein the determined physical characteristic is at least one characteristic selected from the group consisting of: a marbling of the first bovine subject, a backfat measurement of the first bovine subject, a muscle depth measurement of the first bovine subject, and combinations thereof.

9. The method of claim 1, wherein the facility includes an animal management location at which the bovine subjects are to be kept for a yet undetermined time period before being removed therefrom at a shipping date, the method further comprising: receiving the bovine subjects including the first bovine subject at the animal management location, the bovine subjects being organized in several arrival groups; and generating a future backfat estimate for the first bovine subject; wherein managing the first bovine subject comprises sorting, based on at least the future backfat estimate and the identified trait, the first bovine subject into one of several predetermined sort groups for separate management at the animal management location, the predetermined sort groups being different from the arrival groups and associated with different predefined shipping dates.

10. The method of claim 1, wherein the facility is a feedlot where the bovine subjects including the first bovine subject are managed.

11. A method for managing animals, the method comprising: Obtaining a targeted trait genetic value for a first bovine subject based on analysis of a biological sample of the first bovine subject; determining a targeted trait value for the first bovine subject using imaging; and sorting the first bovine subject into one of multiple predefined groups based on at least the obtained targeted trait genetic value and the targeted trait value determined using imaging.

12. The method of claim 11, wherein the targeted trait genetic value includes a marbling genetic value, further comprising: determining a marbling score using the obtained targeted trait genetic value, the determined targeted trait value, an implant dose value for the first bovine subject and a target backfat value for the first bovine subject, wherein the sorting is done based on the marbling score.

13. The method of claim 12, further comprising: selecting one of multiple time categories for the first bovine subject, the categories including at least an early time category, a normal time category, and an extended time category; and determining the marbling score more than once for the first bovine subject while varying at least one of the implant dose value and the target backfat value, the variation being defined in a schedule associated with the selected time category.

14. The method of claim 11, further comprising: selecting an actual implant dose for the first bovine subject based at least on: (i) the targeted trait genetic value; and (ii) a genetic value relating to an average daily weight gain for the first bovine subject, the genetic value based on analysis of a genetic sample of the first bovine subject.

15. A method for managing animals, the method comprising: obtaining genetic information regarding a first bovine subject, the genetic information determined by identifying, in a biological sample from the first bovine subject, at least one single nucleotide polymorphism (SNP); generating a physical attribute estimate for the first bovine subject using at least one physical measurement of the first bovine subject and an equation configured to make estimations for a single animal; and managing the first bovine subject based on the genetic information and the physical attribute estimate.

16. The method of claim 15, wherein managing comprises sorting the first bovine subject into one of several predetermined sort groups for separate management at an animal management location, wherein the predetermined sort groups are different from arrival groups and are associated with different predefined shipping dates.

17. The method of claim 15, wherein the physical measurement is an imaging measurement of the first bovine subject.

18. The method of claim 17, further comprising: estimating an empty body fat measure for the first bovine subject using the imaging measurement; determining a feed allocation using a predefined algorithm taking into account the estimated empty body fat measure; and administering feed according to the determined feed allocation.

19. The method of claim 15, wherein the physical attribute estimate includes a future weight estimate based at least in part on an estimated daily-gain-to-finish measure for the first bovine subject, the estimated daily-gain-to-finish measure also being directly used in managing the first bovine subject; and wherein the managing is also based on an estimated days-to-critical-weight measure for the first bovine subject, the days-to-critical-weight measure being estimated using at least an estimated daily-gain-to-finish measure for the first bovine subject and a predefined critical weight for animals.

20. A method for predicting a trait in an animal subject comprising: analyzing genetic information in a biological sample of the animal subject; and determining a physical characteristic of the animal subject using imaging; and calculating a quantitative score based on at least the genetic information and the determined physical characteristic to predict the trait.

21. (canceled)
